United States Patent Application Publication US 2013/0034624 A1 - sequence listing, part 17

SEQ ID NO: 51775 - DNA, 1733 bp, Bovine  19866881163207
  misc_feature (1)..(1): n is a, c, g, or t
nagagggtgctggttcccatactctgaaaggaccctcgccatgttatctggtttagcatactgagcctttattacgtacgtgcttttatttagcaaacaaaattctcaagctaaaatgttcaagaactactaccatcctaccagacatttcttcaatctttcttcttaagacagagtaaatcaaatctgataatcacatttaagaccacaaacagcctctcccttctgatacagcagcagtatgtgaaaacttttcccctcacgttcctcccacagcactctgcaattctagcatgagctgaagttgtggcgtgtgaaagtgaatctcctaatagacactggcttctcccttagcagaaaagggagttaggacattactaagccagtcacgatgtccaaatgttcaagcaaagaatcatcactttttagaactgccaggctgagttgtcccttcatccacccaagaccagagtggtcagatttagaacagaattttctactaagctaggctggcaacaggacactcattcttctgggtggaagactgactccttgacagtaacatgtctttcaagaaggtactcagggtcggctatcacacttgacaagatcactcactgatgaggatctcacctggccaaagcctccctgccaccttaacacacactccatattgttctagtctttaaagtttattctagtatttctgaaactgtggttcttaaattgattgtgggtgataaaatcaacttagtgatttgagactagctttttttgtttgtttttttttaaatgaaacagagtagtcagtgtcaattaatcatgggcaatcctcagttatgtgtgtatgcacgagcctatgcattcaaagttgatggaaaatgtactttgtattctgggttaccatcaaaaatctcgtaaggtcactaacttgcttaattggtttgtttctattcaattttcaaatttactggctcttttgttatctttaatttactgttaaatttactgttaaagccatataaccaattttatttcagatgttatacttttctactctagaacttccctgttaattctttctgtaataaagcttctaattctctgctgctgctgctaagtcgcttatcgtgtccgactctgtgcgaccccatagacggcagcccaccgggctcccccgcccctgggattctccaggcaagaacaccggagtgggttgccatttccttcacaggtcggagatcccaccaaatagcttttcttacctgagtacttgccgccacccgctcatgctctgccagtcgcgcggctaccagctggatcagctcctccatggtcagacctgccatggtcgtacgtgctgtcttgatttgctgaagaatgttggtcatctgagccctaagaaagagagatattgagggggagaaattttgtgctactttcatggggaatatctatgaaacctctcctattttaacccataaatatttctctggaaaacactttttaaattaatccttaaaaacacttacttattgcattgtgggaaccgagtcagcaacttctccagaatcttctccagtttgtctactggttggggccggggagtttcagtagaagccttaacaccacccaagcctgggggaggcgggatggaggcagcagggggcacgtgcggaccatgggggccgacaagggaacccaagctggggctatttctcccatgggagcca

SEQ ID NO: 51776 - DNA, 1886 bp, Bovine  19866881180701
  misc_feature (1)..(1): n is a, c, g, or t
ntctggtccttccccacgtggctcccctggcatggcatgccctcttctctctggaaatataaggaataaattcttctttcagtggcatcggcctctcggtgttgtcactcagtcacctctgcaaattaaaattccatggatacaaatgaggcacagagtcactcccccgcgaaacccagagaacaaatccattcctaaggcagctgtaaaggtcaatagcaaggaagttctagagcctgagaagagtccaggaaaggagcagaagacatctcctaagagcaccatgtgaactgaaactgtggggtcaaggagaggccggcccagcggggacagcctcgcagggacgggaggagacacacagagaggagggcttgtcagcctgggtggccaggaggagcctcactgcccaacttctctcccagaagccctgggaaaacgccctctgacccctgacctctgcccagagggtcctgtttctgaagcccggtcacctcctgtcctcatcataagcaccctgatccggctgtccacagccaccaagggtccctcccctacatcactccttcagcaccacacagcgctacaggagagcatgcgttcctgggtccctccagcccttggtgacacttgctgtgagtaattagcgcatgaacctgtctctgctcaacaatcagccccaatcctgaagactcttaatccttctgtactgctcagctcacaagcaggaaaaactgtatcaccctgaaaccctgacaccacgcagggaaaagacacagtggctgcagaccaggagacagaagtcaagggctccagagactagaatctagatctaattctgcaatcaactagcaatgtgaccttgggcaaatccctttgcccctctgaacctcagtttcctcatctgtaaaagaggtgaggggggagaagagctaaaaggtttctaagttttagaagtgtaacaatgtaggtgtgctgtgaacccaggcacaaaagagctatattgtgtactggataattccattcaaatgaagttgggaacaggaaaaatgaatctatgtgacaagccagaagagtggtgacctggggcaggtggactaagaggaaaggagcccaaggaagcttacaggatgggtgggaaatgttctcaaagatctgggaggttatgatacggtgtgtgaaaagtgttagtcactcagtcatgtccggctctttgcaacccatggactgaagcccaccaagctcctctgtccatggaatttacaggcaaggatacgggagtgggtagccgttctcttccccaggggatctgcctgacccaggggtggaacccaggtctcctgcattgtaggcagattatttactgtcttgagccaccagggaagactgtgacatggtgcatatgtatataaacattcattgacttgtacaattcacgtgtacatacaaccaggtacataaataccttaataattttttaaaggaaaacagggcttgacagagcagaaaacgcggttgaccaggtttctgctaagggacccagaaggtactctgccccctcgcttccagcctcataccctaggtgttgacaaggggagccctgggggctgcttaggggtcaaggctgcacacagaaaccaagggtacactcactttccccccactccactccttgagccagggccagagcaccctctccccaccacccaagacgggatggacactaaagcaatccacacaacggaggacagggacagacatggaaactggcccttacacctctggagagcctggcgggggtgggggctgaccgccaccttctccttgggctcttcctgcccagggcccggcccctcggcctggggacgccattcttggcccctctcgtg

SEQ ID NO: 51777 - DNA, 1447 bp, Bovine  19866881202059
  misc_feature (1)..(1): n is a, c, g, or t
ncttccaagaagcctcacattatatttgtcctagtcacgactttcagttcttacttgcgttttactatttctttgcttgtatttgcccatttttgtcctagctgtgattctcaattcttactatttgtgttttaccattttaaaatgttatgtatttttggggtgaacttttgaatctgtttaggcattctcccaagggaaatttaaaagaaaagataggtttctttttgtgtttagcactcttgctgctgctgctaagttgcttcagtcgtgtccgactctgtgcgaccccatagatggcagcccaccaggctccccgtccctgggattctccaggcaagaacactggagtgggttgccatttccttctccagttaagcactcttaagttttttcatctcatgtttctacttcccctcatttcttttaagtgatttaataaagggaaagatgaatatattgagttgactgcttaattataaatgttgctacctattaagtgcacaacctctgcgttgtgactcaagtcctgagctgaggcctaatgctgcactgagagctgagttccaaagcgctttcggcagttgggagcataccacttggggtgttaatatttgaatacagaaaaaggaagctgttatttcaaatgcctcacaatacattgcagttgagggattttatttcccaataattttagcttaaataaatgaatttttctctttttagatatggcgagagcttttttctccacttcatgcactgaattttggaattgggggagatacaacaagacatgttttatggagacttaagaatggagaactggagaatattaaacctaaggtgaaatgaagctttttttttaaaaaaaaaaccttaatcttaagtcttttgcagagagttaaattgtcagaaactggtagtttttaagaaaaatttcttctgggacttccctggtggtccagtggctaagatttcatgctcccaatgcagggggcatgagtttgatagtcaaggaactagatcccacatgccacaactaagacctggctcagccaaataagtaaaaaaaagtgtttaaaatttttttttcagttgcttctttaaaccattatttcattgttgttcttggcttcatgcctttttaatatagatgattttatcattgtttaagaacattccaaatacatgcttaattacggatcagtgtattgcttgtgtggctcatacttgaaattgttataattatcttcgtctgctgttggaagagatttgatgctaatgaggtttgctattctatggtcccgaggcagtaaggggaggaaagtcctcagaggtgggccattggagcagggctatgattcacttgaggaagtaattttggattcacttaacacacaaacagattggtattcacggcctgcaagttcttctaaaggaaatttga

SEQ ID NO: 51778 - DNA, 931 bp, Bovine  19866881365840
  misc_feature (1)..(1): n is a, c, g, or t
ntcaaacacttgtgctgttattgcaatttcctgtaaaagaagtgatagccctaaaagtcaactgtatctaccagttaaagaacaaacacccaaaagcacttgaagctttgcatctgaacctacgactgcaggacttttctaacgtttttatctctatggtcaaactccaggcaattttgattcccttatgtttgtgaaaatgtatttttttttcataaatcttttgaagtaaaagctaagaactgttagatatataaatctggaatctgatttgaaatgttccttgatttcatttccctttgttcttgagggtagtagtgtctatataggtgtcagtattctctttgatttgttcaaaatggatcagtaataaaattaggtctctagctgtccacttttagtttcattaaaagcaactttttggactactttgggattatggctaaatttctctttttatatggccagtaatttatctttttactgtatttatcaagcaaaaacttcttgtaactacacacataaaagtttatcattctgtgaccatttctgaaaaagtctagtgatcttggggttgtggaagagcaaagccctaggttataagacttctgtgtgccaggctggggcttttctgaggctcaggtttgttgaggaaatgatgaaaaccatacctttgttctgccattttgtttctttatctataaggtcatgattgaagttcctgactctcattatgatgaaattgagattttaaacatttgcttttctttacatccaaaatggatcctaggtaagaggaagaattccagatatgtttcaaccaattattgtcagtctttactttccttcccttgagcccctgggctcatctttgggttattatatatagtaccctcctaggatactaccactgaacgctaatgaggtacca

SEQ ID NO: 51779 - DNA, 1208 bp, Bovine  19866881374815
  misc_feature (1)..(1): n is a, c, g, or t
naaggcgggggcatcccccaggccccttaatggagccaggcccccgagaggaacatggacgggggctaacgaggagcccagggcttgggcaccagaaaaacatcctgtagaaacccaaagtaatcacagggctctaagagtgtggagatggatgtaaaaataaaacatctaaatcctgcccgctcaagtttaaaccacctccgttcagaggctgctaaagaaacacaacatccagaagtcagcattgtgccaaccacgtgagaatcacgggctggtttcccgattctcgtaactctgcggctatctcccagtaagcagctcttccacgtctggaaaagctgcagagggccctgctcttcccttctgaagccacagaggaagctggggagggggtggggagcagagacaaaagcctcatctcccagcatgagaagactcaatacataaagctgaaaactgatgaatcaagaaaaagcagcctaagcatattatttacaaatatggaagcagacaccagaacaaaggaattgccatggtagagatgggaggggtacccacaccgtagaactgctatattttgttttgcaccttttggcttgtcttggcattgtttaatatgggcatgtattactttgattaaaatgaatattcactttgaaacacacccatgagggtaattccctggtggtcaagtggttagggccccatgcttccactgcagggggcatgggttcaattcctgctcaggaaactaaggtcccacatgccacactgcatggccagaaataagttaaaaaaaaaaaaaaaaaaaaaaaaacacatgagaaacagaagaattctctctctgctctcctgaggagcaaagaggctggagagagctcagccagaggattactgcggccgctcctctatctattctcaggatggtgggcttcatgcccatgaggactggggagagacaccagagagatggcagaatttgtgagacttgggccactcataggatcttggattctcggtttactcatctgcaagtcacagatgatatgtgcatgctacttaaggtctgctgagaacttcaaatgagatactgaatgtaagaagcacgtgtgcatggcccaaactaccccagtgcatgtgtgcgtggcccaggctaccccagcgcatgtgtgcgtggcccgggctaccccagcacgtgtgtgcgtgat

SEQ ID NO: 51780 - DNA, 816 bp, Bovine  19866881419954
  misc_feature (1)..(1): n is a, c, g, or t
ntgcttatgctcaagtctcagtttcctctttttcaatggagagaaggatagtacggacgcccccacccaagggtattgtgaagactaaatgaggttaatgcgcaaagagctcaggatgcacctggcacacggtacaggctcagtacacctcggctgttataaacaggagagcaaagtgcagcctggcggcggggaggagcagccctcccgcaatgctctagtacaaaggcaaaactgggtttcaccactgctgggggcccgggaaggacgcttcccaccagccctgactcccaaggccctgcggacatccgggaaggaccccaagcagtgggagtgagtttcgtgtgcgcgcgcacacacacgtgcgccaggggctgcggcccagtcacctcggcctcgtactgctgcctggcctcagccaccacctgctggtgctcctccttcatcctgtccatcttccgctcgtgctcccgctccacctcctggcgcttctctctcaggaggccactgagctgccgggcaggaggcagggatgcaacatgcagggctgaggcacttgaaggactcacacacgtgtgcgacacgcgcccacctcccccagcgtccctacatacacacgcggccacacccagctgctccactcacgtacagggcacggggtggagaaggacttggcctccagggaactaaggcataaaaactgagccccagccgagccgtccaaggcaaagcagaggcccttcgggccaggacggctcggccggctgtccaagtcgccgggcccccagggcgaaaggagcagaccggcactcacct

SEQ ID NO: 51781 - DNA, 1031 bp, Bovine  19866881508782
  misc_feature (1)..(1): n is a, c, g, or t
naatattttattacatcagattcaaagatgctgaaatttaaatttcagtttgaagacggggcaaaggtttttttcacccctcactcagaaaaacagaaaaaaatggaaacagtagacgttctctgagaaggcagttaagtctacattttaatggtgcagtcatgtaaagaaaagtctgtggctggatgcttggcaagcaagacaacacagtgtttactattaacaattccaatcactataggactctggaccagccaaggaacaacacatctgcacggactctacgagtcagaggggagctttcctgagtaaaaaactactacagaggccaagtgtctagacttgagaaggtggaaacctgccaaaatcagagagcttccccggatcaaagaatgaacattttcccctctttgagagagaactggagaaaatgctatgaatgagacccaacagtcagaaagctaaccaaagttgggtatgtcctctatacatgaaagagtagagcaacaagtctaaaactcattggccttcagaatacagatttgaatatttcagtgtaacaggacagattattttactaaaacaaatatttaaaagtacattaaaaaaaaaaacaacattatttctctagtttcttcaagaacataggcaaaagcccagtgcactatatccctagaatcaaataggaataatctctttgacaggctcccaattcttaagccttagtttttccttaaggctctctctgattaggttgctattcaatcactcctcccagacccagatatttccaatcacactgtaacagcttccatgtctgtatctccaggcttcacatttccaaccattactccctggatatcactctcatgttctccatcataatgtaaaggttcagtccatccataactgatgacatttttttcttcccctgtcaaacctcctcttctgctctgaattcccttgtcacctaaaagcattgtttggataaagcaataattaatctacttaccaaaagtctcctgcttcac

SEQ ID NO: 51782 - DNA, 1201 bp, Bovine  19866880391923
  misc_feature (1)..(1): n is a, c, g, or t
naaaatggtttgtgttgagatatatatctttatgagaacactattgggtataacaagaggggttttttttgctctgtgtagtgtgatattgatctctgagaaccattaggaatcatttttggccctgttagttctgttttactttgcctatacttcaaagggctaaggccatgatcaagtgccaagaatttcaagtgtattcttggctttggccctaattctgaatagactttgggaaacttactgatactcgttggctttctgattgttagagaagtaggaggcaggcatagttatttcatgtggaaaattccacagctacagaattttaaaatggtttaattaatacttaagctataagaggatttataatgttttgatgtttaaaaagcaactttccttgtattcgaatagtaatgattttgacctttcagactcagagtgatctttttgcaagaagacagaaaatctgctgccactctgaatctctagtacttcacaaagtaccagaggtacatgtttgtttctccttccagcttcttcatcttattggcacttagaattttaaagggtgtaccctttgagctagtactgctacttaagaagagaacacattcttaaaagtggttgatggaaaagctcattaatattctatgtatgtgacccttatactcccctgtactcactctccagaatgctcttagaaaagcattatggggctagtaataagtcagaacgtcagagctgaggtctggactctcagacagcctgcccctccatcctctgcctttatctgttggtagtacttaaacgcagctctgatgctgaatagaaggtacatgaaactctccctcccttatcagccttttgtctctaaagaaaacagagcacacttcaccccagaaccttttgcgatttgtgagatcatagactgaggcagaattacctttatcgagccaccagccccatctgacttgcagatgtctcatcagtgggagccccctgcctcacatgaaagtgggctccctatttggaaaggtatctgccaagagagaaggcaggaaaaatgaacagtcatcagagtcatggacatattaaatgctttatttgctcagtagggagagctaatttaagcaaaggaataatctgagcaaagctttacttctagaaagtaaattggtcattatatagacgataagat

SEQ ID NO: 51783 - DNA, 1760 bp, Bovine  19866880889251
  misc_feature (1)..(1): n is a, c, g, or t
ntatgttttttctggtttaatgaatttcccaaaggcacagtttgattagaaattagatgaataaaagaaatgatttgttcatgtaattgattgtaaacacacttgcagagaattagagtgtctgtgtcagctaaaggcatagacaatctttgaagaaatcttcactgagttcagctgacactttctttggataacacaaaccaatttttagaaacatccaaaacaaaactcttcattctcacaccacatctactttgcacacaattcaccaagtaaagaaagcactgatgtctcccctaaggtttaaacctttctagtacattcatctcatagtacttattgctacattcattttatgtctctttttcctaaattaaatttgattcctatttagttatgaaataagtacatgttgtatgacttgtgcaaacttccagcatggacttaagttttgaaaaacaaatccagtagtagctctgacttgctaaagactgtggccctgtttactcactttactcaacacataaaaataatgtcttgatgtgcctgttactggcacagtgttcaaaagctattcaaacacttaaagtcttccagacaccacaaatgactatagctacttgggtgggatttatatcttttatatctatactttcattggctggaaggggaaaaaactataaatgatttaaccttttcatgctactttgtactataagtcccttcacccctaagaaatgctaagaaatatttaatgagattaaacttatatttgaaatgttagtttctgttcagtacacaatttctgttgcaatcaaccttttcatcaacccatcactggcaaaatgttttaatgccaagatttttttttttcacttgatacattttacaccagtatcactgctataattccagtccttgttttcagtccatttagttattcactaagttaagtttgtcattaacatgtctttgcttttctgggcatatttcttgttgtgggtagtttcataatagcttctgaagtcgttgtatatttaatacgttaaaaaaaaatgtaatttagtcactgagtcgtaaattagtctgactcttgcaaccccatggactatagcctgccaggctcctctgtctgtgggcttctccaggcaagaatactggagtgggttgccatttacttctccaggggatcttcctgacccaggaatcgaacctgggtctctagcactgcaggcagattctttactgactgagctacaaacttgaagcagaattaatcatatggaaataatctctaattccacaatggcatatgctcttcaactttctttgaaacacatgactatgtcagtttttcaactttccatttttaacggagaggaaaaaaatatgataaatgtcaactcctggtcaatattagagaaatattacatagtggtgggatttgtaataaacctgagaacacctgagcaggtgttatgaattaggaatagatttgcctgaaagccttaaataaaaatgcatttcttttgataaaagtccaggaaggcagtcctcagaggtgtgctgattctaaggtcatcaggaaactcagcactttcttactgctcttgcaccctctatcagcagcttcccccttgaaatacaacttgatttttctagcattaaatccacattccacccaacaagaaaaaggaaaatgaagaaaatggcatccttaaggacacttctatctttcacacaccacagtcagtaacatc

SEQ ID NO: 51784 - DNA, 1206 bp, Bovine  19866880514394
  misc_feature (1)..(1): n is a, c, g, or t
naaagttgagggaggaaaaagtatactgacagacttactagcagtttggaacaggtcaggcaagtcatttgccaacttctccagggctatatctgctatggggccaaataagacaacaggtctcttgaaaccagctgaaatgagaaaagaaaaagccatgaaattagatgtaaaataagctagaaggatatattttacaaaatgagaaacatggccaatattttatagtaactacaaatgaagtataacctttaaaaactatatacctgtaattttatacataatattatacaacaactatacttcaattaacaaaaaagaaaagccatgaagacacctccaggtctttagctgttaagaaacaaaagtattttacagagtattgataacaaaatagtggactttccaggtgatgctcgtggtaacgagtctacctgccaatgcaggagacacaggagaccccagtttgatccctgggttgggaatatccctggagaaggaaatggcaacccattccagtattcttgcccagagcataccatggacagaggagcctggcaggatacagttcatggggctgcagagtcagacatgactgaacaactgagcacacacattgataacacaactaaataaaagaaactgtgtgttcttccatctccaattcagcccagctcttttctgaagaataaaagctctctcttttattttggttcattcccctcaccattactaaagataaactttgctctatagaatatataaaaacttctgaatggtagtattaaaatagaaaataaccaaggttgtagaaatacaagtttgcacagttcagttttttctaagtcttatttcgtgctgaaaatatgactccaactgtcagctcacttggcctaagtgatatagataaattggaacatgaccattaaagtttaaaaatgaagaaaaactggctctgagcccagtcagatcatttcctggcccacatggatcccttaccttctcgaagcaaaaccctctcgtaggccgggaacttggtgctgactgtcacggcggcagtcaggtcctcccgactcttccgtaggttcttcttcacacctgatctctggccgcgcatcctccagaagtctgccctgtccccggtggtgtctctctgggcattctgaacgctggccatttgttccgctctgagagaagaagccagga

SEQ ID NO: 51785 - DNA, 1322 bp, Bovine  19866880550457
  misc_feature (1)..(1): n is a, c, g, or t
ntaggcaggccctgatgaaaacagatcaaaagctcagggagcaccttttaagaaacaccttcttattttctcttgctttttttctgtttgcccctcctctatcaggtgaacacacaggatttcagaggactcgttcgggaggatgctgttctctacctgttagaaatccccaaaggtgaaacggtgaccattttagctcagagccgagctgatggtgagcaagtttggttttgagttcagtggacagtaggggaggggaggtagcttgggaacagaataggcaaatctgagtgttaaaaaattgacctaactctaggtcatagatatgtgcaaagaatttgggtagcatttaacttcctacagaaatgctttctctgcacccactgaaagaactttactagttgtgtgattttggaataaaactgcttttctggacagggatcgttccttaattactgtctgaagttatgattgaggttttctgtatgacagatgcagaggccacacctgcaggtcagcccgcatattaacccttatcaatctgacacgttgatttacctgtccaggtcttgtcatctgtaaaatggaagttaatagaatcttcttgtctgcttcagagggttcattggcacctgtgttagtcagggttctccagacaaaatggcacacagagaaagaactgcttattatgaggacttggcacatatgttcatggtacctggcaagtcccaaaatctgcagggtgagctggtgaggtggagaccccaagaaagctgatggtttacttccagtccaagtccagaggcttgagaaccaagagagctgattgtgtagttgttgtccaaaggtggactggctcaagatccaggaagagccagtgtatctgagtctgcaagcaggaaaaaagctcatgtcacaccttgaaagcaaaaagaattcattatctcttactcagagaaggatttaccttgctgttctgttcaaatgttcaacagactagctgaagccactcacatgagggagggcagtctgctttactcagtctatgtgttaatgttagcttatccagaaacacccgcaacagacacagtcagaataatgtttgaccaaatatctgtgcgtcgcatggcctgttgatacagaaaattaacaatcacagcaaaagtcatgaacttagttacttgtccttcttcctgtttgagctatggttaccatggagcctgtgtgctgagttcactaaatgcatggaaggtaaagagggtgatcagagctcagaggacccgataaccgctccaggaaagaccccagccaggctagcaccg

SEQ ID NO: 51786 - DNA, 1247 bp, Bovine  19866880588974
  misc_feature (1)..(1): n is a, c, g, or t
ntcgtgtccgactctttgtgacctcatggactgcagcctaccggctcctccatccatgggattttccaggcaagagtgctggagtgggttgccattgccttctcctctggtattagggtgggccctaaatccagtgacaggtgttatcacaagaagagaggacacacagagagtcccagggtggcagtgtgaagactggggaagagattatagagtattgcaagtggaacaatgctcaggaccacttgaccagaagccagaagaagccaggaagcatcctttcctagatccttcacaggtagcagggccctgccaacatcttgaccttggacttctttgacttggagacacatttctgttgtttaagcctcccagtctgtggcactttgtcgtggcagccctgggagcacaggcagagaaaaagggaagctgggcgcttgtctcatccgcatgccatctgtcacgtcagaggggccttattttttactaagtggacagtacgtaggcatcctcccttctactcacttttcccattcttcctcaggtccccagagtgcgaatggtatgagggacagccagctcatgaggtcccacaggtatgatttaaacttactttccctaaagttttcatttccctaaattcttttgaatttgctttttttgtttccagaaggctcagggcctggtagtccccaggttcataccattagaatctgttcttccacaaacacactcttcccaagagttgaaaaggcttattaggagactagcaaacactggtttcctatgatgagggagaagatggaaatcgaaagcagagaagcgacaagaagattctggagggagtggggaaggagagagagcctggtgttgagaggtaaagacaaagaataacaggggcccccaacgagggcctggatgaataggaatcttaggcgagcttgagagcaaaaccagccttgagaaaggtggaaatcaagctggcctgtgaggccacgattcactataaagccaggacaaaaagaaaagaactaccatagctctgcaaatctgtcatccaattaactgtgggcctaatttaactgaaaagccagtatgcctttataactccaattctctaagctaatccttaaacagcagtttaatgctgtttgttaaaaaaaaaaaaatcccacagagacctaatccagactgatgggttgcctcattaatttgaaggtggcgtcactcttgtttgaggatgaatc

SEQ ID NO: 51787 - DNA, 955 bp, Bovine  19866880697666
  misc_feature (1)..(1): n is a, c, g, or t
nttgagcaagtaatattcagtttgaagtgagaacaataagagataggcttaaagagcagggaaaatttaggttaaatgtatggaaaaattttatagagaaggtcttggtaaaatgctacaatgataacctgacaagaagttcattaagggccagttcacaaagatctgtgcagggtgtagtcctgacaggggaaggtagtcagagtctagaatttgggatcatgtactgaggagcccttgagaagatctgtggcttttcatgagggacacagccaacctgaagctgcagagaaggaaccaggagaataattactccaacctcatcctcctctctcccttgggtcttcttccagggcacccactgactgaaccaaaccagacaccagagggcagaggagccccattgatacagtctgcagatcagtctccccgagaggggagaagtatggggagcagagagaggatctggaggggccaataggagacacctcacacacatgtgtcaatggtcagcatggtggagtgagttcctaaagcaggctacagagagaatttatgcaagagttttggaaataatatacctacagattattacaggtggactgtagtaactgactatcctttccagctgccataaattcggggcagggggggcagttatgcatcacaagtgtaagaacaagttgctgctactggaaatcagtgaaacacattttgtgaaattcattttataataaaaagtcttccccacaaaggcaaaatgcccattgttagcagtagtaaaattggttgcctagtattttgcagcatataaaagattttcatgtacaacattttgtgttatttcctcattaatcttgggaagtacctgggatgatagatcttttttttaaaacgtattatattgatgtatagttgatttacagtgttgtgttaatttctggtatagagcaaa

SEQ ID NO: 51788 - DNA, 2640 bp, Bovine  19866880734029
  misc_feature (1)..(1): n is a, c, g, or t
ngaactaacacccccacatgctgtaaggtacacccaaaataaacaaacaaacaaaaaattcattttttaggttaaaaagaaaaatacccagcaggtgataaaacatctagggaaaactttttttaattttggtaaaatacacttaacttaaattcaccattttaaggtatacaatagaaaaaacattttcaactaaaagggaattacaatactggcttgtctctatatttatacatgtgggtttcccccaatcagaaaagatggcagatactttttattttaacccctcatcccaagacaatccaagaaaatgctttctggacatttttatgcatcctgcctgtgcctttcaaacagcacaagaggcaagctcctttctgggcggggctggaaacgcagcagcctcatatggggacacatccagtgggaggaggaatgtgcttctctccagtttcgcacatactcctctgtctgctagacaaagtgatattgtggcatctgtgcaaaacactccctacacaatggaacagaaatcagagagtgtccattttatttgtgcaggcaggagacccatttcccttctccaaggaccagcaggaaatgtgggcacaggctaatgcagggacatctggatatcctacaaagcaagcagcaggattagagcccggcccatgtgccgtttctgttattacttcccacaattaataaatgcccagcaaatcaagacggacttgcttatgctttgggccttagcatgaaattttcctatgtgtatcgataccaaagagagttttgcctctttcattgaaatggcttgcttttgaattaagtcagttttctgcattgtgacaacatcctggttttaactatcttttatgatactgcctgaagtttctgacatatataggaacctcaaataacaatcagccatttctgaaatacaaactattgactagtggtagtcgctcagtcacatctgactctttgccacctcatggactgtagcccgccaggctcctctgtccatggaattctccaggcaagaatactggagtggggtgccatttccttctccaacactgactagggctacctttaaattaaggaaaagcttggaagaaaactaaatacacttggtattcaatagtattgacagatatgtaaaatttttgtcaggtaacatgagttagtgctggaaaacctcacaaaattttaaaaggaaaatccataagtggctcagtaatcagatgccaactcatgccatacaccatgtgagatcttagtttcccaaccaggaattgaatcaatgtcccctccgttgagggcatggagtcttaaccactggaccaccagggcagtccctggacgtcaatttttttaagagaaaaaaaattttttctctactttggctattttttaaataatttatttttattgttggttacacacggtcttggttgctgcacacaggctttctccacttgtggccagtggggctactctttgttgtggcgcacgggcctctcactgtgctggcttctcttttgcagggtctgggcacatgggcttcagtagttgcagcttgcgggctctagagcgtgagctcagtagttgtggcacaccaggctttgttgctctgcgacgtgtgaatctttccagaccagggattgaacctatgtcccttgtattggcaggcagattcttctcccactgtaccaccagggaagtcctagagctattttaaaaccaagtaagcaatggcaaaatatttgccagtgtacctatcgtcttggggactggggtcaataaacacatgtgcaagttatccaatctgtgcttcaataaacttgcaacattcagtcaactggttggcagctggttttgacctatcatatgattacagttagtagagtagacgccccagcacagctctgcttgcagaagcaagacaaagtactaaaaggaggaaggagctggtagtgaaagaattccttgaggtcttgaaaactcaatcatgacctgacttccaattatgttctaaacccaaaaggagctgctcataattactatgcagtattacatgtatgttgcagcaattggaatagttctggaaaagaatgaaagggacagaacccttggaagaaatattggccccactatttagtcaaccagctcaagagaaatctccagtcagaatgcttgtcggcagatttacctccgtagaagcacaacttatcacctaccttctaaccactgacatgtctaacagctgcagagagggtaaatttttaggaaggtcagagaactgtgaggtcaagagggaactagtaggatatcatggaacgggcggctctagatgcttgttcctccaagtgtgggtcatggaccatccactgggtgggtatcaccaaaactgacagtatcacctatgctgctaagtcgcttcagtggtgtccgactctgtgcgaccccatatacggcagcccaccaggctcctccgtccctgggattctccaggcaagaacactggagtgggttgccatttccttctccagtgcatgaaagtgaaaagtgaaagtgaagtcactcagtcgtgtccgactcttagcgaccccatggactgcagcctacaaggctcct

SEQ ID NO: 51789 - DNA, 750 bp, Bovine  19866881124562
  misc_feature (1)..(1): n is a, c, g, or t
naaaaggtagtaatgccatttttaacaagtaccttccagaaagacttcagaccacagtgcttttaatagtgtttttccattttctacaacagtatacatgaaatgagcactcagtaaatattttttgatgctgaggtggaaactaacagaatgtatacacttgtattttcccccataatatcatcaaagaggtagcaaatgaagggctttcctctggcatgacagatgaaatgcaacgcacaaattcagacggtttaaagacaactggtggattactttaaggcacagggtttggggtttgctttgtattaactattaataactcagaaagccctattcaccaatttattagtgttaagttgaatttctgatgagatgggattctaaagcatcaccaactattctaaaatcaattctaccttctgaatgaaacaacttgtaagagggttgttttattagttcaaatggataaaagcaagccccccagccctagtggaggctgtgtggtgggttcatcatcaggttgcagggaccaggtggtgaagcaggtcgtttcacggagctggtacaggtgagaaagctgaaggaagaggccagcatctgtaccaaatgctcctgtggcttttttccaacagctttccaagtttctaaaaggatttagaacctggtttcctgccagctccctacttttaaaagcctgctccatttctactacatttgcaaaaatgctagctgcactccatccctcca

SEQ ID NO: 51790 - DNA, 1517 bp, Bovine  19866881154906
  misc_feature (1)..(1): n is a, c, g, or t
ngatgtctgatgagccctttgttttcttacatgtggacagaaatgaacattagttgatccttaacaatcaagaattaacagagacacattcaagaagataaaggccaaatctttgggatgtttaagaggtcacacaaaccgtgtgtagagcctggaggcctgaacattgaaataataacacacaagctacctgtccatacagtgtatgtcctgtaagtactctttaccccagggacaacagattgtgatgttaagagcctgggctctccagaattctggattttaaacctggccctactacttgtgacatctgggatgcaaggtaagttacttaacctctcagcttcctccattaataattgaagacaataattcctacctcatagaagtcatttaatgcttaaatgagatactatgtgatttgcctggcctggtgcctgaatgcataaacgctcaagaaatggtaactctcattactgttatcatcactgtggcttttcttcttgccatttgtgctcacctattcatgtgctatgaataaaatataaggggtgcagggccagaagaaaccgtaaccccattactcctgttcccgaggcctgatcaagaccagagaaggacaaaacatatttcaaatctaaattctaatattggtgtcatttctgagactgtctccctgtgtttgtttgctttaatatgaatagattaataaaaaatacttctcccctgcatgaatatttaatggcaaacggatgtgtattcaatgatacatcaagggtaaattttaactaagactcctttttagaagtgatcgccactcaggttaaaatggagatcactttctccactgaatttaactttctttatcagcaaaaaggaaggaaaattagataatcattcattatgtggtttatctctttcatgaacatcccccagtgctgattaggcattatctatatttagagcgagctgagcccacgcataagatgatcgtgcaggtcagtattgacctgatgctacttcatacacaggtgggaggagcagttagccaggagtaaaaggacaatgggtgctgaagaaggcaatgtttccccctcagggaaaaacacctgcccttttctagcctcagaaaccttagtaggagccagcagcatcttctctcttaaatattctctgccagagcagagcatggcctccatcagtagggtgaccataggattggctgttcaaagagacactttacagttgcacttcccagcagcccctagccacacatagttatttaattaaaatgcaataaaatgaaaaattcagtttctcagtgccactggccgcatctccagggctagcaaggcacacacggctggtgtgtgtctaccaaacacgacagtccagaagcagaacattcccggcatcacagggagtcctcttggacagcactgctttagagtgagaaggggtgctcacccggtgtgctgtcttggacaagtataacaagaactaccccagataaacag

SEQ ID NO: 51791 - DNA, 1608 bp, Bovine  19866881166230
  misc_feature (1)..(1): n is a, c, g, or t
ntggaaaaacaattcagctacttacctcactaaaagcattcgttatgcaagaaatgcaataatacattgtgtgtgtctcagagaagagcatgtgcatagtcttcagaatgcaaacacccaatattgattaaccaaaaacagtatcattgagtagatgagggaaggtatagtataaaggagataactcctagtcttttatagtagaagccaagaaataatatctgcaattgaaaaatgaaggtgaaagtgttattcattcagttgtgtctgactctttgtgaccccttggactgtagcccaccaggctcctctgtccatggaattctccaggcaagaatacaggagtgggttgccattctcttctgcgggggatcttcctgacccagggatcaaacccaggcctcctgcattgcagacagattctttaccaggagagccctgggaaataatgtaagcagttgaaaatcaaggtgaggcagtgtaaacacaatctttacgcctgtggaagcaaatacagggagaaatgctgaaaggaaaccatggagcgcggaggaatacggaaaaggacttcggtttttgccgtaaaccttatagtaccatttgactttcaaaactgtgtttctgtatttctttgctttatgttttaaaaataagagctggaatcattatgcagacatcagtcactgtataaaaggggttatttccacgttactgtccactttcttgaaaaaaaaaaaataaaggcaaacatttctgtatattatgtgcacaatttgtagaaaatgactgctgtattacctctgttgtatgatgagctaagtgttctgagtttttcattttaatttcctgctgtgtttgtgtatgcactgagcacacacgcttacattttgcttatattacacgcataagagtaaagaggtaaaaagtaggtcaaggagtgggctgtactacttcaggtgaagaaccctaattgggaagtggatttgcatcttgacagtaaaaaccctgatgagttcaggatctgtgggtttgataatgggcttagagtgtggaaactgctgaacacatgtgggaaggatggcagccagaatatgaatagctgcagtgagaatgatgtttgctgaggtcaaagtggatgcattgatttctcctcaggtttatatacttacttaagttaatggtccatacttttaaaatgaaatgttttcaatgtgcctacctttaccagagtacatataacggcccattctgcaacttagggtcagcaataaattgccatatccctgccaatggcaagtaatgctcttaaataacagaacttcgttgtcagtaacaacaacaacaaaaatacacttttctatgaactgtgaggacctgatgcgaccagcgtaatgtttttaaacatgtcatcatcttgctgttacaacttggaaatgaaaagatttgatctggaagtccctatcagagagcaaatatatagtttatttcaatcatgaaaaagcaaaaggagctagaagaatgtgtgcttttgcattctcctcctggatctgaagttttgctgattaatttatctcacctttgagtggtacctgtcagttcagctccagg

SEQ ID NO: 51792 - DNA, 1674 bp, Bovine  19866881202767
  misc_feature (1)..(1): n is a, c, g, or t
nggtgttctgccgtaccccctccccaacctgttcctctcaggaagttctggttggtaaagcccttgatgagaagcctgtccatcttcttccaactcagatttggccagggggtggctcaggactcagacgggcaagtccagagatgcatccagatccttaaagacccacactgataagcatgccatggaggtgcagagaagagaaaggaaagagaggagaagggaaggctggagcgggagatcccacgggtcagcacaacttctaaacccacatgagtcactttccctttctgccactgcaggaaattaaatccgtctgtcgcctccacttaggtcaaccgagcgctcacccacaacctcagagagccaaggaattctccacgaagagggcatttctctccccatcccgtgaaataacaggcacgtcactgtccttcagtgtgccctctgtagacagcctgacactgggctaaggttttagcagatgtgttctatagtacataaagaataggtattttgttgctatgtccctctggcctccgtaattcttggctcgtttccaaaaagactacagaagtcatcctggccccttaagttttgaaatcccagtccaccaggccctgtacaacagggaggctgagctgtcccctgggaccatctggcagccagcagacaccccctccagctttgcagtcatctctgcttccactgaggagggtgagcaggggagggtccgcagcagggtttatttatttattttttttagtatttatttctttttttttctttttttttttaaattttatgcagcagggtttagatttgattctgagggaaaatcaggaaggtaaataaatcatgggaaagaatgtgaacagcatctgagtgggagctgccactagtgacctctgaaaatcacacgtggctgtcctgagcactagcaaatggatttccaaaaaccccaagcctgacaccaaattcgtctgacaactctccacatgtacctcagggttaaaagtagaaattcctggccctctcactagcaatggaaagacactagtctttcttatagaattctacgcttttcttttacaagtttaaatataggtctgctttatcctttacattcagactaagagcatcactttatacaggaggccaaccctaacgagctgactcttccttgaatctcgccacagcccacccatcattccaggttaggtagcctcccctcctgcactcaaaacctccttctgaggactattatgatccttccaacactcagttttaatgacctagactgtgagctccttgttagggggaggaagtcagtgtaactcattttgaatatcaagaacccagtacagtgactagtaagcagtagaggatggatcaaatgtttgttgaatgaataaacgaagtcttttgattttttagaaaggtacaattctacaagtggctaacaatcaaatgaatgcatgtggcattttgttctacagatgatgatcttagagatttaagaaacagacagataaaattttgagctagaatttgaaaaggagcataaacatggtgtcttttttttttcccctagaccaaggagatgtgattaataattaatctttttttaaggctgggaagaatttcagatttcaagacctgctgatggtgtta

SEQ ID NO: 51793 - DNA, 1499 bp, Bovine  19866881240406
  misc_feature (1)..(1): n is a, c, g, or t
nctgacttgttagtttttaataaaataaaaggtgatatgtaaatctggtttatagattgatgggcttccttggtggctcagatgataaagaatccgtctgcagtgcaggagacctgggttcgatccctgggttgggaagatcccctgaagagtctgtccccttttcctccctctgtctaacttctgtcttttgacaagctaagtgaaaagattcaatcttgatcctgttttgtgcctcacgtctcatgctgacagcacatactagtctatcaaaacatttggcaatagtgtctgtcccacttcttatttgcaaaatatgagctgtaaagtgttgctcttgagacgtttaaaaatcttgacttggtttttgcaaaaccctccctgtataatgatgccccatgtggaaagaactgagtttttcttcatttagaatgtgtgtgaatcttctctctcatttaaagaattttgcctgtgaccctgactaattagggacgttactcctgttgctttcaggtgagtagctagaaacagattagccaagtgatttattgatccatattttattttaggcttagatctatagtactgcttctgaagacttgcagagaaatttgacatggtaaggaaagcaaatgttctaagtgccaagataagcatgaacagtaacttcatttcagccactggtttagcagagcgagctggctctgtgcaaaagctcacttaaatttgaatgtgctagaaatacactgacagaatctcctgttttatctcttttttcgcctgacttagtcgacgagggctaacagtggatgtccaaacagtttacagttgctaatacaatgcacaaaagcttgctttgtttggagagtggaaaatagagctgaaggggggcttctttagggcactgacctaatttcactcctactacaaaaatgattggttttaaacacatatgtatttctgatccaggtgtctatatctcagctagtagtgttacagcctgaggaagggtcgctcagtgctgctttgtgtatttttacaaagcagccttatttttatttgacagtgtccttttaaacttaaaacaagaagtcaaattctggcataaaatgataattccacaaaaggcaggcaattaagaaaggcagctggcgttgcatcatcacccctctcagtccttgaaacctcctcacatttgagaactggttagtcaccagctttttaaagataaagttccctgggggccgttcctgtgtaaaatgtggggaaatagagctgagttaaaagtaaacttagttcaggcattgccaaattttctgaatttcttaaatttcatgtttatgatttactttgtatgtatcatgtttatgatttacgttagaaatcacatgtcagcaatgtttttactatctgttatcctagaatatttgcaggcagtatgtgctgccttaaagaatctctttcgcttattaatagaaccgaggagaatacacatgtca

SEQ ID NO: 51794 - DNA, 917 bp, Bovine  19866881364111
  misc_feature (1)..(1): n is a, c, g, or t
ntgtgaagtgacaaatatattcattagcttgatacagtaatcatttcactatgtacagcaaattattatgttgtatgccttaaatatatgccatttttattaaagatatatactgtaaaaacagttctaggggagaacaatttgtaatcacccatgcaaaacaggaaatatgtaagttccaaatatatttagcatgataaaactttgatgaattggatgtgtatcatttcctatttaagtcttgggaaactactattttagagaaattggtcatcggcattcaaattaatgtatcagatggtcataaaatactaaaatcccccagaaaagaaaacaaaaaggaaaaaacaaacccaaactggcttaacagaatggtaaggcagtgggaagtacagtccagacgtggtgtggtgcgtgtctgcgaatgactggacaagaatggcccattctgggcagcctagcaaatcatgaggaggatgtaggtcactgctgaagggccttacccacaccttcaaggactgacactggcattgccctgcagctggtattgagagtgcctggaagggttggcatccagctgtgtaggctggacctaattgatgttcaggggctctgaatatgactgactttactgaatcagatatgaggcatttaccacgtgtcacacacaagaaatcctaccttcgagaaagcacacataagtcaactaataaacgattgggcactttgcaaaacatcatagaaaggtaacccattatttcacactgttcatagacctgactctttgttatgtgtaaatgtgctttgcaatctgcaaatgcaaacaataatgtttaaaagctgtcactgaacttacaccctttccaatttattcttcctactggagaagtctatattatccactttaggggtttgat

SEQ ID NO: 51795 - DNA, 1617 bp, Bovine  19866881753251
  misc_feature (1)..(1): n is a, c, g, or t
naatgcagtctgtctcaaaaggcaagagtggccggccctgggagaagcaaacactttggacagagtgtgggccgtctcagaagacaagagatgacccacgctctttttcttttttgcttcttttggtggtaaaatatacatggaacttaccatctttaacatttttaagtgttcggtggcattagtatgttcacatttttgtgtaaccatctctatcattggtctctagaattttgtcatcctccccaactaaaactctgtgtatattaattattcctcattttcccctcctccagcccattaaccactgttctattttctgtctctatgaatttgacagctcaggagcctcacagaagtggaatcatacaatatttgtcttttttgtggctaatttatttcacttagcatagtgtcctaaaagttcaaccatgttgtagcatatggcagactttcattagttttaaacatttttcctatttgacatttaccactaggcatcacatacaactctggaaactagaggtttgcttctgtttttcctcttcttggctaaaatgggattggagaatggaagcagcaggaaatgagcaagctgactggctagtcattcatcccttccctcttattctttttttacccccgtaatctctgcagattgaaattgctcagaagcatcctgatatctatgcagttccaatcaaaacacacaagccggaccctggcccaccccagtacacaaggtaagggctgctctgagggtataggtctaaaaaaggggcttatgtaggactttgatgcttaagaatttttttttcacctacatttcaaagtaataagaaagtttgttttttaattcctcctggtaaactgtttacttattcagtcaaatttaattataaagaccatagagtcaaagttttatggtagtgttgattgcatgctaaaactaacatagtgttattgtttagtcgctcaatcatgtcccaccctttgcgaccccatggactgtagccaactaatcttttctgtccatggagttctccaggcaagaatactggagtgggttgccatttccttctgcaacacagtgtaatcactgacaatccaagtcagtcccattagacccattggagccatgtgtgtgcatgctgagtcgcttcagttgtgtccagctctttgcaaccctatggactgtagcccaccaggctcctctgttcataggattctccatgcaagaatactggagtgggttgccatgccctcctccaggggatctttcccacccagggataaaaccaacatctcctgcagcttctgcattgcaggtggattctttactcctgagccaccggggaaatccaattggagccacagatgcattaaattgtgttaagatagtttgtgagcaaaatacgtggggtttagatgccagttgtttcattgttaatattttctagctgttggccaacaagctcagtaatccttttgtgtcacttagcaaagtcaggctgtgtgtgagctgtggtctgagggaaagggaacatcaattgactggtgttggtaggatgccttctgtttaaagtgctgcataggcagtagtattatcaacagagt

SEQ ID NO: 51796 - DNA, 1249 bp, Bovine  19866882200667
  misc_feature (1)..(1): n is a, c, g, or t
naaaaagaaaaaggctcagaagcactacaattgttgtgacaaatttaaatgaagaaaactccccataaccactggggccaaaatgctccagaaacctttacttaacaaatgttacagtgaaaaataatgttgaagaggccacagattctcttgtcacgctttcctattccagaacccaatataaagttctgaagcacaaagagcagaatcctattcacctgcaatgtcaggttttcttgactggaagaaaaatggatgtgctaatagctggcaatctgaaaatgacacacccataggatgtgcctttgtatcacgcacgtcaacataccctttcatgtttgcagcagtggcaaaaggactgtaaatcactacactgcaatgaaacttctttaaaattcttattgttgacacactaaaatgacccagtgattgaaaacaattacccttgcattctgtgcttcttggagctcttgcattctctgtaactttgccttgtgatccatcttctcaaatatttttactttgcccaggacagatttgggagcattgtgctgctcctcactgccctctcccgtctcctcactctctgggggagggacgggagtggagggcttcagtacaggccgtccaaaagtgggtttcgctgcaataggaggaggacaacctttggtagatgcccctggaatttcgttaccagcagcggctgaggggtttgacttgtattcataagatctggagaagtcaaaagattcttctctgttttgggttttggcctgcagagagcaatgacatagttttaaccttgagctttccgtttattttcaaatctctattagtgatttaatacactccatttcctgatcagtttccaaaggtggtcaacaaattccactccaacaagaaatcaaatacgacaaggtacatggccaagatctggcatccaaagccctacctcactccctacagaaaagtattaagggctcgaggaaaccaagagggtgctgcgaggcctgcaagtgctagaggtggatcagacctaactctgccctagaggagatttgaatcttagagaggacctcagaataagtcaggcttcaggatggaagggtggctcctgagttcacaccatgctgaggggacgtgccttggcccagaggtccacccagaagtgaggagactggggttgggagcggtaagggagaatatcatgctgatggccactttgtcttcatacttccatcctaggccg

SEQ ID NO: 51797 - DNA, 1481 bp, Bovine  19866880399569
  misc_feature (1)..(1): n is a, c, g, or t
nttggatcaggatcctgacagatacatgtccttagcacctctactaaagtcctatgggagacaaagtttctctccatgctagacttctgggagcatatgggggaagaggttcaggtcatctgttaaaaatgaccagaataaattattcttatgatttatagaattataaaatacaaattttctgacccaagataaaattttgagcaatggtagagacactggaaaattactgagataaactgaaactaaggaaaaaataaggggactgctagaagttagattccccagataccacctaatgcacacttagactatttgtacattatccacatacactttgcctaataaatgtaacaattattcctactgaaagagttcctcagttcagttcagttcagtcactcagtcgtgtccgactctttgcaaccctgtgaattgcagcacgccaggcctccctgtccatcaccaactctcagagtttacccagactcatgtccattgattcggtgatgccatccaaccatctcatcctctgtcatccccttctcctcctgccctcaatctttcccagcatcagggtcttttcaaattagtcagctctttgtgtcaggtagccaaagtattggagtttcagcttcaacatcagtccttccaatgaatacctaggactgatctcctttagcatggactggttggatctccttggagtccaagggactctcaagagtcttctccaacactacagttcaaaagcatcaattctttggcactcagcttactttatagtctaattctcacatccatacatgactactggaaaaaccatagccttgcctagatggatctttgttggcaaagtaatgtctctgctttttaatatgctgtctaggttggtcataacttttcttccaaggaataagcgtcttttaatttcatggctgcaatcaccatctgcagtgattttgtagcccccaaaaataaagtcagccactgtttccccatctatttgccatgaagtgatgggaccagatgccatggtcttagtttctgaatgttgagcttaagccaactctttcactctcctctttgactttcatcaagaggctgtttagttcttcttcactttctgccacagagttcctcagagcaatttaatatcaaggtcagggtccagattcaagaaataagatgctacaaggcacaaacctacacagacaaaacaacacagaacctctgagggtttcatcagggatacttgactcagacaattctcaggccttgaaaccagcacccatgtgaagtataaagctatttctacacaggttttcctaatcctccaaagatgtgatgactgagaaaaatagatatttaaataaccccagagaaccagaacagtgagaaggtcattttagagtcaaataacatttagattaggtatgctacactatccccccccccctttttttttttcagtccacaca

SEQ ID NO: 51798 - DNA, 1299 bp, Bovine  19866880407649
  misc_feature (1)..(1): n is a, c, g, or t
naaaaatgaaagacaaggctgctaagataataggttattaatgaatataataaaatgtttgtcacaaatattttttggaacaagataggttatatttaaatgagggattaagctaaattaagaaagtcaatagaaataggagggaacgaggcgtgggggggaaactaacctgcactgtggttgctaactctactactgagtattgagtaataacaatgattactgaattacaattaattttatcactgaattatgtgtaagttcttataccttatatgtagtgaatacaatatttgttaaatgtatgcaccttctttctaggaactagctcatggtgtcagaagttttgtatttcatagtttcattcatgggtatttaatcttaagtaccatcttaagttacaccagctcacccatttggtaaagaaattctatatgcaaaaatcaaggcttttcttttcaattatattttattcacattttaaactttattttttatatccccaattataaaaaaagagatcatgagaagtaaatccatttccacttctagccacatttcaaaatatagaatattaagtctccatggaatgcccaacctgagaaagattttcccgtgggtctctcaggataattttacagcaatttaggagagaaaacgatattttttatggtcctcaggagctttggatgggcagaagaccaccaagaagtgggatacattttcagttctgtgggtgttaccagaagggatttgctaaacctacaaatttcctcctcaggtcactattgagtcaaggtgacatatatagaatatctaaatgtgtcggtgatgtaattgcaacaaactacttctgtcaaaatgaattaaaaatatatttttagtctaaatatttcttaaaaatatgtgaaaataatattttcctatttatgagagatcactttattactttctatagaggctttaaggattatatgagatttaataaagaaaaaaatgctgttttataactataattatttcaccttaacaatatcattttgaacctgtatctcagtgttttcagagagtaaaattcataatgcatacatttgtgaatactgaaagtccttaaaaaaaaacagaaaataaaaagttgaccatcaataaggaaagtgagaaaaaaacaaattaataacaacattattataatagctgactgctgcaaagttttagtttatgcaacatatgtggtaagcaacaattttattctttatataatttaatatttatcaaaatcttattaaaaaagaggaaagt

SEQ ID NO: 51799 - DNA, 1189 bp, Bovine  19866880429704
  misc_feature (1)..(1): n is a, c, g, or t
ncacttcgtgtgtatgaattaccctgtcagaaattgataccactcttactaaaggcccagcttaagtatcaccataatagtgcagccctccctggccatccccactgctgctgctcactaggcttagttgtgtccaactctttgcaaccccatggactgcaccctgccaggctcctctgtccatggggatttctcagacaagaatactggagtgggttgccatgccctcttccaggggatcttcccaacccaaggattgaacccaggtctcccacattgcaggcagactgtttaccatctgagccactggggaagcccccaatccccactagttccttattttaatcattcttatggcaattactgacttctatttgtgattgtccgtgaaagtgctttcctctcaaactatattgtcatgtccttaagtataaaggttgaatcaatttagcttagaatacaccacaatacctgacacaatatcctgtatatatagcaagttctcaaatactaagaaacaaatcaagaaatttacagacagcaaactatttaatactttttagtcattgtattcatgtatttcttttagcatatggcttgttgacctactctgtaagattattaaagccttgggaataggtatcatacctatccttttatttataaatgatataaataatataaactttatattattcataaatttattgataaataacagattataaataaagtcttgggaacttattatataataataatattttcttattatgatttgtcaatgattaatccataaagagatactgattattagggtgactattcaggttaaagccatttcttgatccaattaaagctttacagaaaagcttaggtagatgcatatgttcttaaacataggcacaattagatctcccaatggtagatgaatcaggcaactcttttatttggcagatttttcaaggaaaaaaagcataaaatggaccagtcatttccctgagctcctctcttattttaatagctattactctcactccatgctcatctcccctgagatactgtgttggattcttttcctgaataagtctttcaaaaattaaagataaatacaagtctcagaataccaacaacatttctctctgagacatttcttatatgttaaatcaaaacagggtgacattagaac

SEQ ID NO: 51800 - DNA, 2475 bp, Bovine  19866880437623
  misc_feature (1)..(1): n is a, c, g, or t
ntctctcctctcccactcctgcgtttgctcccctcttccacctccttctcaccctgcttctccaccctgctaccttcttgcccttctgtttccctgctactcggcctgccctcccttcactgccaacaccattctggaaagaccagtctacacgtattccctctgcatccccccctctacaattggcctccagcccctaccacctttctagatgcccttgccaaggttaccagcagtgcccttgttgccacattcaagcagacacttcagcccatatcctgcttggcctgtcagtctctgacactgttggccaagccctgctttgttgaaagatttcctttcagcaactcctaggtcccaccctcccctgattttcctagccagcctagtatacagggaaaagatagttttgaattgcagttctgccactatatgtacttgggcaagttgcttaactcaccaagctgcctctgtgagtcagggataataatagcctctactcaggttgggctaagatatataaagtgcctagcatggagcctggtacacagcagtgctctgtccctctgtctatcctctctgccaatggtggagtcagcaagctgtccccagatatgtagtctctacagtgatacagcctttggttcttggttgggtatgaggctgcctagaagctgcatttctcagccacctcttgcaactggctctggtcatgtgactaagttatagctaattggatgtttgtagaagtgtcatgtgacaccttctgggaactttcattaaaagaaagctggtagatcttttgcccggttctttatctttgtctccatctcactgcctggaattcatatgtgatggttggaactctagccatcaccttgaatcatgaggacaagagtcaaatccagaggttgctggagcagtgagtggaaagagtcacatctgggaggtctttgtggagcagagctggagcaaaactgttgcccccaaactaggttcatcttgtagtgggtgtccagtgaaagcacacaaccaagccaaagagtgggagaaggaaggatttattacttgtagcaagtaaggagaacactggggatctttctctgtaacagtgtctcttggaacagcaaaactggggaagtttcaagcttaaggcacatgcttattattcatgaagaggcttggggagtttacgtatcatagaactggggcaaaggttgacaggagggtcagaaaagctcagggtcatcccttaggtttcggttgatctagtggttgaagggggtttcaattctgcaaaacaactcaagaaagtgcttcaggctaatctttaccattgaaacagaactgcgggggtctttaccactgatatatcatctttgctgctgctacttctttgcctgacaacagttgtttgatcctgcattcttttgttcctttaaaatcattaattactgggacctgttcattcattattgagacctgttcaaagacaagcattgtggccaggcttggatcacaaaagcggcttagggaacaaatgacttctcttataccaaaatgctacatttggttctttttctctgggcctccttactttatctgcttacaataccaactcaggactgtttaccctgaggcttttacgtggaatttctgttatgtaagtcagaactgattctgcctactacagagattttggggcttccctggtggctcaaatggtaaagaatctgcctgcagtgcaggagacctgggttcaatctctgggttgggaagatcccctggaggaggaaatggcaacccactccagtaatcttgcctggagaattccatggacagagaaacctggtgggctacagtccattgggtcacaaagagtcggacacgactgagtgactaacacaccacacacacacatctctctgaaacggaatcaagtacagcacagacttctctggtgttcactaaaaagccatctaacctttttatagatccctagatacctgtaatccaccaatttccagcttagagaagaagaaaaaaaaaagtatgaccgtttaactttgaatcctgggaggagaactcttagctggataaatttatttttcttatccatcaatgttttagatttatatccactttcctgttctatttgatgccaacatgcattcctctgctgtggtgcaggtatgactaagtactgtctcatttcactgaatcgagtgtcatttgtcttgagttctacaggctgactgcatacatgacagcacacagtgacagtaatttgcactgatctgcccccactgctagtcctgctgctacaaatagcaattgattattatgctgtagtgttattgactgtcactatgaacacaagctttatttcatttttaaagtaacatgctgcagatttgtttagtataaaagcaaaacagggaaatattcatttcttagaattatttgcagtcacaa

SEQ ID NO: 51801 - DNA, 988 bp, Bovine  19866880438234
  misc_feature (1)..(1): n is a, c, g, or t
nctgttttattttcacatcttggtcgatagtgcctagttgttcaggctggctgcctgcatattatttttgatccctttgtctctgaactttgtctccttatttccatgtcgactcgcatcatttgtgctagttgaaactgcatcattttccacctggaataatgaaatattttcctgctaggtctccctatcttgacactttgttctttctaatccattattcactgtgcaggcagaatcatcttctgaaaaagtgcatcttatgatacctcttgctgctcaaaatcctcaatagcctcacagtaaaaatgaaaatcctcaccatagaccataagatctacataatccagcctctgataacctttccagaatttttttccatccccccatctttattactctcctatcacactggttttacttcagttcttcagcatagcctgtactttctttttttccccaaaacatttttattcactcttcttttggtaatttgtaattaccctttaggtttaaagaaggtgtcagttcctctgaaaactttgcctcatcccctagtctgtgaacattagatctcttcacttagaatatctgctgttcttcctccacagcactgatcaccagttgtaattttcctcgtgcttctgtgatttttggcttactgtttattctatcctgaaaatatatatgctacctagggcaagaagctatgccagtttagtacatggtccatagaaggtgcgtaatacattttgttgaatgaattaataaataaaatatttattgagtatcttctgttcagtacagtaattatcttgaaggaggaagaatacacattaattcaaaataagtaaaaactcctaaaccactaaacctttaaataattagaggacagaggaagacagtatgcaattaagtgtgaaaatatgtggtacagcatgaagctgctagaggaatgcaaggaaggaagagagatctggggcttcaa

SEQ ID NO: 51802 - DNA, 1045 bp, Bovine  19866880448393
  misc_feature (1)..(1): n is a, c, g, or t
nattaggacttctgaagcattaaatctaaaggtccatcggctcacatcttccagccctgcctgtctgtggacaggaccctgtctgtctgtttcctctattgcactattttgtttgtactactgtaatcattttgctggcccagatctgtgtgggtgtgctggcagctttacaacaaagttacatgggaacagagttaaggttgaatatttattagaagaagccatctggcgtcaggctgtctgtacagggggctggcttctttagtaggctctcctctttctctagagttcttcctccctctctctcttctgctcctgctcaccctgctcctcacttcacagttctgaaaaagttgactctgcctctctcacccatttactttgtcctttgttatttgtgttcttacaaaagaaaaattgcgagatcattctgtttcttttaaaatgtttctcttttcttggaggcagcttttgcttgtttccacaatgacagtgtccacagagggtcaccagtagaaggcagcagggccgccacagcagaacagcggcttgcttcctacgtgggcttgcaagttgccttaaacatccatttcctgtcgctgcctttctttcttacctccagtcagcaaactaatataaaagcacctctctttggagccaggccactctccacataagaaatcagatgcggtaattcccatagccttctgccattctgatccagttcagctgacttaaaatttttgctacactgtgcttgaaatgcttagttttttcacttatcatttcgtgtgatagttgttcattctcttctgtgaatgtccctcttgtcttttacaactcttcccgcttctccattccccctctcgcctaaacacagggcctctgctgagagccttccccagtttatgtagtttgtcctgctgtaagtgtgctgcccaaaattgctattgtcaccaacctgctccagtgatgctcattttaaaacatgcatggtatgtaaccaaggaagccagtgggaaaggaagctcataaccaagatcac

SEQ ID NO: 51803 - DNA, 793 bp, Bovine  19866880496045
  misc_feature (1)..(1): n is a, c, g, or t
nttggaagaaaacaaaaagccagaacatcctatatccagtgtcctcaaagagactttgattaaccccaacgattccattcaaggaaacaagcttcagcctgttcttgtgttctcagtccaccctcttcattcaaggtatggaagatgcaattttctagcatacacccagttgaatcttttctaatggtatccatgttggcgctattttctaggtaggcatggagggatgtcttcatcattcacaggagtctggggttacgccaaaggcaaagacaactccacagacaagggaaatagataatttcagttcccgaatcagtattgagtccactaacacctgagcagtgaaaatcctgtggtgtcttcattcaagagccaggaaattccatgtgtttatggactcaagttctcttctaaatggagtgactatttattgtttcgtatccatgaaaggaaatctgcaaatagcagacagacgtcacacattccttgtgcatctacgccccagtggctccaatgctgagccaactgctcatgagttacaggataactaattcacttggtcctatttctccctgaaactctacgtggagttgtggttcactggtttagtgacgtgaatgaagggaattcactgcacttcaaatctctcattacaccttaattaggaccccagctagaaatatcaatgttttaacaactgtagcagacaaggtttcttttttttgctttaatcatatattgtaaagcagattgaagtactttatcaatgttttcttcttttggttttttt

SEQ ID NO: 51804 - DNA, 1764 bp, Bovine  19866880548647
  misc_feature (1)..(1): n is a, c, g, or t
naatacatgttcaccttatatgattagagaaaagaaaaatgaaggagcaaaagatatttcttgtcttctgaatcttaaaccacacctatcctttatggcgcttctaaagtttgcacactgggaaaatcttgactagcatttagtctttttgtcaagatgaaaaatggcaacttttgccccaaagtagtgaatattccttaactcaaaaaaaactttgttcacataaaatagagtcaaaaaagccctttgtttataaagtgctttcagattctcaatgagagacattctatttttttgattcagtttcctcatgcattcattaatattattatgggaaaacaattatcattttaataaaacaaactagagaatatattctgcctgtcaccttctctctgtgttcagtatacaatggattacctgctagcaataaattccctggcttgtattttaactcagaatataatgtttccaatttttaaataaaatttttgcagatatataatttgcataatctatgattgatggtgcttattaacaaaactccaaatttctgtcttattctctcttatgtacaaataatgctacccccctgccccacactgaacacgcacacacagacacacactctatctcttcagggttcattccaatctaataaggattgttttcacagcattccagacataatgctccaaattattattctatattccttgttctgctgcagataaaaggagaacacatttaaaggaccattgcttagaagtctcttttatttaaatgttaaaacaaaaaaaagaattagctgtgaaatatactggaaggttccatgggattctgaatgacttcttctaacaaagtgtttacatatgttatctgtgactggaataatggaagtggtagagaataccatattttaataaattttcagaattattttgtataggactttagaactaataaaaatgtagcacataaatgtccaatagccaaaatatactatctcatcatttgctttttatggatgtaggggtgaggatagtaaaattattatttcctttaaatatctttgtcaatttcttttaatcttacagtttacagcttccttttcacagtgaatctacctttcaaagaattacttattctttgaaaacttcacaaaggcatcctacatgatgcattttcatgttatttacagcaaatacgtaaatcatatactaatgacagtagcatctttgtagttcattctaaaatatggatgaaatatgagttttcttccaaggtacaaaacgtcattaagggctcaggtggttaaaatcaacatgaaaaatacatgcagcattttctccccttaaatgcaataatgtaatcagatttcaagtcatcttacctacctcacttacagctttatggagattaattagtttttagaccccagtcacatgatcttttctgactgtcatttagctggctgactagaacctgtaagctgtctcctgccccaaaggacagattaaattttagtattgtttgtcttctttctttgatttaaagttgtatttttaaagttatggtttattttattttgttgttaattggaaatttactgtaaccttgtttggggggatgttaaatatttgaaataataaatattaggtaaaacaaaaatgttttccctcttttgctataaagatggttattatacagacacctaaaacataggtttttattatttatgattcagatgttacaagtattcaa

SEQ ID NO: 51805 - DNA, 880 bp, Bovine  19866880606801
  misc_feature (1)..(1): n is a, c, g, or t
ngcttcccttgaaacatattaaaaactctcagaagagataatctacagtagggaatagcactgtgctggcccggggtgtacaggatgacctaatgggtcttttccatctctaattcctgtgatactacagatctaagagatggagccagtaattgcgttacaacatagcagattcctctctctccctcctctttccccccttccctggagttcagcagagaatctcttaaaataaacaaaaactgtgagaaactaagagaagtcagggactggcccacttttgagatgcagaatgtggaaagtatgaagcgctgatttgactatgaaggctggaaagcagaggggccagagccatttacactgcaggcagtagttaaaaaaggaaaaaaaaaaaaaacaaaaaaaaaaacttgaaaaaaatgggtgtaaccctgggctttgatacaactggcctttcagcccccacttgagatttgcacatcctcaagggaagctgtggtttggaatacgatcgtgcatttaatttcactcagagaacttattggacttggcaccaaaagaaagaatttgcagtatattttttgtcatgattagtggccccctcgccacaacatttgattattttggaaagggaaaagttaaatccttgtaaagttgtgatttacaattttcgagcatccaggtagggagcatgacttctgccagcttgatcatgggatccacattttattctagctcattgatgtgagaaaacaaaacagttctgtgggggaaaatagacttgaaaatatatcccttgattatcctgggagatttttctctccaaactacatcttccctcagtcacatgattttggtatccacggaactgagcaagaaa

SEQ ID NO: 51806 - DNA, 2289 bp, Bovine  19866880610854
  misc_feature (1)..(1): n is a, c, g, or t
ntactcatacccacactcatttacacacaggcacaggcatatacatatattcacacatacttgcaatcacaaacacactgatttttgccccaaaattcacatagaaaacaggaagtttaaaattctcatgagaaatgactagtttttaagaaaagttagtttaggaacataagaaactaataaataattgacaagttgaaagtgcttatataaacaagtttaaagactagaccaaaatgtattgctaaattagtataactaattgctaaattagtaagtataacaattaacctaatgtgtatggtaactactgcctcgttctccacttctgaactcccttgtcttttaccctacccccatggtatcatgtaaagcaattcagataatttttgttatctttactttggagaaatccccagatcatgatcctttctgactacaacttttgaaattttcagttttttctgtcttcctgaagacttctcaacagcaatatttgaacacagagctgttggtcttccaagctgtactctattttttttttgtctctgaatctttccaacattgtcatgctagttcctaaagcttggagttacccaggtggtagttattaactgacgtgtcatggttcattgtgaacaagctaggtcaacaaacttgtttttcatcatgactggttttaatttgaaagggagcttgttacgtatttgataatgcttcactgaggttcacctatttcaggtagattaatagcttgttcagggatgaggagcccaggggccccgttgtaactgtgtgctgttgggttcaaggttcaaacttcagaaagtataaaaatccttgtttttcttctacctgtttggcagtacatgctttagtgaacttttatacttggtaacacttgaacaatcccaggtttgagatcttacagtaatattaggaactggttatataattaagtactactctggtagtactttccaggttagaagaccttcaattttgaaaatattcatacagagtttcctgatcatttaccaggaaaaaatatataaaaatctctttaaaatgaaatattaaatatctttcaagtcctgataccacaggtaggtattagattggagtaaatggatgaaaaaagtctgttcatgtgggaccaattcatgaggcgatggcatatcagtaattccttaaatgaatgtctacataaatacacttataatacattttaaaatttgtagtaaattattaactgaaaaacttttttaaataaatgagaggttcaccacatttgtttttttttagccattcataaaatagatcctttggacacacgaaatatatcagatagctctgtcatgtgagaagaaaaaatttaagaggcagttccttcataacatggtcctagtgaatctcagtgtagctgaagctcctactcagattttgctcctgaagcatttaaattcaacactacttaaagtttaaaccacaatggaaatattaatgatgtctctgtgctgaaaacagcttggcagtctcttaaattgataggtttctaaagaaactctccatttcaaataaggatctgatgttcagatttcccaacctgtctgaaatatagtatacctacatagattggctatctaggagcttgtaaacaaattcataaatttgtcatgctgattatagtgttggcaaacacaatggctgatcatgttataaatgtttatcaacactcacactcacccacctgctaagaggtgctacgctttaatgaaattgtttgaatatcaaggccggttgctaagatacaatgttcttgttactagggatgtgatgcttgcagatttctgttatcaaataatgattagagatgtgctaacctcaaggtgctcagtgcagtggaaggtttaccgagctacaaattagtaaactgcttgagcaggcaccggcagaaggaacatgtgcttcacccatacacgactggcattttaaaagacgacgagaggacagggagcgtggccacgaatgacggggccttgaaagtttgccatggaaggttcacctactctgttgcccagcatgataaatctttagccagctggggaatttgttgaaatccattgcagtaactccctttctcatgcaaggtctgttctttacatttgcttttaattgggttgttatggaattattaacattaaacacatcatatcttttttatgagaaataaaagtaaataaaagtgtaatcctgcagaatgaagcacttgaacatgaacacattttt

SEQ ID NO: 51807 - DNA, 853 bp, Bovine  19866880614163
  misc_feature (1)..(1): n is a, c, g, or t
ncatgagcacacatcagaagcacatggcgatgaagaagtgctgtggtgggagatctgatcaaagtttctcaaaacggactccaagtatttgatgaagattaacatggagacgatttaccaaacaaatacagcataaagagccaagagaccttctaagggacttcaaggctccagcttgcccacataaagaatatcattcaacagaaagaaaacaaagacaagaataaatatctaagagcactgggtctgtagaacaactgaactgccgattgatgacttttctgttctttttttaatatatacattagaagatgctttcagtttttaaaagcaaacaaagccatgagtttgatctgggtcctaactgtgtaactcttttaagtgttctaaaagatgtctggaccagaattggttaattagcgctttgtgttgcactatgttacatatgacctaaccagagataaaaaggtttaaaggtctcttgtaaccctgcaatgccatttgtaacacaaaaataaccccctttcattactagcatgccactgtagcacgcaggttattttttcccttcactgcaataagggcagctttcgcatcagaagaattcttggcaaattaatgcgctacctcttgggctaattaaattagaaaggatcaaaaatacagagcggcttttgtggtggacacaatgtcgtgcttcatgcgtcttgctcagagaggaatttctgccatttagccccttgcctctagcagtgttctggactctctaacacagtcaagttcctaatttgcctcaatgagagagaattattaactgataataagaaaaggagcattcacagctccaggctgg

SEQ ID NO: 51808 - DNA, 1217 bp, Bovine  19866880627362
  misc_feature (1)..(1): n is a, c, g, or t
nttttaaaaagtagaaaaataaaatttaaaaaagtatatttgaactttataggatacacttaacatatgcactaaattaataggattagagaaaaaattcttacaatcactaggcccaatcctttgttcttagttctgaaaggcaaaataactcacaataagaagctgccataggaactatagctgaggcaccactgatataaggaagaaactccccattcgcaccaatagggtatttccctctggaaattaactgtactttcagttgtggagcagataattgcacttcttaaagctacatttatataaatagtccccatttctgggttgtttttgccctcagttttttcataaatcaaatactaaatagattgtttatgtgtattcttcatatagtgaagcatagtcattcattaaaaataataataataataagtgcctgccattttaaagttccagtaagtacaaagagataatcttccttctggttgcctataaaatcagattgggacaatgtctctcatggtgaacttttaaaaagcaaaaactgtgtctaaataacctttgcatttgtctgtatcagatgtttgcaatattagatactccatgaagatttggcaaatgaataatttgaattaatagggtaagtgatatatgatagaagtagaggtacagaagacaagaaagagttccaaatagattgtgaacagtttttctaaagaaatggcctactagctgaaattaaactgatgaggaatcttgcaggggaactgcatggaaagaatagagcagactatcatcagcaaaaccacccaagggagattgaacctgtcagaacatttagatgatggtagcatggagattcagagaagaaaatggcaccccactccagtgttcttgcctggagaatcccagggacgggggagcctggtgggctgccatctatggggttgcacagagtcggacacgactgacgcgacttagcagcagcagcagcatggagattggtagatggtagatggaagaaagctatggaagaggaacctggtaatgtagagacagagatcaaattgtgcttggtcttgaaaaaaacaggtaaaaagactgggcttttttcttccatcaaaagccatgttttgaagaggatcaaggcctgatctgttcagatgactttcctcagaataatttacagatcttatatagaaaccaggagccaa

SEQ ID NO: 51809 - DNA, 2623 bp, Bovine  19866880629711
  misc_feature (1)..(1): n is a, c, g, or t
nctgcatgtgggtttaaaaagtactaatcaggcttccctggtgggatcttcccagaccagggatcaaatcaatgtccccagaattgcaagggcagttaaccactggaccaccagaactgcctgattagttctttttaaaaaatgtttccttctaatttgaatatcagggtaatggaattttgtaaaacagtttggaaaatgttctgtcttctatattctggaagagattgtgtagaatttgtgttatctctattttgaaaatctggtagaattcaccagaaaagttgtttaggtttagtgatagcttttatggaaagctttaagttataaatacaatttctttcagttcagttcagttcagtcactcagtcgtgtccgactctttgcgaccccatgacttgcagcacgccaggcctccctatccatcacctttttggcaaagtaatgtctctgcttttgaatatgctatctaggttggtcataactttccttccaaggagtaagcatattttaatttcatggctgcaatcaccatctgcagtgactttggagcccccctcccaaaataaagtcaattatttaatagtttaaattattaaatagttaataattaactattattaatagtgctgtcgcagcttggcactctcggctgccgcccatgacctcggacatagggtagctcgtcttggctgccacctctgacctcagacgtgggcagaactattaaatgaatagttaattaagagtttaattatttattaatttctttaatagtcctcaaagcattaagattaccaatttagtagcatgtgagttttggaggatttagttgccttgttctgctgtgtccttttaggatggtgctgacatctggaccaaagaggtaggaagacagagggagataggaaaagagagagcaagcgagagagatattgaaagcatcatacacttgctgcctccttgggagcatacctctcttaagcagagaggaagattcccctcgtctcagctgtggttccactgggcctccactgctcatactgttaccaccactgttggattgcttgggggctcatggacaataaaatggtgcatttttttttaatgggaaaaaaagatacatcaaaatgaacgtgagggttatctacactgtgcccagcattagcattccctttcctaccttccaaaccagaactagaagactttccttggtgctgtctttttgactacagcccagtgtctacttccagttttgggtgcattaaaatcaggttgggagacccagagaaaaaataaaatggcagactcactgccagctcatttgatacttcagttttccctccactaaccttccctagtactctatacatttttagagttactataaaaggagaaggaaatggccacccactccagtattcttgcctggagaatcccatggacagaggagcctggagggctgtagtccatggggtcgcaagagtcggacacgacttaagcgactaaaccactaccgccatcatagcttctgtgcagggtttatatttctgttctgtcatagacagtgtgcttataccaccttaacctggaacagaaacccaaatagattcttccttagtgcaattgtatcactgtacaatccttgaatacttctgagaaacagcagagtgatttttacggacattagtttctgacctagactgccttagttcaaatgctcactctactccttactaactgtagaccatgtccagattctttaaactctttctgtctgttttctcatatttttaaagggaacagtgataataatagtatcttccttacagtaatttacttagttgttataagtaggtgcctagaatagttcttggcaaatcaggcatactatatatactttgccattaataaagctttgaataaaaatgttttctaacttaccatctgtattgtacaatcagaagaatatctaataatcagtagtaaaaatattaggatatatgtgtaaccacttttttcatttcagactttgttaaaatgcagattatctctttctggtttaggtcaccacgttccctcttatcctatgtccttcagtacattagatcagattgtcctgtgaagatgcagtgcaagtgacctggtcttactactgtagcaattaaatcacataatcagaaagctaatttcattgcactttgaaaaggttattaattgtcgttgtatatatttcagagaaagtcaaatatgggcaaagggcatgttgctaatagtcatgcatcagacaagattcaaagggaaacttaaaaccaagcttcctcaggatgaagataactatcagaagactgatgctataaggggggttaggcggaacagaccatcttttactcttccttctctattcagggtaggtcattaaaagtacactttagaggttgaggggaattattacagattttctcccaatatctatacaaatttaagctaaaaataaaaatggaactcatgtttatatttgctgcctaaataaaacaagaacatataattctgtttcaaggatatttgtagtgattaagcctaaatgcaagtatgtatggttttaaaaaagtttatggaggag

SEQ ID NO: 51810 - DNA, 1306 bp, Bovine  19866880706323
  misc_feature (1)..(1): n is a, c, g, or t
ngagaaaggcaggtggaaagacaaaaatgagtaggttttcacttagtcaatctccagtacagaaaaaaaggaatgcttacacttgaaacttgaaaactaggaatgaatcaatggcactctggggcaggaagatggaataagggaggatgatggagaaaaattttgctagataaggcatgcatgcctgctaaatcccttcagtcatgtctgactctttgtgatcccatgaactgtaacccaccaggctcctctgtccataggattctccaggcaagaatactggagtgggttgccattcccttctcctagggatcttctgagccagggattgaacctgtgtctcttatgtcttggcaggcaggttctttaccactagcgacacctgggaagcccagataaggcagcccaaattaaatatcaatacccactgaaaaataataataactaatgtttggaaagggtagtaaggaaataaatccaggcaaaagaaaattaggtcaaatcaatatatcaagtttgtgtaatacttttaatttacagaagggttattctgtacttgacataaggaaattggagatgttactattctctgagagcaattgagttatccaccatcacaagaaagtacagtcagcagctgaaagctaccatctttgcagtgatgtttatttacaaagcaaataatggtttgaaatcaccaagccccagtgaaagtgattctcaaaaaagaagcctctcccccgccccttactctatctccatcacatactttttcaagtatcgagacaaaatattcactatcaaaaacagattctttttcaaaaagtacaaaatttcaaagaagtctctagcttcaggagaattctcagtattcatatcagtaaataatccaaagtatatttttttaggaaacatacttctagtaggataagagccttttgtatcctttacatctttaagagagtcacatctttataatacataataacaaaacagaatatattgtaactcatttcttgaccttttaatatttctgtcactgattgtcagagttgagaactactctctatcctgaggtgatggattatttaattaaccattgaccttggtcccaacatttgttgacaatgagcacagttccatgaaagctgcctgctttggatattggtcaattcttcattgtttatcaataggagccttccatttttcataacttaaataactagaattacatttgccatgaatttgtccaaacctattttcaaatgaattcgtgtctgtttccttttgactatctatattagaa

SEQ ID NO: 51811 - DNA, 2521 bp, Bovine  19866880708281
  misc_feature (1)..(1): n is a, c, g, or t
nctttaggatatactggttagatctccttgcagtccaagggattctcaagggtcttatccaacaccacagttcaaaagcatcacaaatctcactcatatatagaatcaaaacatatgataaatatgaacttatttataaaacagaaacagactcacacatattaaagaaaaaataaaaaaccttgtaattaccaaaggggaaaagggagggagggataaattaggatcttaggattgacagatatatgctactatatataaagtagataaacgaggacctattttatatagcacagggaactttaatcaatatcttataatgacccataatggaaaaggaaaaacaaaaatatgtatatatattaggaatatatacatgggaaatatatatgtgaatgtgtgtatctgaattgctttgctgtgcacctgaaactaacacaacattataaatcaaatggactttaatttttttttaatttttaaaaaataaatggagttatggtctaaatggaaaataagtataatcgtggggtggagggaagcaatcagttcagctactttgacataccataaactgggttgtttaagcaacaagcatttatttctcacagtatggaagctggaagtataagaccagagtgacaacacaatcaggttctggtgagtgccctcttcctgatttgtaaatgattgccttctcactatgtcttcacacaatggagagagacattatctcactcatgtctctccttataaggccactaatcccagtcattagggctccaccctcatgacctaattaactctcaaaggccccacctcccaatgtcatcacactggggattgggatctcaacgaatgattttagggggatataaacattcagtctactgcagggaagaagtaaaaatgaggcatttggacctgtaactagatgaattgcaaaatatatctctcccccaaccccagtccccatctgtttctgagatctattcgtacttctgcatataaattgctaggtacaactatattttctatgaaatgaaccatttgaatgagaaatcctaatatatgcattaatgtgtgcatatgttatatatattattctgttatcttaggagatatcttagggttaggagagtgtcacttcagaacaagagcatactgtcccacaaagattaaacacaaaaatgaatgactatgagtgtctctgtgccatcctaagataataagcacctttgaatggatattcattttttcaggcccaaagtcaccatttactgccaagggacaatcatattcctacttatccccaggataccttggataatctgactcattatataaaaatattgttgagagctttagataaaaaggagtcataaacaacaaatctatgaggggagctctctgcaaccttataaacaagaaagtttctgggtcctgaaagagatttttctctttgtattttgataattaaatagttagtgtggtcacaactttgtaataagactgattgtctatggactgaaaatgcttatccataatcagagggtctcagagagacttgatgaagataagcatgaggtatgtaagaaaatttctgtgttgtgaggacagagagtggggagccatttctaacctctagtaaatcatctaattcaaatttttaaaaattctggaccattgtcagagagcctgatgtgataaatcttttcattccccaatttacttttatgagaaatgccatagcatggtagcaaatatatccaataactattgtcagataatgacaaatctctgataccttttgtcacattatagtccattttgctagtttcatatttacaagcaaatggttacctcaaaatatgaaaccctggcatttagagaaatgcagaaattactcacttctctggaattctgcatgacaaattagtactatgctttaactctaataaatgtagctataactgagttttcataaacattcttgagatgttctactagagtagctttattttggcaccctacttttcctgcttaaacaaatgaaaaggttggctgatattgtcaaaatacagcacttctggtgaaccaagagccatttattaaaataatgtattgatgcggtgtcataaaacataaaatcacatttctgcaggaaaaacctattaccctaagccaagattattttattttaaaagaaaaattattgcagttgtggattctgaaagtaatatgatgtggttcagaccctggccttttagaggctaaccaggggcttttaatgcacagtgatatgttatgtaaaagagatatttgtgtaattaacaagtcttcttgtcttcacagaaatgcattaactggaagtagattctggatatcctatgactcctcagaatgactaactgaagaacacaaatatgatttatcccagttgtggaaaggctttagtctaacacataggcaaatgtgacaactaacacacacacacacacacacacacacacacacacac

SEQ ID NO: 51812 - DNA, 1738 bp, Bovine  19866880724372
  misc_feature (1)..(1): n is a, c, g, or t
natggtagcacagagaaggaatgcttaaatttgctctatgaaagtcaggaaaaatttatgtaagaaatagaagttaagtcgtacttgagtaataaatattgcttcagtgaatggatccactagctgtacaagtcagaagtcatcatccttgacccactgtcttcctcttgtctaatttttccttcagtatataataattctgtgtacttttctctagttaagttatccctgtccaagttcaacctactgtcttctcttactggactagagaaatagcctcttaatgagctgacctgcttccactctgcccattctctagttttctatctgcaaccaaaatgaacaagtataaataccatcacctcctcttcctgccttccacaatgttttttcatgtgtattcagataaggcaaaatgtcctcactagaatccacaatacctgggatgcttcagtgctcatcgatgtgtactcttcatttaaacattgcactcttctaacagctagctctgttctggaaaataaaagtacccctctttgtttctattcttctcaaatatgtcaagttctctcccactacaaagtctttgtaatatcatcctctctgcttggtatgatttcctttactcttcccattttagtcaagtggtctcttttttttttttttcatatctcagtttaagcatcactttctgagaagggatttaccttatggatccctccttactaccacctcagatggtaaagaatccatctgcagaatgagagacccggctagataccttggttgggaggatctcttgaagaagggaatggcaatccattacagtattcttgcctggagaatttcatggacagaggagcctggagggttaccagagtgactaacaattttctcaggagaaattcaccttatagacaccgccttactaccaccaccagtgaaagctagattgttttaccaaccattctcaaagatttatattccttttcttcaaaacatttatttttgtgttattacacttgtgaggttgtttaataaatatctttctccatcaggatatcaaatctcatctcacaagagcatgtttttactcactcttgaatctccagcagctagtagattacctgatcccaaatatatgccaaaacaataagtaaactaatagataagatgaattaatagatagacaggtggttgaatgactaaatgcacagataagttagcagatagataaaggacaagaaaagacatccaggcactgcatgaacaaaaacaggagaaaatagcagcttgcgcctttgctttgagtgagcatagagtgcatgggatgtgaaaagatgagtttgggggagcaagttgaagccagactgcaaaattgttgtttgccaagttaagaaactttcatttttcatcctatgggcatttgacagtcagaagaggctattgggaggacaaactataattatatttgattttttaattaagataaccctggcaggaggtgaaggggagacagtactaaatatagggggactatttagttacaaggcagctccagttatgcagaactggcattcaacccagagtgatggagggaagcaaaagtccagaatataaagtatatgggggacatttaggctgacatgtcggattacatgtgggatgagcgaaggtccaaagggtgagggtcaaatgaaggctagggtgtcattacaaaggactggaatagcaagtt

SEQ ID NO: 51813 - DNA, 1338 bp, Bovine  19866880779310
  misc_feature (1)..(1): n is a, c, g, or t
nactaccaagaattatagaagtagtggcttaatcttcttcctatccaaagtcctctttcccaccatatcctcctcaggcagctagtctataagttctgctatactttctactcaatctacctaccttggccagaatcacctacttaagatagtttgtgattacttttaatgaaatcattttgcactgacaatacctaagcttctagaaacatgaatagggcaggaaagtgctagatcaagaaatcacatatttaaaaatatgtaataatattctttttttctgattactagtgaacttagggtatattataaactaaactaagtcatgttgcccctggattgtttttacaataaatttaatttaaaatcttctactttttatttccaattttaaatcttaggtgtattcagggatgtattcagtattgttcaataaacaattattaagccctactagtgtcagacactgtgctaaatgctgagtaacaaacatgacggaggcatgatactggctctttaggaggtcatgccctggtagagaacattaatgtgtaataaaacaagaatcacaaaagtccctatgctttagacatctactttgtgccaggcagagatatttttcatccatttaatcctcacaacatgtatgcaaaggatgtatttattttccatgtgtaacagatgagaaaactgagcttcagtgagctctagtcacttgtttcaggtgacagtaaatggtaaattatggtttaatatctgaattcacattacatgacctgtgttcttacaattatgacacattattctctgggatgagaaaatccacacttttagagcaatatgaaatgagttgatgtgctctcattaattagctctcattaatgtgctgtcattaattagaaataaaatttctacagagtatttttattgcattttgttgttttaagaggaaaaaacagaaattaatttgaattgcttcattttctagagaaactaagatgtgaaggtgaaatacttagcaagcatgtaagatttacagggaagtcatattcatccactacatttaattccgtggtatttgccactgttcaaaatgctttgtacctcctttctgaatccattttaggatttatttttattcctcttaaagagtttatttactgataaaaataatttttatcaaaaatgaaggcttgagcattttgtcagtagacctgattctagataaactttggataattgcagaaaccaaatgcccctttttttaaagaggacagttttccgcattgaaattcaaaacaatataaagaggttttgatggcaattccacagtcattt

SEQ ID NO: 51814 - DNA, 1809 bp, Bovine  19866880789372
  misc_feature (1)..(1): n is a, c, g, or t
natgttatgagtatgacatgaaataatccgagaaaacttttgtcagtagtacttgagatgaatattgaaagaggaagtatgaattaaagtgaaagaagtttgatttcctaaggctactagtacacagtcatatgagtagtaatgagatcaaaatgggtaatactagtttagaaagattttctagcactcaaagaaagatgggggggaggcaaggtaacagactcaaagagaacaaatttgttgctcattatgtttggggattgaaacaggaaatttgaaaatgacatttgaatattgtctggatttcagaaaaatcactggtttaacatattgcaaagatcacaaatggttcttgaatttttaaccagtgaactgtagatgaatccaggctacacacaagaaagggatttttttttaattttttattggaggataattgctttatcctattatggatattaggatatcctgcatcctaatattatgttagtaccatacatcaacaagaatcagccataggtatccatatgttccctccctcttgaatgtccctcccacctccaacaccatcccactcctctaggttgtcacagagtactgggttgagctccctgtgtcacaggtcaaactcccactggctatctattttacacatgtatatggaatctcccggcaatcttgattccagcttgtgcttcttccagcccagcgtctctcatgatgtactctgcatataagttaaatgagcagggtgacaatatacagccttgacatactccttttcctatttggaaccagggaggcctggcgtgatgcgattcatggggtcgcaaagagttggacacgactgagcgactgaactgaactaatacggaatctagaaagatggtactgaccaacttgtttgcagggcagcaaggaagacacagacttagagaacagactgtggacccagtgggagaatgagaggatgggaggaattgagagagtagcatggaagggaatttttgaacatagtttaaaaacaattcaccatggaagtattgaagcagatcaagatctgcttttgcatttatatatactatgaaaatcttttaaaaagtcaaagatgcaaaaagaatatccaagcacaatcactaatttctgttacaactgaaggaagctcaagaatgaacaacacacacataccacacaatagcatgatgagactttttcatcttgacaaatggtttgaatcaacaaaaattataaccaagccaaggatttacataagaataagtatggttctggcacaacaggcaacacttctttcaatcattttttttttttttttacaaacacacttaggttccttcttcatatacaaagacatgcactcagtttaacattgttacatatgtaggctagtccaagctctgtgattgtagatgtgtgaaacctggaagacagaaaaattcactaacataagtcatcttcaaaagaacagcagaagaaactctacaaataccaattgaacaaactctggcggttgtgaaatcatatccaggaaagcaacaggctgttagttaagttttggcaagtagaagtgaggtatctgttttgatcaaagcttccgtgatacctgagaaacaaactgacagacttacaaacaaaagactctacaagcagcaacaaaacaccgaggtctaaggaagcacacagtcattcaaggattgattgctgaagcctacggttgccgaatctctctttctgggattaatgcccataaagatagcaacaccgtcatcagtgtcatcttcaaacaaaaga

SEQ ID NO: 51815 - DNA, 1196 bp, Bovine  19866880828463
  misc_feature (1)..(1): n is a, c, g, or t
nagctttttaacaactttaaactattgtcataatgatgtggccatgcccttgggcttcaatctgatacagccaccacactctatggttagagcctcttagaatggtcctgaaatgcttcttagagttccaatctgaaaacttctgagaagaaatttgttatttaatatatttctttcatctagcatcagatatttataaataattggagttaggaaaataagcatcagcaccaatataatagcaggcattttatttttttaataaatattctcttaaatccacaccttgagaattgcctaacttagtgagattacatggctttgatatagagtgttataaaatataattgcattaacataatatcactaaactattcccttaatcactaggttaagggaaatagtaaaaaagaagtgtagaaagaagataacttgagaagactataaagaaaacaaggggggaaaatgtagataaatagtactgaaaccaagaagaaaggaatgggaaaaaaaaaaagaaaattatcatatggtaaagattgcagattactatagcactctgctgagctgaaatacagcattataacaccaagatgttagtggactgcagttgtatgattccatttttttaaaaaggtcaaaatcattatgtgagtttcaaaatatgggatataacttgtaggttgtgggtcattttggctgggtgaagggggtctaaccttatcagagactgaaatagcaaaggttataaagcatacaatttcataaaataaattaaaatgtcattgctattttggggattcactgttagattattgttacttttataagtcagtgttggcctctgaatcttctcctatatgactggaagcaaatctataaagtcttggttgattttgttaaagcgtttttggtggtaaagaatgatgttaatgacaaaaattatatttttcataaaatattgggttaacaaaaatactgttacacttcctataaaatagcagatagttttcttaacatcagatttgtgggtgctttcaatctcaattctatgtatgaatcttcacagagtcctaacagtttagcagtgctaataagagttgaacaactacacgaggctcatcaggtcaagcgcttactccccttaatgcagccttaaacaaagttatcattatcatttccagtaagtgacaaac

SEQ ID NO: 51816 - DNA, 1147 bp, Bovine  19866880849953
  misc_feature (1)..(1): n is a, c, g, or t
naactcctgtctctacctgtcatttcagcatttgcatcaaaactttgaaactcgggtgtgcacaagcaggatatattccaacagagctctccaattttcagggacttcattccctttagacttcagaattgttctaaagtgtctgtaaatgttgtcacaaaatctaaggaaaactataaacattaagaagttcatgtgcattatactgactgaaagaaatgacaacatccaattattatctccacaatatcagtaatgaatagaatgaaaactaaaccagcatcatcctcattttctcatgctctgctaggcacacacagaaaccctgctgctatgctttgtctctttccccaccccttcattttctccgcctgtgatagacatatctttatggattaacaagtacgaagatcatgtcatttcctgacataaatgataatatacctttgctcctagatatgtttagacaaaaaataaataccaccccccgccccccaacccccgaaaagcctcagattgagttgttggctaaacagagcttcttaattaaaatatcacagtgaaatgttttctggtgatgtgaaagcttaaaggcagtgcttcacttgcaaaagatgagggaaagagattgcaaaccccttccagccctgcaactttttaaatagattcactacaatgtgaccagttagccttaatgtaactgatagtgaaaacttggcctctgtgcactggtgccaaatccaatctcatgccaagttgagtcagtcatgtccagctccttgcgaacccatggactgtggtccaccaggctcctttgtccatggggattctccaggcaggaatactagagtaggttgctatgccctcctccaggggatcttccccacccagggactgaaggcacatctcctgcagctcctggactgcagacagattctttacctctgagccactggggaagccaaactcagagacaaagatttgggtgaggtaggaaagaataacttctttactttcctagacaaaaaggaaaatatcaggctcatgcctcagaaactttgtgttccaactagggaggatttcagatcagatcagtcgctcagtcgtgtccgactctttgcgaccccatgaatcgaagcacgccagg

SEQ ID NO: 51817 - DNA, 1356 bp, Bovine  19866880888554
  misc_feature (1)..(1): n is a, c, g, or t
nctacttctgctttattgactacactaaagccttttactgtgtgaatcacagcaaactgtggaaaattcttcaagagatgggaataccagacatcttacctgcctcctgtgaaacctatgtgcaggtcaaaaagcaacagttagaactagacatgggacaacaaactggttcaaattgggaaaggagtacatcaaggctatatactgttaccctgctttcttaatttatatgccgagtgcatcataagaaatgctggactggatgaagcaaagctggaatcaagattgccagaactaccaacaacctcagatatgcagatgacaccacctttatggcagaaagcaaaaaggaactaaagagcctctttatgaaagtgaaagaggagggtgaaaaaactggcttaaatctcaacattcaaaaactaagatcctggcatctggtcccatcacttcatggcaaatagatggggaaacaatggaaacagtgacagactttattttcttgggctccaaaatcactgcagatggtgactgcagccatgaaatttaaagatgcttgctccttggaagaaaagctgtgaccaacctgctgctgctgctgctgctgctaagttgcttcagtcgtgtctgactctgtgcgaccccagagacggcagcccaccgtccctgtgattctccaggcaagaacactgggagtgggttgccatttccttctccaatgcatgaaagtgaaaagtgaaagtgaattcgctcagttgtgtctgactcttcgcgaccccatggactgcagcccaccaggctcaacttgaaaactaggcctcatcaatggaatgcagagcactgacaaagcaaagcagctgttcgtggtgaattgaaacagataaagaagcaaagatgaacatagattattctttcacaaatcttggttgtaatgggaagaatgagcacgctttacctaagtgtttgaatgatgatgaaacaggatcactgtttcattcctaactctctgtatagattcaagggtgcaattaccattttttacttccgctgctgaaattgttgccattttcattttacattacttattagaacatgggagtagtgtccaagcagatggttgtcagtaaactgatgactacagttatggattagtgtccaaatacaattctcaaaacttggtacactgtgtagtttcctgaatgtgactgccaaaataaatctggcctgcaaaataattttgaggactttcccctctcaaatttttttcagtattttaagctaaagatagcctttaaaagctgagactttgcacatatagacaaaccacttatcgcgtttgggaactttcttgatgag

SEQ ID NO: 51818 - DNA, 950 bp, Bovine  19866880915677
  misc_feature (1)..(1): n is a, c, g, or t
nacccagggatcgaacccggttctcctgcattgcaggcagatgctttaccatctgagccaccagggaagcccttcagagtccttatagttatatcttaaattatttgagtattgttttataagaaatcagacctttggaaagacatccatgtatcacatccatgatacatccatatgtatcacacctagctaaattcaactcacaatatgagcttcaactgtcaattgtgaatacatttattcattatcaatcaatttgccaaagtgccagttcataaaaatcatagaaattggtattttcttggggctgcataaagcttcaaattatatttggcaatggctcattctagaggaaaactttagtaatgttctattattgccacatattcctgtgcccatgttagaaacacctcagtatctttccctttctgccaccacctcatacctacttcctccagaattaaaacactctaggccatgttataaagacctttgctgtatctcactaagacttctttcctatgtggccactaagttttcctgaaaacacaccttccttagagtctccatataaacttctcaagggaagtctacttggcaggaataaggaaacaaacaaaactgtataataaggcaaaggaggccagaggaacactgttctgtctcaacagcagttggcatttctgtgaatcgtccatctcactgagtttataaaccatgttgaataccagacttcctgctggtcctaaagaaataattattactgagaataataatgagactttatcaacactattaagatgtatttggttaagcagttaaattgactttggagatgaaaggaggaaaaaagaattaaagtgtctgacacttttaaaagcaaataacaagaagcacaaaggtaaacttttgactgtcagggaaagaagtttcctaggaatcatctctgt

SEQ ID NO: 51819 - DNA, 765 bp, Bovine  19866880919716
  misc_feature (1)..(1): n is a, c, g, or t
ntaaacttgtaactgaaaaacatactgtggtaacatggaatgtaccaaaaaaattaaaaaacaataacaacaaataattattcctttcttatatactcaccttcatagacctcttatccctttccatgttataacaaacatacagtgaagctgactgcaagtgaagtgttagttgctcagttgtgtctgactcttggcaaccccatggactgtacatgatcctgccaggcaactagagtggatagccaatctcttctccagaggatcttcccaacacagggataaaacccaggtctcctgcattgcaggcaaattctttactgtctgagccatgagggataaactgaagccatgacttttcaatataaaatcaatcccaatggtttctaaactacgtgttagaaaagaattctccaaagtggaccaagagtctatgataatattgagtaatttttctcagataagtacatcatgcccctatctactcagcatttggtatatataaatttatcttatttgacccttctatcatctaattttttagaatatgtaatttatgatataaactatttggataaacctgtgaaaatgacagctgatcctgttttaagaaacgtgtcactctgtctcacaagaagtcatgcaatactgagacctaatgatggttttacaaccgttttccagcatatttttacattgcatgcattttcacttccagccatgaacccagtacttaacaagacataaaattaataattcagctga

SEQ ID NO: 51820 - DNA, 771 bp, Bovine  19866880944573
  misc_feature (1)..(1): n is a, c, g, or t
nctgttctattttcttttgcagacttttgcaacggaacttttcaagaagatgctgggagaaaatcagaaatagataaaagtctaggaagcaatttttcaaattagctccccctctccctttaatttcaagaagaggtgcagttcttagaagtgttccttctttgacagatcattcagaggcagagacatgggaatcctaggcatcaacaaggtcactgccaagttcattccagtctcctggagtactacaggctgagagcaaaagaatgaaggcccagaaacagtttatgagataagctgccaggactaaagtcagggtcagggcttctggaaacttaaaagcagacacatatcaccagaagtatcaccattagcacagctcactgatgttctcatattggtctccttatgtctggacacattttttctcttgagcacaaggaacaagttgcacattccagcagcttcctgtagccagatttgcctgatttatacagacaccgtttacagaatccctgtcaccttttcagtctcctggcttctagctttgacacccatcttcccctggctctccctgcttcacactcaacaaatcccttatattccagacatcacaataaaaatcatggacattataaatccattttcagtaacacctggtataagaccttccttattgcaaaaagtgtgcaactttccccaagttccttgaaatctattgtatacctggcctcagctctccttataccaagagttttagatatcctccat

SEQ ID NO: 51821 - DNA, 1154 bp, Bovine  19866880947851
  misc_feature (1)..(1): n is a, c, g, or t
nctgtgaatggtctagtcgtggcctggagtaatcggaaaggttaaatttgtttttgatttactctgtcttagcaagacccaacatttatgataaaattttaaaggtgttcgttcaatgaagattacttcaacctcatcattgataatgaggctttatttcttaaagcaatacacctttttccttgtttatgccagataaatcaagtattaatttaatctaaaaaagagaatgaattctgaatgagaaaggggaggtttagaaattcgagtttcaggggtataataacttttgatttatattcaaactttgtgtggaaatgtaaaatttatccttgtcctgggaaatgaagtaaagtgcaatttgggagtaattctgactaaaagtctgagtttataaactccaagtgctgcaaaactgacagaatctgtgagttaatatttatcctgtaccttgctaccttctgatgacaagtaccacacaaatatcaagcacaatgaactctgtggaattttcagttctgagtttgctaacagcaaactgctcagaagcttattataaaaagtgttccttttgtagtaacaatagcactggcttatgctgatgtttgaattcattagtaaaatcacttttcttacctgtcatctttctcagagtcttcctgagttttaatatgatcaatgaaatggactattgtttggtctaaagtattctggcagaaacttatgtctgagtaaccagagtgaaaagtatacttgaagtcctatcaggtgaattctttacagagagtatataccatctaatattgttacacaaaactcaaggttttgccttgacagtggggcctgactccagtggcacctgccccttggaggtgggtctctaaagcatgcagtctacctttatctgtcttccgtgggcagggaaagccagctctaaatggtcttcactagctggggctattgggagtatggtgttatctactttttttttggtttgttttgtttaactggaagataatccactgttttgaaggcaagatactgcacagaaaagctttcttacttctggaacttctggaacccttgcattaagttatggtctattatatatatttagaaatctaacattttaatgatcacaaatctacagagta

SEQ ID NO: 51822 - DNA, 1706 bp, Bovine  19866880987527
  misc_feature (1)..(1): n is a, c, g, or t
ntagaattcatatttcaagacacgtttttgggttatgctggcctaatggaataaatacaacttggtttttaggcacgctgctgctactgctaagttgcttcagtcgtgtccgactctgtgtgaccccatggactgcagcttaccaggtcctccatccatgggatttttccaggcaagaggactggagtgggttgccattgccttctttagtcatgattctggtataaaataatagtaagacttttattgtcactccatattttgttcctgtctcgtactttttaaattctctagtctctagattccaagtctagagattctctttggagagtttttcatttttactcatatcagtcttaaagttatttccagaattctttgtgttctttcatagttaaaataattcttcagatttttccactgattcatcaaacatttccatcttattttgcataaagtgtactatatttttggaagtatataaatatactagttacatggagtaagttagtaagcagtatttctttggtcaatttgttgttttctattaaaaaagagaaaatggtgaaacaacccagacaagagatacaattatatgacttttgtcatttcactgtctctagcagagaaaagtgttcattttgttgctttttattttctgtagaggtattattaggcctttgcctcaaaggtgtaatatctgaataataagatctcctttgacttatatctgacctctgcatcctactcattttttactgagagtcagctaactaggctgccagatattgtgtctcttaggaaatttttccccatcctgcagtaaactttcataaggaaaaggcaaataaaatcaaattttcttgtggaatgcttaatacaagtaacatattatagcacttttcccccagaaatttatcagttattgatataaacatattatcctgtcttgatttaaactgttaattgttctcaatagttctatttcttgttgttcagttgctcaattgtgtctgactctgtgcaaccccatggactgcagcacaccaggcttccctgtccttcaccatctcctgaagcttgctcaaactcacgttcattgattcgatgacgccatccaaccatctcatcctctgttgtcctcttctcctgccttcaatctttcccagaatcaagaatcttttccagtgagccagctcttcacatcaggtggccaaaagtatcggagcttcagtgtcagcaacagtccttccagtgaaatgtcagaactgatttcctttaggattgactggtttgatctcctcacagttcaagggactctctagagtcttctccaaaaccacagttcaaaggcaacaattgtttggtcttcagcctttttattgtctagctctcacatccataagtggactggaaaaaccatagctctgactatacggatctttgtaggcaaagtcatgtctctgccttttaatacgctgtctaggtttgtcattgctttatttagtttaggctaactagtttaggctgaaatcattttgaccagacttctttaaagcagaaagagggaatactttcttatcctaaaaagaactacttctcacatagctttaattttttgtcttcaaatgtgaatgatcaaagtaattagtgatcttaaatgcttcagtagttcatcatggatattaaaaagcaataggtcagaa

SEQ ID NO: 51823 - DNA, 667 bp, Bovine  19866881009460
  misc_feature (1)..(1): n is a, c, g, or t
nttttatgaaaaaatagcctgtgatattattgtgtctaataatgagggatttttatcagctttggaagagaccagaaactgatgggtaatgggtagagcacccttaacacagccctgtgagcacagaattaatcatctaccactcacaactcttagccacttccacaactcactctgacaaatattaccacaaaaccacatgctcctccaattgcttgacagaaactcagcttgaaaaagtttccttcagtgtagattttcataatgtttccagctagtgatagaagtaaatgctgtcatagtctgggtgggcttggcactcaaagtctttgatgcaagaaaatgaaggtgtgattggatggccatgccccaggtctctggtgagtgcctgggacaggccaccaagtaagggtccatagttttctgcagggaagaattcaagagtgagacagtaaagtgaaagcgttagttagagagagacacactccatagacagtatgtgggatatctcagaagacaagaggtaggccccaaacatggggtggttaatttggggggctgggtaatctcataggctaagaagtgggaggaatagtctaactatcttggagaaggggtgggggatttctaggaattgggacaccacccactttttggccttttatgg

SEQ ID NO: 51824 - DNA, 712 bp, Bovine  19866881010160
  misc_feature (1)..(1): n is a, c, g, or t
natgatttcctggaaatagctgtacttttttttttttatgatttgtgtgtgtgtgtgtgtgcgccacttttaagctattgctttcagtttacttcaatgcagtcactgaagtagcttagaaagaaatctttgatatgccagatcaaccaaaaattttaaaatatccttttgtgcctccatttataatgcaaatagtaagttggcattttgggttcatttcaccatcgtctctgaagtgggttaacatacacagagttaggaagtgaagggagtcccacaagagagcacatctttgatagttcaataatagtaaaaaaaaatgtatttaggtcttttctaaataccttttacttcctaagatataaaaaacgagaggaagagatctaagaagaataaattgtggttgccctctatgttagctgaatgactaaagatattgttctatgaattacccactacttaaatattcctaagtctcgcctttatgagctcataaaaaagactttgcttatgtgtctaggaaagccagtatctttatatactgtcagaatagaactaacatactgtttcaatataagtttgaaaaccagcaaatattttgttatataaagcaagctgggcaatcaccttaaacccatgtttacattttagttttatcatatataaacattccctcgctgaaatagtttaaaaaagtaggaaccgatatttg

SEQ ID NO: 51825 - DNA, 833 bp, Bovine  19866881016444
  misc_feature (1)..(1): n is a, c, g, or t
natgttgttaaggtcatttaaaaaatccttcaaatttaaattccatttagaatagcatgttagtagatgcaaaataaattacatgagaatactgaacaaatatgaaattcaaaagacagatatttcaaaactttttggaaagcacttgaagggaagaaagaagggaagtcggtaggagaaaggttgattcaaatatttcccccctttggggaaacagctgcaccaccaatgttctctcctcattccagaatcgtgtacttatttcagagtatggaaccacttgtagaattttttccctatgcttaacagtttaagcaagtagattataaccctcactaggtcatcccgtattctttgtttattttataattttctctaagcaccttaaatattgattaatctttctattccattcggagacaactaaactaaattaatacaagttataatcttactctggctaatcatcagaccttaaatctctaatatatttaaacatttctaagctattttctatataacaagacctcttcagatcttttatgcgtaagagtggtatgaataaatagattaaattataactacattatgaaatttcattttcacacagtcttatgaatgggataaagcagatttattattttcagttatagacgataaatctgaaggcacatagaggttaacacacttgcctgagtttcttcagtttattagtggaaagatgagtctagaacccaggtactgtaatacctattcacactttactcccttgatgatggcctgcttaatactctgttttacactctagtcttggggacaccataaaacagaaa

SEQ ID NO: 51826 - DNA, 1058 bp, Bovine  19866881038104
  misc_feature (1)..(1): n is a, c, g, or t
ntttcactattcagtgatagagaactgaagaattattcttaacagacctgattcacagtgtaatttctttgttttttctttttatgagtgcaggattgccgataaaaatgcagccaagcaacaggcattttggagtctgttcaggtgtggcacctgtgtgaatgtgtgaactcacagtccggagtcagagacctgcattgcaggatgtgtttagaccatggcagacaaatatatctcagatacattagggagttgatcatatatactatgagttgtgagccagaaaatctggcttctggtcaagtatttaccattacctctacgttctccattagtctctaaaacttgtgtgctacaatttttataattaaaaaagggttgcagtctatggtttctcaagctccttaattctttaatagctatatgatgatactgaatgttatatgtcttcacagtaaatgctaataaaaggagaagataaactatgaaataggggagaagaggcaagaagcaactacttttttattgaaaaaaacatattacatattatgcataatgatagaaaggggaataaaggaaataatagaccaattacttttcttagtgagcaaatgtttgcagtttttaagtttatttctaagttacaggccttccttcataagctttatgtatgacatgaaactcctaacaaatacagtttgcctttcttttgttattatttttataagatcaagaatatttattattaatattaatacattagtggacatttttattcaaaggtttaaaaagtacactaaagtattatctgagctagattcattttaggagaaatcataaacacagagaaaccataatcctggtgtaatgtaggaatctaattaagactaatgaggcaacattaaatttaatgtatgatgcattttatatgtctcaccattagagctgcagcaagctgttcatcagagtcgatctttggtgactagccccctacaggcatccttcagaaacctaggtttaggctggcattgctgcaaagaagtcaacacaaaagcaac

SEQ ID NO: 51827 - DNA, 2646 bp, Bovine  19866881114934
  misc_feature (1)..(1): n is a, c, g, or t
nttcgtgatcctttactgatggtcctaaaatcaacccagaagtccaaaaagtagtgctttctctttggagtcaaccagacaagtttcatcacagtgacagaatcgaagcccttcctgatctgtgtatatggaaagaactaaattcaccaaatttcactgaaatacttgacaatcagtttgaaaggatactcccccaagagcctttttactcatattgaaacactaaatttctatgacagtgatactggtgtcaaaatatcatgaaacacaggtaaaagtattgagtgtgatacgtgtttgtacagtatttctactttccatatatcacttcatattaataggcaaggtcgaaagggactgctgttggttctccatattcaagagagaaattgagaactgaaattgctaaatacccttttatatttcacccagtaaatgacagtggaactgagagaaacaagactggcctttcagattaatgcattccaaacttcctctcatgaaatgggctgtagtccatcacacttaacctacactttccacacctccaggaggagatatccacagatatacctatttactttggcgtgaactcaaagaaattagtttgcaaatctggtcttttctttgtgcattaactaatttctcctttccacacatacacttcaagaacatcaggtagatccatttacttccactccttcatcccactgctcctcctaaagtgacatattaattatggctcatttgaaattttctcttacaaatgtaggctcagatttcaacacctaaacaaattatatatacagcgtgcaagcctgtttgttccaggtttcttaaaaggagaaaatgaatgcagtgtattaatcatcaaactgatgtccctgattgaaaaataaattatttaaatgagtaacactttgggttttttttttaatatactactttctagaaaatctcctcaacatgtaaggtgaaaagaatgaaaaaaatcactactaccacagtggatacatgaacaaaattaaagccatgaataggctacatgatcatgctcagtccaaaatgttgggcattattgccattggttctgtagttaataatcaacttttatggatggtactccaaattagttttaagaagttctaaaaattcagcttgactactacagatttaaatgaattttattcttttcagagcacaaaaaacaaaggcaacccctaatgtagatttattaaaaaacaaaaatgcttatgtttctaaatacatggagtagggaagacattccttttctctcaatgtaatggcaatgaatgtggatcatctaaaacaaagcaacaagcttaaatggaaggcaacccacttaatgattttaagatatatatttgagatataactcaaatgccattctattcatggggaacacatgtatacctgtggcggattcattttgatatttggcaaaactaatacaattttgtaaagtttaaaaaaataaaataaaataaaaaataaataaagtaaacaattgattggtttttagtgtatttacaaatatgtgcaacctcatcacaactttagaacatttccatcacctcacaaagaaacctcattctctttaggtaccattactaactcctccctccctctggctccaagtgaattactactttctgtctctatagattagcctattctgcatatttcataaaaatgagagtatatgcagtctttgtgattgatgtctctcacctagtataatatttttcaaggctacttggaagcatgtatcagtactttatagattcatttttatggttgaataatattccacagcagagttatatcatatgtgtttatccatccagcagctgttaaatgtttgaactgtttctaccttttggctattataaataatggtatcataaatattaatgtacacctttttctgtggacatatgctttcacttcttgtaattagaaatattgggtaatatgtaactctatatttaactatttaaggaacttccagacagttttccaaagtagctgtaccaatttatattgccatgaagagtgcatgagcattccaatttctgcacattttcaccaacaattattatctggctttttgattatagccattctagtgagtgtgaagtggtagttcattgtggttttgattcgtttctctgatgacttaagataccaagcatttttgtatgtttattggctatttgcatatttctttggagaatgtctatttggctcctttgacaatttttcagttgaggtctttttcttattgagttgtaagagtcttatatattccagattgttgttgctgttcagtctctaagtcatgtccaactctttggaacccatggactgcaacacgccaggttcccctgtccttcactgtctcccagagtttgctcaaattcatgttcattgagttggtaatgccatctaaccatttcatcctcttgcaccttttgcttttaatctttcccagcatcagggtcttttccaatgagtcaattcttcgcatcaggtggccaaagtattggagcttcagcttcagcatcattcctttcaatgaatattcagagttgatttcctttaggattgactgggtttgatctc

SEQ ID NO: 51828 - DNA, 690 bp, Bovine  19866881118363
  misc_feature (1)..(1): n is a, c, g, or t
ntaatactgaagaagctgaaactgagtggttctatgaagacctacaagacctagaattaacacccaaaaaagatttcattataggggactggaatgcaaaagtaggaagtcaagagatacctggagtaacaggcacatttggccttggagtacaaaatgaagcagggaaaaggctaacagagttttgccaagagatcacactggttatagcaaacaccctcttccagcaacacaagagaagactctacacaggaacgttgccaatgtctattatatagtttaagttctcaggactactatgcagaattactttcttctgtataccctgatggcatgataaaatcgcatattcaaaactggcaagtcaattttgctaaggaaatttcaaaactaaactttttgataagttttttctctatcaacctcatacatttattgagcttcagttttggtaatatcagaatctattgattcacaagataaatattgatctgacctcaccttcacctcagtttatatttacttctgaagtcaataaatctagaaactgatctgacagcagtcaatattagtttaaaattcttaaaatagcagctttactgtaaggtaataattcagcattttatagattctgcctcaaagaaataaaaaggcaatgtaacttacaaatttcctagataaaactatttt

SEQ ID NO: 51829 - DNA, 1839 bp, Bovine  19866881129614
  misc_feature (1)..(1): n is a, c, g, or t
ntcccttaggaaaaaagattgaagatttatagaaggaagtattttattacttttaaaactgcagttttaaagaaaatcaaagaaaaagaaggaaaattatatcaaactataaatgcctttttatgactaacagttttgtaacactgaaatttatgaaaggagaagggaataaagcagaacatagaaagatttttcaatgagctcacagaaattgcaactcctatatcacaaattgcaaactcctaaaaaattaaacctgttgatgtgactacaaactgaatggtgttaaattcattagatgcttgaggatattatggatttctcctggaaaactttttgggttttttttttgcttaaactctcaagctacttgttccaatttttgacaagttaggattctaaacctttacaacaccaatgacaacaaaattctgtgttcatttaatttctttctcaaactttcagtgatttgttaatgttgaacaggtaactgacaacataattaattcctaatattccactgtcataaaacagagtttcctaaagagtaaaactagagtgtagagtaaaggaagtctctacatacacacaaatttctgacatgttgttgaaaggaagaaaagtgaattgattttcccccagatagtctctttttatgttcatccctagcatttatgtagcataatattaatgacaatcttataaataagatgcaaactataatgacttattaataaccactttttgtaacacttctaactactgaaaaatatcaaagtattacctttattaagatgttcttctacaggaaaaatttgttgctacatttttattacaataacatcatacacaattcttcagattgcaagtcatatagtaataatatttaatatcaaagatgatggatcccagaatggaattccagttcctctaattcctgagtctaccctctaagttttactcaaataactcaagtaattaaactttcttcccagtattttcgaacatttaataagtgaactactaaagttatccagtggagaaggaaatggtgaaccactccagtattcttgcctgaaaaaccccatagacatcattgcctgcaggctcacagtgcatggatagcaagagtcaggcacaatttagtgactaaacaacaacaacaatatcatctggaataatttcagtgatctggacctcagtaccacaatttagcaatgccagatattagaaagtttatttcaattatcttcaaccaaatttcacttctacacattatatcctcttgttctgtcttgtctttacctttttttgttgtcgtcttctgattttcttctccagtacattacactcgcattgtactattatggcttttgtaaagcatctaatttcacactgaacatcctcaactgtagtgcagtccttggaaggatatgttgccaagtcctctcactacctgttttcgtttccttaggtccactgttcttcaatgtccctctttaaaagggtgcctcaattgggcacaaccctccataaggaggtaatcaccaagaatggtaagcctcctgattttcagctccaatctttttcacctcaaagctctcacattatctgaaaagccatggcaattagattatgggattagctagaagatgtatcatttgccagacagtatcaaatagtattcctcaaagggctcctcttttttttctttttggattattattcagccaaagtgtattcagtaatagttttggataggaaagaaatgtatgagggaaattctcagagccaagcgtgagaaagaaaggaggctcttcgtgatcctttactgatggt

SEQ ID NO: 51830 - DNA, 1204 bp, Bovine  19866881136270
  misc_feature (1)..(1): n is a, c, g, or t
nccttttgagctaattcctagagataaaaaatgttttaagagttagaaaaaaagggagaaaagcaaaaactgcagtatgctaagtcacttcagtcgtgtctgattctgtgtgaccccatagacggcagcccaccaggctcccccatccctgggattctccaggcaagaacactggagtgggttgcaatttccttctccaatgcatgaaagtgaaaagtgaaagtgaagtctctcagtcgtatccgaccctcagggaccccatggactgcagccttccaggctcctccatccatgggattttccaggcaagagtactggagtgggggtgccattgccttctccgaaaactgcagtagccatgaaaaactggttaagaagccttgcatcataaaaagaagagataaaatgaataaagacagtctatataaaaggatataaaatatacttgcctattgaaatttcagtgtccttttcaacacaatatgggatttaatgttgaattaagttacaaaacatacctggagcagaaggaagcactagcaatgctttatttctttgataggagttaaaaaatcaaatttctgtactgatcaagcaggaaatatattacagtgtgggtgaaacagactgggttagaggtggaaggcagccagtaaagggcacccttcccatagaaacaggcagcctctccccaggacaagctgactagtgccttgagaggaagagaactcaatctaagatcattctgttcatcaaaggaagctgaaaatctggcttttaattaatatttcccaaaatgttaaagagacttatagtcaaactatacacctttcacacttgggacaggtctaccaatcctgctctggggttttcaatagtccatgtcaaagagaagccagaatctttcattctaagaatcctgaagataagactattcatgcttccagaagctcctacattacacttgaattccttctgtaagatggtattccctctttccatgaagccaattctgagaactattttagaaaaggccactccattttggaaagcgctgaagcttggtatatttcttacacaagatttccaatccctgacaaataattcaatggtgcataatgaaaacagtgctctgatggggcctgtgcttctacaattagacattagtggccatatcaggaagagaaatacctaagatggcaca

SEQ ID NO: 51831 - DNA, 1570 bp, Bovine  19866881137672
  misc_feature (1)..(1): n is a, c, g, or t
ntacaattgctatgtgtgcgtttaagccttcctttcatgtagcaatccattcaacaagtaatccattcaaaaagtaaaattgggaccacatccagaaataagggactcagtactatggcttctttgacttcttggtgcattttattatttgaagtaaacacttaatgtgtgccatccactaacctatactgttagatatcacttaatgtggagaaggatttgctttcagcagtcactttgtagttattcagcctcgattcagtttactcctatttctcttgccagttatatgagtttgggtgaatcacttaatttgattgtcagtttcctcaactgcaaaatgggtgggacaatggcacctcctagggctgctatgttgattgaatatgacattcattgtaacatcctgggcatattacagcatagagtattcatcaaaatttagctatcctaggagtatcatgtctatatatcttatttcatgtattcaaaataatgcagatgggcattaaaaactgcaaagcttcttacaagtgtgggtggtcatttttaatagtatctggaatggggactatttctaatacctcattaaattcacaggtctaggggaaaacctgtgtagttggtaggtgatcaataaaggtttgctgttgcatatgataatatgtcaatgagacaccatacaggccccatttagtgctgaacaaactgagtccttaaggtgtgggtcagccagtaaagtgctcaatcacacccttggcaagtgtgcactagcatctcatagagtttgttttcctttgtttatttcttcacagccttttatatgccaataacatcctactctgccactaaagacttttgattcccagcaaagagtttgattcttttccaaaggacaaacacacgcagggttcttttcatggtttggaacacatgctggatattatagcaagttgcaagggttaggcccagatggatgggagggtcatgcactgagttgattcacctctgttaagaagaactgtggagtatgctgggatactaaagacatcattctgtagactcttgttgcatgctgattttagaggtggcagccatggagatgcacagcttagagcttcaaaagagcccattgcctggagcagagctgactggaagtcctagctgtccttccatgagaatgctgaggccatgctcctctggctgctcccacaaaggctggtatggccagtgttgactgatttcctaagactcaagacatcttcctttgacttggctgaaagttcctcagaactgtcctgtggtctgagggccttactactgaaacccttcctttcctctctttcacaggtattagaccagacttgtgatctgaaatctcttcccatctactcctgttcccttcccttttattcacaagaaaagtttaactcctcctccatcaaattttgcatgtcacatcctgtcctagctttctaggaacagtgacatagttggtgatatgctaccgtattggaaatacagccccattctgtatgagtgccatactggcccagtagaagctttccta

SEQ ID NO: 51832 - DNA, 946 bp, Bovine  19866881146245
  misc_feature (1)..(1): n is a, c, g, or t
nattgggaggaactgcaccaaaacatttctgtggctatttttgagtggtaagaggtgttttgttttgttttttaatattactttttcagttaaatgtactaatattcattactactttaacaaaatgattatttatattttaaaaaataagctttgtaatatgatccaaagaaagaaaaatatgatgaaagaatgcattccatttaattaaatctaaaattaatacactgtgactttttaatcaaagtttatcattctcttacaccaactgaagaaagtaaacatccttctttatatactcttctttctcatagaagccaaactccagtttttgacctggaattcatagtctattcacctgaacataatgaaaaaggacaatttggacttaagaacaacaaaaaatcaatttgcctatatcagcaaggaaatggttgctgtatagttttacttcgaagattttgaaatgtattagtaatgcagagcttaaattgatatagaccgggacagataacaaattcaactcttctcttccttggaattcacaaagctttaatacagataataaaagtaaaaataacacagaatattttccctaagcataagcatgatagtgcatgaatgtatgctcagtagagtctgactctgcaaacccattggctgtagcccgccaggctcctgtgtccatggaattttccaggcaagaatactggagtggttgccatttcccactcaagatcttccggatgcagggatctaatcagagtcttttgcatctcctgcattggcgggtgaatttttaccaccactgtgccacctgagaatccctaagcaaaatagtacaacccttttattcaattattgctggtatcttgctgctactgctaagtcgcttcagtcgtgtccaactctgtgagacccatagacggcagcccgccaggcttcc

SEQ ID NO: 51833 - DNA, 809 bp, Bovine  19866881159829
  misc_feature (1)..(1): n is a, c, g, or t
ntgtttacttaatatttgttatcttgacaaaataatattatgtattaatattaatgtaattttagttaattaagaatgataaaatttatagttttatttaagaattataatataatatagttgaatagaattagagtggtcctgaattatttaaaaatacaaacaggatataagaaagccaatttctcagttaagtttctaccctacgaaacacgcgtcttcacatagtcttgcgtgtcttaaattttttgtaggcttagaatatcacaagcaaagagcttgcaatgatttgctcaaggcctattctggtgacgttaagaaatgggagagagagattttccttagcttacctattccccatatcttatcttctcaaggctgggctctatgtctgccaaggttacaactggctgatcagaatgagttaccatgttgatataaaggacagtcctcaaggcctttcttttctttcagggtaaagtacagtttaatggtgacctccaaaagatgaagatcttggttttctttttctaacctaaatatactaggtcttaagaattttagaatgtgtaagagcaaaccactggagaatgtattttgggtgtgtgactacttttgttagccctgagtcatagcagaggcagtcacatctactaatcacattggggtgagcctgtggttttccctctgatgatatcagagcatttactattgcttggaaacacatcctaattcctacagaaactggagtttttgataactggatcaaaagacatgtgtgatttctgcaaaatgtctagtcctctatt

SEQ ID NO: 51834 - DNA, 1019 bp, Bovine  19866881204182
  misc_feature (1)..(1): n is a, c, g, or t
ngaaaaggtttctttcccttacatttatatattgataattatatattagcacatattgctaatactgaaagacctaataataggaagtgggggtacacaggtgcaggagcagaaggaagagggaagaaggtccagaaaagaaaaaaataagcatctttcacaagatcaacagcagaggctgtgaatcataaatgacactgaatggactttaatttctaaggctattctttgatgtgaagaaaaataattacaagctgaaagatactggcaagtattacactcaatataaagataaatacattagccataaataaatctttatataaaagctcacactcagggcgggctagcaaccagcaaccatacattgtgtcagctacagccggccactaaacaaagggaatgaaagtttgctagtaatgttaaaatcttgtaaaatatttcatagttgcctcatgctttttttcctctttactgtacttaaagggggcatgtgagaggtagcgatagttccaaaggtccaggccagaagtgacaaaaattaaactctaagatctgttcttaaaatattggatgtactttactaatttgatttacctaaatttcatcttttacttacactagagttcagagatataaaaaaatgaaagcagacatttattctttcagcccgactataagcttttaccagcagtttcagacatactgtatttatctattctcttagcctaagaaacaaacaaaatatgaaacataattatatcatttatttactgggctgaacaagtacaatttttctataatactcatgacaaggaaagtagatgctatttatttaaacaaagcattaagaacagaagcaattctttaaaaattcatttgtcacttatttatggatattacttgatagataaatatttcagtaattccactataaaggggatgtttcttgcttcttctgagttgtaagtggcagtggagatactgaaggaaaatactaaacagattacaattccagg

SEQ ID NO: 51835 - DNA, 1226 bp, Bovine  19866881206652
  misc_feature (1)..(1): n is a, c, g, or t
nataaatgaacagaaatattaatattgaattaataggaatgatcgagtgaattaaacacagcgggccaaattctgcccctggatatgcatgtacaatttccattgacttcaatgggagttttgttgtgtgtatccaagggcagaatccagcttaatgaattttttttaaccgtttttaaatggtgaatgaaagcacccgagatgattctgtaaatatcgcatatatttctgttttttttcccccatatgcttgaaatcttatgattcaccacaaatgtcaaattttaaagttggagaaaaaaatatagggaataaaatcattgctgttacatcttcttcgtaaaaggctaacacatacatattgctgcaggcttctatttctgtatattaaattataatactttcatgtattaataaaccactgaaagaaatccgaaaaaaataatttattctaattcatgcctttaaaacatatgatttagttagaaagttactacgtcatgtcatgccataagcgttattgaattttaaacaaggttttacatattcattttctctatgttatagttaaaaatctatgtgtttttcttaatctgaggaagtagctggaataggactcagtaagaaggccattgcctttgttacttcttttgtagaattcggaaatttgactaaatcaatgagtctcgtaccttacaaaaagtttttttttttcccccaaagaaaacaacctttctttcaaaaaaaaaaaaaaaaaaacttttacatggaaccatattatataaaatagagacaagtatagagcctgttagctaaaggaacgaccagagaccctgcagctgtgatttctctgttcttccactctgcagtgacccctgtgggaccttctacttttatgggacatagtttggaagctaacagtcatgagagaatccttcttactaaacatctttagaattaaaacttgccggtaccttgttttcttgtgtataattttctcgccattctgtgtttttgttaaatggaaaagtttaaagaaaatcacagatgtgttctccttattaacagtttgatttcaaactacttcctccatttgaactcgatcctcacctagaaatcaaaagaaaggcctcagaagtatatatttagggcaggagcttttaggggagaaatagtaatcttgtgggtcatttctaggactatgcatgattccctaattctctgaa

SEQ ID NO: 51836 - DNA, 1697 bp, Bovine  19866881208365
  misc_feature (1)..(1): n is a, c, g, or t
ncttcaaaaatgtatatgtaactgtatatattaacttcatattgtaaaattttataagaattataaaagtgagtagagaacagagggaaaaaaaatgagggtgatacattgatacactttgataggtcttaatgaattaagttaccaggaagggaacagtagattttgttgatgttaatattcttgtctgtctgtctaatataagacttttagattttcattcctgtaaaaatacctaattttgttgtcatacaaaaatgtgttcctcctactagagaagatagactaggctagttgagactctgaagatttcattagacctctgggtataatctgttatttctgctaaactgagattaacattactgattcataaaataacttcaaaaattgcctttaatgacaacatctgactgagtgtacacatcatatgggataatcagtttgaataaaataattcccattagtatcataacatgtttaattttattttaaaatcaaaatggagccaaggtttagagttcatgaattttcaaaaagagttgttttctctcctatcgaaatgtaaatagtttcctaagaaatccttgtcctcagagaactaataggtgtacatacagataatcagcataaccattattctaagaggaagttaaatttcaaaattagagatattttttattaattattcatattaaacatttttctgaatccttgagagaatttgaaagtcagaaaagggtttgattatatggcacatggatttagtggtggcttaataaaatcatgtgtactctagcatgtttaatgtaaggaagactgacaaatggcatcgattttattacaaaatcaatatttgccttgctaagttgggtaaattcatttctgtaaattttatttaatatcaaaagaatgaaattcaaagaatatgcaaaccaagaggcttccaaaattaaatatgaagtgaaacattatcaaaagctgtattaagctggtcctgattagttattatttaaagcagatagtcatattcagcttttaaaaggtaaagttctcatatattttaatgtgagtgacttcaaatttaatattattattatttctttatatttttccagggaaaatttcagattttgagccaagtatagaattatatggttggaggttacataatgcagacctacagagtgttttatattatgtctacgggacagagcattagatttcacagagaaagtcacagagatgccacattgttgaaatttctgatctggttgcaatacttaggtttgaatgaaaaacccaagagccaaattcacagaacaattacatttgcttcttgcatgcttgatgcccccaaaatgctagaatatgcacttttaaactggcaaaataaattctctctttcctacttactaaactttaaacttacaaatgtttcttatctaactttaagtatactccttagggtatctgctggccttaaaaaactgcagggcagctaagaaaggtgttccctgctcagccatcttatttatctatcttctcatctccagttcaatctaaaacacaggcacatgaagaatcctactggggcatctataaaatatgtaacatcacttaaaaagtagtttatgtcattactttttaacacattgtatttatttccaaaagagaattcaacattaccaaccaga

SEQ ID NO: 51837 - DNA, 945 bp, Bovine  19866881228641
  misc_feature (1)..(1): n is a, c, g, or t
nacaaagaaatcttttgtcattaatgtcatcaccaagaacaggaactgatgttattcgagctttgatctttgttttctttcccttcccccactgcttaattcaattatgtatccctcctttacataatacaagtaccactcctcctcagctcctcaattacagactattcagcaatcctagctgtcctgagattgagccagtgtattttggcatttttttattctaacctctaacaggtactgcatgttccagacaattttctttttaaggcccccaaatatgaggctacatagataatagctcattcagtaatcagtagattatgaagtggttaaaatgtagatgaaaattaatagatagtttgagacaagaggctacttagattcctttgatgagaagatgcatcagcttacatctaacctaactgtctgctactcccttgtacccaaataactaggcaattgcaacttttgtgaaaacatttcaaaccatatttatattgtatgactggtcaatgcagtttttaaataactgtggtcaaggattgacaacgtaaaaaggaaaattaaaacttctttcatctttatacctcacctttttactgtcacttggattagcatcaattactatgttctttttttggggagggggcagggggagagtagggaaaggtggagattgataattgtttaaaagagatagctggcacaccttgatagatttgtaaacatgtatctgtgctcagcgtagtacagagcaaactaaactcaagaagatttatgtcctctagaagcttatgatctctgtatggaaaaaatagaacaaatgaaaaagcattaaggaatcatttctataagtagttagatgtaaaacaaaatgaaactgatagttgtgaaaaaaaggattaatgggaaaggacacctgaggaattaattgcaatctct

SEQ ID NO: 51838 - DNA, 1205 bp, Bovine  19866881306577
  misc_feature (1)..(1): n is a, c, g, or t
ngagagaatatcacatcgttcacatctgaggcagttctgttgtagacacagtgatagtttcagctaagttctctatttttttccttaaaatgtcaagtcctgagctgggcggagcccccgttttctgtagtgcagtcaccctgtgcacctaacattgcctgctggctggtggcagcatctccttgatgagcaggccagggccagtcccaggcagctcccctttcagcctgacagctgcatatcccaggtggtctgacatttgagatggaggctgtggataagattgaaggtgttttaggggagaagtaggctgtgaataacaccaagacttcatccagatggaatcactcatgagacaacctgagatagtctattactgcccatatgtcttctaggtctccaaaggccaggctccattgatttataagaaacctactatttacgcttttggctcatttcacaacagactacagtaaaggatttatcagagatgctgctgtttctggcagttgttgggattttataagttctttaaataaaacagtctccataaatatcctagtaaacatcagacaataaagtaaatatttgggggttagattcagtttatttcctcttaatacacaccatctttttacaggtttccttctgagtacagcaccatggcaaaaccttttatagaacatacctattttaggtaaataaataaatatgtgactccaaagaaataaaaattactagatatagctatgctcacagtattgcttaaacactttctctcttgcagataagtcttggaagaattatttcattattttttccagcacaatcagttattagtgtatcttatttatagatggttctttgaggaactatagtaatatagcaaaatatcagttatttcatcacactagtgaatttaatgaacctgaaggtgtgtgttattttagcacttactgtagctcctgtgaaaacccagtggtgctaaaatctgtaaacctgtcattgcttaagtaataaccttgttaaaagcatcttcatttaacttactttagcttctgcaggatgtaggttttattttatcagtgcagagagtaggtgtttcaaacccaaaccacttattgtaaatataattaattgtagttcattaatttattcacagtgttattgcttttattttcatacttaggttaaattaaatattg

SEQ ID NO: 51839 - DNA, 1080 bp, Bovine  19866881371539
  misc_feature (1)..(1): n is a, c, g, or t
ntagcttgcaagggtaacaggagtgtatcccttgttctctggcttttgttgggttgaaccaatgagaaggcatctcaggagaccagagggcaggagaggagtgaagttatgtttgtcttttctgctgcctccctgtaaggtcaccctaaataagccttatccattgaaggaagtttctcccggtcttaaagcagcctgaggtcctgatctctggactcttcctttcaggtccagggatgaatatcacccctgaggctgttagcacagcttcccttgtatctattctttgtggttcccctacactctaaccacatcttggcacatagttctttgcaaattatccctaataggaagctgaaaaggacatttgtcgtctgcctaggtacacattttaaaaaagctaaaaaggacatttgtactctgtttaggtaaagataactactgtgtttccctttagttggcaagttttctttcatttgtaatattcctattttcatcatctttcagatttctgtagcttattgaatggctaccaacacaattggccttcagtgaaaacttgaatttaagccataatgtaagatatttttaaagttactttgacacctcagtttcaccaaagcccaatgtgtttagagatcctctcagatgaatttatcagctcacaatttatcagctaaacaaaatttaaatgcaaatgacaaatacacacacaagctagaatgtcatgtcatggaatggaatgtcatctttgaaaagtgtcagggagtctggataaaagctgatctgtgaagtatccaaaaacatctctcactcacctacccattcattcacagcacaatctctttgactatcttaggggaccctttgtttttgaggttctcaagtctgcatgttttactagttttttcctgcactgggtctgcagtgcagggaatgacagccgttctctgggaaacttgtttccaaggtgcctctaaatttgccctgtgacatggttttcttggtggagcctaaccaaaaagtactggtaaaggttctgggcaatgatttaatttggtgcaactggggatgtttaaa

SEQ ID NO: 51840 - DNA, 1516 bp, Bovine  19866881375904
  misc_feature (1)..(1): n is a, c, g, or t
ntttgttcacttagtagctaaatggttttttcaacattttggctagcagtttctttaatgagaaggtacctggaatgaattaaatttgcttattatttaagcttatgaggtaaagtgtttcttcagggagtactcttatgctttgatgcatttcaatgaatattgttcttgaaaatgcctatttcaactacttgcaacttgaaacctgaaaattctcataatagtctggtgtatgaaactaatcacgaatatttgtgggatacacagacacgatgtgcctctcaccctttttttacatagcacctttattaaggtctaattcatatatacaattcacctacctaaggcacacaatttcatttttagtgtattcacagagttgtgcaactagctctacaattaattttaagacattttcatcaccccacaaagaagccttgaacccatcagaactcattccccatcgtctcccaacccaccgcccctaggcaacctctaatctatattgtgtctctatggattttcctattctgaacatttcatataaacacaaacaaacaatactgaggtcttttgtgacaggcttctttcacttggaatactgtttttaaggattatctatgaggtgtcatgcgcttcatttctttttattgctgaataatattccactatatggatatatcacattttatttatctattcaacagttgaaggacatttgggttgtttcctctttttgactatcataagcagtgtcgccatgaacatctgaataacaagtttgtgtggacatcagttttcatttctttggcatatacctaggagtggtatatgaccaatggctggccatgtggtaattctgtttaagcttttgagaaactaccaaaatgtttttccatggtggctgcccattttaccttcttaccagtagtgtatgaggattcctacttctctgtgggtcactcactttgatgtcaatgatcattcctcctaattcatcaaatcaatgcatttcctagatgctggattatgtgccctcctgtgtccttctgatggatgcatgtgagcataaccataacagatgggatgtgagccctgattactgctcttgtatgccttgccacagcatactgtagacccagaaataccagccctccttcaagcacacctttcaagctgccctaagaacactgtctatactgagttttaccaactgtaaaatgagggagcttgttctagagtgaaccagcccacttctaccttgtttgtagaactgtttctgttttaaacccatttggtggcacctccagctccatggggcttcctaggtggtgctagtggtaaagaacccacctgccaatgcagtagacataagaaaggcaggttcagttcctgggtcaggaagattccctggaggagggcatggcaacccactccagtattcttgcctggagaatactgtgggcagaggaaccggcaggccacaaaccatagggtcataaacagccagacacaa

SEQ ID NO: 51841 - DNA, 1921 bp, Bovine  19866881413603
  misc_feature (1)..(1): n is a, c, g, or t
nagacctagctcttggcatgtcttcattgcatctgagacctaggcaatttcacttattattcttgggtatgattttcttggaaatctataaaacttatagaataggatagggagcatttttatgcatttgtaggaaattagcacagaagaaattttaacattattttcagctgtcacttaggcaattgcttcagctcagggatgaccaatgccagagcactgattaaggatgttaattttattcatctttgtatctgtttagtgtcaagtgagaggaagagagggtttcaaatgtgccctggtaaattttttttttaaacacagggctttttgaaattagaaaaaagtcagaaatctatgcaaggactaaaggcgactcaagagaaaagaaacattcaccgttgtaggtttgaagcacacagggcatcttccaggccaggagaaggcctggtccacggtgtactgatcagagagcaatctgtttggggctcagcagcaccttcaggcctctgagctcttctgccctagcagggatctactgctgtttattatcagtgccatcactccaggatgggaagagggggtggtcttagggagccaattgtgttgtcaagaactgtgtgttttggggacacattggctaaaatgaatcataaaatcatagttccaagtgttcttctgttcttgggtatacagaattgaagaggaaaactgtgtctgacattttagggtgttcagatttggcacttctcttcactatgtgtgtaaggcaggtcccatcactgtgtggagtctaacttactgacccctggaaatgaggggatggatccaaagatctctaagaactcatttgagcttacatgccattgactctggacttctctatataaatattaagtaagtttacagtaaccatggagaaaggctgtgtccttgctgacaattgtaaatgtccatgatgtcaaaatgcaggatggtaaaaagtgaagttgaaaatgaggaagaggtgtgacagggtttaatctaagtagttttgaagggtgtgcactttttaggttgcctaaggtctggactgaaaaatatgtcttctcctagcatatttcagagttggctaaattacatttaagaacttttttgtccaaaaagaaagaggatggtaattaaagcaaaagtagccccacagctcagatgacccctttctctgatggaggaaatctttggatggttatttttctaccgagtctttaaaagagaactctagtcttaacaagggctaagagctcttgtagaagtaggctgagggaaacaagggaaggaaaaatggcttttctttaagcttttaaacttattattaaattcataaattagatcaaatttattgttgaattttaagtctcaaacatatataaaaatatatgtttttttttccatgttcccatcaagatttccatgttcccatcaaaattcaacaataaattcatggccaatcttgtttcatctgagacttccccagctgtatattgactcctcacttccaatgcagagggggtagatttgatccctcgtgggggaactaagatcccacatgatgtgcagcacagccaaaaaaaaaaaaaaaaaaatcttgtttcatctatgtcatcacttaattttgtttaaataagattcttttgaagcaaacacatagtttcatctgtaacaatttccaaatactgtgtatctctcaaagttaaggactctttatttaaaaaacaattgcaatattattaacacaactaaaattttaaccaaaaattcctgaacatgattaagtatcaagtcagagttcagatatctccaattgtctcatatttttcaaaacaatctatatgaatttggatcctaacaaggtccacagaatatgtggacacagaattgatga

SEQ ID NO: 51842 - DNA, 1919 bp, Bovine  19866881511849
  misc_feature (1)..(1): n is a, c, g, or t
ntacttggcataagataagtgccattaggtgtctgccaacgttaacaacaagactttttaaactagaaagctttatttatcttcttgagcataaatcaaaatcctgaggctaatcatctcaccggtgttcagtacggataacttttaaaatggtgttgctattgtttaactacccgcatgcaaggaaattcaaatggctgcctgaaaacaaaccattaactcagtttactgatgagcgctcagccctaccctccctctgcaatgaaaaggggctgggagggaatggatactttgtgcctgagtagaggttgtaaccaagaacctgagtactgccagggacccttgacgagatcttcactcttttctccctcttcacaaacactcctgcaagcctggtaatttaccactaaatccgtgtgcacagaaacaaacttttaaactataatattcaccacatgatatgtacattccttggactagcatatcattgcataatattgttaagttttaataaaactatcctttgaagctctgttgtggaggacagtaattccacagcagctttgaagtatcctcccttaaataaagtcagagaaaaagccattgtttatttcaccactatttaagagttaatgagagatttgcacctgtacagctgttgcggactgaaactagctcatggagtgaatgtgttttctgcttgagacagttgtaaatgccttgagtaaaaacactgaggactgctaatggataggtttattttaaagcatgccatctgctatcaatcatagagaagtataggaagcaagtttggctgggctccctccttgtgagcctgataaagacagggctccaggacttgggaacattgagtcctcaagagaataaaacatcaaacctactcagcagctccactaacaataataaaaatgcctctgcctaaaggtgacattctgaatttacgattatttgtgtctataaagtgtattctttggctcctgactcattctgactgtctcactctgagaacaatacattaagcctgcctggagtaaatggaaatcctatctttttattaaaccagcagccagtacctgagtcgatctaatgccctgtaggatcgagggaagattttcagctctgttccgttccttccttagatttttcatgagaaaattacaaatgaaatctattttaattcactaaaatacataaataatgtaggcaagtttatctttcctagaagacaaagtaaaatgcaagaaaatgaaagactgaattggaactaagcctcctattctatcatgggcccgtgacaatgctggtggaaaattacatattagaaatatgttatggcaaaatttagaatggtggctcagaactgttatgttctttatgccgtatggactaaacatgttttcaagaggacaaacattatttcctcggaaatcttccagctgtggaatcataaccaatattgctttcaaaaatggatcccaaagtattccttgaaaaatgtcaagcctggcttattaaaagtgctgcctgctgaaatcctcagtggatgaaatgagttgtggcattggaaacttctacagcttataatgttagaatctgcctcaaatctgcagcttaacttaattctactgctagcctggaaaacagagttgtgagtgtttagggaaaacccacctggccagaaaactcatgagcctaattaaagttaatagagaaattaaaagagaaaaacattggctcagtagtagtaagaagaaacttataaggcaatagaaattaagggcaggaacttatatttttgtactatgcatttgttagaaacactccttcccaagaacatgaaagaggaattgatattatttgacttgctatgtattattggtgatatgttacagtccaat

SEQ ID NO: 51843 - DNA, 1006 bp, Bovine  19866881513039
  misc_feature (1)..(1): n is a, c, g, or t
natgcctagaattaatctgaatgttagaatgggcacaaaatcaaataaaaatggagtgtttttgtttcaaatctaggaattattatgatataaggaaaattctcttaaagactactgtaaaacataaagatgtaaatatttgatattgaatctttctacatatacacttcatggttgctttataggaatagataaagtgtttataaatagtaacttgaagattgctgaggaaattgctgagtgtttgtaccttttgtcatttatgaatcaaagtaatctgactgtcctcccaggggttctaaaacaaactccagcattatagaggtaaatagtttcaaaaaatagatttcttgtcatatctataatgccagctctaataatagacttttagtatttgtattctaggtaataaaatatattttctatgagtaatttttctttagtgtttattaaagagttcaattctcaaagaacaaattctggtcactgttttaactgaataaattccatagcagatggctcatgtcaaagaaaagaaaaaaatactatgaggtaggtggtgtgtccagtggactaaacattgtaatttcattagaaatctatcctacctcaggatatgcaatatgctgttctcaaggtgagcgtagacatagtggccaatgcagcattttttcttctgttcacccgttactaaaggcgacacttaaatttttttttttttttttttaaagcaaggttttaagctcaatctgatttggaatttttgtttttctttcttccttccctacctccttccctctttcccttctttttctctctctctctctttctttttcacactggaatcacagcatatttttgattttattcctgaaattattttaatcttggactagtaccaacgataacaacaagaaattccaccttctagatattcaatatgcttagtaatgcaaataattatttttaagaatagctttcccttaggggtcctaaatttcaaggt

SEQ ID NO: 51844 - DNA, 769 bp, Bovine  19866881680805
  misc_feature (1)..(1): n is a, c, g, or t
nataatttctttcaagcctaaactctcccttatttgagaaaagctttcagtatgttgttagctcactgttttgtataccataaaaaaatgactgatactgtgggaacattccaatcatgattgctgttaccagattttccatagctattcaatatcttaagcttgagttattcattttccctcagtgtacattttttttggactgaagtaacaagattttatataaatatttactttgctaattaacttagcaatcatctataaaggaaataaagtcagttcatgcctaactttccatttctcacaatgcaactaatatttcacttttctctcttattttagacagttaataatgtcttgtatttatgactttcaaagataatcatctccatcaccttatattctccaactattgtaagcagtacaagaaatatcaccacctcacttctgaaaggaaactgaggaactgtactagaagaaatggtgagcactgccagatgaacagccaacgagccacgtaaattctcatggccaaggtgagcaacctgggaaaatttacgaatctcagtgaatggggtagcaatagcaacttttgatggtaatagcttcaaggatactgggattgctttttgttagtagaccacagagatgacttctcaaggtctgtttcaatttcctttagaattaattgctccccctagtccattctgaaaggagatcagccctgggatttctttgggaaggaatgatgctaaagctgaaactccag

SEQ ID NO: 51845 - DNA, 1676 bp, Bovine  19866881684656
  misc_feature (1)..(1): n is a, c, g, or t
nggttttgttacttaaaatagtctgaaattattcagatcacctcatctactcccaggagtctcaactcaacactgaccacgaagatcacaggagctgacctctgggaaaattctatgttttagaggagagataaataagcattttatcctagcccctttgccagtcagcattatgacacccaccacaaactccatgaacctagtataaagagacacatttgctgcttaatgctgcttagtttgtgttatttaaatctggagcctgagctctgtgaattcgtgatggaacaactttggcaaatagaaaaataaactttgcttcagtggaagattagtccgggagacccagtggacatttcacagcagtaaaatccatgcaaaatgaatttgggcaagaatagtctatctaagatatcaatttgcccaaataatatatttatagactattattacatctagggaaaaaaagcactagattgaaactgtaaaatttcactggtagaaatgatccattctcaaatgttaaccgagattaaaagggagaatttgacacttttaaataaaaaatgatgcgtaaattacacaagaagtctatggagacccctttcagttcttattttctcctctatcctgctctaaaacatgcagtaaacctttttcaattggagagggtttaatctgtgtttaaggatacttagaggcagtaccatctcttcctggaggcctatgtacagggcttttttttcagatattgattgtgaaagtgatatcacaccagaaggtacattgataccgtgtcaagtaaaagaaaatggccaagaatccttacagtctaatcaaagctctgttcaagccccacactcatgaaatccaatcaatagagacgattaaatgacacgtacagagtcaccaatattaaatacactccatttcctgtgcaagagcttgatgacacaaagtggatgagacaaaacttgactctgtaggtttgtttacaggatctgtgctatatatatagagagagagtatgaaagtttgactcagtcaccatttgccccacaaactaaggtgccaactataggcatctacaaaccatcttgtgctgaatcaactgtgaaagggagccagtcagagagtatgatttgacaacaatcacatggaggagaccagtatttattttaacatatggtatttggctttatgatggaagacacacaggaaaacaaggaaataaaaagagtaacaataaaaataggtatgatttattgagagcttgctatctgtcagccaatgtgctaattgctttacaattattagctcatctataaataacatctcactatattttcagggttgaagaagctaagattaagatgcattcagtggtacagaagtaggagagttggaaactgaactcagcgttacctgacttcaaaaggtaagctctccaacagtatgattcaaatccaatcctaactgactatgatcttggaaagcctatctgtctgtttcactgtagtttcctcctttactgtaaagtgagaggcttgaactaaataatctaaagtgtctctcgtgatctaaatgtctaaatgtctaagagttggtggttgtaccatgtctgactgctaggcatttaaaaagtgtgaataatatcacctcatcaaaattgctca

SEQ ID NO: 51846 - DNA, 1087 bp, Bovine  19866881728199
  misc_feature (1)..(1): n is a, c, g, or t
ngatagaatagatttgatgttggccagaaaatttggtggtttcctcttttattggtggtggtgattagtggggaccagcagggcgcatgcagagcagacaactagtacattccaaaaaccactccattattaaggaagtgggttgttccctattttttcagccttatcttgcttcgaagttcgcttttaaatttggtagtgaatggagtaccagtgttgagaaaaaaatatcctgaatgagagctcatgcaacctctattctcacgtgagcaatgatagacgttctttctatgaaaattgctgtaattaaaagacaacccaaagtggagaggagaaaaaggttacactggaccccttgtaaactactctaatggaaatggtggaggtgaattctcttcctttcatttgtttcctgattccccaaatattcatcagggcttcaaagcatccctcaacaaattttttgatttaagtatatttaaggatttggctaatacaaaagttagtgtgtcaggacaattatataaaaaataagctgatttacaaattactagtctttcttctctgtttacatatgatatttatcagtcttaactgtgatgtatattttgtaccatgcacattgttagcaaggatctggttaagatagagatgtattgacttaacttggtctcatgaataattccatttgtttatttgctggatatatccagtttgctgttgatgctgtaaatatttgaattggattcaacttgtccatcagagactttccgctgtctctcttggacatcatatatgtaatttgatgacactatctcctggaaagtaagaaaaatgtgtactttggtttctgcttggtaaagtcattcaaagtgatacaaaatgtcaagagcaaagaagataaccactccaatgatgtgaggaagcaattgacagttttcttggtatttggaacatgggagtacttagagatttgtggcattaattacacataaacaactaagtatcagatatctgacctgataggatttttctcttgtttcaaagtatataatattagaccctttactaaatatttacaaaagtt

SEQ ID NO: 51847 - DNA, 831 bp, Bovine  19866881767076
  misc_feature (1)..(1): n is a, c, g, or t
nttggagaaaaaatataggaaataaaatcattgctgttacattttctttgtaaaaggctaacacttacacattgctgcaggcttctatttccatatattaaattataatactttcatgtattaataaaccactgaaagaaatctgaaattttggtgatcaggaattcattcatgtcctgtcaagtgtcctttatctgaatgccacagaccaaggtgcttcatccatctcaccactcatcactttactagagtcagaaaatcttttgcctgtgatcatcaatgcctgtacttattatataatcttgggcaattgtcatatcagtttacattttaacatttagatatgaaattttagtactaaaacctttctagattaagacttcatgatagaatctaaaatatgtttgatcctttgatagattcagtcatttaaatagaccaattctcttttacatcatcacacccactgggctgacacaaagaaagccaatgccttagacctaaaattaatcacaatccactacaagacatttgccttaatacattatctcccaggtaatgacaaataatctttgtgggagataagcagataagtgctaaacaggcataggaaaagtgtgtgtgtgttcatttgggggataaatgtcagaagaattcaccctgtgttaggaaaacaaaacaaaaaccagaatactatacattccttgactgactatataagttaaattcattacattctttttggttttgtttttatttttaaattaatacggtggagcctgatgggctgctgtctattggggtcgcacagagtcagacacgactgaagcg

SEQ ID NO: 51848 - DNA, 909 bp, Bovine  19866881885973
  misc_feature (1)..(1): n is a, c, g, or t
ngcaaactctattccttccaatctgcactttgttcctttgcgctttatgtgacagtgagttcctaaactgaaaacaaatctcccattagtcagacaaagggctgcctcctcatttctgattgaatactattaaaaatcctacctagctgctacatttcggtagtagaatttaccatttccctctgatagtcatgggatttcccaggcaagaatactggagtgggttgccatttccgtctccagaggatattcccaacccagggatcaaacccacatctcctgcactgcaggcagtctcctgcattacaagtggatttgtgagtattacaaacattgtttataataaacaatgttatttgtttaaccaactgagccaccaaggaagtcaaaaaataaagagagagagcagtcatattacttttaacaaacacacaaccagcgctaactggaacacaaattaggtacaaagtagacgtatgtgttttgtgtgtgtgtgagttcacaaagaaaataaatttttaagtttcagagattttaaaaataatttctctttctgagagagcattctcatttctcattaattataaataggataagaggaataaattttaatttttacattaacactgcaaaagaattcaatgagaaagaaacagctaactgaaaagcactgcactgagatttgaaagactatgaaaagatttgggctgaattctgttttcttttcttttttgtagtcattccttttcaataatcactcctatgaatctatgtgcatcaaaaagtgaaatgctatatattttcaaagcactcaaaatagctccagtggttcaaaatatgcatgatgatcaaaatagacacaaataactgtagatctatcatgtgataaatacacattatcaaatattt

SEQ ID NO: 51849 - DNA, 1334 bp, Bovine  19866881978381
  misc_feature (1)..(1): n is a, c, g, or t
nacagcagctaaaaggaaaggtttattattctgcctcttcttccttctcactggagtctcacaaatatgaaataggtcaattggggcaacataataacagcaattaataagatattaattgacctatattgaaaattcaatgctctttgaaacatcttcagagataaatcacataggtatctatagtaatattaattaagaattggaatttttctctataggttggttgccactttataagagttagttgaagctacatattactgcaggacatcaattaagtttagctttattataatgattactagtgtctgaacttgcattttaaaagatttcaagacacaagacaagtgtaaaagaaattagaaaattgtcccagtgtccaagaactgtatcaccttatcacaaattttctttccctcccaccccaaaataatgatgattataacagtgatataatgatgggagaggttgatattggtaagtgctcctcaccaacatattctacttttgacaagcccttcccaagccaaatgcgtatttgtctcagtagaactaacaaagaatttattttgtaggcatctgttactggttgggcttcccaggtggctcatatggtaaagaatctacccgcaatgcaggacctgggctcaattcctggattgggaagattccctgaagaagggaatggcaacccactccagtattcttgcctagagaattccatgggacggaggagcctggcaggatacagttcttggggtcacaatgagtcagacatgcctgagtaactttcagtttcacttttctaaactatagaagtaccctccctgctccctatactaccagcagctggtcaagaaaatccaactgagtcaatgatgggtaataaagaagaaacacacggaatcaaagacaagaaaaagaatacgtaacatcaattactaacaaaaattgtcactgcaaaaaggaggccacagggcaactgaaaattgcaatcagatattttaccatagactttatttttaaaaagcaatagctctgttcaggaagaccatacaaaatgaaatagaaaacctaaagaaagaaatagttgatcaacaagaagagatgcagtatgagctggttagttcaggggaaaagtactaaaactatcacagaaatgaagacaaatttggaaagaacacaggaaacactaaatgttgcagaaatctcagtggggaacatgtcagatagaaataataaagctgaaataaatgaaatgaaaaagagataaaaataattagatatatagagcaagcggatatagcatctgtataatttggagtctctta

SEQ ID NO: 51850 - DNA, 1198 bp, Bovine  19866880353914
  misc_feature (1)..(1): n is a, c, g, or t
ntatatagaagttataacttctgatgtatcgggatacatcagaagttataagctttaggcatttccaactgaactgaagacctttgccatttgtcttttctttatcacattgcagtgagcatgtgatgagaatgtgataaatcacatctacaatggaaagtcacattccttttaaagctaaatgagaaaagatgcaatcaataagaaattcttgatccccaaaggctgttcagtagtgtaataagtgctatgtctacttgtttattctcctttttactatggcccttttcccatgaagtttttttatagatccataaagatcccaataggcaatgagaccatatagtacattagataagataaactctaagctaggggacttgagtacaattcttcaagtcagtacttcttgtgtaactttaaggaaatactcaaaccgagtgtctatgcttctttcctgcagatatcaaagagaacaaatgcagtaatccattgactgcattcaaaaatgtggttatgttttatctgctcttattattctccttattatggcaatttcacataggagctctgcatgctcttgatgcccaagaacaaaacaaaatatgcctacccataaaatactcaacctctgatgagaattagaatgggaaacatcacaattcttagcagcttattacaatattaaagacaactatatatcttgaacttattagtagattcaggcccagaaattgaagagttatagtttgactgtaaagttaattcataggcctctgcaagagaaaaaaaaaaaatgtctctttcaccactctgtggcctataattgattgtaattaccagtttgcataggactgtattggtaggagggtcaaagattacaaagaactttcccattgctcagtggctaatgggacacagctgcaagggaaataaaacagtataattacactttagtctcttttgttcctttctttaagcaacatagttacaattttcacgtcactaagaaatccatcttcatatgctataggtagtctttatgatgtaatcttattgatcttgggtgctgactagtttcccccatctttttattgattaaaatctgactttagctaactgttacctgattgggagatgttctttaagtacattaaaattaaagagattacaaaaaagataaaggaaaattttagca

SEQ ID NO: 51851 - DNA, 1080 bp, Bovine  19866880359949
  misc_feature (1)..(1): n is a, c, g, or t
nattttttactgaccagctgagcatcaataatgttacatattttccttagtaaatagatgccactttgataagaaaatatgttcaaaaatcacattaaggtcacactctgaagaatattattgtatgcttcatgcagaatttaaatgttatttaaattaagcagtttaattaataacataaattaaatatttatgttagtaccctgagggtagtggttagtctttgaggctcattagcaggagaacacacaaaactggaaagatataaaggaaggtttattttctttgttgagctgcaactaattgcattaaaataaaccacgtactttgccagctttaattctcatagaagagtaagcaatccaaactccagtcttttgatgtggtcatatatctattgccaagtttctttttaaagtcccccagataaacatgtatgccaattaagcaatataaaatagagaggaacttgtggtgcctgcgtgccattttctcattaattctaggaaatgactctggcacttattcccactattatccagtagattaaatgacatctttcccccagttgactgcggtaaaagcgccaggtttgctttcatcttggactctctactctttgaaagaagaccagaccaaacagtgcccttttgaggttgaagatgcctttcttcataatgtcatccattggagaaagctttgaggaaaggtcagttttatcccagtgtaaaagaaaatgccagcaattcaagtaaagccatttattgctacttagaagtatcttcaagttctgttgcaataatttacccattaaatagatccaaaacaccaaataatagcatatgcaacacacctatatatgtatcatacttcaaaataaaatacatttcacttaagacaatgtagttttaaagtatgaagaaagaaatcattaaacagggtagagatgacactctattccatttgaactttgggcataaaaacacttgaaatattgagtggatgtaaagaaaactatttaccatggtgtagccaagaacagaataatcaatagataatataaaaacaggacaaaaagga

SEQ ID NO: 51852 - DNA, 1328 bp, Bovine  19866880509630
  misc_feature (1)..(1): n is a, c, g, or t
nttaaataagcagggtgacaatatacagccttgacgtactccttttcctatttggaccagtctgttgttccatgtccagttctaactgttgcctcctgacctacatataggtgtctcaagaggcaggtcaggtggtctggtattcccatctctttcagaattttccacagtttattgtgatccacacagtcaaaggctttggcttagttagtaaagcagaaatagatgtttttctggaactcttgcttttttgatgatccagcagatgttggcaatttgatctctggttcctctgccttttctaaaaccagcttgaacatctggaagttcacagttcacgtattgctgaagcctgacttggagaaatttgagcattactttactagcgcgcgagatgagtgcaattgtgcagtagtttgagcattctttagcattgcctttctgtgggattggaattttccttaggtgtcttttccttaggtggtctcagtctttctgtttcatataggaaaggaatcatgagttaatctctaggagttcactgacatgctaactggcatttggttttaaccactgctcaattctttctccaacttcccttccctctttcttatcttctacacaggaacgataagttactatactaacacatttcttcctacttttctcaactctcagataacagagagatgatattttggaagaaaaatttccatttaagttgatttatgattaccacatatgtgacatatgtacataaataatacttatcagttttttaaaggcttttacattttaatatggtgaccctaaaaatgtgtataaagaaaaataactgaaccaaatggtgcctcaagattcttatttacagatgaaaataaatcatctaataactaacactgatgccaagcaactaacaagaggcaatttaacagatgaggaaatgctaactgtagcaaggaggataaatctaaaagttgggagacaaattaggtgaatgtcagcatgtgcacacagctaaagtgatttttttccacaacaatgatatgatgtctcaaagtactgcagtgcaaatgactaaaacaacacctatcagaatcagtgaatcattacctccaaattgaaaaagcaaaatggcaagtatatgaactcttgcctttaaaacagctctttgtatcttaaagtattactagcttaaacagcttaaatgcataattactagcttaaatgcataattttatgttcaacttattgaatagtgtttgacgaggaacattactttcaacttagttctaatctgctagaaatatgtctggctccattattct

SEQ ID NO: 51853 - DNA, 1252 bp, Bovine  19866880553452
  misc_feature (1)..(1): n is a, c, g, or t
nccagtaaaggtcaaggagagcagcttcactcggtctcttttatccctatcatcaacaccactgcggcgtgctgaatcagtttcaatttggtctccttttaaaagtcactgacatagcaaggaaactgatgctttgacaaccacagcccaccaaagctatcaaacaggggaaaagacacaactaacaccatttctatagaatgaagaaatcttaaaagaattttgcctcattgcccaagaggaatctgtcaatcacttgcttaaccaatgccatatgcaaatataaaggccgtacttttcaagctaatcagtactcagacattcaatattcactcaacaaatacttagtaatgcctgccatgggtcaaacattccgctggacaatatttccctcagctgtctttgagctgaagagaatttctcaagtcaaggatatctaggtggttagggggaaaaaaaattcagatttgaatacaggaactgaagaaatgcacctgaaaacttcactctattaccttcagtcaaatattttttcttgtgatttttgcatgcatactcttctttaggcaaacacttaaacctcacatccaaagatgaatgagcaggcaagttgacatttgccagcttcagtatgacagatgcaaagacaccatggtacttcttaagcactttaacattttgctgttttcttcttcagcatatatatgttccaggaaaagtgcttaatgacttgtctgccttttgatttgcttgctttttagaagggaagtgatagcagagaacacgtcaggtgttttgcttcagggatgtgatggctgggtaacagctgttcttagagcttgcttctactcaaaccctgtgtattgcaggcagaaagccggaccaagcataattctattgcagcaatttttagcaaattgttctgctaaatagaaatatattgcttgaaggctagaaaagtgatgataaacctggcccttcagctctacttttaaaggtcattttggttaaatgtaagcaaattgtggtacaaagtaccttttacttgctgtttctcacttatatctccccctcatacctcattatgctaatgtaatgacttatttgacagagtagtttcatccataatcttggaaatgtataatggatttaattttcaaggttatattttcagaaaactattaatgtccctttcaaagtcattgagactgaattatgtttcaacaaaatattaagtacattaaaggtccct

SEQ ID NO: 51854 - DNA, 1898 bp, Bovine  19866880623350
  misc_feature (1)..(1): n is a, c, g, or t
naccacttatttaactataagttgagcaagttagattctttgttctttcattttctcatctgagtatattcctgtcttctaagcagtgtcattctgaatgttaaatatggtaatatgtgtaaaatgcttagaacagtgactggcatagaaactgttataatgttgccatgtgagctcagtataatgccataaagtcacttctcaatgtcattgtagactagatttatatttttcatgtcatcgtatgtaagaacttcatgattacttgaaagtgaaagtgaaagatttttagttgtgtccgactctttgcaaccccatggactgtagtccatggaattctctaggccagaatactggagtggttaggctttcccttctccaagggctcttcccaacccagggattgaacctgtgtctcccgattgcaggcagacgctttgccatctgatccaccagggaagcccaagactgacagaggcaagtgcaaataaggatgaagatggataagtcctggcctgttctgacagcaagattgctcccacaggttctggaaggagacacaaatgagtcagaagtgaggatgctctttccgtagcaaagtggtgagtaggctcctgattctgtcttccatggcaataattgtcaaagcagtgataggagattccagttggcaataaggaggaattagcttttactgccttttgatggttcataagaatagtcacaaaattactatggaaatactggtattggtttagctttgaaattttagtctgtaagattatttaggtatattcttataaggacaaattctttgccttgtaggaaatttgatttttcatcaaaattaatgatggaatcacaacatggatcattaaatgtgataataccactacaaaagtaagcataactatgaagtaatggtactagagttctgtagttcataaaataatattgttggcatttcttttaaaaagtttttttttaagtatgtatgagcagaaattccaaacttgatctctttaaaagttagcatttgctttaaaatatagatatgatgatattacagtaatttcattaaggtaaaatttgcatttataattatattagatttgttcatcagttgtacatttagtaactaaattgtgatttactgaataatactaaagggactaactgtcttggtttggtataattaatcctcatacaagtctaacaagtcagtatatatactgtgtatacatgttctgtagtcatataggctttattggagggaaaatcatatagtagaaagagaagcacatggttattaggtatttagtatctttgactaggtcatctgcaatgttcttgttgttcattttgtaactaggtccctaggccagctacgaacacatgttggcactgacatggatcttttactgttggttctccctagatctctaaataggacagtgataaggaaaaacagcaaaaggaagtaaaaaaacaaaaatctgatcggtagtccactgtgatgctcaataaggacccctgtgaacactctaggcaagacaaaagtatccagctgttctcattcctagtttcagggactaaccagggccaggtctatgctgctgaaactggacttgcttggagcttagagccctagtgagagggactcttacttcctcccattctattttcttgtcatatgtgttagaaatgcctagtaagtgtgatttaaacagagcaaggtgtagataccaggtatgtgtacagtgtgagtatgaaggctaagtggacatgaagatgtaggggcttggatgaagttgagtttagatatgatgaccttcagtgaagttgcaatcaggtttgtaagcaaagacccctttcccacttggtacacactactcagt

SEQ ID NO: 51855 - DNA, 954 bp, Bovine  19866880849514
  misc_feature (1)..(1): n is a, c, g, or t
nattgaactaaccctgtgtgacgccaacgctggatggtaataacgcagtggctgtggggtctggaggaggggggcaatggaatccatagagtgactttgagcatattaataagtcatttatgaaaagaacattcagcatcttcaaatttatccattccagcatttgataaaagcagagacagttttacttaattagtcatgatgtggatcatgtacaaagtgatggtaaagtctatgaatttgaatttaaccagacattttttttcatgaattcatggatgactgaatttaaatagctgaaggatcattaagcacacaggattgattactaaagcagcttgctgacttgttttctttggctctctttgaggatgtgggaaaatgaatgatcatcttttccaagttaagtacatgagagagagaagtcattttcctcagcttcaacacatagctcctctgagaaatctaccttaatgaattaccttaacaattgaatcttctatcctgtgcttcttcaaacacttaatgtaccataatgctttgtatagtaatttatatctggtcactacaagttctgtaaatgtatttggagtattatgtatagtatggctcagtgaactggctaatgagcttcttcaggatagtgctcagctctttaaattgtttgtattgggtgcattcaggggagggataatggggaagaagggcaaggaggccaatattttagcaaaaaaaaaggagcaataaataatactgagaattagaggactttgcatgtaagaagaaagccaaagagaatgatatcatgagttaagaaaagaagactgtagaatgagatgaatgagagatgaatcaaatacacagagaggttgaacaggattggattgacaggagactactggttttcaaggaaatgactgatcacagttttattagtgataagagaataaggca

SEQ ID NO: 51856 - DNA, 1579 bp, Bovine  19866881117971
  misc_feature (1)..(1): n is a, c, g, or t
ngaattgattaacttttttttgctactgttattcctaatgggtagaacaccagatgaaaggactcaacattcattctgaatataaaatcaaacaaagaatatacaccattctcagtgcaaaattgcatcagatttttcttgttgcttcaattaaaatccgagtgtgtttaaatactcatgacatatctagagcaaatatgtgcaacagaagtactgtattttgaggtatctattccttataagtgacaccccactccagtactcctgcctggaaaatcccatggatggaggagcctggtgggctgcagtccatggggttgctaagagtcggacacaactgagcgacttcactttcacttttcactttcatgcattggagaagaaaatggcaacccactccagtgttcttgcctggagaatcccagggccgggggagcctggtgggctgccatctatggggtcgcacagagtaggacacgactgatgcgacttagcagcagcagcattccctgtaagatctcaagccaattagtgtgccagaaagaccagcccccatgctcataaaataacatgcggctgaccaactgttttgatgtggctactattttttttatccctactacttttgaaactactgtctaccacatcagttcagttcagttactcagtcatgtctggctctttgagaccccctagactgcagcatgccaggcttccatgtccatcaccaactcctggagcttgttcaaacccatgtccttcaagtcggtgatgccatccaaccatctctaccatatgtggtagtaatatgtctaccacatattactactcagttacttttggattatttagatttgcatcaccccgatcttaaaaaggaagacaaaaaaatcaaggattactagctgctggatagagttcctttaaacagaagagaaagataaaaatgatttcttcttaagaaggaattcttcatgccccctttgacatcagttacacatctaccagccatctcaaagtattgccgatcccagtctcctcaacatttgccctttactagaggttgtactacagccaacttgccaacctgaggaagtgagtgcccagctaccgacaaggaagagagtggacctcaactttcaaacagctggttcagtatctgataggcatatagtccatcccggtcagactcaagatagaaattattccaagagctgaagagaggtccagaaagcacatgttttgtttataagagtcactgactctccccaggtgttcaacatgttgagaattgtggttgactgctcagtccctggttggttggctgtttggctggttttgagaagggaggttgtcagaatatgaccttcaggggaaatgaagtctctacaaaaccaaatgtttgttactaaaacttctgcaccatgactaacattcaaactgcattttaaaaagaaatcattcaaaacacactgcttcagaatcaatagcttctttgaagccacagtaagtagcatgaactaaatgcccatttttggtggcggaaagcaaattacttccaactgctcaaacagaattt

SEQ ID NO: 51857 - DNA, 1368 bp, Bovine  19866881179107
  misc_feature (1)..(1): n is a, c, g, or t
nttccccaccaacagtgtgtgagggtgtcagctccctttacaaccccccacccaacacttggtatggtcaatcttttaaattttagtcattctaatggtatatatggatatctcattgttgtttcaatgtgtttccgccctgacttggatgtttaattttgtttgaatttctagttcatgcttccattagtctatgctatttagtgactccatagcttctctcacacagaattttgtattgatgtgtttatgctaataattttaggggtttcacaattactttagctgtttttaacctcttctattcctttctatactgatagtttccttaatgacgaaaattatttccacttatatagcaccaacatacaatatgagataagcaaattatatagttggctattattcattattttaattttactttctgaacataattgttattcaagaaagtaagatttttacactgtttgtaactcctagcacaattcttgagtgaaaattgtttaactgataaccttcaaaggctaaatgaatctttaacaaaattcaaaaaagtaataacatcaatcattagattttcctattccttaaaaaacaagttgtaagtagtactagttagtagtattactaatagtactagtatttaatcactatacaattaaaaaaaatccctccctataaaatctttaccacatttgattaaaaatataaagtgaaataaaatgcattgtgtttatactggatcagtgaaaacccttgaggatctctcttttggtccttaatgattctttaaactagtatgtctgtctgttataaaagaagataaaaatataaatgttttgcactgttggctcataattctgggcacatttgttgtgttgctaaatatggtggcctagtttacagaaaaacagaagctgtttgtaagttgtcaaattaacacatttaaattaagcattccaaagacactaataacagctgtgtttttaaatatttctttgagccattgcactctctgcatagaaacatgtggcacagtagctactgctactgcaatgagttctgtatggagtgactttagaaagagaagagaaaaaaaaaaggcggcggggttgttatgtttttagcttgaaactaagtatctaggaaggtgttatatgagacggggtgctgagatatatttaggaagtatcatgacccttacatttaataagtaagagatgtgtttatatcagttttatttttgtattatatcaatttgtatagcagattatggataattgtggtgcaacccactgaaaacattcaagaggaaattttcattctgaatttctacattgccagtggtaaagtaatccaaactaa

SEQ ID NO: 51858 - DNA, 1926 bp, Bovine  19866881197665
  misc_feature (1)..(1): n is a, c, g, or t
natagtctacttgtggctggcaggaaatatacaatttcttatgtatgcttattgataaatgagcaaaaattccccagagatagacacttcagttttcataagctttcacttgtattccatagcatggttttgttgtatgtattctcattgactgtgaaatggaccttaaattaattaatttctaaacttttctaagacttggcaagatagtctcttgaaaataagcctttcattaactctacagaaaatgacagccggggtctataattcttttaagtagatcagaagtgttttgcaatgcaacaaaaggtcaaagacaggaagctcacttttaatagactgttcctttaacaatgtttctctcaaaaagttatattaaaatgcagtatacctatctcatccactccagatattaattattttgacaagcaatggggaaatgccagaatatgtgaactgatgaaaacaaaagcaatgatgtttccaaggatgcacctgacagctcttaggggatctagagaaatgagagcagaattacaaagatttcaagtatcttagtaatacactcagacaatttaaagttacaaaaatttgtcagatttctactgaacttaaattctttctgaatgcatagtaactcttttataccttttttaatgctgttcatttatatcagaatgattttattatgataaagtatatttaatatggatttacataatgaaacttagttttatatgttgtagtagctgtgctctgatctctagtctaaaatatgcttgtctggattactaaatcttaggtttggagagttcttttaacagcagatttcctttgtaaccctgttaatttttagaagaaatgtttattattcggtgtatattttctatatttgttcttttacttaaaacagtactagaactaactgaaatttcctttcagaaagttggacattcaaggttaatttatctgattaatcaaaatatgtaaatagacaatactaagaagtttggaagatactgaaaaagtcatgagaatccctggggactctttcctggggaaattatagtgggattttccacctatattttaaaacattgaaaaatcactgtcctgggatttaagcagtatcctagaaattcaccatcattttatcaacattgtggcacagacttctaaattatactgaaatgttaaggatagcccattttaatccttcctaagccattcagattttttaactagttaaagcacactctatattttgcctttgagaaaggaaaaaaggtaaatttgttagcacaatgcacatggaaggaagtgtccttagcaatctacccatcctattttcccagggtaagatgttctcaggttctaggaactcttcccctagagatgtattggactggccataagagagactggcaacagaggaaaaggtttgagcctgcagaggcatctaaccacgttaggtggtgttgaccagtatcaacaattccacttcataatagtctttccatcatattctcttattcctgtccattagggcaaggtcagcttcccactggtccttctcctctaggctgagacaccagaagctaaagcttatttctcatattccctggatcttttaaagtgtaggtgtaattatttgtgaattaaatcactttcttgcttaggggtacaaagtttaactaatacatttagcattttgtgttcctttcacccataccagaataagattgcctttaatgagttttccaagaaaagtaggttccaaaccaaagtgtaattagcatggttcctagttttccttttcccaaagtgaggtaaagtcacttttttgggggggtagaaaatcattacttctcactatgactttttctgtatacaaacaacatcaatttcaaaaacaaaaatatccta

SEQ ID NO: 51859 - DNA, 758 bp, Bovine  19866881366391
  misc_feature (1)..(1): n is a, c, g, or t
ngagatggataggtctcttaaaaattaattctgtactccagaatgaatgtgacttattgctagcataaaataagcttcaatggaaattaacagcaaatgaagagagaggagatggtctaccaataaatttagggcttacaaaacaagcattaataattgttaaggacattgtttacaacagaattctcaacatattccaagtagattaacataaaacaaataagtacatgaaatgcataaataattaggcatattattagttgcctagtgatagctgttaagcatccaagtaaaaataatgcataagaatttttcagtgtccaataattattgcaaaatttaatgcaaatggtcttcttataagctgcaataattgtttaacctaaacttatctctgatatacatttatggaatcaacgatataactttgatacaacaaaagatgacttccatttgaaagcatgcaaaataagcagctgaggcagttctttgattatagagactataaagaaaagattattttgaattagtcttttaaaatatttgttttttgaaaccttatttcctttttactttaatttttccatctctttcttttatatttattttttaaacacttcagatttttttaccagggcttccctggtagctcagacagtaaagaatctgcctgcaatgcaaaagacccagggttagatccctgggtcaggggagatcccctggagaaggggaatggtgacccactccagtattcttgt

SEQ ID NO: 51860 - DNA, 1491 bp, Bovine  19866881445401
  misc_feature (1)..(1): n is a, c, g, or t
ncctgtgcagcaattaagaccctacacagccaaaatataaattaatagaccttaatatattgttttctatacctttctcatatcatcactattcattcatgtacatttcaagttatcattactctccagaggaaatcacaaattatgtttaatatattttttcataggaaaggaaaaaactgtccattttgcattaagtagtaaaaacaaaaagagtcagattaaagactgactgctaatggggtcaggagccagggactaagctgagtaacactgctgcttttccagcttttatctaaagtacatgctgggaggctttatccacccatttaatctcttaaacttttaaatctaatttcttcttttaaatcctcttttcttcttttgttttgtctcctaacccttgaaatactcttagataagctcttagattcagttgaaataatccctattgattctggtatttctcataaagtttgagagcatgaaaacaaacttagatcacaagctgaaataaatgtcactgatctaataaaaacaataaatgcatttaatatttaagccaacaatagatattttcagcagaaagtatacattcactaacagcaaatctccataacgtttactaaatgtgtagctaatccttatatacccctacatggcaggtgccaccatgcccattttataggtaagggaattgacaagagattgattaaacagtttgttcaaagtcacatagctagtgaggaatgtagctgcaattctaattctagcagtctgctgcagtcaatgctggaagctctaaagtgcatctcctaagaggaaactcttaagtctgatcaccctcttccataagcaacttcctaatctttattgtctgcttgctcatacgcagctgctcgtactccttattagcagtttaatgttaccaaataaagcatttaacatttacacaaaggagaacatttttgttagacatcacacaggactgggttctgatagatttttatagatggaaatgggagaagggcactgctaatggaagcaacagaaacatcactttgccaacaaaggtacataagtcaaagctacagtttcttcagtagtcatgtatagatgtgagagttggaccaaaaagaaggctgagcactgaagaactgatgctttcaaactgtggtgctggagaagactcttgaaagtcccttagacagcaaagagatcaaaccaatcaattctaaaggaaattaacccttactattcattggaagaactgatgctgaagctctaatactttggccacctgatgcaaagagccaactcattggaaaagaccttgatgctgggaaagattgagggcaggaggagggggtgacagaggatgagatggttggatggcatcatcaattcaatggacatgagtctgagaaaactccagatgatggtgaaggacaaggaggtctggcgcactacagtccatagcgtcacaaagag

SEQ ID NO: 51861 - DNA, 1448 bp, Bovine  19866881501902
  misc_feature (1)..(1): n is a, c, g, or t
naatatgagactggaatagtaatactactggttgaatcctgtgctgagtttgattaaaaggttctgtcagagactaaccttcacatattaagctggggacagcctttcaaagaaatgatagcgataaggctttgagagagagagacaacactagaataaaagttcaacatgccccaaaggatttttcagtgcatgatgactggaggcctaaaagctaataaaagataaactttcaacaaaagtactgtcaaaaaaaaaaaagtgactaagaaatagccccaagaaagaaaacttggacaagctatttttacagcaataccaaaagaaagattaaaatgaagatacatttaactatcattcaatttcctgcttttttaaatgcatttcctagaactgacctttacaaagtttatttctagtttttggcaaaaacagaagaatgaaagatcactgatagagctatcttaatcctgcagtcttttgtgaagggggaaataacgaggaaagtttttttataccatatttggaaaacaaatatttatgaagccatggagaagagtaggagggctgatttttctctctctcagtacacccaggacaggtcaggcctgagactaggaaggaaggggctgctgggctgtctcatccctgtacacctgatagaaaaatcaacatctagctcagcgtgcaggaggcctgaatggattggaaaacatttctctgattctgagtctgggaaataacgagttccactggtagctcagacagtaaagaatctgcctgcaatgcaggagacctgggctcactccctgggttgggaaaatcccctggagatgggcgtggcaacccactccagaattcttgcctggagaattctatggatagaagagcctggcaggctaggtctatagtccatggggtcacaagagtcagacacaactgagtgactttgtttcactttcactggagaaggacgtgtactgtgctgttagaatggaggaacagacaggagataggaaaagtgtttgaggaagactggtctgccgttctcagatgagtaagaatcaacactagaaatgggagggagtcagctcaggttcatgggtgtgtgaccagtgcagtcatacaaagccccgtgcttagaggatcccatgattggtttaatgttctacttgctctatcttgaaattcttaaaactctgaataaaaggctctgagtttttattttgcacttggctctacaagttgtgaggcagttcctgtgaggggaggggttgtaaactttgggtagtttatcgtatcttaagcatctctaacagtttaagaagcctttccttcctcctctcaagatacatgctgctctgaaccccaggaaattgaaagactatcaccttaatcacctactcatgtctcttcctccatacttcactcaaaagctccagcacata

SEQ ID NO: 51862 - DNA, 1782 bp, Bovine  19866881508730
  misc_feature (1)..(1): n is a, c, g, or t
ntgctgtagactttgcttcactggaaagtggagaagaaaatttaaaacaatgagctctatgaaattttaaaatatttacatttgaaattaaaaacacaggtcatgaaagaacaagagcttattttgagttcaaaatgaaaaaaaggttgaaattgtaaatcgttaatgaataacaactgaaatatacaaaacctatcttgcagtgaagttaaattcattctcttcaagaacagaggatcaataaagaaattaagccattctaagttggagtgggaaattaagttactgagggcagcaaatgagagtaggtaatggattacgaatttcagcacctttgggaaaagggatattaaagacatatcgttgatgggagttttgtacttttggtggctaagatcactcacaagaatgtctaatgaggtaaaagtatgtttgccaaagtatgttatgtcatatatgaataagctatcataacacatgaaatatttttctaaaatatcaagctgttcaacaatttagtgggaaaaatatggaaaagaatgagaaggaattgtttgtgaagaagttaaaatttgaaatattttaatttcagcaagcataatacagaatttaaaatgttaaaaatctaataaccatcttatctcaagattttgttgtaacaaatgatatagaaagcctcagagataaacctatgcaccttatctttgttttgacaaaggaggcaaaatatacaatggggaaaagacagtgtcttcaataaatggtgctgggaaaactggacagctatctgtaaaagaatgaaattagaacacttcctaataccatgcacaaagaaaaactcaaaatgggttaaaggataaatgtaagaccagaaactataagactcatagaggaaaacacaggcagaatattcagacataaatcacaccaagatcctctatgacccacgtcttaaataaacacaaaaatgaacaagtgaaacctaattaaacttaaaggctttggcacaacattctgtcatctgatggggcttagtatttaatctgctgcacaaaatatagcccaacatacctgggataagtgtattaggtactcacatactcatgatattatggccttgttgccaaactgtgaagaatgctacttatagggtagagtcatttggttatcactagaaaattgaatttggccctgacaattacttttacgaactccttaaccctcagtgctagaaccaaacttagttatcttttttctcaaatcaggatgctgcatactaccaataatccctttttcatcacaattcttatagatgatgaatatctatcaaagctggctaatcaaatgagatgctaggatttttaaacaattatgcaaataatgtacttagatccccaaaaagtgtactttccaaatattacagcaaataatataaacaagaatgagaccaagttaaggcttcaccagaatttactctctgagtttataaaaccaagaaactgaataacaagcatcatggaatcacttcttgaatagtaatgactagtgctaacgaatttcatgtagttccttaaggacaccatcctgtctcatgactcttcgtgtttctatatgctttttcttctgcctggaatgcattctctcaccagttcaccagccaaatcactttgtcctccctcaattcttagttaaagctctatctacaattctaaaacttttttactcttctaacaaataccagtgctctattgaccagactgacatatgcaaattcactggtaa

SEQ ID NO: 51863 - DNA, 889 bp, Bovine  19866880469987
  misc_feature (1)..(1): n is a, c, g, or t
ntagctgtgtcctctgcatgactttcagtcttgcctgcaaccaataatgagaatgcagcccattttaaagtaaaatcacttttgcagaaaggtttgtttccccttcttttgttaccttgatatactactagtttcaaatgcctcatttaaactttaaagaaaattcctgatgtccttgctttacatttcgagagatccaatagtgtaccaggtcttgagataataatctattcataggtttatagaaagagtgaataacttagttggataaacttaagctaaatcaggagctttaaaaaaagtcctgagaattctgaccacataaataagcttctcttgcttttatatgtggtgaataactaagcatttaataaaagtaagttcttatttttgaatgtactatgttctgaatcccataggataccatgttattattgccttccattgttctgagatggaaaactgatgctcatagttggtacttaaacagatttgtaaaattaaaaattagaatttgaattgagttattttagatcttaacactattatgaaacagtatccttgtgtttagactgagcaaaatttagaatataagggggggaaaaagtgtctagcatgtcagtaaaggcaagaacaagctaaaagtttaagaagaatttcacatcagcagtggaatgttttgataaatcagtttataaaaaaaaataggggaaggtaacagagacttggaacagggaatttcaaaactgtttccagctttattgagatatatttgacatataaacttatttaaggtatacagtggtgatgtttcaatatatatatgcattgagaaaggattaccacagtaaggtgaacaatgtgggggaatatgccactttcaaatatg

SEQ ID NO: 51864 - DNA, 1569 bp, Bovine  19866880598881
  misc_feature (1)..(1): n is a, c, g, or t
natgtatagatgttttatacatctaaaattactccaaaataaaaaagtttattttaaaatgcccccccacactaccaaatggggcttccctggtagctcagctggtaaagaatccacctgtaatacaggagatcccagttcagttcctgggttaggaagatcccctggagaaaggataggctacccactccagtactgtggtcttccctggtggctcagctggtaaagaatttgctgcagtgtgggagagctaggttcaatccctgggttggaaagatcccctggagaagggaatggccacccactccagtattctggcctggagaattccatggactgtatagtccatggggtggcaaagagtcaaacacaactgagtgactttcaccttcaaacactaccaaacattccctctgagcaatagcaccctgaatggagaaaactattagactaacctttttaaaatgcacatccaatcatgtcactttctggaaaaatttttaaataagcaccccacccttatttatcacgtaagatccacactgtattgcttttgatgacctttctgaacacatctctttctactccatctctgatacccatcttttcctttaccactcctggattttcacattctcctgactgtgtctattgtttcatgcttatatacctccacactaccttgtagcatggtagtagacatgatttagaaatagattataatgaatatttgtctgagtttaagaaagattaaatgggccaaggagaatggctgttagtgttcactttagtcattccctgctacctacaatagtcattctctctgacagaatcttttgatcaaagatctagtcatgtagattattgtctgcttgaaaaatggcctgttgtgccccaagaatgaactagaggtgatgaagcccatagcatgtgcagtatcagacctcacaattctatagctcagatacgttcacagcaaaactttgacagatggctctcagaaatgattcacttaatttaagcatttgattattgtgataatgagaggatggtaaatattaacacagatttaacctctcagtagatggaagttaaatcataactcacatgaaaaaaaaagaacagaagtgttctgtgtttaagtgaaagtgaaagttgctcaatcatgtccgactctttgtgaccccatggacaacacagtccatggaattctccaggcgggaatactgaaatgggtagccatttccttttccaggccagaatactggagtagatcaccattcccttctccaggggattttccaaacccagggattgaacccagctctcccacattgtaggcagattctttacaagctgagccaccaggtaagtccaagaatactggagtgggtagcctatcccttctccagggaattttctctacccaggaatcaaaccagggtctgctgctttgtaggaggattctttgtaggagctcccagggaagtctatgtttgttttaagggcattatttattaatagtaagatatattggtttattatctttgcatcttctgtgacccatta

SEQ ID NO: 51865 - DNA, 1178 bp, Bovine  19866880749889
  misc_feature (1)..(1): n is a, c, g, or t
nagtgcacaagctcgctaagtcacttcagtcctatcagactctttgtgagcctatggacttagcctgccaggctcctctgaccatgggattctccaggcaagaattctggagtgagttgccatgcccttctccaggtcatcttcccgaccccggggatagaatcacttttaagtctcctgcattggcaggcgaattcttttcccctagcaccacctgggaagcccatataaagagtatataacagatctaagaaaagggacttgtgggtggggagggaagctggcattctattttaataacatggttatggatctggaagaaagcaggttatctgtaactataaaacttcagcttttacaaatgggaatcccaaatgtttggatattttcctttttcttttcttaaagggggtcctgtcctaaaatctagacttgtttattttcttttttacagagagttaacacggagacaacctactccatttcaaattcgggtaactgtgaggctttttaaaaaattatttttaatattcgtcatctggcttttgatgttaaaatatgtatgattatggagcctcaagtaagaattaactcgaaagccataagtaattaattcattcagtaaccagcctagagtaactcttcaaattttaatatttcattcctaataaaccacattgacagaaaactcagagttcctttggcaaaagcaaatgtgtggctggagataacttgttttatctagttatgtttaaaaagctaaataataaaggtcttcttaataacatttacccaaacagcagttgaagattcaaattcacaaatccatggtaccatgtcataatctattctcctagattaatatcttgaaaactacaaacttgatccttagtaggatgtattcaactgagtagcatacagggcatgaaatacctataaaatacgatgataatgcttaagaagccacattataatccatgatacaggaccaggagtttgcctcaagttatattagaatgactttagtggagtttggcttaaagttttttagggggtgatttatgaaatgaatggagtataaataatactgagtagaaataaatcaatattaaacttgtgtgtcatttaacatattgatactgatcctccagtaacacaaagtctgccacttcaggcca

SEQ ID NO: 51866 - DNA, 1486 bp, Bovine  19866881053472
  misc_feature (1)..(1): n is a, c, g, or t
ntggttagctagatcatgaagatcttttttgtatagttattctatgtattcttgccacctcttcttaatatcttctgcttctgttacgtccatatcatttctgttctttcttgtccccatctttgcatggaatgttctcttggtatctctaattttcttgaagagatctctagtttttcccattctattgttttcctctatttctttgcattgatcgctgaggaaggctctcttgtctcttcttgctattctttggaactctgcattcaaatgggtatatctttccttttctcctttgcctttagcttctcttattttgtcagctatttgtaagttcttctcggacaaccattttgcctttttgcatttctttttctttgggatatacttgatcactgcctcctgtacaatgtcacggatctctgtccatagttcttcaggcactctatcagacatggttctccatctcccaggaatattcctccttaccgtaattctgcctcttatccaaatttcccttcttatagaaattatctgtaaccatgattgtcctccccaatagactaagtttcttgaaatcaaggacatatcaggatatatacttaaggtgcattctaaataaaccaacgctatacccaggtcacagaactgtagctcaagcttgcaactttttagttttgttttaatagatatagcagaatgaccttgatatcgaattcttacactgacttattcctttccaaataatgttttctctccactaaaagggacttactgttaggagaagaaagagtctctggcctcataataattctccacatgctggaggagtttgtgataaggtcctggatcgcatgtaatattactgacctttactgcctctattctgaacatccacaggaactgtctacagattgagagcaactcaaaatagaattctattcatttagttccaatgtacactttagaggattagttcctaatagcatttaatttgtcattttctggctttctttcctaaataatgatcacttactcatgttagtgcataaataaacagaatgattaaagattaaaatgacatatctttctttttcttatctaagcactaacgaattctaaaccatggctttacatttaatctactgttttgatattattgagagacagaaattgagattattggaaaattcgcaagtattccccttccagtactgatttcttgatatttaggttaatcaggtgacatatgaccagggtagacttgacccaagatgtactaataactccctgctaatctacagaggttggttcaaactactggcatgaaactctagccaggtcaattatgtcctcttctccctggatagaaaaaggtaatttgtacttgggcaaaatgtttctctggatacgtttgctttggagagagagtcgaggtaaagactaggaaagagggagaggggaaaaacaagagagaaaccagaaa

SEQ ID NO: 51867 - DNA, 1247 bp, Bovine  19866881107257
  misc_feature (1)..(1): n is a, c, g, or t
ntattcttatttttaatgtctctctctctctctttttttaaactgcccaggtccttaaggcagtaagaacccaaacttcctcatcaacaagagcattaagctgtccctttattaactccctcccagaaaaaggctgttattaaccagtggtatccctcaggctgctctattgtctgtagagaaacagggacatgattcgggcattgggcaaagctgaagcagttactaactgctccccacttgaaacttgagaagggattggattgtaaaggttaaactggtcttcccagaccatcctttccataaaaaattattttaaattatgtgcagaaggaagagagttaaaatttcacaagactctaccctggctaggaatttgctagaagtgattaaaatgattaaagctgccctttaggatagcagggtgtattcccattttatagatgaggaggttgaggctctgaaaaatgtaacaatatgagagtgaagctgggaaaacaggatctagccctttaattccaaacacttgtgtaatgggaacagtacaagctatacaaagcaaggatgattaacctaactggatcatgggtggagtaaccaaggatgatagccttcaagaatttgcttaacatcactcctcttgaggaagagttggaattattaggatgagattaatgatgcttccaaacagaaggaatgttttaagtttgggcccagaggcaagaataagaagatttattatgcacaggagctgctaaaaattttttactcatcagccctgggttttctttggaaggaatgatgctaaagctgaaactccagtactttggccacctcatgcaaagagttgactcattggaaaagactctgatgctgggagggattgggggcaggagaaaaaggggatgacagaggatgagatggctggatggcatcaccgacttgatggacgtgagtttgagtgaactctgggagttggtgatgaacagggaggcctggcgtgctgcaattcatggggttgcaaagagtcggacacaactgagtgactgaactgaactgaactgtactaattcctagaaagacttttcagatacaatatcccgttagaaatctctgtaaattatcaccctaacatttccccactctttccctcccacacacaaaaaaagtaacaattgtttggttatgcaggttattaaggaagcataattaggaaaaaagatagttcatttaggacttatgtcagc

SEQ ID NO: 51868 - DNA, 942 bp, Bovine  19866881125648
  misc_feature (1)..(1): n is a, c, g, or t
natttagactgcagtgaaggaaaccaaaggttgtcacctattttatgccttgtttcagatgtctacaaaacttgtttctatccttggactcactgtaacttcattactcttttcaagtcaaatcacatcccaacctcaacaattcaaattggtctaggatccctcactaacaaaatgttaatatttatgagtaatgcattttggtttcagagatagggagagaaaacttcagggagacagaatgagttattgacctgctatagaatgtgtcatttggacagagctgctttgtaggaagagatgattcaaatgcacaatttcaaggggcaatgcaatctagtttgctaatctctcattatgctaaggtgaggcttttgtgaatgctgactgctcattagcatctctaacccacagaagaatccagataatgggtgccagttttattatcattattgagcattctgtttacattcctttctttttttgaaaaaaaaaaaaaaagttttattggaatatagttgctttacaatattgtgttatttttctgctttcataaagctatgatttaaaaaattaagtgcagtaaaaggtaaagacagaccattttctctatgatcatggacagcacatattaggcaatatttatttgtttttgacttgaaagaattcaagtgagcacctcataacctctgaagtcacttatctcccttcctgagccacatctaccttgaccaccactgagcacgtttcttcacataccagttttgctcccacatcaggcaagctggtgtctcctttttgagaaaacgcagtttcaagactgcacctaaaatcattttttatctaatgtatgtgaagtgtttttgcccattagctggctagaaggaaatagtttttttgtgtgtttggttggttttttaaaataattaaatttacttattt

SEQ ID NO: 51869 - DNA, 1953 bp, Bovine  19866881127257
  misc_feature (1)..(1): n is a, c, g, or t
natgggtgggaagaaagaatacaatcacacatattaacagaagtacccaaagaggatttctgctttattacaacaaggaaaagaaatgcagatttaaagaacttagacccctgcaaatggtgattcattcttaactccaatgagcttaattttgtcattaagcaccagatgcatataaaaagctacaggggacttgcatatttggcgagagttgtagggaactgtacaataaggagagaaaagtgagaatgaataggaacacacaagaaaagctgttggaaaggaaaaaaaaaaaaggtgttgagatgccaaaacactagaggatagaatactcattcattaatttggcaagttcctttcattctaacttctaaagagatctggccacagcacacttctcaacactccagtgcaactgagcattgtctctggtccacacacagattctagtttcttttcttccacttctcccaccaaagaaagtatactttacagacagaaatcttttaaaacatgaacaaataatatcaactccattgttcaaaactcatcagtctcccttcacactttaataaaaagtcttttctactctgtaaagctgtcaaaaacctggagctcaccacctgtctgacctcaatttcctcctcattttcactcactggttgctgtgctccacatatacttttgtttctaaatgttacatctgctcctactctaggagtttgtcactagcttttccctgttcctaaaatacattttccctcatatccctagttaatcatcttcttttaagtcactcttagaaaaataccccatcatccttctttctcttacattactatgatttatttttattatggcctgtatcactacttataattctttctatatacatttttttctctctgctccactacaatgtaaaccccttaaggccaaattctgattttcttggttcacagcaaaattgcctaccacctagaatattccataagacagcatacgatctagataaatgttttttaatgattactgttttcattatcaacttaacaaatatttacaacaaatttagtatgtgccacatcctatagcaggttttgtggtgcaatgatgtgagcaaagagagtttccttcatggggtttttagtctagtatgtgaggtagatcatagcctattattataccaattttcaacaatatggctgtggtgaggacagggaaggaaaggtctaagaatgttagaagtccaagaaatcttaagaaaagaatgttttagcagagaccgaaaaggataaatatgaattaaactgataaagttaattaaagggacacggagcatcccaggcagagaaaagtgtgtgaaaaaaagaacagggaagacaaaaagatctggatgagcagtgtggacaaaacacagacagcaggggtaaaacaaggtgccccagagtgatctggttatctatggcagtgtgacaaatcaccatgaagcttagtagcttaaaataataataatatttatttttatgatgaatttacaacttgggcagggttcagtaaggagtgacactgaagctgaagctccagcactttggtcatctgatgtgaacggccaactcattggaaaagtccctgatgctgggaaagatcaagagcggaaagagaagagggtgtcagaggatgagatgactggatggcatcaccgaggcaatggacatgaacttgggcaaacttttggagatggcaagagacagggaggcttggcatgcccgcagtccatgggggttgcaaagagtcagacacgactgggtgactgagcaacaacggtaagtacagttttctctgttccctccatgtagctggagtaggggtggctttaaaggtgtgaatgaatccatatctaactagcatctttggctgtcagcttaaaaggtcagctagggcattgactgg

SEQ ID NO: 51870 - DNA, 781 bp, Bovine  19866881225356
  misc_feature (1)..(1): n is a, c, g, or t
natttgttacataggccaccacaataggagagttacctcagtctaacaacctcccttgtttaacaggagagatacactctgtgtgtctatgaattaactactatacacatgcacacacagaaagaagtacaaacaatccatttctatcttcaaatagaaataaaatggggctgactttttcaaaagaaaatcaaatgcttaacaaagttaagttgatatgtaaatagaacacaaagtcttttttttggcagtcatcagctgtaattaatttaatgccatgtatttagcacaaaattgtgtaacatttttataggatagatcttcaaatagtagattctttccttctatattccaatggcttggttagtcacataatcatttaaacaaagggcatttatcctgctctgcctaggaaagcatccacatttggcaatccaaaatcaaatgttgtgaagattacccttccacatacagcgagatgtgacaatttagaaagacaatgggcatgttaatctattcaacggagtttcaaagttagtagcatttgaaagaataaataaaatcataaaatctacagctgttgagacagatgagccaacaaggggaccagttatccattcacttctctttagcaaagaacaattcctttgccagtgggttagatcttccttattgtcttatttatgttgactgtaaagaaggcagaacgccaaagaattgatgctgttgaactgtggtgcggaagagactcctaaaagtccctggacttcaagaatcaaac

SEQ ID NO: 51871 - DNA, 953 bp, Bovine  19866881254510
  misc_feature (1)..(1): n is a, c, g, or t
natgaagaacttttttaaatgcaagccagtctaggtctctcgggtgacacaggaagtttaagtattgcaaagtgcaactcactgagctaaggggcataaggataaacttctactttaagaatatggactctaatgctaaattgcctggaatttaatcctagctgcttgatttactagctgtaaattgaccttggccatagtcttcaacctctctgttacagattttttcacctgtaaaacaggacagtaatgcttttcaattcacaaactagttgaaaaaaataaataagtgaatacatgaaaaataatgtgaagagtctgacatagactgcatataatgtacaatcatgaaaagccaacacacttattttgttccattatttttattttcaagactgctggcaactcgaagtcattgtaagttccaaaggctttctgtataaaagacatataaggagatctttttgtatttagttaatgccttgggcttgatttattactccttctgccactgaccatcctgtgagatggtacagtctccccattgtactcagcttcgttgtcacgtgtatgactcaaactctaaatcttgagtcttaactgggctgctctagcaatttccatcagtttaacttcatgtatttgagacttttggtaaccaggtcctgtagccactttttaatttaatctccagggaattcttggcttttatattccaaacaacttggagcaggggtgttcttatgataagaagtaagtatttctaatgtgaagaatactttccatgggttctcacattgtgggcagtatcctcccaccccaccttctgatatagttatcagggtctgaatgcagctttcaaatcaattccgtatttaactactcttaattctatgctgttagtaccagaatagtgatttatcactgagcagaaatccatttaatgatgtcaa

SEQ ID NO: 51872 - DNA, 1428 bp, Bovine  19866881268317
  misc_feature (1)..(1): n is a, c, g, or t
ntatttatgcttatctggatacttttctgataagaatcccagggcttggtgtgacatttaaagtcagaaggacattcctgatatttatgaactgtgtaaccttgagcaactgaacagtcctcaaagagccttatatatggacaagaatcatatctacttaaagaggtgttatgagggtaaatgagaaagtactcaaaaaggcattataaacagatattacactttgaggtcttaccattactaaaaaaggaccacaatctctagtctaagctcttggtgtcaaacagttcagaattcaaaacttagagtttagaaatataatattgagcccatattccatattatatagcactgacatgaatagttcaatatttttttaatattaagacatagttttaaaatagtgcagttgatttacatcctctcagttcatgtcctgccacacagtgagtaggtcagatcagatttcacactaacaagttacaataatgtattattgaaagacttgggattttagaatggaagtttactatgtatattataggagatggtatatattaaatgcctagcaaacatctggctgtctccttggtgcatattaaatgcttatcccttcttgagctttctcttttgtgtcccctaatccacagcccgtctctcgtttccccagtgacacggctgggcttccatccctcagcctccttatagcaaaactgtactgttcagtcctagttcaaacagagcattggactttcaaacagcttttcctctatgagattttctccttttcctaaatactctcatctttctccccccatctcccatttccctttctatgaatgtttttacttctcgacatgttgttatttaaaatgtctctggcaattatgagggcttccgtggtgactcagagagtaaagagtctgcctgcaacacgggagacctggattcaatccctgggtcgtgaaaatcccatggagaaggaaatagcaacccactccagtatttttgcctggagaattccatggacagaggagtctggagggctacagtccatggggtggaaagagtgacactgccaaagcgacaacatattaaacacccaggccaggttcccttacatttctttcctttcttaaaacaacgaagtcctggtgaacccagttttgtaggcatgtccacttcttcttccaattctgaaaggtttttggatgcacctcatggcttgcaggatcttagttccctggaatccaaccccagccccctgaagtgcaagtgcagaatcctaacccctgcaccgccaggaaattccctgagagaggttgttttcgagaagcttttgtgtccttctgtttccacatggttctgtctctcccaagggcatccatactgggtatgagcaggaccccagaacccatttcttcctca

SEQ ID NO: 51873 - DNA, 1026 bp, Bovine  19866881315747
  misc_feature (1)..(1): n is a, c, g, or t
natcacaagaatagcctttttaggatgtccctgttggtgcagtggataggaatctgcttgccagtgcagaggacacgggttctatccccagcctgggaagttccatatgccacagagcaactaagtctgtgcaccacaactcctgagcctgtgctctagagtccgtgttctgcaacaagagaagccactgcagtgagaagcccctgaccacaacaaagaatagcccttactctttgcacctacagaaagcccacgcacagctgccaggacccagggcaaccaaaaacaaagcaaggatttgcaaaaagaaaaaaatagttttttaaaataaaagaatgcctaacacatattagctgttattaccatttgtacatgtattatttcatgaaatctttgcaaaaacttaactgaataataattgttattctccctgagtcttatcctgttatttaacctctctatatattgcagaggtgagatttgaactgaattgaaatccagcctagggtcttaaccactaagcccaacttttgaagttaacattgtatgggagagaacagggtggagcagaagatgctctatctcttgctttgtaaagctattcctttgctgtttagagaatccttttgaattcacgtttctctcagcttaactgtggcacacatcattaggcttaaataggtaaactattttttatatgctttttttggcaaaatcagatgttgtattagataccttcaaaggcatttgtgagcagtgcacatttgatatctctgtatctgtattgatgggctctttgactacttaatgttttaaggtaattaaaccacaaaaactcattgaaataatgtttggggctgacttaaactcttaaaagccattagctgttaactgccaagttgctctgagtctctgtctgcatgaaattgaatcatatttgagagggtttgtaggctagtggcaagattcataaaaccctgacagttttacatctttcatcacaaaccaggaaatcagaggaaggga

SEQ ID NO: 51874 - DNA, 806 bp, Bovine  19866881450651
  misc_feature (1)..(1): n is a, c, g, or t
nctaggaactgcaggacacacggaatgtattcaatgtatatatcttaaagaggatatagtaaaatactctcaaaataaaaaggaaaattaactgttatgcattctgcttctttctttgttcatttgtgaattttccaccattcattattaacttcaatatatgaagattttcagtcatgtaggagtcaccaaattggcattttccatgacaatctgctttacttagcacctaactgtgtctaaggagggcatatattcttcttttcaatatttatataagtccaatgcaaacaccaaaccaactcacttttatttagtattcaaggctaagtgaaatgtttctcaaattcctttttaatggtttcatttttattcagttatctctacgtgatttagttatatgtctttttagaacagtattccaagggtaatattttataagtccaaggatatctaaaagaaaagcatccatgaattcttaactttaagatctgtgacatatttaactatgaaaacattctaggtggcattgaaaaacctaatgcatctaaagaatctctgttgatttcagcacagcgttactttaatgactaatttcataaatagcacttgtgtcactgaaccatgaaactgtaaatctctttccttccattagtctctttgataaaaatggttgaatagccttataagtttacaaattatatcaacaacattcagaatttattttatcttgatggaatcaattcaataaataaagtataattctagtcaatgacattttgtatcagcattttaaattcttcagt

SEQ ID NO: 51875 - DNA, 786 bp, Bovine  19866880531200
  misc_feature (1)..(1): n is a, c, g, or t
ntttatctttcccttgcaaagtctgacagacttatattccaagagtatttgtattctaaatcttgggttttacttaatgtatatgcctcagaagagcaggtgttttcaaccacgtgcggaaaagctgaccctgaaattgtgtgtgctatctcataatttttatggatggttatcataggatttttgtactggacaaagatcagtttaaaacaagtagaggtaaatgcaattaaatacagcttgttattaagtggtatccactttatgtcaaatcttgtcctccaaaatatttaaagtacataactataaaaacttgataagctgttcacctgaagagaaagcaatcatattatatacggattaataaatgcaagaaacaagaaagtgtgaagtagaatgaaaggtcaggaatcagggagagagaagaaagacagcaatggtaggcaggaagcaaaatattatgcaaaacagataaagaataaaagaatttcaacaaaatgatgcattgttactccttagttgtctggtctcttttccccagttttaaaaacattaatatttgtgatcacattaaaattttaaaattctacatcactgttcttacatatatattaataagaccctttctctccttatttcttccttaccaccagttttgccagccaggaaatactcttagaaaactacatctgtgtggatagatggagcaaaggaagagagagaaggaggaatagtatatatatatatatatatatatacacacatacatgtatatataaccaggca

SEQ ID NO: 51876 - DNA, 2950 bp, Bovine  19866880555447
  misc_feature (1)..(1): n is a, c, g, or t
ncccactccagtattcttgcctgagaatccccatggacagaggagcctagccagctacagttcatgaggttgcaaagagtcagacacaactgagcaactatccacaacacaagataaggtgttgatagaaatggatctggatggctttaggagatagaaataacctattcatgccagctggggctgtcagcacatgtgagatgaggtacaacaggacatgagaagaggaacagaactgagtcctctagaatctgaatagctaagccaggagttgaacagtggaaatagatcctgtgattggtatcagagattcattcttacatcagtcataggagacagaatggacccacaacccctggtagatatgacacatcattgaacaagagggagataatgtcacataagtggtcttagaagatgttcagttataaatggtaatggatagaaaatatgaattacctttcattgtaaaatgggacaagattgataaaaacaggtctggttcttctatggacaacagaagacttagcagtttgaaggagtagtgatattgtcaatggatatctactttgataaactaaagtgaatcagggaatatgtcatagtactgatggaggaagaaaagggggactggaaaagacagaaggaaagggaggtcttctgagcattgtttgcttaaagttcatagaaaagctcattttaaaaatatactttaatgaataaaataatacttctttccacatatcagactcagaaaaaataataagtcttaggtgaggcagccatttaaaatacaagacctttgcatgttatcaatacctttgcatgtttatacagaagacattaaatttcagttgtttttttggtctggaaaacattcctatcatgttggaagtcaattttacatgagtcaagtttctgcatatttaagtactgacagtttttctcccttcaaagcaaatagtggataatttactcaaagtctattataaaaggttgagtttcccaaaacttggcatttcttcattgtgacacaaacctcctgcatggacagtatccacctaggtcacttgatatcactcacctatatgggacttggaggtcaaatgaaaactgaaggaaacatgaagctcatatttcttgctatgccatgagtaagacctttgtctcagacacagtagtcatgaaactggcaggctaacctgtaaacttggaagtaggataaaatctcagacctttcctggttcttgacaattctagcattatgtatctgaaaatctaatctgagttcagtaaacactttgtttttgttgctgttgatcagttgctaaatcttgtccaactctttacaactgtagctgccaggctcctctgtcctccactatctccctggtgttgctcaatttcatgatccattaagtcggtgatactctctaatcatctcatcctctactgccccccttctccatttgtcttcaatctttcccagcatcagggtcttttctaataagctggttcttcacatacagggccaaaaaggggcttcagcaacagtccgtccaatgaatattcaggctcgatttcctttagaattaactggtttgatcaacttgcagttcaagggactctcaagacttacacttcacttacctgtaaaatgtattgttagcaggctcttgacatggtaggatgtaaccaccacggacatgtaggtttatttcatataaaggagctgcaaatgtatgaaatgtttctctgacaccaatatctttgccctggaaatgggacagttgcaagaaaagaacagaagcaataaaagaatcatcagcaatactggtacttgagggggcacatttatataatcaaataatatactttttaattaaaaaaataaaaccacacacatttattcaggaagttatgttggttaaaggataaaccactttattccttagtttatttatagctttgaaattaacttaccactattttttgtagtatgcacatgcagaaaatacatgggtgtttgatgggtcgcaaaagctattcttgacttgtcacatatattattcttggaaggaatgcattactgttaacaatcttcttgcatacttaatgaaaggcaatgacctttttgtgcacaatgtacaattttgaaatttatttagtaaaataaatccatgactatataacaatctatggcacaaaaaattaactctctcactgtttgttaatttgattcagatataattagtaagaaacaatcttactctttttaaatggaaaggaaaataaatatgtcattattaaaaaggctataatcaagatgttactcatttatattttgtcagtcccccagaattctttaattacttactgtatggtaatcaaaccaccgagcattagggacatagccttctacagtgtcaacgtactggaatttaaaaatatagtcattaaaaacatatataccaaagaatattattttgtgaacaaaaatatgtgatgggacttacaggttccaatacaggagtaaccataaatgctggaccccacagaaactgtttgaatatatcccaggttggtttttcatttaaaaacctggataaaatatatacaaagttaaatcaaagacatttagctcttctaaatacaataaaataattattaaaatcatattttgaactatggacttttgtggattgaaatgcaaatcaaactataaaagatcaaaaacaatttcatcacttggaattcaatatgtgaaagtcattcagtcatgtccaactctttgtgaccttatggactatacagtccatggaattctccaggccagaatactggagtgggtagctattcccttttccaggggatcttcccaacccagggattgaacccaggtctccggcattgcaggcagattcttcaccagctgagccaccaaggaagt

SEQ ID NO: 51877 - DNA, 4134 bp, Bovine  19866880619378
  misc_feature (1)..(1): n is a, c, g, or t
ncatttaatgtttgggataatgctctgcatatgaatacttgtatgcctaaaggacaatgatgataggtgtcctctgaaatttacatataaaatcatgagtatatgaaatcatactcaaagtgattcttttttaaaagattcagctgccatttttttgtttttgattgtggctgggcaagagtggaaaggcaagaagtgacaactaataaagagtttagataaagctaaaccagggaaactcatttttaaaacttagaaataagaataaggaggcctggaaaagcccctcttgtagttaccttgtgaagcatgcagcaccctgctctggattctctgcagaaggaaatagtcagaagagcacaggtgatgtaggtcatttgtctgaattacttgctaaggcagactttgataataactttctaatatttaaatgacacatattaaaagaaccatgtgattctagtgatattctaagtctctactaagatcaagcaaaaggatgtgggcctgtgtagcagcaagagagatttcagaaagagtttaggtaagaatttcacaacaatgcaagtagctatacatggtgatgaataagcaagggaagttatagcatagtttctttgaaagtgttttgatattgaagagattctgatatcatcctgaaaatcacttcttaagcttttctttagccctctaagattttaagattatatgttaagggccaattcaaaaacacaactatagagaactggttattttaaaccagaaaaagtctattggtaaactaagaatatcacttcttatgagtcaaatatctagccttcattcaggtttttatttggtaatataccaataaaattgcttggaacaactgaaaatttttctttagctgaaggtacaacaaagaatttaatactttcaataacaatttttaaagaaactgtcaggcagcttactaattcctgagggaaaaaaccacaattttaaagaacactggtgttacatataacatcaatacacaaaatagaaaaaaacaaatgtcctaaaatctttggtatcatttcaaagagttagtaatatatgtgtcccataaaaatatgttttaaaagttaaaaaatatttcaatctggtattaaagataatgacaatatgggtttaaaagtaactcattcaagaactttttcttacaaaccctcattgaatgaatcgagaaccctgtcttccaggagctcctcatgtagctgctgctaagtcacttcagtcgagtacgactctgtgcgaccccatagacggcagcccaccaggctccctcgtccctgggattctccaggagaaaacattggatagggttgccatttccttctccaatgcatgaaagtaaaaagtgaaaagtgcagtcgctcagtcgtgtccgactcttagcgaccccatggactgcagcctaccaggctcctccgtccatgggcttttgcaggcaagagtactggagtggggtgccattgccttttcccctcatgtggcaggcaagaccaattttatcaattactactcaatatgaaaggctggaaaaactccaatggatatgcagagaaggtaaaacctaatcttaaaataccacattttctataagtcaaatcaaaaaaatcaaattagatttttcagtttaggtagtgtatgtctgattatgatacatagacatcaaagatccaatgcatttactttaaaaatcaacattctttaaagcatatcccaccaacttcaataaaactttactgtctaccatttctgttagtcaactgagttttatttttgcttttgatttcaggctcctttactgtgttttgtatttcaaatgacctacctaggaaaatgaggccttcaagccctgagctggttttatatcctgacagtttccagacatgctatgctctccctgggggctggaagatctcaggagaaggctccatctattttcaactaatatctgacaactgtcaaatttctgtgtctcattttaaacttttcatcctcccttcagcctcatttttctagttgcctatatctctgcttgccacttaataaaatatcatcaaaatcaccaagggaacttgttaaaaacaaaaacagtgacccataacagactgaatctcctggattcatgcgtgggaatttggattaacaagccttttgccagcccctcaattcccaggggattaccaagttctatcagtgtgaaagagtactttatgacatatcagtctcattgctaacactgagcctcaggacatatattttaagatctcagttccatataattttcaaactaatcatcacaataattctatgcagtgagaatcattgcttctatgttacacaaaatgaaacagaggctcaaagaaattaagtattatgtggagctatgaacactgccagcatgctgtgtagactgtatggtaggatgaaaaagataaagggccgaaaagtgagccttatatttgaatcctggcaatgatactacccagagggcttcccaggtggcactagtggtaaagaacccgcttgccagtgcaggaaactaaagagacatgggttcaatccctgggtggggaaaatctcctggagaggagcatggcaacccatttcagtatccttgcctggaaaacaccatggacagagaagaatggagagctacagttcacggggccgccaagagtcggacgtgactgagcgacttagcacgcacacgcgtaatgatactacagcagcctgatcttgtcattcgaccttgttgagcccaggtaaatcacaggaaagtggtgattacaatactgacctttataacttatagcataccaagatcactttagaaacgttaatccatttccatctacaattccatttttttcctttttcaatctccttaagcatgagcccattttaaaagtcttcttttagcttctttacttatgagtagaaatgcattaccactttttaacaaccttatgttaatgagtcatctaaatatgattatttgggaggtacatctgttatgtaaaccaccataacaagcctgtttaaataggctaaaattggaaacaatagaatttccaaaattaggagactatcaaagaaagagaaattattaattaaaattataaggtgagccacacagtttaataatatacaagcactaaatattataatttttagagaactgctgtcaaaataataggcataaaataagatgtgaattatattacattatttcatttgaaactgtatgtacacatgcatgtgtatacataaacatatatattggcacttttctcaaaagataggaaatatatcaatgtagtaatagtagttatctttgggtttagtaattatgtattacttttgttttcttctttgtagctttttctgattttacacattttctataaaatatgtgtacattttacagagagaaaaagtaaacattattaaaataaaatttataagtaagttcagttcagtcactcagtcatgtctgattctttgtgaccccacagactgaagcatgctgggcttccctgtccatcaacaactttatttatttataaataaaacaaaaaatgcttcaaaatattagaataggccatgcagtcacttgcttctttttatcctggcatccacaacaaaaatacatttcttacaagggtttctttagtttctgttatacccaatactgtaaaatacttaataaaagataaagatcttctctcagattacacacattaattttcctctgaccatatttggcttccatgagaattctacaaataaaatatctgcaacagaaggctctgaaatcagggaacaaactgttcttaactgtgtgggataatttttcatttacatgagaatcagccttcccaaaataaaatggcagtattcgctctcttctgggcactgttcttttccttttttttttttttttttaaattatcctctctgtgaccttaggcaagtaatttaacctttctgtgtctctatttcttatatagaatagaatgataatagtatcaacttgataagccttttcatttgaggattaaatcagttaatgtttagaaagcccagaagaaaatgatcata

SEQ ID NO: 51878 - DNA, 1223 bp, Bovine  19866880666111
  misc_feature (1)..(1): n is a, c, g, or t
naattactgagggacagagagattaagctacttacctctatctcttgggtagttattaaagaaaatggaactttggtcccctcttcaagaaattttgtactaaaacttattatcgaattctggatgaaagatgtttggcaaatatatcatttttagaatcatgactttcccttcattttcaattattttagcatatcttctgagaaaactgggcagactgttctaatagcaagacagtggtaattggagtccacatttagttggatgtcacagaactggacttacattggcaaatatttaatcatctgtcagcctcttgttggtgactttgagctaatcaatatccagtcatgcatttatgccagctgtattcagttcagtttcaaccatgggcctgattctatttagattggctttgagtctgttctactctgcccacttattatcactattgagtattgcttattactttagttttctgaattttctttgtccccttattaggctctcttattcaatgctaagtcaaaatacttaaaaataaataaataaataaaaatctggtcatacctacaaagcagcaaaagcccaatttcaaagatgtaactcacaaattaagatttaggattatagaatttaaaataactgtggaggtctactcagaaccaccatgcatgcttgctcagtcctttctgactttttgcaacctcatggactgtagcctgccagttccttctatacatgagatttcccaggcaagatcaccagagtgggttgtcatttccttctccaagggaccttcctgacccaggggtcaaacccatgtcaaaccccatatctcctgcattacaggtggattctttgctgctttgccatggggcttccctgatggcttagcagtaaagagtctgcttaccaatgtaggagatgtgggttcaatccctggatcagtaagatcccctggaggagggtgtagcaactcattccagtattcttgcctgggaaatcctgtgagcagaggagcctggtgggccacaatctgcaatctagacagacctgaggttcttttagggatgcttcaagatcaaaaccaatttttttaaaataatttaaggttttatttcctttatactttcattctcacttgaatatgtagtgaaatttaacagaagctatctgactgaatgccacagatatgctccactgccttctattaagccaat

SEQ ID NO: 51879 - DNA, 1164 bp, Bovine  19866880714830
  misc_feature (1)..(1): n is a, c, g, or t
ncctaggttccttcattcttttgattaatttgggtttctcatatttcctatcagtaaatctctttggcctgattcaatgcagcattatccttcattagggagtcggatttcatgctatcagagaacactgtggtagaaagagaccttagagatcatttgcccagtcctttcattttagagattaaaaagggattttagaaagatgctgctttttgaaaaacctcttttgttctgattaaagtttatccttttctggtacacttaaataattttcttatatcttctttacataaacaatcttactattatataaggccagctaactggtgttgtacttcaatcaggcattacaaggttgagaaaagaaagaaaataacattttttgttgttttaagtttcacacactataatacataaattacacctacatgttatagctttaccctaaagttctcaattatgaccaaataattcctatcacatcttatctcttctttgtccattttatattttatgttatgtagaggggagaaagatacctgggaaaagtcattttagtggcattgctgagaataaaaggacatttcagcattttttctgatcattaaaaataatgcaaaatatcaggaataaaagaatataacaaaataatagtgactcattatgtcaccatccagaggttgaatatcttgaagcatttctgttttgtctttttgctgtacatttttctccacatgcatagatgtatgtatgtatgtattttaatttgggagcctggatgctctcttaaaagacaatttaccattttttttgttcggatgtaacacaccaaggataagctggcaactaaaatctcaataatttctacttctgtgtctatcattaattcatagctcaactcaagcagaagggaagttacttagaaaaagtaaaagaaaactacaccccattttgatcctggaaaaactgtagaaattaggagaaatgctttgctgaagaaagcagcaacagtaggaatttctcccctgactacttattcaatcactggtaaagggtaatgcaaggcgtgttgtaaataatctagagttaaatgtgatagaaaggagagaacctttgaaatttagctttctaaattttgactttaaaaatttactttaagttttt

SEQ ID NO: 51880 - DNA, 3006 bp, Bovine  19866880719579
  misc_feature (1)..(1): n is a, c, g, or t
nattatgctagtcaggatgcaaaagtagactaatgtgccaaaatacactatattcactagtgcatttcttgtatcatgaaaatgaatattcattgtggaaaatgtgccaaatataggaaagaatacaattttacaaattaaattatccagaatgctaacatcttgagaaaactaccatcagtggtttagatgcattttgtagtttagttatagtttaaaacattgacctttttgtcttatttcctatatatgaaaatttaaaaaaacactttgaaaaatgtatacattaacatactacaattgtctagaattctacaagtcataaataacactcaatgtttttagtatatttattttatattatagtattatatgagcatatgtatttgtatactgaatattagttactgaaagaacatcattggtccgagattcaaaagagtatgaaaagggggctatatgtcagataatatcacatcttaagtgatttactattatttctcaattaaaatagaagcaacacagtggatcatgtaattcaatatgagttttaattatcaagaaaatcattagttaagtttattgtctattaagatggcttttatttattttcctaaggaaaccaataactgagagagacaaaacaaaaacttttggtttaataatgcactgagcctagtagctcaactgtatagtttccatattattagcaagtgcctaaagaataaagcactgtttcatttttaagcttctatcaattcagggaaaaacatttcatctgtactcttgacaaaaggagtaagcttaagagatattcgctgatataggggaaggaaaaacaaagaaacagataaaggtagtaccatagcattaagcttcacattttaagctgtaggatttatttttgtctttagactctaaacagaataagcagttagttttgttaatctatcaataccatattttttcattttaaattgtaaattgttatctacttcctgattttttgttggagttacactcaaaacatttttatgtttaagatttattattaaaatcactgtggatggtgactgcagccacaaaataaaatgatgctttctccttggaagaaaagctactacaaagctagacattaagctatttcaaagctagatattaaaaagcagagatacagctttgctgacaaaggtccatgtagtcaaagctatagtttttccagtagtcatatatgcatgtgagagttggaccataaagaaggctgagggccaaagaattgatgcttttgaactgtggtactggaacagactcttgagagttccttatacagccaggagataaaactagtcaatcctaaagaaaatcaactttgaatattcattggaaggactgatgctgaaactgaagctacagtaccttggccacctaatgcaaagagccgactcactggaaaagaccctcatcctgggaaagattgagggcaagaggcgaagggggtgacacatgatgagatggttagataacatcattgactcaatggacatgagtttgaacaaactctgagagagagtgaaagaaagagaagcctggtgtgctccagtccatggcatcccaaagagtcagaaacaacttagtggctgaataacaattagtgccatttgtttctgagcccatacatatctggggtaagtcttttaattttctgcatgaatgggaaatgaaagagcataatatttcttattcttaacattttattttaaaatcctatcatattactccatattttctgccgagaagtgttctgaaacaagttatttacttctttttctttatgaatgactctcagatttatttctttataaattaaaaatttgctaggggcttcccaggtggcattagtgggtaaagaaccctcatgcaaatgcaggaggcttaatagacatgggtttggtccctgggtcagaaagatcccatggaggtggaaatagcaatctactccagtattcttgcctggggaatcccatggacaaaggagcctagtgggctttgtaggatctatggggttgccaagagttggacacaactgaagtgactgagcacagcacaagctatattaggttaaagtcttctattctttatttttctttagaaggttgtaatggtttggatctgcattctcagttctctttaatctaaagtacttttatggttaatttatgatatagtttattgtttctgccttagtttatttcatttccttcttggaaacatcttccatgttctctcttgattttccttgctctagggcatgggagatgcaagttcttgtgtgatctccttactacttaatttctcaggtcatagaatctgggcttctctgatggctcagaggtaaagaatctgcctgcaatgcaggagtcacagagacacaggttcagtcgttgggtggtgaagttcccctagaggagagcatggcaactcacttcagtattcttgcctggaaaatcccatggacagaggagcctggtgggctacagtccatagggttgcaaagagtcggacacgactgaagtgacttagcacacatagaatctactttctctttctctggctgcttagacttggtttctgactacagggattgatttagacctcttgagacatttttacattctttctgttacctggaacatgtgtcttattttatactcttctaattctcactggtgttatttctaaacttgttacttccctctcactctccattcttaaaaggaaaccaaacagtttttaaacattcttcaatatgtattttgaacagattttgaagctacaccaataataattataaaataacctgagcctttcccaacaaaatgaggatatcaaatatattttgttccttaactttagtaatgctaattagaggtttcataatgtcttttgctccctctactgtttgttacattatgtattggactttggaaagtgttagataccattttg

SEQ ID NO: 51881 - DNA, 3055 bp, Bovine  19866880758730
  misc_feature (1)..(1): n is a, c, g, or t
natatttattgtgcaccaattacgtatcaagttgcaagtgaggctctaaagaagagatggtcccaaatttaagcctaggcaaaatgtttaaggtctttatttccagataattattagtttgatatgatttatactatttaaactagttcatatgccagctgttgcaactagtagctgccattacatctaatgtataaagtaaaataataaattctccttaatattatgatctatatggaaagattacatgaagggaaagaaaaattatatatgtttatagtaaaatttgagttacatggtgatgatgtgtgttaacattggtataataaaaaatctatttaatatttaagtttaatagtgtaacatattttcgtaatttgaatacttgtgagacatttttcttggctatttgccttgaaaaaaattttttaaaatctccatgtttaccagttaacggtacacatgttaaattctctcccatttttaacatcaaaagtggcatcaggtacacatatacacaggggcttcccaggtggctcaatggtaaagaatctgcctgtaaatgcaggaaccacaggtgatgcaggttcaatcttgggttgggaagatcccctagaggaggaaatggcagcccactccatattcttgcctggagaatcccatgggtagaggagcctagcaggctacagtccatggagtcgcaaagactcagacatgactgagctacagagcacacatacatacacacatacatacgtgtacacacccatacacatgcatatatgttataaaaatgatagttcaacaggaactgagcattttggagtgtcattacctaacagaatctgaagtatgtgtgacttttgatataaacatcacaaaatgggaatacacacatatacaccttcactcattgaccttttaatcccatacaagttataatgactaaggaagagtcatttagggttaagtgaatccatttatttacacttaatttgctccagttgaattccttctccccaaataataaaaaaataaatggtttttaaaattaagaaaaatagttacaagaatcaatattactttattttccacagattcttcttgttcatgtcattatcacaaacaatttaatagagtgtagatattctttcttaaaagttatatatttatcaaaggtcacacttttaagcagtagtttgagaggatagaatttcataaagaattataaatttaacaatagatttttaagtatgtaaaatattaactggctattttgaattgaagtacagaaaagcaggctcagtaatttccattatctctcatctgtgcatacataaataaaaataaatgtggcctaataaatggctatacttttaaaatatgaatatatccaatattgaataattgtcttaatataattatcatactatatatctattcatagatatataaaatactttggctgcagacctgtgtgggagatcgttctggaatgcagtttattctgtggttgataggatcgttcagtacacttgggcatgtgcctcgggttgaatcactgatttctgagacagaaacaggtcaataaaacaaaacatggttttaaatttacttttcaaattttcaagtaacaaatacatttaaagtaaatacaaatatatatatatataatgaaaattaaacttaacttaaaaaaaaccctacaaattgaattcctaattaccgaaaggaaatgatccaaaagccctttgactgttccttaagagaatcaaagtatattcacagaaggtcttaaaagacagactcaaaaggaaacaaaatgttttctgcaccatactcataaactgtgttttagagatgaagaaagaagatggagaaatatgtatgggaaatatatatggagagaggatgcagagaaggagacaagaattagagaagaaaaaaagtttaggaggaagaagatacttaaacagaagagaaagaagagaatagcaaagaaaagcaaaacctcaactctatataataaagagggactttctaacaaccagagatgaggaagataaatttgattgcttcataatagagcaagctttcagtttactagaagaatatgaaacaagaggcagcagaaaacactaactactgttagactagaaaataatttgcagtacattttccacttctgatttaattaggcgagaatgacgaagaaagaacaagtagatcaggtggatgaaagtagcatgcgttaactctaaattaggatataaatattcaggaaaaaatggtaaacacttcaagcctgtttcacctactctctgtttctctcatatgacctcactccttaaaaaaaaaaaaagtctatgacaaagatgttatccccttaaatttcctaaccccgcttgcaagtgctgaaagctagagtaaaacccgactaatgagatttcccactagttagaagaacctcactggtaactacagaagattactgtgctgtttattaatattttgtttcttttgcctattttctagttctaaaaaaaggccattaatatcaaagcatatgaatttcttaattgcaatgacacttcattgaaatatctgtaatataatggctagaaaaagttggagtaactgtaacttacctgagatctttctttaagtatttcatctcatatagatctcatatagattataaactacttttcaagatccataattattatagagtaaactttatctcaacctcactataatgtataagtattttcaatattatttaccttcaacagcaggtgtcttagttgctaaaacaacaattagggcaatagctattattgtaactatagcaaagaggacaatcagagtaatttctaatccagaaaatttctgctttgccatctaaagaaagaaaaagaatatacatttgaaatgtagaatatataataaatgaccataattatcataaaattatatattttttctactaagcataatgcaagcagagctgcagacagctctaacagtttataatctaaaataatgcacattt

SEQ ID NO: 51882 - DNA, 1206 bp, Bovine  19866880778884
  misc_feature (1)..(1): n is a, c, g, or t
naaattttggataaagtgctatattgaagagactacattttcctgtatgattaaaactgttttctactcttcattgcatttctttctttatgagaaacatctgtttgaaaatatggcataacagaaactttcttgttgaattgaatcactaggtaaatatatagctacagaagaagaaagtagaaaagagacaaaatataaagaatgttgtggagttaatttcccatagaattctttatcggttgaagattgtcagcctaaaagatgtactaactttcctaatgctatggttcaagggttttattccaatatgcctttaaaaactttccttggagcatttatagtactttccgtcttcaaaatagtttaaaactgtcaactagctagtcctcacaacatccttttgaggcaggtaaccattattattcccattttacacttgggaaaaaagggtaaaacgattaaaaaagaatagtgactcagccagaactttgtagctgaattctagcctattacacagtcctatccttcaccaaggttttcttttaatagctacccttgtaatcatgttggtttaattaagtcaaatattcagtaagtagtagctgagcaggaactcaatacaacatttagtttctagatgaatttgatcttacatccacaaaaatatgataaactaatatacacatgtgcatttgtgcacacatacagagacacacctatgtgagtatatgtgtgtacgctgtgtgtgtgagatggcagtgatgcaaaatttaaatgaatatatttgattatccatagcaatatattttaacctgcatgaggaagatgcagtgattcaagagagagatatcctctacttaaatattatcaatgaaaggggccatttactaggtgtcattcagatcacctctaaaagcatattgcaaacatcttcctctttatctccagtcttacaactctagatgccaattattactctgctgccaaaggcaacatctcttaaatcttcctatatgtatctgccaaaattattttccaacatccaaacttgactatatagttttccttgtttaaaattcttcaaagtctcattaaaagtctctatgacagatggacccttcttcagtagccctggtgatttttgttatcaaacttagaaaaaatggatctcgaagaataagatctaacttgcattcactgaaa

SEQ ID NO: 51883 - DNA, 3086 bp, Bovine  19866880919936
  misc_feature (1)..(1): n is a, c, g, or t
ntaattttatgtattttatttaatgtgaagatttttgttttttatacgagcccatatatgtacacatgcatgtgtttataacataatacatactgagtcatcatcacttaaacaaatgtgaataatgattagaaaaactagctttataagccatatcattgtgtctttagtgaaataaaagagatctaagttcagttcagttcatttcagttcagtcactcagtcatgtccaactctttgtgaccccatgaatcgtagcacgccaggcctccttatccatcaccatctcccagagttcactcaaactcacgtccatctaggtggtgatgccatccagccatctcatcctctgtcatccccttttcctcctgcccccttttcctcctgcccccaatccctcccagcatgagtcttttccaatgagtcaactctttgcgtgaggtggccaaaatactggagtttcagctttagcatcattccttccaaagaacacccagggctgatctcttttagaatggactggttggatcttcttgcagtccaagggactctcaagagtcttctccaacaccacagttcaaaagcatcaattcttcggtactcagctttcttccttttaatcattaaatttataatagaaattctttggactttagggttgatgtgattaaaggattctttcagtactgtttattgaaatatactctgataatttttaggatacacaaatcactgatattgactatatggaagacaagaaaatctttacttatgatcaagttacctttaacggcctcccagaatttgttcaagatttgcatgctcatgggcagaaatacgtcatcatcttggtaataactgaacatatatattaatttttagtatttacacatttgaaaattaattgattttctagtttcttctctctattaattaggatcctgcagtttccatagagaaacgtgcgaatggggcagcatatgaatcctatgataggggaactgcccaaaaggtgtgggtaaatgagtcagatgggactacagcaattattggagaggtaaattatgatattcattaaatttgtgttgcttggattttctattgtacaacaagtgtttctgagtgtgtgttgtgtatgtatgtgcatgtctcagagaatttgcttgctttcaaatctggatttgctattttaattgcatagagaagttttagggtaaatattccaattatctctaaaacagttcttgtaagaaggcagataatgtttaatgataagcaatgaaattatttatacaaatatgataaataccttgattacagcaattctcatatttgatgtaaaataattgcatgtataaatttagtacttacatgttggataataagatttatggtgtacatttatggtataatgattttacaataaaatcattagatatctataattaaagttatttttaatactttacatttgaaaaaaagccaatatgagatggctttaatgtttaaatttccttttccaattttaactttcctcatatcatggaactaataaagagcagtgtgaagaaaatgcccggttcccaaaggcataatttttaatcaagataaatattcttctagagacagcttaataagacatatcaaaacccataatgtgtagattgttgacctgataattccaatgctgtaatttagtcaagggaaatgaaacagcagaaaatatcaacttatagaaacatatttattatagctttatttacaacaataaagactatactaaccatcactttttatttaatcacattcaccaaagttaaaatttctgataaaaatgttcttaattatgagctccatcagggaaaaaaaaaaccaatattcctcccctaatatcattaatatcttaaaaaatacattttgttaagacctataccagggcttccctggtagctaagttggtaaagaatctgcctgcaaaacaggagtcccaggttcaatccctgggtcaggaagatcctctggagaaggaaatggtaacccactccagtattcttgcctggagcatcccatggacagaggaacctggtaggctacagtccatggggttacaagagtcagacacaacttagcatctaaaccactaccaagacctgttctattgaatatggacagatctgatcgctaatatgcataatttgaatataaaacaatattatatgtctcaatacatctgaaattgaatttatcttactaaatgtcgttattttacatggtaagtaaaataatatgaaggagcataaatcataaagaggcatctagtgtttaacagcatggaactggatatgagactgcttggatatgtgattggatataaggttccttctgtactacttattagcaagtgattttgaaaagctcctctgtttatcacttctttcatcagcaaaatgggtttaattatactacttacctcatctgtaaagtgatgataaaaatagtacctagttcctaaagttctagtgaagatttaatgaagtaataattaaaagcagttggagtagtcctaagaacatcataattgagtgactaagcacacacacacaaaaataaataaacacacaaagaaccttttagcttaaatttcttgggaacatatgcctttggaaatgcactaatataattcctcttatcacacagtgaatatgtctgtgctttcaagcagacctaagattattgtaaatgtaggtggtccagggatcacatatacctaaagaagtacaatgtcataactttaagaatttttactcttcctcttcactcagtctgaatttccattatttatgttttcttttacatttgtatatatgggaataatctgtttttctaggtatggccaggattaacagtataccctgatttcacaaatccaagctgcatagaatggtgggcaaatgaatgctacctttttcatcaacaagtaaattatgatggactttggattgtaagtagttattttagacttgtgattttggacaatgaacatagaattatttttccataaattaaatataagttcaatagatgta

SEQ ID NO: 51884 - DNA, 1431 bp, Bovine  19866880960260
  misc_feature (1)..(1): n is a, c, g, or t
naatatcaattaaggagaatccaaattgttttaggaaaataaaataagaggattttcctggcttccctgctggctcagatagtgaagaatctgcctgtaatgcagaagatctaggttcaatccctggcctggaaagatcctctggaaaagggaatggctacctattccagtatccttgcctgaagcattccctggagagaggagcctggtgggatatagtccatgggatcacagagagtcagatacaactgagtgactaacaagaatggaaagtatataaaccacaaatccttcatatttaatagaaaatatcatgcatatctttgatatcaaggattcacctactatagaaaatcagaagtgacctcatttataattaaaactatgttaaggttattaatgtatttatttatactttccatgataattctgcgattgaccattaaacataaagctatttcagtagcatgttttaatccttatgacttaagttatcttcatatttccatatataaataatttaattatcattggcagttgttaataagaatgtaaagagtagctagtagaaaattgcaaatcttctccttggattgagcaatacttaccatcttctgcctacaatatgcttatttctgaattaagtatctgcttccatgttcagtatacaaatcacttggtttaacagccttatactgccatggaaggattaattatgtttagctatctgccttttctgaacacaaatgttaaaggctgtactactatggaagtctcctaaaatatccaaaatatctaaagttcaaatctccatagcaactttatactttccgtgtaaagattttagcatgtcttagcaagtatgtatatatgtatttcagttcactgtcactgaattaaaatataagtagatcttattagcaacatgaaagtacggtttaacataatttcccaacatacttaaatgagattaagagaagcttcacaactttcattctaccctgtatatagagtttacccttgaacaacatatatccaagtaagcacagttcctctgcatccacagattcagccaagcacggactgagtggtactgtactatttactattgaaaaatatccacatataagtggactcatgtaatttaaacccatgttgttcaaaggttaactgtatacctaaatatcttatttactttacccatttacacacgcatacccacacacacacacacacacacacacacacacagaatggcctctctagtcctctttaataacaaggattcttcaaggcacaacttataactggtatccttcacgagactctcacttctcaggtgcaattatttttctcctctttaattgatatcaatataaagtattggaggagtactggagcagagcatggcaacccactccagtattcttg

SEQ ID NO: 51885 - DNA, 1218 bp, Bovine  19866881035745
  misc_feature (1)..(1): n is a, c, g, or t
ngccttgaatgttccttaatctaatatcttgagtagtagaacaaagctgaaggcattaggtttcctgatttcagatatattccaaagctacagtagtgaaaagcatggtcttggcataaaaataaacatataggccaaccgcagagttaaagagcccagaaattgatccacacatgtatagttaactgatctttgataagagtgcaagaatatgcaatgaggaatgtagagtctctttagctaatggtgctggagaaactggatattcacatgcagaacagtgaaatctctaattattaaatctaagtgctgaatttcttttagttctacaattaatcaatatgaaacttacattagcagcttcatcttcagttagactttgatctattgtcacattaggcaaatctggccaaacctacaaaaagagaagaaatgagaaaccagttcaaaataaattcagtgtggtatgacttttgtaaataaagttttataagcaaataataaaaaataattccttcaattatttgcttagtttgtgttttggcatatgtatcatttggaaactgtttccattttccatattaatctttttaatatgacaaataaaaaaaatccaaccttggtgtaggtagtgattttgaaaacaatgcgtgtaaccaaattgtctagtcaacaattaatttgaaacacgtacaccaaatttaatttaatgtgatatattaaaattatttctacacttgctccaggataacacttgaaaaacaaaaatatatatagttttatatgaaaggaattgaatatctgagttgaatgatgccatactgaggcaaataatcctcttggttttcacagtagtactaaaatcctctcaccaccatattcctactccagtcactgcttcttagtctaccaatgtttcttctactccaatcacaaacacaaaacaggactcagattcaatcatgccaaaagctctgggatttaaatctatgttgtagaaagtagaatccacagaagggtaattacatataagagattagttgctgatagagaatagtgcttaaaaggtagtaaaatgaaaaaatgtacaaaaatatagaattagaagaaagtaggagggaaataatcccttttaataatcaatattctatacttgcacgtttcttaaacattggatttttcacctttaccacagaattttttctattttacctttat

SEQ ID NO: 51886 - DNA, 2273 bp, Bovine  19866881040249
  misc_feature (1)..(1): n is a, c, g, or t
natgtattaaagaaaagcttgtcatagatagagaacatattgtgaaaatgtatatttattgaattccaagatatctatatagaatcatagttatatccatagaatcagtgttatatttttaaacctcattcctggaagcactgcagatgtcagatcaatttggaatgctgaatagttcctctgggaatgacatggcagcaaccaaaatagtatttggccaaattaaaaatgtatgccagtgatgccaaaagtcacagtaacctggcaggtatgtagctattatttaactgcatgataattgttggtttttccactgaaaaactattggctgtttatgcagaaatggagcccatgacttaggcagtctctcttttgatgtcattggtaactggttggggattgtatccagttacaggacacaatctctcaagcaaactatttgggaagaagttttaataaattatatagtatctcacctacaaatggaaatgggagaatatctaattaaggactaattttcattatacatttttaataatcagaatgatgtccatattctgaaatgataacaaaaattttttattacaaattagcctgatcttagtgtttactgaagattctttcagttttaaatgtttattcataagaccactaataaaataaatattattgtaagtgattttctttgtatgttcatgggttgtagaactctcctctctcacctgcatgcttgtcttgtggtttatgttgctatttggaaagaattttgtgttcatagttcttaaaattccaaattggccaaagtggcccaagtgcctgaaaatgcagcatgtgttcttaagtttaggagaattagtaatatttataaatagtctcctctggatctacattattgtcgttttattggatagtactcaatgggcaatattataaagtgggacagtctgctgttttaaaagtgctggactttttccttttatcattcatggaagaatttcacactaaagacattacttcaaccttataaatacactatccaggaaaaagttgtatgaggatactttcatatttataaagtttggagtagtcaaatagtctcattaattatatatacagcgaatataatattaaatttgatctgtatttgtgacttgcctcttccaggtagagtgttagatcatgtcatttatcttcaatttaactctttaattgataactgtaatgatacttagcaatgaaatagtattattttaaataaatgcaaataattattacatcatcatcactgtcacctttatcatcaccaatttacatcatgattatcatcaaatttaatgttattgtggaagattccagaaccctcacactacaaacatatatatgaatttgaatccactgttcattgagttaaaaagtagaattcagaattaatatattatcaagaagcaaatacaattttggctattttctacctattctatgcttggacatgccaaaatttataaataactaacttggaaaaatgaaataagatacagaaagtatagattttggaggtgaaaatgtttaattcaaataaagtagattatcaggtgcttctaggctatttcatggccaagttgaaaacacagaaaaggctttgggcaatcacaaataaatgaatgctctatgctgaattttaactcctcaaaatatcttttaagtaatgttgttatatcagttatagaatctgacagagaaattacatttgctagagttattataataaatgaataatgatagaaaataaattataatataaaaattagttttgaaataaaatatactttatgccatttgtgctgaacaatgataatctaagataaaactagatcattaaagaattcagaaattctctaatatacaaatgaaagtatttttgatagattcaataatcagcattgtttacagcaaaacaaaaagttacacacatctggcaaataaaactgaatcctttatcatttgttataagtttaatgtttgccttgcatgttttctgactcttacattggttttgtgtggttttgcataaccatacatgacatattatgtactaaaatataaaatattaagcttgaatagttggtgaatagtccagttgctcattcattcatttaggaaacaaagatatcttagtatcctatggttcagttagcattgtacatagaaaactaatgtcacatcctttggtgtctcacagtctagataatggagggaagatttaaaaataatga

SEQ ID NO: 51887 - DNA, 1691 bp, Bovine  19866881086778
  misc_feature (1)..(1): n is a, c, g, or t
ntgttttattaatattatctaatcttatttattatattttcatggtatattcactcatttgctttttggaagtagatggaatataaataagccaataccttgatttataaaagattacctcaatttataaattgccttgatttataaaaaaataagtcaattatatggaagcactctctgcagtatcatagacaaccaaaagtagagaaaaacttcctgacaatggaattttttattagtctttaagtgacttggtgtcattttaccactaattgattcggttcttgtgactgagcaaaccttcttttatttgcaaagaacagagttatatttatggtggcacattcatgtggcagatttggaagaatgtattattattccattttacttgggaaggcactaaaattcaggtgtttagttggtatcagtacctgcagcctctaagtaataaaatcagtgattgggacaagatactttgatgctaaatccatgtactttccacatcatgagtgcagataaattactcagctatgtttatactctaaaggctgataaagcacaggagaaatttcaagcagggaacccagaaaggtccaggagataaatattagagcagaatctacacatgacaagtataaatgaaccacatgcagcattgtagactggtaaattatatcgatggagctaaaacaaagtgtaatgattccagtcacccctgctgaatgggtgacctacatgataaacaaatagcaatggtaatacatctggataatgacaattcatttcaaagagttaaaatcaacaaatgcaatacttccctactctcagacactcagtatttgagaattcttagtttggagaattaccaacgtgtatttagtgagatgatagctattgcagtcatgaccaaaactaggaactttgttttatttcttactctcttacttactctctttgatcttactctcctcaaaaactccttcctcttctttacatgaaatatcataaacaaaacaataagagattcacacatgtaatacagttagggtattatatcttccctgaatatggtccagattaactttttatagttttatgtacatctgttatgtagctgtctcacattgcccaaccattcacatgtaactttctcatgcatacctgctctctaaactcaagggtgagacaataagtgaaatcaggtgaagtcatcattaaaattgtttggtctgtatttgagagttcagaaactttctgcctcactgaaatatttgttaagaaagtattgataagtaagtaaagtattgaataaagtattcaataagaaagtaatgatgtttagtcccatgatgtttagtttcccatgaggaaaaagtcattttctcttggggaaagtctcagtaattcatttggattttattttagtgggaacatggtactcagattggtaaattactcagactggtaatcttggaatcagaacagattaaataaactaaatttgtaatggaatcagtaaaaaatttcctgaaatatgaatttccactttaaaaataattgaagtcatttcagtgacactgggattcttttgggattgtgggtttagtcactaagccatgtctgactcttgtgaccccatgaactgtagccctccaaactcctctgtctataggattctctaagcaagaata

SEQ ID NO: 51888 - DNA, 1501 bp, Bovine  19866881180038
  misc_feature (1)..(1): n is a, c, g, or t
natagctttctttaaataattcaaaacaacctcttgaaattcaagccagaagttcaaatataaatatccgaaatgggatgctgtaaatactttcatttgcattcttggtttgaacaattcatgaatgacttggaaagtctatggcatggtaatttgcaactttgctgaaacaaattccagtcatacacctgctggaagtcttaaatgtggaaaagagacattcatctgggaactgagcctggtttaccacacagtatcaagaattcaatgcagtttccctcttttccacttgtgtctgctctcaaataaacaatagggggctgaaggttgttacttcaacttttcattgtcaatttgtatgtataaattttgaagatttgaattctgagggagatgggcttagagatttttatttcgtactaaaaattagaattaagtaaatgtctctctgaaaacaacacacatacatacacatacaacctgttgtgctggagctttatgctcatccaagggcaggttaaagcgtctgcctccaataagggagacccgggttcgatccctgggtcgggaagatcccttggagaagcaaacagtaacccactccagtatttttgcctggagaatcccatggacagagaagcctcataggctatagtccacagggttgcaagagtcggacactactgagcgacttaacctaacaagggcaaaatcaaaattaaaggggaaagtgatttttgttcccttgtcctagaagtaaagtaataaaatcttaaccttctttaacactttcttaatgataatctgagcaaaacattttaaaatgacaatttcaaataaaactgtagtgtggtaactactgtaattacaagtctatatatttttctaagatagtactacttataaaatcctaaaggacagaaagaatataaaagctaatgaagtttttatgctttgacactaacaacaaaattgaagtattcagtaagaaacagtttttggtgtctttctgtaatataaatattgagatctctagaatagtggtcatcaaatataaataatgctatttcttggtggtgtgattttgggtggttaaaatttcttagtatttttctgctttgctcaattaaaaaaaataatgcactatattttcttaaataatatacaattgaaaataaaaatcctttgtaatacttttaaatattatattggcattctaaagatttgttttattgtgaacttttatcattcactaaatttatagaaaacccaagtttcaaatcaattaagtttagtatgcaatcatttttggctggagtgagaatagggagaaagtgttcttaatgaataatctcttctaacatacattttcaagataaagctagacttaaaagatgcttactccttggaaggaaagttatgaccaacctagacagcatattaaaagcagagacattattttgtcaacaaaggtccatctagtcaaagcttggtttttcca

SEQ ID NO: 51889 - DNA, 1044 bp, Bovine  19866881218413
  misc_feature (1)..(1): n is a, c, g, or t
ntatactgaggtgcttttttaaaattaccttttatatgatctataatgttctttctagaattttatttacatatactctattatatatagagagaagtgaacactatgaagatagcatatacaattttgatatcctggtatgctttgggaccaaatatgctttagaattaaaacttgatcacagttgtttaattatgataaaatttaaaatttattgatccagaattttttttgacttactattgaattataggtccttatacaatgcttgaaaaagtaagcaatccatatatgattatctcctttctctgctttgtatcatgctactttttcacacacaagcaaacacattttatagagaattacttgtgaaatactacatagaaaaccacattttaaatgaaatactctttaaaaaaaaatagtgacttgtccaaatagcaccattgtcttaagccagttatgagattcatgtttagaatacatgttcagacacaccaagctgaatcaaaatttagaaggataatttcagttcatgaattaaaaaaggatcacagttaagtacatatatcatgtaattcttaataattaagttttaaatatgtgaatatttaataaaagaggtgatgcttttatgtcctaatttttcacaatgaaaatagtatctttctttcctttcctacagttgttattatccactctatgtaaattaccaattacatttctagacaataaatattagagagtattctgaatgaaactgcacttacttctctgtagctatagacatactatatccatagaggctgtgtacatcatactgttttccccagtattgcatagcatccatgcaaattgttttggaatacatgagtttgtcaagaatatcttagaaaaaaaaaagaaagaaataattaggtaagaaatattttgccattttaagcttcataattcttaagtgatgtgctatgtaatactatatgtaatgaaaatataatgagagacatcactttatgctaagttccagtgggtctctacccttta

SEQ ID NO: 51890 - DNA, 1359 bp, Bovine  19866881423804
  misc_feature (1)..(1): n is a, c, g, or t
nagttggacaggatttagcaactgaacaacaacaacagtaataatcatagatttctctcaatacatgtttcttactttaaaaaaaaatgttctgtatttgggtcaaagtacattatggatgaaactttgctatatagggcttccctggttgctcaggggtaaagaatccacctgccaatgcctgcaatgcaggagacatgggttcgattcctgtgttgggaagataccatggagaagaaaatggcaactcattccagtactctggcctgggaaatctcatgggcagaggagcctgggcaaagtataacccttggggtcacagagtcagacacgacttagcaactaaacaacaacaaattgctatataattacaaatattcaaatatataaaagaatctgtatgcacacacgtctctgtacatgtttctgtttcaatatccattggtccaaaacttagaaatgtaaataatatactaaattaaagatccttcaacactgaatcttaagaatttgtaaattttgagcataggtcagtagctactgcaacctctgctcccaaaatagtcattcatactataaagatgatctgaggaaaaattactctcatattttttctttgcagattgaagtcatttctatcaggaaaatataggagatcctcaatttattcttcctattcaactcatctcaggttcagaaatagtactatgggtatctatccacaatcagtgatttagaagaaattttaaaatataccaaagtcttgggagccttgtattataagagattctagtgatctaagagaattgatggtttcctaggtgagcaattttctgccaaaaagtatcttaagcataaaaagaaataaattccattggttataataataaatcacccacacaattttaaagtacttatctctctaaaaaaatatatacttgtttttttgccaactatttggaaatataaactacaaatgtctctggacttgggttcattttcttaaaacagaatttggcatcaatttttacattttctggtaaagcaatgtaggtttaaattagcatttccaactctaataatatgaatacattatattgatagtgctattagaatacagacaggaaaatggtagtctcattataactattcataaagataatgcatatcattttctagtatttgaggggagtatcttttgatatatgcatttgaattcaaggagatttatgtctgtataaggattatatcacaaccttttttatggttttggtctattgtatgaattttattgaagatattattttatggattataattcttttcataatgcattaacatttcaaataagaaacacat

SEQ ID NO: 51891 - DNA, 1299 bp, Bovine  19866881663262
  misc_feature (1)..(1): n is a, c, g, or t
ntatattagtgcttgcaaaaggcaactggcaaaagaggaattattatttctcgttccacatatccctctgctggacgatggtcaggacactggcttggagacaactatgcaacatgggacaatttggaaaaatctatcattggtatgtgagagtcaccatctttctcattattcttttgaagtttgtattagctattcactgttgctagttcatatactttataagtcctttgaatatgcttttggcaccatgttctctgacaaatagcataatgaaaaagcagtgggccagaaagcaggatttagcttattttgagaaaataattttgtctcttttggtctcagtttccttttgtgaaagggcagaaatggaaagataacatatagaactaagaaaagaaatggatagaaattctagagtctagggaataagaatatcttgtagatgctaaagtatgaaacatctcaaacaaacttttaaagttttctgactatctttgaataaaaagtaaataaaatattattttgttaaaggcattatttttcagtttcagatacagacttaaatattctttatatttatattaggattcaaggaaaacatttaatcaatgtttagaaatattcctttaaaagaagagctggaaattcacatacattctatttcatgaaaatgatcactcctcaggggattttgtctaataaggataattcagtttgtttcagatgataagatctatggcaaaataattacagaaacagccttttattttaataataaaaccaaagaagccattaacatattcttatactataatttgttcataacagttttgtgatctaaatgtgtcatcttgaaagaatcagagtcttatttttataaatgtcattaacactataaagtaaaaaaatgcatacattttataggaagaaaaaataaaaagtgtattaatctgaaaagctgttttattgaattagaggtcagttttagaaaaaataaatagaaaaaagcaaatatcaaaatattgatttctacaattttcttttctaatttttaggtatgatggaatttagtctctttggaatgtcatatgtaagtagctccattcctcttatcttcatcacttgtgaatattaaaaaacatactattaacattcattaaatataactgtattttagactggagcagatatctgtggtttcttcaacaattcagaatatcagctttgtgcccgctggatgcaacttggagcattttatccatatgcaagaaatcacaacagtgcatttactagagt

SEQ ID NO: 51892 - DNA, 2380 bp, Bovine  19866880513386
  misc_feature (1)..(1): n is a, c, g, or t
nattgtttgatctggactgtcttaagaaatcaaggttgctgggagaaataacctcagatatgcagatgataccactctaatggtaaaaaggtgaagaggaactaaagagcctcttaatgagggttagagagagtgacaaagctgacttcaaactcaaacgttaaaaaaactaagatcatggcatctagtctcatcatttcatggcaaatagaaggggaaaaagtggaagcagtgacaaattttattttcttgggctccaaaatcactgtggatgttgactgcagccccaaaattaaaatatatttgctccgtggaagaaaatcaatgacaaacctagagagtgtattcaaaagcagagacatcactttgccaacaaaggtccatatagtcaaaactatggttttcccagtggtcatgtacagacatgagaggtggaccatgaagaaggctaagcactgaagaactgatgcttttgaactgtggtgcaggagtagactcttgagagtcccttggactacaaagaggtcaaaccagtcaatcccaaagaaaatcaactctgaatagtaactgaaaggactgatgctaaagctctaataattttggccacctgatgcaaagtgtcgactcactggaaaagaccctgatgctgggaaaaactgaggcaaaagaagggggcagcagaggatcagatggttagacagcatcaatgaatttcagcaaaactccaggacatgaatttggccaaactccaggagacagtggaggacagaggagcctggcatgctgcacgccatggggttgcaaagagttggccatgactgagcgactgaacaacataaacaacaaagctttcttacgttcttttacaatgcaaattagatccaaagaaaaaaaaaaacaccacctggtgacacccagagtttaagaaagacttgttataaattacatgagtgagaaactaattcttgcaaaaataaaaacatgctgatggtgtaaatgttcttgcatgtctgactactgtcatgtgggaaaaagtttgaatagtgaactgacatgcattcaaacccaaaggattgaattcccaattttaaatacattccagaaaatggtgtgaacaagccttccaacagcagttattattaaatgaatactgaccaaaatatgctaacactatcagaaaatccagaacccccagcaggcttattacagaaatgaagagcaggggtaggggctgggacctcatctgagaggaccagcaaaagcttcaagaagtgtggtaggtcaaattcagcaaacagaagcaagggtgacatcctgtgaaaacaatgaggcagaatgggagagaaacttggggagcaaagcggagacaagatcaaaatgtaggtaaggatctttttttgggtagacaatcacttcattttctgtaatatgctaaaatcagaggcaatgtagaaaacaaaaaatcactggctcttcaagttcaaatttttcaagaagtgagagcacctgagatttgaagtatttttatgtctaggaaaataatggtacatccaaatttagggttcactttgtcaggtaactttccaacaataattttagggcagtaaatgagctaattcttactctgcagcaaaaactcatctacatatcccagatgaagggtttcaaactgggggaattccaactctgccatctttagggcggaaaagacgccatctttggttagggaaggctggatccgaacttcatgtaacctacgaatgagagacacataaaggaataaaatgaaagccatcaaaataaaaggttcttcctaatgtaacgctctgaaagaagtttatcgtactgaagtgtcaaatgcaaaaacactgcctcctccacaaaaaaatatcagagatgcttcctttaaaagagcattttataaaagtgtgggcacatctaatgtgtacactaaagtcacagtaagaacaaattataataatcttatatcctttttggtactttcctgaacctgattaagtcaaggcaagaatctggtatttcttcaataccttttagaggttaatattaagtcctgtttttaacagagtatagtcctatatagtaggtaacaatatctattcacttaaatacagttttatttatactcttcatattctatgatggaaaggaagtttccttttttaaaattcaatttaaatattataaaagtaaaagcagaggtagacttttgatatgtaggaaatagtaaatgtggcataaagtgatgtgaagataggttaaaaatttaagggttaaaggtcaggatgctgaaaaagctgacttaaaacagtgatttctaaatagcaagtatcaccaactaaaacaattcagaaaactg

SEQ ID NO: 51893 - DNA, 804 bp, Bovine  19866880647434
  misc_feature (1)..(1): n is a, c, g, or t
nctgctgatggacatctaggttgtttccatgttctggctattataaacagtgctgcgatgaacattggggtacacgtgtctcttttccttctggtttcctcagtgtgtatgcccagcagtgggattgctggatcataaggcagttctatttccagttttttaaggaatctccacactgttctccatagtggctgtatactgacttctttttaaaaactatcacatttctatcttcattcctctatccattcagcaattaatttttttcgatgatttcaaagtaagctgttgtttctaattctcatttttatcactgggaaactgagaccaagacaggtgacgtgacttacctgaagtcattcaggaggaggcagtcgattgtcactggagctctgactcccccaagccattttcttaaccaccaagcagtattgtatttcctggaagggcagaaagaaagactcactcaagattgcttagtggcagggcaatgactagcaccaggtcatctgattctcaagctcccaaaatttccattgcattgaaccgtgataaacagcctactttccatgtagaagcagggtttcttctgctccacaaatatctgcagatttggtgctctacaaaatctctggaaaatctgatttttgacacagatgattttgcagaactaatacactttttattccttctcaacatttaaaaataatttgtggaaacaacaggctgggaaattatcattttagataactttttacagtgttcagaggactttcacatatgttatcttatttgaacttcatg

SEQ ID NO: 51894 - DNA, 1371 bp, Bovine  19866880717400
  misc_feature (1)..(1): n is a, c, g, or t
ncctctgtgcaccaagttaaacacccaagtacttatagtagaagccttaagagaacttgttgggtagagagtttgacctgtgagttttgttttaggacatttcgtgcagttattatcaaaagaagactgtacaacagaaacacacatgttccataagagtcagcccaatatgtgcctctaataatgttacatattctaactcctgcgtgtactgctttgctaaaatgtaagtgaaaacaccaacccccaaacagaaccctcttttgaaaatctattgtgtagctaactgataacacttctacatattttggaaaatgtgtgtgaactccttaagatgtgattctctaaactaaaaacaatgttactggaatttctgttgtacttattgaacccaaggcgtgtggggtaactgagattaactgagatttttgagtcccacctccaactctagcagagaacctttcctttatcagcgttgaatattggatttcaatatggttttatggggaaaaggttttgttcctaaaatgtttgaaaaccatagttgtaagacaaatcactctttttaagataacaaatcaacaagtctgaggaccttggattgagtcccgcccctgtggttaagtgatactgagaaatctcataactactccaaaccttgagctcctgtttaaaatctgagattgtatttatgatatttactgcttcacttgctaaatatcatttgactacagtgaccttctttcctgatattttcaaatgtacaaagctctttcttgcttcaagaccctaggacaaactatcctctcctataagaatgtttgccccttgattttcatagaactagttctccctcatgatttaagcttcagcttaagtatttctttcttacagatgccttccctgaccatcctacctaacatagatttatctctgacattttccatattaatatgcctctgtctataattcttctaacacccagattttctatttatttcctaattttaagttccattaagtcagaaggcaggtttttttatttattcataatacttagcacagtgtctagcaccacataagcactgtaagtatatacttattgaatgaatgagttcttgaggagaatgaacataatgggtataaaaagcatttttaaacttaaccctttacaggttatgtatttttaagttttatcacttgttgtattggctcaatctttcagacttgagcatgtgggttaagagtaaagactaatccttatagccttgaattggaatttcacctcttctatttaaactatgatctaggacagataattaacctcagtattacctgagaggctggtcatgagaattaaaaggcataatg

SEQ ID NO: 51895 - DNA, 1152 bp, Bovine  19866880761318
  misc_feature (1)..(1): n is a, c, g, or t
naagtttgggaaatgctagcatagcagtttaaagcagaaattggcagctttttgtttgtttgtttgcttgttttgttttctgtaaagggccatttagcaaagattttaggcttcttcaagcatatggtcatcatcacaactactcaactctggtgctacaatgcaaaatctgccacagacaatacataaataaatgagcataactgctttccagtaaaatttatttatggacactgaatttgaacctttaacaattttcatgtgtcacaaaattatccttctttagaattttttcaacaattacaaaatgtaaaaaaacattctgaacttgtaggccagtcaaaaaacaggcagccagtcacatagtttgcaagcccctgactcaaggcatcaattaccactacatctttgaattgcttactttccttagcttcagtggcttcatctgtataataggggcaagggtaaaaccaatgtcacaaagttactgcaaaaaacaagtaaagatgaatacttaaaaagcaggtgcccagagatttcacaatataatgttagccagctactccagtttggcagtgcctcagtcattggagtctgaatgtttcatactctgcttctccacaaaggcagctaagcatctgggggctgatcttccctactttgggatatggttacataaattattcctcttctctataaaataggcccctgaaatctgagcctggaaatgcccaaaaggttttgtcaccactgatttcagaggcctggaattgggagcaggtcaagctaaaatttgcattccatcaaaattaagcttccaaattagtgttttagatcttgcagtattatgtcgctgatggttgctgctgctaagtcgcttcagtcatgtccggctctgtgccaccccatagatggcagcccactaggctcctctgtccctgggattctccaggcaagagtcctggagtgggttgccatttccttctccaatgcatgaaagtgaaaagtgaaagtgaagtcgctcagtcgtgcccgagtcttagcgaccacatgcactgggagcctaccaggctcctccatccattgggattttctaggcaagagtacctggagtgggggtgccattgccttcttcctggttctcaaacatta

SEQ ID NO: 51896 - DNA, 968 bp, Bovine  19866881007884
  misc_feature (1)..(1): n is a, c, g, or t
natgctgaactgatgaggtttaactctgtggggaaaaaaaaaaaaacaactagtaacctttttacaccagcttaattttaaaactacttcatttagaattatgtaaccttgactctgcaaccctcttcttcccttcctgtcatttctgtcattagacctcaccgtttcttttctaaagtgattggcgtcatcaccaaacacctttcttgactacggctgtcctacctccaattcatttagcagttccagacgggccatcttctatagcttaagtttgatcatgcctatcccctgtcttttgtaaacttcctattcacacttcaaattgaaactcctcttctacagacccacaagccttcccaccctgccctctatgctcccagagctctgtatgtgaattgctgttatcaattgtttttaattgtcagagttgattgtagttatttgtttaataggtctgcctcctttgctggatttcatgttcttgttgttctttagtcactaagtcatatctgactcttttgcctccccttggactgtagcctgccaggctcctctgtccatgggatttctccaggcaagaatatgggttggattgctatttccttcaccagggatcttcctgacccagggctcgaacctgtgtctcctgcattggcaggtgaattctttaccactgaaccacctgggaagcctggatttcatatagccagcatttagtacattgtctagcatattatagtgttggaggtaaaaatttagctgaaattgagaaagtctttatgtttcaccttacaactctttagacaagatctcatcatcactgaaggcctatcttagacaggtttgcacccagtagatattaacaatctctacccgcccaccccctaaacactgaatttcacttgcagttatggattctgaagctagagatttgagaggagataggaggaggacagaaaccaatt

SEQ ID NO: 51897 - DNA, 1141 bp, Bovine  19866881032148
  misc_feature (1)..(1): n is a, c, g, or t
nttactggagtttcagctttagcatcagtccttccatgaacacccaggactgatctcctttagaatggactggttggatctccttgcagtccaagggactctcaagagtcttctccaataccacagttcaaaagcatcaattcttcagcactcagctttcttcacagtccaactctcacatccatacatgactactggaaaatccatagtcatggcatcaccgacttgatagacgtgagtttgggtgaactccgggagttggtgatggacagggaggcctggcgtgctgcgattcatggggttgcaaagagttagacacgactgagtgactgaactgaactgaactgaactgatagactgatcctaaaggaaaccagtcctgaatattcattggaaggactgatgttaaagctgaaactccaatactttggccacctgatgtgaagagctgactcatttgaaaagaccctgatgctgggaaagattgaaggtgggagaagaaggggacaacagaggatgagatggttggatggcgtcaccgactcaataggcatgagtttgagtaagctctgggagttggtgatggacaaggaggcctggcgtgctgcaatccatggagttgcaaagagtcagacacaactgagtgactgaactgaactgaactgagggtgccctttcatgataggctctcagtaaatgtcagctaactttgttattatcatcatcagcagcagcagcagtattatagttttcaaagctctttcacatacaacatctcattaaaatcttccaacagcccagtggttggtgctgtgatcttactctaataaatgagaaatgaaagcgcaaagaaatgaaaggagagacactgagccagaaagaggcaaaatatggaatcacgttagattttgtgttctggaccagtgcatcctctttcctcaccatgttgcctttccatcaaaacatctgagggtctgttgtttattagttttctgcaaatgatatactttgagtcttgggagcctgacaaggcaggcaaacatgactgtgttcttccctggcagggctcagcagacaggaagctgggataattggattccagcctttcaatcttagggctgcatttgtaaccagccaaccg

SEQ ID NO: 51898 - DNA, 1332 bp, Bovine  19866881033860
  misc_feature (1)..(1): n is a, c, g, or t
naatgctagctaataacccttgtatgatactatttgggtaaaagaaattatgtttgcatagaaaaaaaaatatcttggttattatttctgccaggtggaatttctggagatctcaatcttttatgtatttgcttgtcttcagttttgaaattttctacagtgaatagaagttatttcttatgtcaaagcttctggatagtaaatatatggggaaatatgttattttatagcattaatccatttatggacaatgagaaatgagaaattctattgattttctgagattaggttgatattattgttttttaaaaaataggagtcatagccatagcagttcgtgaagatttaggggatggcattcattgccagcattatctttgactaactgtgtaatcttgagtacatcatcgtctttttgggtttatgttctttcacttgcacagtgactgagttggggtagatgaatgatttttaaatttggctctgtatagcctctgtgtttctggcaaaggataaaaggattacatgtgccaagggctgcagtgccctatgctttaaattaaacgagaaaagattgacatgcatttgtcttgtatgttgaatttcaaagttttttttttaaagtttcctgacttgtaacagatttgagaaactatggacctaaattatctctaaggtcactttttgtcctgatattctatgatttattacttttcccactgaatttcctttattataatactaggtaactttacacacacacacacataacactaaagtacagaatgctgaaagaacctcacatttttactctaatagtttctgatcatatctaagaagaagttcccttttaagagttcacttgtcttaagaaaagcatttatctgtttatgaagaatctatcattatatttgccattgacagtatatttatagaacataaaatacattattattattatatattatgctatgactagaatatgaacaaatgaacataattccaccagaattacctaaaaagtagactattgttgctgactacaacaatttaatatcctttcactgttaagcataatgaagaataacagtctcattgtcaggaaagatatgacaaaaattcatgctgagaagcttgcacctggactttatggatcagttcattgattttttagtatattcaaaatactatattctggggaactgaagtagattaaaaatttaggatggttgaggcattggtcatttggaggcattgagaagaaatttgtttaagagatgaaagcttaaaagagagttcagattatccatggccttgaatttcatcttagat

SEQ ID NO: 51899 - DNA, 1641 bp, Bovine  19866881051000
  misc_feature (1)..(1): n is a, c, g, or t
ncctattcacatgtcttttctcttcctatgtttctgttgctaaactctgcttcaggtgtaagtagaataacgggacattcacctcctcggggaatcatgcttccatgtgcccaagaataatatgaaagcaccttttaaaaatgcagatttctgctctcccctcctcacctctgccctctccctactcccacactgtcattagaggtctggtgtgtgggtcctaagaatctggatttgttatgggtattcaagataactctgatgcacgtagtctctggacagttttgtaaaagatgacttagtgatctttctcctcttttcctctttttccttctcttcctccttctcccccttcttctggaacaaatgtaattttaactctgtctcatcaactgattatattaaacttcatcacaaaactcttcccaccgtacaatgatttccatgtttcccagtggacagaattcctaatttggaaggcaggccacctgatttatagcactagatccactattacctatcagtcaatccatgcccctacattgtacctacctgccttccttacagagttacattgaaggttatatgtggaatgatataagaatgtttcatgaattgtagaggattttactaaaactattaaaacaagaaattgcattttaaaaattcatctgttaaaatatcagagattcttttttaatggtgttttgcaccaggggttttgagtggctctgccaatgtttctgattaagcatatgtttgaggaatgacagttgtgatctcactgcattttaagttgcagcatctccgcccctccctgtcctatcctagccagatacatttaacagctttgcaatgtgacttcacagattcaaaaattgaggtatttcagattcttgaatacaaatcccaaaattatcttcctgtgtttccagagaaacctcctccctccacacagaatataaagtatcagatactaacaatagaatattaaaagccaaattcaaatacccacagctttggagaacagtcccacacacagctggtgcccagtcagaaggtctgtatctgtcacccaccatctctgctactcatagaaccagaatgtcaaagctgcaaaggatctcatagattatctttctggtttaacgcatgaggaaaatgaggtacaggaaagggactcagtcatcagaggcatgccatgatcgaaggctaaaaagacatcagagtccaggttcctgtctcctggtttactgtttgcattgcttagttaatagggtggccttgcagttgaaagcaaaaggtactcactgaatgataaagtcatgttcccattgtatgaggctttccagtggctcagtggtaaagaattcacctgcctatgcagaagatgcaggagatgtgggttcaatccctggattggcaagatcccctggagtaggaaatgacaacccacctcaatattcttgcttggaaaattctatggacagatgtgggaacaatatctcttggggcacagcacactgcaccatgattctgtatcttgaacgaagacctaaaaagaagacattaaactgttaattgtgattcatacaatagtgtcaactgagacgacaggccaaccaggatgcaagatcaccc

SEQ ID NO: 51900 - DNA, 2124 bp, Bovine  19866881081952
  misc_feature (1)..(1): n is a, c, g, or t
nactaaccctgctttgctagtgccacttgggtctagtctctggagtttataccctgattctctatataataatactaaataaggtttttatatagcattttatggtttacctatgtgatattcttggactctcccaccaaatgtgtaaatgtggaactttacccattcttgggtgggaggcaatgtgtaatacacaacaaaagaggatggccattggcaaaggtaatttcattttttatattttttaatggggtgataaacttttttattgggttgtgagagtagatatgtgaaatgattaacacattgaatggcttaatcagtagagttactatacagaacaataatgaggactattgttataattagagagaccaggtaatctctgaggtctcttcttaatcttcattatttgtgaatttggagtttacacaacatcttgactagccctgtacaactagaacaacttttgaaaactgtagtaagacttaatggtttggaacttttattcttgaaaattattatttttattattagtgaataaacagttgccttactgatggcctccattaaaaacagaaattaagatacttatctctttacttaccaggcactagcagctcatactatggaagtgtttctctcttcccagtctggtggattcccacaatggcgcacaactggcctttgagataaatagttttctgtcagctcagcatcctcatagtttggatcgcttatgttctcttagctaatttgcatctgtcttgttcaaaagaatgaattgtctaaaatatcctgggaatgatgttaaacacaggatagagcaattgtcgtgacatgggtacctaagagaacccagttcgagaggggatttcggttagaactgtgagcttcctgaaaatggggatcctgtctgtcttattttttggttgtgtgctctgtagagcataaaggttttatggaccagaaagtgcctttggggaaggagagtggtggtcaggtaggttgtccttcgtcaccaccaggtccaagtcatctgtgttgaaagtatggtgttcctagttgaagatgtctgttctttaaaagcagcagcagcaacaacaacaagaaaataaaaagcctcaactgtgaagtatcaactcaaaataggtggtgtttctaatatattttctgttcctaagggaaatattttctgtttaactgtttgttcaactgtaatgttagccttatgaaaatttaaaaaggaaatctttttgttgttgttaacatttgataaaaattacaagtggcgataaacttggctctaaatagttgtgaacttcttaggcttcacagattccagttttctgacactactaaagaagatgccagatgtcgaacagctatatggccttcaccctcgataccttgagaggcgaagggtacggggccatgaggcttttagcattccaggagttctggaagctttgcaggcatgcccaaacttagtggtgagtgcacttggttgaacatttgacatcaactgatgaatgaagcactaaattaaaagaatggtagaacatgttcatgcaaatttcattcataacgaacttttaagttccactccatacttaggatcttatgatatagaaatagaagctttggatgctaaataaaagcctttcttatgcttgctttggcattattttgtagggtgtggaaacttctcacttggaattagtagaatccatttggacatacatgccacatgttcatattttggggaaatttcgtaaccgtaatggagcatttccaattcctcctgaaaataaactgaaaattcctataggagccaaaattcaaactttacatttagttggtgagtacatgtttcttgggttgcttgtgactcctttaaatgccatacagctgaatattagtggaaagggaataatggggattttagaaatagcttggtgattgctgatggcaaccgagaggggtaggatggggtgggtggtgggaaggggaggttcaagagggaggggacatatgtatacctatggctgattcatgttgatgtgtggcagaaacaatattgtaaagcagttatcctccaattaaatttttctttaattttta

SEQ ID NO: 51901 - DNA, 965 bp, Bovine  19866881131025
  misc_feature (1)..(1): n is a, c, g, or t
nttgggcagatcccttcccattgtgcatgtcatcatctgtaaattaagactaataactttgtcttgcttgaggtgttatgggccttaaatgaggttctttatgaataggtgaaagtatttcttaaagtgctatataagtattctatgtaaagatgaaatgaaggaatattaaaactctagtgtttaattctaacccaaattaataaacatgtggttttgtcttgcttcagggctgtgctcgggttggtctgagtgcaggcacgggaattggggtttcctcggcccttgttagcaatcagaactccaacaatgacaatgataataatgcccagaataatgccaacatccacgacaacaatcaccatcacccagatgactcagatgaagagaatgacttccggcaagacttgcagccaggagagcagcagtttgcagccgacggtaacccagatcttttgtgagctccagatagagatgatttttactttgggtcatgtttctctgactttcctgtttccttctcctccatttcagtttgtcactttatacattgaggaaccttgctaacaaagcagctgatgggtggatggagtttgcctgtctacttgcttgttttaaagttgtctttgcgacgtctcttgtccatagaatctattggaggtacttacagaaagggaaggactcagatgccatgagaattagggtgcagtgagccttagaagcctggcttaatggagatttagctgtcaggatttgggtgaagaagcatctttcggtatcttgctaaacagtagatattctctctcaccattgaacttgagtgtggagatcatttttggatgtaccaagaattggaaaaatgaataccagatatgtgtagagattgtgttggatacccttcacacacctctcgccattaagtcttcaaagccaccgagaaaattaagcacataagctaataagga

SEQ ID NO: 51902 - DNA, 665 bp, Bovine  19866881266697
  misc_feature (1)..(1): n is a, c, g, or t
ngccattcattcccattcatgtctgcatgaacaggacaccctggcatttctcctgatcctcatcaccacctgtgaggcatggggccatggggccgagggcccagggaaggcatgtgggtgaccgggttggatgggacccaagggccgagcatggaggacctcagagctgagaagaggcttcaggtgccatcagatgcaggctcccagccaacacagaagcggcatcctccattgcatcctggaggctggtcaggctctgcttgtaaacctccagggacaggagctcactccctcctaacacagctccttctattgcggagaagatttagttataaggaagctctttcctttgttgggacacaaatttgtctctgttgtagcttgcatctgggaccaagcaattggcccccttcttccactgagagctcttaaatattggaagaccatgatctgccaccttttaaagtcttctctctgaactcaacaattccattctggccgtcttcttctggatgtgcattggtgggtgaattaatcaaggctctcacaaaggaagtaggttgatgttggtgccaagatgtctgtccagaagcactgaattttcttaagtgaagcatcagtgtttattggttcatagacatgaacatttttctttcttttttttt

SEQ ID NO: 51903 - DNA, 921 bp, Bovine  19866881300663
  misc_feature (1)..(1): n is a, c, g, or t
ngttatatctttacatattacttgtactcctttgggcaagtcactgaggctacgtgtaatttggcttaaatgaaaaatagagataatcttatttcatggggttgttgtgcagattatatagagtggagagagtttattatggtacctgctatataccaaccagtcaacacaagtcaacaataaattaatataattcaaaggaaagcatcagtataaatcttgagaaaccacccaccaagttggttgtcaacatatgatgccaagtaacttgtgtgtgtttattgaatggacttgacactggctgtgagaatgagaggtaatagtccttctaaactgtagaaatgtcaaaaagaatcactgccagatgctgtaaactggattactgatgacaagacccacttgtgattgagactgatttaaatgcaattaacatattgagtgcaagtgtgtgatactgcagaaaaataataaacacttgtaaaatagtaaagttcactctgatgcttgcagtcaacttgctgttggatccatctaattgagttactgtccccaatgtcaccagaagaaatccaattaaaaagtatagctacattgtctttcaggctctgagtggtttatgaatctcagttcagaacttgggtattgctgaacccagaaccacccctgctaagctgtttgtaatagacactgcttgaagtggcacatagggtccattttgatgagtaacacgagaactctaggttttgttgcagggaaagaaatctgagtaccaatgccagttctaccctcactctatataaccctggatctgtcctttcctctgggacttcagttaaaaggagcagttcagatgctcttccctcttgctgaagtgccagcccttgcccagcccctcgccaagctctcaaaagcgtgcaggga

SEQ ID NO: 51904 - DNA, 612 bp, Bovine  19866881391478
  misc_feature (1)..(1): n is a, c, g, or t
ncgtatcttcacttctattttgattgtgggctggatattcccaaagaagataattatccaacagaaaacaaccaaacacaagtgcagactattctgctagtatgggcacattagtcagtataagctgagtgaccaaagccctcgaaaaatgtcttgcaaaaatgtattatttcactggctacccaactgcttgtttaacaataaaatgtcatgtatgtcaaagggctgtgaagataggaccaagtataggaaatctactattctaaaccactgaggccagattggcttgtttttaattcaacctggaaaagtaaaattccattttttcaaaaagattttaagaggaaaaaaggtcagagtctcagagtgctgccattaactggctctcctcagtgtgagtcttggattgtagactaagtcctctacattaagtctcaaagaagattaaaaaaaaaaaaaaaaagtaactttcagttttgagcatgtgaatctttcataaacctgaagataagcatgaagatatttcatcagcaaaaatgtactgatcatttggttatatactattttgcagacactgtgtgaggggctaaaggtatacagagaaaagaaagc

SEQ ID NO: 51905 - DNA, 1181 bp, Bovine  19866881457155
  misc_feature (1)..(1): n is a, c, g, or t
ntcaggcacagaagtgtaaacaacccaataacttactacctctcacacccatcaatcattttgtttttcactatcactacagcattcgtcgggggagtgtgcaatttcctcggttctgtctcgctgcagcaaaaatctgaagtgacagacgggacccagtgttacagctcagttttatttggcaggcaaaggaaaatacatcctcaaggcgtgagggcaggccaacacaaaagacgtgaagagaagagagccagaggctcaattttgtttcctctttttataagtttttttttcctccttcccgagcctgccctatgtaaactgggctagccaggaggctgtttgtgtcacctgaggtcctcactctggtcctcggaccttcctttgttctattttcatgggcttttcctttctttgtcttttagccaccaccattctggactcctttttcctattctaactacctaacacattcgatacattacctgagatattattagctttattataaaataggcttcgtgttagatgattcttcccaatataggctaatataagcgttctgaacacatttaaggtaggctgggctaagctatgttcagtaagtagtgtattaaatgcattttcaacgtagaatgttttgaacttacaatgggcttactgggatgtaaccctatcgtaagtcaaggaagatctgtactgtgcaactgaccagggaagagaagggccaccatgtgaaggataaagggatggagtgtgtatgttcccatgattaccagccagacttgtctttcctagactttctgatttcacaaaccggtaaaattacatacacacacacacacacacacacactgccaactcaactgtcaattatatacatgtgtatgcgtgctaagtcacttcagtcgtgtccgactctgtgaccccatggactgtagcccacccacaaggctcctctgtctatggaattctccaggcaagaatactggagtgggttgccatgcccttctccagggggtcttcccaacccagggatcaaccctgtatctccagcattggcaggtgggttctttaccactaacaccacctgggaagccccccaccaattacctatatttccaaataaatataatttgaggccatgactatcactaggtgttactaccattatctaatta

SEQ ID NO: 51906 - DNA, 1464 bp, Bovine  19866880428869
  misc_feature (1)..(1): n is a, c, g, or t
ntaacttctaatgtgattgaatatttttaatggggtaaaactatataccttttaattcctgtgatttttcccgtgacttctttttaatttttatgtgtaaaaagttgctatgaccaaattttttttaaaaaaagactgaaggttaccaacaggtgaaatatagccaatatttcataataactataattgggatataacctttaaaaattgtgaatcactatgttatgcacctgaaacatacgatattgtacatcagttatgccttagttaaatttgttaaaataaaaataatttttaaaaattaaacctgaaagaaaaattagaagtaattacacttgtcttttgaaaaagagtaaaacagagtatttagataataccaaatctgttacataaatcaaagaacaagggcaacatgagaattccaacatggttggaagttaattctctttttcatattcaaagtgtcagaatcattgaacagttcaagatgatactctacaattaaagaccaaagcagccgtcctctagttagggctttcccataggccagtattgcttcaataaacatgagcatgattttaaaccatttagaggtgcgatttaaatcaacgtcctttttctctccataaaggaaaagctgttccagacctagactcgccctgtaacaatgctttctgtgacaatttgatgaacattaatttattagcccaattcttccatacataaaggaagggagccaagatagcacaaatacattaaataaccactgtgttctactatgatttctttgtagacataagcccatgaaactgactttaaaataaaggggaagggacacccttaatttcacagtagtgttcaggaggaatacaggtggacaaacacacagacacacgacggaaaagcctaaatgtatagcaaggtttttaactagttctagactattctttcggagaaggcaatggcaccccactccagtactcttgcctggaaaatcccatggatggaggagcctggaaggctgcagtccatagggttgctgagggtcgaacatgactgagagacttcactttcacttttcactttcatgcattggagaaggaaatggcaacccactccagtattcttgcctggagaatcccagggatggggaagcctggtgggctgctgtctatggggtcacacagagtcggacacgactgaagtgacttagctatagcaatagactattctttacataggaaatttggggttttaaggtgatgtttctaatgtgtataatatttaaccaaagtgctcgagtaaaagctaaaataacatgaattttaatctcatcacttgatgttcatctcctctgtgaaagtgaagtcgttcagtcgtgtctgactctttgagagcccatggactatatagtctaccacgctcctccatccatgggattttccaggcaagagtactggagtg

SEQ ID NO: 51907 - DNA, 1484 bp, Bovine  19866880560353
  misc_feature (1)..(1): n is a, c, g, or t
ntgaagaatggcgtaagtcatgacagaatctctatgaaatgacctagtgtgctctctttgggtgaaagagggttcggtttcttatcttcttcttcctgctcaagctgcctacgtggaatttgtggcttacaagatacccgttggactggctttaggctgataatatcacttccttcatgttttcttccacatctttttttaaaaagaatatatttatttttggctgcgctacacaacatgtgggatcttaatttcccgaccagagatcgaacttgctttccctgaattggaagtgcggagttttaaccactggatcaccagagaagtccttccatgtcttattttttagaactttttggtaactcctttcagtgagatcctaaaactttcctgttatggtttagttgtttctccaagtatttatttcttctggcaggaatcaataagagaggtacttctcatgactcttggctgcaagttgtgatgtgtcattattgacagcaaccttttgagcagcatggatgatccgttatttttgtgatgaagaaatgaggggtaaactttgtatttatggatttaatgtaaatttcggctgatttcatctgagtcttttgagagccttttatattctcctccactgtcttgctggttgggacttggaactttcaagtgagtgacggtcaaagctgacaacaaaggggaaatcctgtggatgtggggtcctgtgattctgtgcaattgttgctactggatttgagaagtaactgactccaaggggtatttaagttcatctgttcttgaatacctgcatttctttagtcatgtgaagtacatactgattcttattcctatacttggaaccatctaattataattatttgttgcaaattaccttttgaggtttccttgtaagttgatcaactgacttggttatttaaattgtttgctttatcctctgacctagtacttacactaaagtttatcctaaaaaaaaaaaaaaacaccaaaaaaacaaaacaacaacaaacctatggaaagatctcttacaagaagtctcatcacagtcttgtttttaatagtgaaaaatttggacacaacgtaaaggcccaacaccaaacctctcagctatattaacattcaactatttaaaatcatttgtatagtgattaaaagttcaggttctggatctagactgtataaattctaattttagtgttgttacttagagctgtgtgaccttgggcaagcttcttttttttattttttgaattgtaaaatatacatagcataaaatttaccattttaattcccttcaggcatacatttaagtgattagtgcattcatattgtcatgtagttaatgaaattcatcattgtaacagttaacagctttctttgggttattttggatatcaaagaagttaaaagagtagactgtgcctgaagtcaagtgaagtgaaagtcgtcatgtttgactctctgcg

SEQ ID NO: 51908 - DNA, 1189 bp, Bovine  19866880741395
  misc_feature (1)..(1): n is a, c, g, or t
ntaacaaaacatggatatggagaacagatacagacacagagaacaaacgagcggttaccaaaggggagatgggatggggacgagaaatacaggaatggaaggttaaaaggtaccaagtattaggtgtaaaataagctacacggatatacggtacgacacaggatatactgtacaatacaggatatacagccaatatttacaagtaactcaatggagcatggcctttaaaaactgtgaatcattacactatatacctgaacttacagaattattgtacatcaagtatacttcaattaaaaaaaagaaagaaataagaatcaccgtttgcaaagcttataaatacacttgtaaaatcttaagccaatcagcctttatcctcaaaggaggagagacagaataggtctccttttgggaggaaatgctttcttttctcaggcaaatactacctgtacacggcatcaccatatcaggaacctaccttgcttgtctgatttggtttgatcccaggccctcgaaccaatagtggaacttttatatcaaactcatacagctgtcttttgtctattggcaaagaaaactgtcctggaaaaaaaaaatgcatagggtaaagatggagccaagatagaaatgtctctcacgcatgcattcattcaatcaacagtaaaaataaaaaatagccttgttttactaattatggtgtcttagcgaagagcttaaatcccccagggtctctaattattacaaggcaggaaacagtgagctcatcttctttaaataaatgtccagaggaactccctggccttaaataggcaaatacaacaaaaggaatgactagaaagtattgaagcacaaatatacattatttatgtatgatactccacctgatcacaactgaatgaagttagtcttaaagctgttaaataaaggaacaaaaccatttatccagcctttcctgaataaactgtacctcaagatagccaaacagttgatgaggcaaatttcctgaggaattccagctagtaaattcaaaaggaaggacagagttatgaagtcagatttttcagtttctgagggaactgatttacgcacaatcatcaatggacgttttaggcacaagaggttcacaggaggagctcaggttggtccacatgagccatcaatcagaaacaacatctctaaagtgaggcaa

SEQ ID NO: 51909 - DNA, 2312 bp, Bovine  19866880862210
  misc_feature (1)..(1): n is a, c, g, or t
ntgtgtgaggaccatgtcagaacggtggaacttacaatactgcgagtttgatgaccaggaggtaagagggcctgctgccccaccaccccttgtgtctattgccagggctttgttagctggacttggtggccgaagagaaattccaggactgttcccggggaaaacgggtttattttctcactgaggtaaagttgcagcagcagcagcagcatagttgctttacgacattgtgttagtttctgctgtgccgtgaagtgcatagctgtgtgtggatacatatatcaccttcctcttgaacctccctccccttccctcatcccaccctcagggtcatcacagagcaccaggctgagctctctgtgctgtagagcagcttcccactagctatctgtttatacatggtagcatacgtgtgtcagtcacaatctcccaattcttatctatactcacacttatgtctccattggttaaggaaatagaattccacaaggccatacttgacttctctaactgaccttgctgggtggggctttctctacttccaccacctcccacacatacacttgaaatacacacggttcacttttccagaatgctacatgcctggtctggggtgagggtaagaacttctttggagatgaaaggagtcgggggcctttcctagaaagcttcctggccagcagctggctcagacccccctgttcctagcacagcatagaccagtgctgctcacatggatcagcaggttaaaggcagcatccttggaggaaggtggctttcagccagcccggatcagtgtggattatctggaggagcacacgcactccagtcccttgttcttactcttcatcagcgggtgcacacctgccccatctggcagcctacatttttgccgtatggagccagcactcatcatgtttctcagaaattgacttgctcactatttatttgtgggtcataagcacttcagagaacaagcaagagagcttccctcaaactcagtcccttccgctttataagtgatcgtgtgagggcagctccttgaagcctttataagcaaaattgatgtacatcttctgagcctatcacttaactccaatctggagaacaaagtactgatggaggggaaaatagtgttattagatgcctctcattttagaaataacgtctctttcttcaagtggtgttatgtatctaaaataggaaaacttaacatttttataagatgggttcctttcatatctgttctcatttgaatcttcacaactgtaaggcaaagatgaacttcagatatcaagtctcacgcagtaaccttattacttggtctcgtttctgagcccttgccatttgacagtcctgccttctgttctctgctttaattatagaaggaaggcttttccctcctgactttccctgaaggcacaggagtgctggaggcctgtttccagcacgtgggccatagactcagagtaattcaaccctcagaacagatggtccactgtctgctccgtaccctcgggctctttgagcatcttgagaccggatgctattctcccaggccttggtttttaatccacctcctctctttccatttagaaatatctcacatgaggcgtatttcttcagatgtgataacccttgctcttctttttcctccatattttcatttcctgtaggtgtttgtagaagtctataacctgactgcagacccacaccaactcaataacattgctaaaagcatagatccagagctgctgggaaagatgaactatcggctgatgatgttacagtcctgctctggaccaacctgccgcactccagggggtctttgaccccgggtaagtttcccatcgtcctcaatgactttgcccagttgtcttcagcagtcctgccgttcctggaggcagagggagcccagtgggtccttcctgctctgagctgagctgtttctcactgctctgctttatacggggaatgctgggtcttagtgcagcagccagttgtgctgagaaaatgagctgcttgaaagtcttgctctccacaggcagtgtgtgctctagctggaggcacagccctggtccccaccacacagggctctcgctccccttcctgcctgtggttcttgtcatgttaccacttgattgctctggtaacacctggggctgctttaatgtaagctgaccaagggccaccctggtcctagcgcttctcagagccttgcctgcctttcatttctcagaagccccaattatagaaacttgaatacttgccagtaaatttaatataataaatacacaaaatgtaagtatgaa

SEQ ID NO: 51910 - DNA, 1324 bp, Bovine  19866881045117
  misc_feature (1)..(1): n is a, c, g, or t
nctattactgtttttaaaaaaagggactggattttgttatgggctaaaaggatggcgttcttctaggctacttgcaagcagttgtgtgaggcagccggagttaaatcagtgctagctgtgttgttgtgggcaagtcactgcacctctttaagcctcagtttcttcatctgtgtatgacgtgcgtgcctggcacataataagcagtaacaaatattagtcattgttatttgtagaaggttctatatatgatcatgtactttgcgtatgctaggttgaatagagaactgacaataattgagaggtttgaagtgaacctaataatctagctgaagaataaaagacagcaggaaattaggttgtctctctttggctatatggaccaaagtaaattgggaatctcaatgtaattgatcagaaaggcgctccattcattcccagaggcttaattttcttttcttcttcgttttcctccttctgtatcactgtggtgtctttcttttttgctaaaagggctgattcctcctgaccaagcctgaggccacccatcaaagtcttcacccgcttcttcctcctttagcaagccattccatcggaaagagaaagaacaggcataggagaatgggggttcttttgcccaagcctttgtgtaaaagttaacgtacgtgcgaaagcgtttttcttttcatcttcgtctgttctccctgttttatctgcctcagagtacaggttttagttgcagttttgctggaggttgctggcttgacccggtgacaggttacatttctttctggggctatccttctgcctccagaagctctaaatcgccttgtgctcggcgttagggacttagtcactgtcttctttctggttttcctaaggtcaggcggaatgaggtaattcatatgaactttgtaatatgctgccgggggaagctgtggttagagtcctggttccgtgcgctgtggctggcctcccacccacagagggtctgtctcctctctaaggcatttctgtgttgctgaacacatccgcagtttggaaacaagcttgcttttgcagaatttaaatgtaggcatgaaagaaactcgatgagtcatgtgatccatttggctaactcttcaggggtcacttatgctctctgaaagtggtatgagttttagagtccggtggggaacctcttctttgggccacttgagcctgttggggttttgctgttcccttctctgccctcaaccatccctccctttggaggagggatgattgagggcaaccaataattagttggttgtctgaaactggctttatattaattctgaataccatt

SEQ ID NO: 51911 - DNA, 1169 bp, Bovine  19866881095273
  misc_feature (1)..(1): n is a, c, g, or t
ntccttccttaaagacttatgtaggtagtgagtgaagttgctcaattgtgtctgactctttgagaccccatggattgtagcctaccaggctcttgcatccatgggattttccaggcaagagtactggagtgggttgccatttccttctccaggagatcttcccgatccagggattgaacccaggtctcctgcattgtaggcagatagacactttactgtctgagccactagggaagtctaaaaaaaaaaaaaaatgtataacaggaggggaaaatgtgcaaagcacatgaacagaccattcacatgaacataattgatcagtatgcatgtggagaatgtttcatcctcaccagtatttaagaatgccaattccaatttgaaaggccagagacatgtgaattatttcaaagggatgatacgtaattctggcaagggtgtgctcaaatgagcaaaatgagcattcctgccctgctggtgtgagtataagctactattacccttctgtaaaatggataggtaatgagtgttaggacctagacagatattactaggtcaaatagggtaattctgttgatgataggagctagtggatacataattagagtagggaaaaaaaaaaatctgtgtccagtgtattaaagtgatgcaggtaatctacaaaactccagatcagcctgaaaatgactccctacttctcagctgccctagattggaggagtattcttcatgtttgttcaggacctcgctcccagcatgctgtgttccttgtacgtaaaattaatttagccaatgagattagaacaacttcaggttatcctgtaaaaagaaactagcggaaaaagaggtgtgttctcttgattgttctgtttcctgtctccactagagaacttaaagcagctctgaagtgtgtcatgtataaagaaaatcccaattccacgggaaactagagatttgaagttaggggaattgagcagctttctttattctgattagaaatgatgcgaaatccatctgtcttgtgtaactcggtctctgttgcttctcttccctttgtagtatgtgccaagtgctctctgctgcccaagccgagccagcatcctgacaggggaagtacccacacaatcatcacgtggttaacaacactctggagggaaactgcagtagtaagt

SEQ ID NO: 51912 - DNA, 1406 bp, Bovine  19866881103511
  misc_feature (1)..(1): n is a, c, g, or t
ntgtagcttttttagaaagtgctggctttgaagataacaagtgataaaaacttagcagtaacttgaaattatatcagtaattgaatctgtcattctttctgtgacacatggtggaaacttttggttttaaaatataattttaactgctagacaaaagtcaattttcacacttaaggtgagccctcctggaacagattcttcacaaagagccctttttaaaggagccaatagagttctttattcacagtattttttttttcactagttttagctaatcttaacatattaagcagttgtgtagctagaatatttatttatcttacagaggaagcagctagaagaaaaatcattgaatttgctttcttagaaaaggttatagaaactactaaaactctgcccatgaaactttaatactttggtaattctcaagcatattcgctgcacagctgttgtagatcacggtgcagtttagtgggattttgcctgttaatgataagtagaacactgtttgagtcttttccatttgtatttaattttatgcactgtatctctgtttgtcagatgctgaatccccaaccagagaagaccttcatacgaaataaagctgcccaagtcttcgccttgctttttgttacagagtatctcactaaatggcccaagtttttttttgacattctctcagtagtggacctaaatccaaggggagtagatctgtacctccgaattctcatggctattgattcagagttggtggatcgtgatgtggttcacacctcagaggcaagtaacatcttattaataagtttttaatttagatactgcaagagataatgggtacataataaaaggaacaagaaggaatttttgtttttgataaaactttattaggaatacttacaaatttgctcaacattttgaattttgttttacaaaggaacttaaattggggttttttccccaggtatagagtgaaattagagcatttagcttttttttttttttaaccagagagaaacttcctctagtgaaataaacaaatcagtttttttcctatgaatttgtagagaaatgtggcctgtatttattactttatagttgctgactgaggaaaaagccttgctatgtaccagtgctgggttcttctgtattctcagttagtcacataggccatgaccttagtctttctctatttctttattacccaatttaactttctcctttttcttaaagaacacaatggaaatagcttaattcaaatgtgtctgacaatttaaggttattgtgtgttaaatatgacatttataaagaatattgtttacattatttctgttctcttaaatagtttgtttgtataatactgagaaataacttttatctcaggttaaaatttctaagcaggttttttt

SEQ ID NO: 51913 - DNA, 1161 bp, Bovine  19866881139031
  misc_feature (1)..(1): n is a, c, g, or t
ntcagttaaagaaagatgtggtggtggctcttgtatcatatcatcatattatgctggattacctaccagacaaagggtaaacgttaagcttttatataacatgcagagccacatgggtgtcaaaaagctctaagttttgagtccgctgcaagatgagacactgaaggaagagcgtctgctcacctcgttcccagcggcactcccaagacctccccccaggtgcaggctaggaaagtgagagctgggctctgcagaaggggccaggtatcctcttccctccaccccgtcctaggactcctcatattccagccaggcaggaccagatggaaatgcagcggtacacagaaggtgctttaaaatcttaccttaatgcttgactaaaatatgctgtataaactgacccaaagaaataaaatggtccattgactttttaaattttctgtgagaaggggaatgtatttgattattctttttttgcttattctaaggtattttaattccacaagcaaattgagattcactgataagagctccttttttttttttttaaaaaagctaagcattctccatctctctttagaaaacgtctccaaacccaaatgcctatagagcaaaactggattataaaatgttcatggcttttaatatctcatcttcagattgctttctcttaattttctctcagaaaaccatgttaagtaactttttaaaggttttaagagcttttttttttcctccctacttgagagaggctccattttactaacagaagaaaatgtattcaaatgaagcattagcctcagatatcttacctcgcccctggctccagagcaacttggatttccgattctttgagcaggttagtgacttggggaaccagtaaaagagccgggctattcttctgaatgtcttgttaaagtcacttttgatggccatagccagtactattgagtgcttcagaacagccctccacgagagcgtggatgaggaaaacacagtaacacccgcatgtgacactttagctgtgaactctctctcagccaatatgtctggggaccacctgtcagccctaaatccccttcctctgtcattccttcggtctgtcctttggaccttagccctcataactagaaactgtattaatagatgttctttctaaag

SEQ ID NO: 51914 - DNA, 1535 bp, Bovine  19866881150871
  misc_feature (1)..(1): n is a, c, g, or t
ntatttctgagatactgatggtcgacttttctgagtaaggccagctaagtcatgtatctccgactgcctgctgaaaacattttttaagtggaaccaaaattggcatccttacaatcagtaaaggctgattgttgacacgtttgtaagtgacagaatggtgagatagcttctgtgagtggagagctgagccgaaccactgttgtactaagatctcagtttttttgagaaggataaagtggcattatcccagttatcctcctgtctgtttaatttcaggtaaattactgagcaaaatttttgaagtgatgaattattaaaaactgttcattttttattttggccataaatgtataattgtcataaaaattttaggatcatttcaactgttttaggctgtacatttcttctttactttaattctgcttactatttcatgaagaaatatcaataaatttctcgattttaatgtaacagtttgtatttttctgtgtacaacagtttgagaaacaaaagttatcttttgaaaaatactgtggatggtaatggtcaattagccttagaaattggatgagggacaattctgtgtctcttctaaaccattgattccaaatttagtagaagttcttacataaacatacgctgtacaaatccaaaagagagccttctctttgaaaaatgtacccaaggttctagacaaaagaattgtgctcaatacgaaattattttatcccagaaggattaggttttggttttggtttctcatttcttagatgattgaagtatgatcgtgtacaacctgtatatcatgaagagaccatgttttaaagagtaaataaattttggctactatggacactggaaaactgaaaacggattaggatgttatttgaaatctcaaattgatactttattgtggtagggaattttaagtgtcacatgtacacattatagaaataaatacatgggtaaatgacattactttgattgtgacagttatcaccatcaaaaattgtttagtcagagaatgtgtggggcaagggggtgtttaatctcttataattttaattttccatttgaccatctaacatgaatgtctttaattgtgtagtttaaaagtttatgtcactgaatactacgtaataattttacctaagttatatggtcagttaatatattggaaaatttcatttttattcaagcacctctagaaaagaacatcaataaacaaacccttgctgtggggactgtatttgtataacttgtgtaagttgtcctggtaagatcagttcttatccacgctaataattggttaagacttactgttctgttcctcattacagcagcatgtaaatcaagcacacttgctttcaatagactactctcaagaatgcatcttcattcaaaacaccttatgtcaataaatgcatagtgactgctctgctaaccaaattttcagagttactatgtaagtaaaattagctttaaaataagttacatctctagtttagtagcttttttttttttttttccagtat

SEQ ID NO: 51915 - DNA, 3158 bp, Bovine  19866881180583
  misc_feature (1)..(1): n is a, c, g, or t
nccttgtggtttggccgcatctgtgccaggggatgggaggctcacccgtgggccccgacctttcacatgcagcttcgcaggctttggtccccacatctgccctgcagaccttgcctgagaagcactttcctggagtgtgttaacctttccgaggtcatctcctgaggggccctcttgaatgagcctctgccacaaagccataaaagaagcgaacaagagagggagtgtttcaccttccttttctgttgttgttttgatacgctccttccctaaaatgcccagctcatgtgtgtgttcctcttcctgcctcagaattcaaatgggatttacactggcttcattaaagtacagatggaactctgcaaaccttcacagactgctggaaaacccgctcccagtagcaatagctgtatgaacacccttcacatcagcagcacaaacacagttggcgaagtgattgaggccctgcttaagaagtttcttgtgaccgagagccctaccaagtttgcactttataagcggtgtcacagggaagatcaaggtaccatgcttaaaatgaaaatgattcctgcttttgtttctgtcttttgacttcatttgtggaagactggtggatgtacctgtatcagttatgtcagagcccagggacatattctggaataaatggtgaatgcatcctggttgtccgagtttttcaggtggacagctctcagtctgagagcccagaggtatctgtatgtgaagtatgtgatgggtatttacggaggatttatgggatagcctccctcctctttgcccccactgccccacccagcacaaagaatgcctttgggcttaagttttcagtagcacattgatgttggatgtgattggtgaacttgcaggcttctgtcaatggcacagtcctaggccctccttttcccttagcctgtctcatgctaggtgtgaccctgggatgggggcaccctgcccaccccacctctacccctccaggggcatgtgcagtggatgaacaacattttgatctgaggtctacctgtctgaacttaatacccactatcagtggattaaacagaatcttaaattactgcatgaaactgaataagatattccagatcaggtcatcgctgaacagaaatggataccgatggtggacagcagggatttagtgattcactaagtactgatttgaaaatggtgtatatatgtgaacatttgtgctttccctagtttttctgagttgagcctatagcagctgtggcagaaaatccactcaccttggcatgatgggaaagtcccttggttgcctagggataaaaccccagtagatgctgagtatgctcacgcttcttcaacacatactgtgggctgagcctgcagaatacagggatgaataggccaaggttcccatccttcagaggccacaggcactcagcagtggggggaagtttacatctccaggggagatgtatgtataatgtataacgcagtggtatctggaagtttgtcttgccatcgtctttgcctgccccacctgatctttagctgcataatctaacagtaatagcatcctactgatgtattacccacatggcaaatctttcaaccctacaaggcagagagagagagagagagagagagagaatgcagagcttgcgttcagacagactgctttgtttgtgcctgctgattctaaattaatctgtaggaagatttgcttctagagttctgatttcatgttcttgggaaggtatatttttattgttgcagggattacagatccttttttaagtttatttgctttctaaaaggaggaacgggattaattataagcccattttgagagtgctactcatttaaatccattctcaagaattatttcctttttaaaatcaagggccagtttacattatgcaggtagaatggaaatagtatagaactcattccactgtgggctatttattggtgacaagatgaggggtggtgcccaggtggctgaggtaatcacactgttgcgttgatctggggatggggagggcaatgatgtcgtgctgtgtttgtgacatgcctctcgttctcaccagtctacgcctgcaagctctcggaccgggaacatccactctacctgcgtttggtagcaggtcccagaacagacacactcagttttgttctgcgcgaacatgaaattggagaggtaagtgattgttcattcttgctttaaactctgcagaccagctggtcctgttttatcgctctggtctagtgactctaccactgactgcggaggaggaggggtggggaggagagagggaatgtgtgtgtctgtgtgtgtctgcctgtcatgggaggagaggtggtcctgtggaggcagggtgtttttgaattgtcagaaatgaacccagagttagtctacaatataattttcttgtaacactcattattttggtctgtaattttcagaggtggaaggatatacacttttttaaaaattgatcaccacccagtctcgttttcaccctttctacctccaaattactctaatccagctgagctttgaaagtcgacactctccatatgtttgctggtaatcaaagtctccaggctcctttgctctaaagggaaacacagtctctttactgtgaaagccatttaactttctagacactctctttcctctttgcccagatgatttaagaattcatgtctatatgtgcattatttgccattttctctccaagaaggcttgtatttagatcagttcagttgagggaaaaggcactttagactgtccttctagatcaagtgtcagttgagtaaacctctcaagctctgggtctcagccttttgtctagaatcagaaatggcatgaattgtctgtgtagaacgttttgtgatgcagtgagaatagttctaggttaaaagttaaaaaaccaagactctgcttcctgccattccttttaccagattaggagcacaaccttggggtaagtctactcttttcagtcctcagttttaaaatctgtaaagtgggacttgaaaaggtggttttgagtcgcaaattagaaatgtatgtaaacatgcttggtaaagagtatgtttatatgtcactgtaaattggaactttatttaggggagttttaggaagacagtgatttggg

SEQ ID NO: 51916 - DNA, 968 bp, Bovine  19866881403505
  misc_feature (1)..(1): n is a, c, g, or t
ntcacagagtcggacaagactgagcgactaacccagtcaaagattattcttagtttaattggcattaattgattgctaaatgattatagtgattttccttcttgaagaagtatgctacaaaaggcatatgaattcagcataaaaaattaggtgttggagtgacatgttaaaaggacattaatgaccctgaagttaaaccattatcctcatgaccacagggttccagtcaactgatctcacctggatagccatgtatatacaatgttaggatgtttggaaaagtgaggaaactagggaaggagagaatcaaagaaaataacatgtaaaagccaacataaaaataccataacccctggttcattgacaagtaatattaaatcaaggttacctggctttccaaaaagttggtagattttttacaattttaaattaatcttatctgataatagtaataacagttcctttgatttgttggtaaatattatgattttgtacttagattcttcatgtaattcttttcaatactattttaggggtcttcaagttctgcttactcctgttcttgcaaacatccttgaggcagatcaagaaaagtgttggggttttgaccagttttttgcagaaactagtgatatacttcaccggatgatagttcatgtcttttcactacaacaaatgacagctcataaagtttatattcatggctataatacgtaagtacctctttatattttttcctatatcatgatgttatataatagttacgtatcttcacaaatcaggtgaagaaaagatgtacccatttctgggtagaaagtgttagaaaatgttttggtgcttagtaaattacttttcacttatctttaaagtaaaaagattaattttctaaaatttacaagtaagctaacttgttcttaaactacaaattttacaagactattttcctttatgtgccttctttcaaatta

SEQ ID NO: 51917 - DNA, 1425 bp, Bovine  19866881437830
  misc_feature (1)..(1): n is a, c, g, or t
natgttgacaattaattttttttaatgttagcaatatatagaccaaataaaaaaatttgtgggttatatctacccatgggtcacaaatttgtaacatctgctttaaactcgtaggctttttgaagtaataatctcagaaaacagttgcatgtgattttatgattctacatttataaaagtaatatatatttttatttttaggactagcttataatgaagaacaaatccacaaatttgataagtaagtgtccagattatggttttttaattatatttatttgttttaattgatgattgctttacagtattggtttgatttctgccatacatcagcatgaattagccataggtgtacatatgtctcctccctcttaaacctccctcccacctcccgtctcccaccttttcccacccctctaggttgtgacagcctcagtttgagttccctgaatcatagcaaatttccattggctatctgttttatgtgttagtttatatgcttccatgctactctctccattcatttcaccctctccttcctctcagattatgtttaataattatttttggttatattgttaatgagattcttcttaaagttgtgattaatcacaataaaaaatacatcttgatattggctttatatagaactgttactgaatgtgcacatatttgaggcctactcacctggctccctggttcagaggttacagagataggagagtaagggggacagtcttcttccgcttcctgtgctctgattacagaaggacagataatagagaacatagggtgagggcacacctaaccacctctaaccttaacctcattcagtaaatagattttgactgttctcccctatgaaccttctttttcttttgctgctaaaatgtctgtcttagaaaccttaggcgctttctactgtaaatatcctaaacccacaacagtcgttacaggaaataaatttcatatattttaagactctttaatattggaaatagagacagtgacattgctttaagcccctaatcatttctaaattacaggcaaaaactgtattatcatgcaacaaaagctatgacccactttacggatgaatgtgttaaaaagtatgaggctttcttggataagtcagaagaatggatgaggtaagtaaactttttggggggcgattagtggttggctgcacaatatacaatctaatctatattacacattttaagtaagggtaatatttccttagactgcttattaatcgattctttttggttttcagaaagatgcttcaccttaggaaacagttattatccctaactaatcagtgttttgatattgaagaagaagtatcaaagtatcaagaatatactaatgaggtatagcttcaaaattatctagaaaaaaagcctttttcctattagggaaaat

SEQ ID NO: 51918 - DNA, 681 bp, Bovine  19866880447016
  misc_feature (1)..(1): n is a, c, g, or t
ncgccctgctctccccctgaagactgctgctttgcatctttttctgcttcccatttgctctgtttctctaacttcttaactcttcttactccctcagtgtaacggttgagggtaaagcgcctgcctgaaatgcaggagattgggtttcaattcctgggtcgggaagatcccctggagaaggaaatggcaatcccctccagtactcttgcctggaaaatcccatggacggaggaacctggtaggctacagtccctggggtcacaaagagtcagagaggactgagagacttcactttcactttcttcctttcctaggttaggtggatgttctgtctcctatctttctttggcatctgctgaactaaaatgttctttttaattccaccttttaaaaaaccagaggaagttactccccggaatatctgcttctctctcactcccagggaacaagtgtgacctgtgggaaaaacgccacgttctctttgaggatgcctgcatcctggctgagaaatacggcctcctggctgttctggagacatctgccaaggagtccaagaacatcgacgaggtcttcgtgctgatggctagggagctgatggcccgccacagcctgcccttgtacgggggagggcgccccgggcagcctcccgctggagtccacttccagtcctcatggccccgg

SEQ ID NO: 51919 - DNA, 2619 bp, Bovine  19866880591504
  misc_feature (1)..(1): n is a, c, g, or t
nctattattcctttagttttatggaccgtattttgcttcctttctcttttgttttgattatcacagtgatcatgtggattttgttttattcattgtgctaccagtcattatttattttgatgctctggttttctcaaatttggccagtaagaatccttttcagctagctcctatatcttttgaatacttctttgttttctggcacaatttgatgccctaggctctctttccctgcctgagatttgggattggccatttgttcaagggacagaaaacatggccatcctcctcaattacctataagatgtcactttccttaccacttaaaataagcttaatactagctaattgtttattattactgtgtgccaggtactctgcaagtgttttccatgcattcagttcagttcagttcagtcgtgtccgactctttgcgaccccatgaatctcagcatgccaggcctccctgtccatcaccaactcccggagtttacccaagctcatgtccgtcgagttggtgatgccatccagccatctcatcctctgtcgtctccttctcctcctgccaccaatccctcccagcatcagggtcttttccaatgagtccactcttcgcatttaattcatgtacaaattctttgcggtaaatacttttacatatccccattttacagatgagaaaatcagggtgtgaagtaaagcaaattgcacagagccattcagctagcaagtggaggagttaaaatcagaactcagatcattctgactccaaaatcaagcttggaacccccatgatatatcaccaattttgctacaaaaagagaaactgctttaaaagagctgaacttcataatatagataataacacaaaacaaaagccccatgctttaaaatggtacctattacacaaaatgtaaagaaagaaatccttgagaaatttggtaacgttctcattcattccaaaatgccaataatcaccatttaagataacctgggtgaggactggaatgtgattggcagctcaacaagaagccttatcatggagtgaattggagcagggactctggaccaagtcattgttaaagccttccaagcatctcccagctgcaacatttttctgtttctggggtgatctgtttagtgcttcagctgtccaggtaaaagagagggatagctaggggctggagggagatctgttgtgattatgtaactgtgtcctggttctcaatgtcctagggtgccaggaaagataggggggacttgcccagtcaagggctgtgacgcctggaagaaggggcccctttttctaatctgcacaaaggtgccctgtgggctatagaggctctacccgagtaaagtcctcccagcttgagattgactgttttgggttcaagggcaagagactccccattatctcgtaatgagagaaaactttctgctcccaacaggaatttccagttagagttattagcttaggtataacccgaaatttaaatgtaattacatttctcttagagctgaggttgctcctagcaacctgccagttctcttcccaggaggaagggcgtcagcctcttactcttttccttcttttccaccttgacctccgcgtccagttaggcctgtgtttagtgaggagccttaacccagacaccaagtctccagccagtctgtccccatgccctccctccctgggtctttgcccgagggcagggagaggtactcgagtaccgagggcagtggtgtgggatattgcagggagcgataggtggggggcccattaagataaagaggaagaataaacagaagcagatgtacctttcgcccaggtccccagctgactgataagagctaggctccggagctgggcctggcctcctgggagctgggagctgggacaggcccctccattctcatttctccactggatcctgtttcccttcctgggggaacgggccagaggggctttccctccattggaatgcaagccagatatattcacaatctattaccaatgccagtgactcctttagattgaaaagatgtgtccagacaccattctcctgtgaactatgaaagtggagactgtgcacaaacatgtacacacacacacctcacacacacccacactcatacccatctaggctaagattaagaagcctcaagctgtccccaatccccagaacgatggttccccaaagctatggggccctctccatgggatgtgttgtctaagcttcagtacaggactctgggcccgggggagaatgagtgaaaggggaaacctctagaaaccctcctggccctaaaatttctctggccttaaaatttctctggccctcagagctgtttaaggctgcccacccccaatccagaaaggatcaagccaatcgaaactctgcacctttaagggtgtgggctggcactggggttggggatagccatggtctgcacacttcctccccaggacacccccttccacccggccaccagcatagtgttctacagcactgtttccctgtgaaaaagaaaaaaaattgtcatggaccctgaacagatttaaaactttgaattggtaatattaccccaatatgtgcacattttcaacctcagtataaa

SEQ ID NO: 51920 - DNA, 1708 bp, Bovine  19866880634145
  misc_feature (1)..(1): n is a, c, g, or t
nttttgatgtgggcccttttacagtctttattgaatttgttacaatattgcttctggtttacgttttggctttttagcctgcttatggggtcttagctccctgaacaaggatcgaatcctcaccctctgcattggaaggcaaagtcttaaccctggactaccagggagatccccaaattttctttcctataataacctatctgagaaaaccatttagtacaactccttgattgggagatcccaatgagctatgagtttgtatttatagagacttactgtttcagaaattaaaaccaagaaattaaaaaaatacattggttttaagttatttaaaaatgaactaagtaacccataacatgttaataacataaataacattttacgagaaatgactttttcaaaacaacaaaaagaatcacttgctaaggagagtgacactgacttatatttttgcaaatctcttcatgtctgacttaatagaagacaatggattttcatgtctgcttctgaattcaatctcttgtagcaggatcctttgaaggctataaagagagtttggctttcagagatacatagtggaaaggggagaagtattttaatagcctttttagttaattgtggatatttatctttgatactataccagaatttgacaagaggcaatttcttaaaggttagtgacaatgtggaatctgaaactatattaattaacttttttatcctcttacattaagatccatttgtctgtcttgtcctttgaatgggtcttggaagtgacaggctcatttcattctttttggaggaaatatctgccagaaacccaaatctgaataactagcctttgtctgtcagtcactctttcaaggaaaaatgacattccagcctgcaactcatagttttctcaaaacagatgtctttctttggtgtgctgggtgccagatgcatattttctacttaatggcacagattatttaaaaaacaggggagtggggacttgggccagatttaataagattaataatttttaatgcttgacagatatttactgagcgtctagtatgtgccgaggaccttcttcagtgaagttgcccctttttgggaactgtgaggcagtaaaagatacagggcttaatagtatagtttggtgtaactgcctccatccatactcaggcacaggagttttatccaccactgcttttgcactatcagtggaacagttaaaagggaagaagcagatagcattttagtgttactatgcaaatcgttgtggcctcatggacctgtttgcgtatgggtttcctcaggtacagagtgctgatttgctcttctcaacctcctcaggtttccgtgagggtgggcggaggtggttccagaaggtgctttggcccaatgagtcttaacaggttcttgttgttgtgtgaccgcagatttggagcagcaaccatttgtttcccagtgcagaggaagccactcttttcctcggaatgctggataccattttcctcttctcctatgctgtggtaagttttagaatgctaggcttttctgtggaggaaagacgtaaatgactccccttcttctcaagttggtgagggattttgaatgtgcttactgaggagagctcagtttccctggagtttatatttttgtgtccttcccgtccatccatgtatccatccatctatccatccgtccatccatgtgacag

SEQ ID NO: 51921 - DNA, 2148 bp, Bovine  19866880660866
  misc_feature (1)..(1): n is a, c, g, or t
nctgctttgtcttctaagccttttattaatacaaatgttttttgatgacctcttaagttaggtcatcatgtaataattcctattttagggaactatattgggaatggtttttgctgtccagaagtcaaggttaaactgaagaagtgacactaaggttcataattaacttccagtgtgtaacataaactagaaaaggaaaaaaattcaagagtgatcagccagaagtagctaaaataattgatttgtatagagatggagtacaatggtatactcaagaaagtaaagaaggtaaacagtagctttgcacgagaagtacataaagtaatgattagtccttaagcgttatttaactcaaagctgaacttttagaaatttaggtaaagacttcacattgaaatatgcaagtatattcttattttttctataccttcaaatgggtcaagtggattgattatctgttaaataaatgaaaataagacttttacagaagtgtcataaggaaaaaaccaatgagaataactctatactttggtactagttaaatattttatgccagcagagaagatgacaaggcttttctgatctgtaattcatgaaaagtctgttacttatactaactgtgataaatgaaacatggcacttatttctgatctatattataaatctatattaaaaatatacacaaaaagattaaaattaactcaatttattgagagagggagtgggagagaggggagagagagagacacagacagacactaacttcgagagagagagaaaacttaatttacaaaacagctgacagaaccagattccccagtctgtgatccaaaaaaacagcagaaaaataaacacacttgaattttctacattcgaacactgctggatacttacatcaatattgacgggttctattgtgtttatatgcacatttggagctgatgaggaccggtctcgttgtccaaactgatttcgatgatcttcatctgctggtcggaaaggctgtggaattggaatggattttgaaggagatggactggtgagaattgggggcctggaaaagtcaagtgattggaagataagatttagagcaactttctagaaagaataacatagaaaaatgaataaagattttgttttcataatcttaaataaaaccttaaaataaaggcaatggcagtaatggcttttaaaagaagtagtttaaaaaactgatacatgcttacaactaataccaacaaagctgctttgctcaagcagaccctccacgaagtatcaatgataagaatactgattttattcagataactccagagaaatcttcaaatggctagaaattacctgtggttaatcagctgaagaaactcttgttctttaacattatacaaaaatgttctaagtacacactgactgaataatgtctgctaattatttctatctttgccatttcttgatgaagttactaagatgaaatttttatgggaagtattaggaaatcataaatcttttaaaaccacacatgtgtatttcaggtatctgttgctttatacaagatgtatctattgctttatacaagaggtaaattaaaatcttgaacaaaaatggcaaaaataatttccaaattcaaaagatgattctcagagtgtcaatctctcatagtttgaaatgtttactatgcccaataattgatacaagacgcacagaagaataatatattaaaccttaaagcaaattttctaaaaactgctttttgatgaaactgacagactgacctattttggtagtgtagataaataacaaagtctatgatctctcactgcccccaaaatgaagctggcattcacagagcacattaaagttttgagaatagattgtaaacacccatgagaagtctatgttcttcagaaagaatatccaagggagctgagaagtgagtaccacttgattgatgaggtgcgactcagtgagctccgtcaggaccaatgaatgattcaatgctaacagcttctcttcagagattggttattgttgcaccccatcttatgcaaactctgaaacttatcagcagtatcaagtggttaataagacagccagaaagacagctgaggggaataaaaagacatttttgagagagagttttaagaagaa

SEQ ID NO: 51922 - DNA, 1815 bp, Bovine  19866880662130
  misc_feature (1)..(1): n is a, c, g, or t
natgatgagttttccctgaatctataaaaaggtgagcctcactccctcaaacatttgcagctgtgccaggcaaggctgtggcgtcgacaggacacaaaacagcaagactgctcttttaatttactgaaaggagcccacagttctcctagggagaaagatcttgggctgttccagcctcgggtttctctttgcccgtgttagcaagacgatctgagtagaaaagcagcttctctcaccgatttcttccggtgacaccaggagtccaaagaagatgatgatcccaccagcaaactgcacggccgccgtcaccaggaaggcatactggggggtgggaaggggagaggtgctcctgacacatcggggatgctcgttaaccacacagtcgttagagacacacgtggaggacggcacgaccgggaaggaagtgagcgccgggcacccggccgctgccaggcactaagctaagtgttttacttgttttctcacaagtttttcccagggactctgtgcagctcagagaggataattaaggtctcctggacaccgagtggtactattacaactgggaagtcagaattagctccaagaatagcgctcttgccaccactcagcctcacgtaacagacagtatctgccctcaaagacagtttccagttgaggggggttacacactacacacaacattaattaataggaacctccctggtggtccagcagttaagaatctgccttgcaatgcagaggatgtgggttcgatccctggttgggtaactaacatcccacatgtcgtggagcaactgagccggtccaactgctttgtcgcctgacgcgacaaagactcttgagtgctgcatcgaagaacccacacagccaaaacactaaataaagataaattttaaaaagagataccacacattaatataggcagcacggaggtgggtaaatgagaaggctgagtccccataggaaacatacagaggaactgaatctggaagaaaaaagccaaggaggttgaaggagggagacagtgctttagggaagagctgaaaatcctggcgagtgaccacctttcccagcacaactgaagctaccaggcgggagggagatgggaagccctctgcacagggggagcctgagggttgtgctggggggtcacagggaagaacagtgtccttccgacggtccaggtgagacactcgagagccagacggcatcagtgaattttatttaagagagaatggagcctgaggtgtcaatgagtgtttccagaattcaaatctgggaggagcccatagggtgacctgaaattcccatttgagccaattagtacagtccaggtgtgaagctaagaaacctgggaaaaggtgactatgaacacaggaaggacttcccactggccctaactagaccaaaattcttcaaggaccaaacacttggcaagctgtttaaaaactgttacctactttctaaaagagcaacttactttcagttattaggtttggggttttgttttgttttggctgcactgcatggcttgagggatcttagttccccaatcggggactgaacccacaccctcagcagtgaaagtttggagttctaaccactggactaccagggagtttccaattattaggtctttgaacaggcgatccgttgacatgagccattcgatttttttatttgttgaacatataagcactgttatttagcttgtactttccaaagtttgttttggaaacacacaagccaatacaatagatactctttaattcttcctccatttcacataaatggcaatactcaacacacggg

SEQ ID NO: 51923 - DNA, 703 bp, Bovine  19866880670802
  misc_feature (1)..(1): n is a, c, g, or t
nctgccgcccgccatgatcgacatcgtgtgctcgccaacgcccttcctcatcgggctgctcaccagctcgctgccgctgctcagggagctgccgctggaggaggtgagctccctgtcggggccggggtagggggaaggggctgcctgtggctttgctgcagcaggcagggtcaggggagcagcgggaccccacggctttgtgagtcagcaccctcctgccaagtcaccttcagcagaacctcttgactgcagactcagtctcccctctaaatgtacctacagccgtggacacccattgagaaaggctgcagtcaacaatttgttgctgttgttgagtcgtgtcccactctttgcgaccccacagaccactgtccatgggatttcccaggcaaggatactggagtgggctgccatttccttctccaggggatcttccatctttccgtggatagaaagctgtgtctcctgcattggcaggtggattctttacctctgagccaccagggaagcccaaccaacgatttactcgattttaatacacctagtcagtaaagagccatctgccctacccttcccccatccacccctctgtcatgggaagaaagcacacaaagagctaatggtaactggaaatcatctttgggccaataacaaagtcttgagaaggactgtgttcctataagtaggtcattttttgtatcag

SEQ ID NO: 51924 - DNA, 860 bp, Bovine  19866880679542
  misc_feature (1)..(1): n is a, c, g, or t
nttgtcattcactagaagtctgtcgtttagcttctggtgtgaacgcactacggacagataagtaactttctcgaatattaaaaaccgtcgtcctgcctaaaacttttacacaaattgtttatgtgcagctctgactctcttattcagcctagtgtgtagatttggccaaaaccttgggaactgaaattaataaacgaaaaaacaaaatgtttatcatcagagaaatgaagaaaggggtatagggaaatatttatttaggttgttatgacaacagaacaagtgatcacaacaacattctttctttcccatctgctaaactttggcttgacagagccttaaggaacactcaacgtccaccgtaaagatgaaacggagcaagaatgttattctaaatttgatagatttttggctccacttaaaacccttttctaactcatacaatatttgccacaactcccagctatttcctctcgcagtgggcaaacacacttgcaacgatgaggaaatgaattgtgtggcgggggagggtgctggtggcagtgaccacaggcctccggcaggccaatgttcaccccgggatgtcatggggccactcactgagtctgcagtgggccctgttctcatgccctgctccatggccttgagaagatggggggctacagaagggaacctggagcagcctacttctacttccagctgagcagggctagaaatcagggcatgtgcagcccatagagagcaagtggtgcccactgatgaggatgaaagcatgggctgaacttaggctgaaggctttcttcagaggcttttccaggtcagacgacttgcagccagccactggtttgtcatggcctagctga

SEQ ID NO: 51925 - DNA, 892 bp, Bovine  19866880847448
  misc_feature (1)..(1): n is a, c, g, or t
nctttgataaataaaagctactttaagttttgtttgtttagtttaaacaaacacgtcctcagagctgtcaacaccatgatgcagacgtagaactttttattctacctaggtttattaaagtcaaaaaagcttatgttatcaccgttccagagcttgtcagcaaaaaagataagaagacggttagctgtttaatgtcttgtgaaattttcaagagtaatctaaacataattgcttaaagatagtttccgaaacattttcatcagcttgaaatcttatagttatactgtgctgtgctgtgctcagtcactccaatcgtgtctgactctttgtgaccccatggactcatggaccccatggacaggctcctctgtccatgggattctccaggcaagaatactggagtgggttgctgtgccctcctctaggggatcttccccacccaggaatcaaacccatatctctggtatctcctgtattgcagacagattctttctccactgagccacctgggaagcccatagttacactgagctaagttaaatgatggatagtcattgaatatctagatcctttccaaataaaacactgacatgttaaaaactgatatatttatctactttgagattcttactatagaagaattaaagatgtttgggtctaatagtaaacacatctgccacaccgaaaagtttactgaaaagactccatttctagaaattattaacagtatttataagttttccagtgcacagaatgctgatgtaacaaccagtcgattattgtttacctttcagttttcactagaaagtaaggtttctaagggttaagaatgctaattgatacatttaattaaaaataccagaagtaataatagtgaaagaaaacaactgtg

SEQ ID NO: 51926 - DNA, 1655 bp, Bovine  19866880853232
  misc_feature (1)..(1): n is a, c, g, or t
ntataattatgtgcacccgtgtctacgtcccccacaagaaggtaagttacccaggggtaaagggtgcgccttagtcatctatgttccccagcacccagcctaggacttggaacagaaactcaataaatgttccatgaaaactgcttttcatgatttttcctctcattgttctccagtcacgtcatagtaaaccttgtgctgcctgaagattttcatatggtaaccctcagtcctttaaaaaccctttttacatcattaaatttgccaatttacagtcatgattcaaaaacatttccattagtttacaaacaatctctgagcctatgtttcactgggataactatttctgccgcttctcccttgaatacagacctttcccacaacataacatatccattgctgatgaaaagccaacttacagagcaaatatttgggggcagtagtggtagacggtataataaaaggaattattgtatctatttatttatattaagcctgtcttgatgccaatatttccttacaggtatctaactgatattactaaactggttgtgagtgaaaggcaaaaaataataataataataacacacaacagtaaagagaagaaagtaaagtagaagataagtagtgatccaacccacaataattaatagctgtgttcttaagacaaacacactagaaaacacacaggtaattatggggcacttacagagttggcacaacctctcaggttaacaatgaactcttgagaaactgtttacagtcatgtaccagcctgcatgaggtaacccacagccagagatgtttacaggtaatatacaagagtataagaggcatttacactgctcgtgctggtcatcgatgcaaagccataagcagaacgtggtccataagactcacccaaatggccccaaaattggtctcagtcgttgttcacatatattctgaatatatagccctgacagtggtaatcaagagatattgtgtggggaagcttttgctttctaaagaggcctttgcaatatttatcaagaggttaaatatgaatatcctttgactcgggatttccatgtgactgtagcataggaataaagatacaaatgcacaaaaatgttcactctggtttttgtagaaaagtacttgttcatcaatagcaaagttattaactaagctgtactacacatccataccttggatattaaacaagttcttaaaaagagatatgtgtatattttctgacatgggaaaatgtcagtgatacgctttaaaaactcaagtagcagaatattctattatactatgaacctacttaaaaataatgtgtaagaacacatacacagacacagacacatctatttatatatgcatagcagatgtttgtaagcctacccaccaaactgcttactgtgattatatctgaggaaaaggatcaaaaaaaagagtaagaaatcactttcccttttatagcatatacatttcttactgttgttgtttggtctctaacttgtgtccgactctttgtgaccccatggacaaggctgctctgtccatgggattctccaggcaagaataccggagtgggttgccatgccctcctccaggggatcttcctgatccagggatcgaacctgtgtttcctgcattagaaggcagat

SEQ ID NO: 51927 - DNA, 1002 bp, Bovine  19866880886664
  misc_feature (1)..(1): n is a, c, g, or t
nggcgcttctctctcagggtctgcttggcgcacctgagagttttgcgctcagaaaggaagtcggccttctgagacactctgggggctgtcgcaaggctagactctgttggcttctgcttggcactttgcccaaactcgtctccacctgtgaggacattggcgagggggctccggagagcgtacgtcggcagaccaccagttggagtgacctggctaaaaatgggccgctggaaagagtccctccggaggggcggctgggctggctcctcctgcacgtgcgcatctggctcagagcaggggctctcttggtaaaattcttccctctcctcctactctatcccctcacctacctggctcccagtgtctccagtctgtggctccacctgcttctgaaagccaccgagacttcgggccccacctacatcaaactgggccagtgggccagcacccggcgggatctcttctcagaggcgttctgcgcccagttctccaggctgcacgtccaggtgtcgccccatccttggactcacaccgaacacatcctgcgccaggcctttggggaggactgggggagggtcctctgctttgagaagcaagagccagtgggttccggctgcgtggcccaagtgtacaaagcgcgtgccaatcctgccttcctggagaacgacagcatccagagactggccacggcctccatactgcagttctctgaaactggggcagctggggggctgggcgagctctctggacgcctggagaaggccgggaggcctcaagagagtcttgccgaccagtcatttgtagaaaggctgctcttccctaaaccggacctggttggatccaatgcatccttgtctcacgcttcagggaccgcccatgaacaggagccagatcaccttgtcccggtggctgtgaaagtaagtgttctaatgtttgcagccaggccctcccatctctaaaacctcaccaactccaccgagctacccaggtcaggatacaacc

SEQ ID NO: 51928 - DNA, 1176 bp, Bovine  19866881000578
  misc_feature (1)..(1): n is a, c, g, or t
ngttttagtaacttggctttttttctaatcagtgccaaactcccccagtttttttaactttaaatatgaggtaataaatcttttacccttccttgatcttttgacttataataccttggtcagttgtttcttaaaaggaatccttaaatggaaagagacaatatcactgtctgcagttctgattagtagttttattcagaatggaaaaacagattattcatttttgaaaattgttcaggggtatgttcattgttaggaccttggactttggagtcagtgcctagctatgcattccaggtctgccattttctggctgtgaaattttggacaagttacttaaccactttaaaccccagctttaagaagtaaattaaccccagtaaattaagaagtaatagcagccacttcgtagagttgttatgaggctcagatgcagtgcaaatgtgtataaagtattcagggagtcacctggtatactataatagacactagaatagttgccaatattatcagcatacaatctgaggattctgtcagccaatcattagcaatctgttgtttgttgggacatgccagtgttctccagttgaaatcagtagcaatctaaaaatggatagattattcctcatttaaatagtgtgttcatataagtgattgcttggatccttatcagaagttgctgttactgaaaaatgataaggctgactaaattgtgatagttgtcagttactaaccaactcccagaaatgaataagaggaacctatctctagttcctagtagaaggtatggacaaaatagtaggtgaaaaataatgtcttgaacccccaaattaagtaagctttaaagagtacaatacctcaaagggtctttgcggtttaaaatttgtatgctgagaatgatgttcattgacatgtgcctatatgtaattttttgatagtttaaaaggtgaaatgaactacagatgggagaggtctgaattttcttgccttcagtcaaatgtgtaatgtggacatattatttgacctgtgaattttatcttttaaaaaagattaattcctgcttcttccttcctaatagttgcattataataatgaaaatgagttgataatttggggggaaagtattctacaaatcaaccttattattttaccatggtttctgagaaatttgttcat

SEQ ID NO: 51929 - DNA, 669 bp, Bovine  19866881106790
  misc_feature (1)..(1): n is a, c, g, or t
ngccagataacagtaactggaatgaaaacaacaacactttcaacttaccactaatgcagaagagcacatgccgaaagacagaacccatcgcaaattcagccgatccccgacgataccgctgatgaaaaggccctaagaagaaagcatttcattttacagctctgggtaacaacacagcctggaaaaagtacgatacattctaaagcaaatgacgcaaacaaaacacaaaaattaaacctcactctcgtgcttagcctaacctctttatcagtttcaccagtgtttcaagaaatgacaactgcttctgcacactgtaaacatttcatgcaccaagacagtgtaattcagggcaaattttccttctatttgaccccccataactgcctgagacacctaggggaaaaaaagaataattataataaaacaagcacacaaatatactgcatcttctagaacagatgaactccaacatcagtatctgctttcccaaagggattcgtcttagctatttgcattctgaatgaagatgttacaacatgtcctacggaacagaagcgacggggccacgtgccctgcctgtttcatctaacccttgggcttcatcacaccacgaggcaaggagtacagggaggcacagacggtaattagctgaagataagtacaagtgtt

SEQ ID NO: 51930 - DNA, 1548 bp, Bovine  19866881180775
  misc_feature (1)..(1): n is a, c, g, or t
ncacctgcagcttggcttactgtctcgttgggtccagtcctctgggtctctccccttttatcccattaagagaaatgacaagactaagtgggtaactgggaggtagaagggggaggcctggcgggggtggcagaatccagtgaaatgggaacaagctggggctctagcctctctgactcagtgacccacatgctaaaaaacagtcggagcagctctgccttagccagtccaggaacagggcaggaagtccagcttttggcccactcgtatcctagcttgcggttacagtgttgaaagcatgcatgtctggaaagctttttccccgcctcccccttcatcatctgtggcttcagtggcaatgtcaggaaaccacaattggcctactccacccccacccagctgcctccctgggtgccaagaaagaaagaaggttaacagtccgtttcgatatgctggaagccctcgctgctaacagtaacagtcccttttcctcacctcataggtcctggtggtcgacctcgtcaacaatcggttcctcaggcaggtgagtaagaagcaacccagcttcaaccactgcttgctctgtttgcacctctttgatgtttagagctcgcctttccagctctgtggtgggcctggaatcccaaagcaggccagcaggcggggggcagtccccggccagggcttgactgaggacaggacagaaggcaggggccaaagaagaggggtttggacaaaggattgattcccatgggctctgtcacaaaatggtttgctgatagaatctttatataggttataactgtagacacttaacctttttcaacatgcctttaaatatttgacaacaaatttcatgatataatacaaagtggaaaaatcaggataaaaattatatacactactttgctgatcttgctttttaaaggatagaaatgagggggaaaatacacatatatagaaagatagaaaggaaaactcatcaaaacatcaattctggttgtcttagagtgggagactgaaaaagagacagattatgagaaattttagattgttttgatattttcatacattttttataatgatcataaactactttcattatcagagaatgagggttgggtgcagttcagtccctggtgggggaacccacgtgctccgtggcatggccaaataaataaacttggagtggctactgaaaagttatgcatgatatttgctgttttttattattagctccatctactttcactttccaagggccctctgggtaggcccatccccactgccctccggctctgagacccagatcataaagccagctttcaatcatactggtcatctgccctgaccaaagccccttgataagaattagccaccttgcagggtggagcattgggaaactactgagtagccacttaggtgcagggaactttctcaagttaattgtgttgcatttaattcctcccagcccttactgagctattatttacgtataacatatttaaatttaagacgtacaacatgatgagttgatatacgttgaga

SEQ ID NO: 51931 - DNA, 1478 bp, Bovine  19866881332464
  misc_feature (1)..(1): n is a, c, g, or t
nagagacaacagttctgactacctacagtaggccactcttaacctggaggatccaaactttatagagtgcacaggactcgccaggatggcttgctgaaatacagatccccaggccctcactcagtgagtccacagtaagctaagtgttctgtactttaatgagttcccagattgattctgatgtaagacatttatgaactgtcttttgaaacacagttgtaggaagcagaggcagcatctcagggcagctgcagcgtccatggcaatttctggtgggggtcagtggcaagaatgtgtgtatgtctgcgtttggagggtgggagagctggggcctgcgtgtcaagtgcgcggtaatgagaagcatgtgtctcctggcctccctgaagtgccaagttcaggctggaagaggacgcggtgggcagcagggactgaaggatctgtctgaccaagtgttcacttctttctagacaggaagaatctgaaggtaaaagtggagaggacgaactgataaatgtcgaggggccttccatgttaggtcactaagaacccaaggcttttagtacagtgcactatagcacaagagcgccacctaccgtggccctgcaggcgggggcaggcccttccaccgctaaacactccctgtccagcccaccccgccctctcacctggcccaccgcagctccaatgctcccggttccatcaacgatcccagtgacggtcgccagagcctcactgctcccctggatcagctcctgacgacccaggtccgcagaaatagcagagctaatcatattagaaggtccaccaataaagaaccctaaagtcagaaacagaacaggttcttattaagacactactcgtaacaacgcgctaggaacctactgagaattacataaactctaatcccagtactctaactggtatgttggagagaaacagaaagaagggggcaaagttacctgtaaaaatggaaactcccccggatgtaacatcttagttagcatccactttcctttagaaaacagacctttctaatccggtgaagtgtgcattccctgacaactgtctgcaccagtttatcaaattctattatggcagagatgagtcagagtatctaactacccaaattcaaccaaacagtgagaaagagagagagaggagaaaaagcgatttaaacggtgcaaggggttccatctgccactgttctcggtgaggctgccacaggactgagcacggtcagggccaagagtctcacagagcagcagcagcttcaactatcccatgagctcaaatttaagaacaggagtttttctataacagggtcccgtgtggcattcaactgattcatctggggttcaagggaagaaatactgaccaattccaacataggaggaaaaaccagctatactggactttttgaaagttggtgaactggtttccaacatggcattcttcctacaccacttccgggagtgata

SEQ ID NO: 51932 - DNA, 1211 bp, Bovine  19866881336525
  misc_feature (1)..(1): n is a, c, g, or t
ntgaaatacatacagtaaaagtgatttcatgtacatcttctttaaaataatgccatcaaaatctccattgaacgactttaacctgaatattacctttaagagttcagatgttactgtggctctttcccacatgtaacacatacactatcaaaaataatagaaaaaaaccctcatctggaataaatatagattcagttcagttcagttcagtcactcagttgtgtctgactctttgcaaccctaggcttccgtgtccatcaccaactcctggagcttgctcaaagtcatgtccatcgagttggtgatgccatctaaccatctcatcctctgtcatccccttctcctcctgccctcaatctttcccagcatcagggtcttttcaataagtaagatctttgcatcaggtagccaaagtattggagcttcagcatcagtccttccaatgaatattcagtactgatttcctttaggattgcctggtttgatgtccttgaagtccaagggactctcaagaatacagattagtgagatggtttctctaaaacttttccaaataaatagctaaaaaagaaagtgccagtccaggttcaatgcacgatactggatgcttggggctagtgcactgggacgacccagagggatggtatggggaggaaggagggttcaggatggggagcacgtgtatacctgtgatggattcattttgatatttggcaaaactaatacaattatgtaaagtttaaaaataaaataaaattaaaaaaaaaagaaagtgtatcttaagtctgcgttagctttcccattccctggactccctggatgaggtaatagtaggtggtctcttttggactctttttcttttgtctttacttcttccttactaccagcgggggcatgtcacccacctgtccttctgttggaatgggtgtgttgaaggtcagtacttagagcaaggcttttgctaagttcatgttctcgtcttcttattaccttctccttgggcaggtgtcacaggactggcatctgttccaccaacttactcagttgggatgcttccactccagaactggaaattgtggaattactgcttctgccctcaattcaagctaacagttctgcttcaccagcaacaaagtggatactatgttttaagttccatgccctgtttctaattgattcagaatgaagagggaacttacaggcaatgtgtt

SEQ ID NO: 51933 - DNA, 1030 bp, Bovine  19866881486311
  misc_feature (1)..(1): n is a, c, g, or t
ngtcctcttttctatggacttttttttttaggagtttggcttttaccgtaggacagtttaggaaaaagggctgtggaataagtgataaaactttaaatgatgccagatttcataacccaataaaatctgactagtgacaccctcttgctagaggaaaagacgcttcattagccgtacctataattcctccgacgtcgtaccagatggacagctggtcagcttcggcctccttccatccaaagttgttactcagataaaagggcaaccagaagaagaaggagtaattcactaacttcaagcacgcgtaggccagtgaatactacaaggaaaacaccccactgtcagtaaggaacgaacagcacagcgtaactaccattctaatacaattaaacagcaaaacaaaacagaagagctggagctgcatagtacctgattttaaaattaaatgttcctataaattcccattgcctgacttgtcctagccttcctcctctcttcccccaacttagcatctagaaaggcagtataataagccttgggattaaaaacacagaggactactccctaattgtccccacttcttctccttttggctctctggtagaagcaaactggtgttctgaaccataaggcagggcatggactcacatttctttatttagataaagataaaaggtattcgtgccactgaggagcactaaccaaaagcaaacgaacccagtaaacatcacagcttttactgcaagtagccaaccctttcaggttcgacttccttcgaagctaacatgatgaccagtgcagagcaacgtgcctggacgctagttccaaaggtccaagaaaagcatcagcatgaaaactactttcatagggtagtttcggaaagctctgagtcaaaaatgaaagcagaggatcgtcacgggccttgtggctctaggttgaggagtaagagctcccatacatggcagtggggctgagaaacctatattcaacacattattaccaggaaatcctgacattcagcatcaaagga

SEQ ID NO: 51934 - DNA, 1079 bp, Bovine  19866881894322
  misc_feature (1)..(1): n is a, c, g, or t
nctttctctctctctctctcatagttcgtggttggcactttaaagctggaacgcccactttccttatgttacagatgaggaagctgaggcctggagaagagctttacctgagatcacacagagtgtagcaaacccagttttgttgaggtccagcctgggttcttttttaactcagtgacacatttctgcagggtctgaaagtacagtaatggaagcatggcagccacctcccactaggtctcagcaggcaccagaccacatcagagtcaccgctggctctggttcctgggaatcacactcaaagggagacatgctttgcctggaatcctaaaggatgctgatggactcaccctgcaaactcctggggtctctccaactctggaaactcatccttcacttttctggtagcatcttagagaaagctctgcgcttgactctttctggttgctaggtgaattgggaggctgctgagcatagtaataactaactgcaaattgggctaggaccctgttgctgggaaagattgagggcatgaggagaaggggacgacagaggatgagatggttggatggcatcactgactcaatggacgtgagcttgagcaaactccggagatggtgaaggacaggaaaccctggcctgctgtagtccatggaattgaaagtcagacacgactgagcgattaaacagcaacacatacgacacagggctttgtagcagccagaatggaagcgtcttctccaggagaatctgagtgctcacaagtgtatcctggtgtctctggactaatgcttcaaccctcaggaaccaccaccaagtagcaaagcattctgggatctgacccttctcccctgtgcccatcttttaaccttgtggcccagccaacctcccactggggcatctcctccctccctcgcttttgtgcaaattgatcacagctgtggggggccagcattcctttcctccacccccactgtaatgcgagccagctgccagggctccctgctagaacttccttcaaaaacactgcctctcctccaaccagcagatgctcagaaggctccacattaagggcaagc

SEQ ID NO: 51935 - DNA, 1799 bp, Bovine  19866880871433
  misc_feature (1)..(1): n is a, c, g, or t
naatgggcaccaatcagcatgagtctcagcttcctttccacaatcaaaaagatctgaggaatatttaaaagtctgagcttattagagactccaagagaaagtgaaggcttccaggttttatccagcccttctgtagctctccatgtatcacatttcattttatctctaagtcaatttaatttataaggaacgtatcaaataaatagctcttgattctatatttctttatggaagagaaaaagaacaaatttgttgataataaaaaaagaatcaaacctcccagaaattacttaaagagggatgacaaatctgtaaagaaacagaatttttttgtcagctgaaattaacaagagaccaaaaggagatgatatagaattatagctctttctgtttcctatgtaagaaataaatgatgattcatctcactttaaaaaagcagagacattactttgccaacaaaggtctgtctagttaaggctatggtttttccagcggtcatgtatggatgtgagagttggactataaagaaagctgagcactgaagaactgatgcttttgaactgtcatgttggagaagactcttgagagtcccttgaactgcaaggagatccaagcagtctatccttggagatcagtcctgggtgttcattggtaggactgtcattgaagctgaaactccaatactttggccacctgatgtgaagagatgactcatttgaaaagaccctgatgctgggaaagattgagggcaggaggagaaggggacgacagaggtggttggatggcatcactgactcaatggacatgggtttgggtggactctgggtgttggtgagggacagggaggcctgacgtgctgcagttcatggggtcgcaaagagtcggacacgactgagcgactgaactgaacatctcactgtttttcaacctctgccttaaacttgtaactagatgtccacaaggaattagaaactataaaatatgagatgattgtgtggtgggatcctaggcaatgcctcatgcggcccctcaatcccagtatagtactctgtaggttcctcccctctctcccttttcccattagacactgttgcctgaggacatgggctgctcacctctcagtgcactcgtcaatgttgttctcacagtggactccatcaaatcccgccgggcacttgcaggtgtaactgttgacatagtcagagcaggttcctccgttcttacagggctcactcagacactcattcatgtctgtctgacatttatccccagtgaagcccggaaggcacaggcaggagaaagtattcactccatctacacaggaacctccattctggcaaggatctaagccattgtacacaagaattagaactctgaacagcagcatccatttaaccttagactcataaaggtgagtaccctgaactgagccacactaacaacaggtaacaattctgacttttctttacatctatttttccctgactcctccaattacataaatgaatatagtaacacttaactgagattcttagtaagaatctgtttaatagctggaaagaactttacatgtatcactgtcttgcaaaattaatactcataaaactagggatgggatagatattaattagtccccttgtgctgatcaaccttttcttttccctccctctcttcctttcttccttttcttgtttttgtttgttgttttttagatttacatacaactaggaaacgagcatttttaaattttaaacatcatgtagttgatcttagagaacactttacagtcatagcagtta

SEQ ID NO: 51936 - DNA, 3433 bp, Bovine  19866880944136
  misc_feature (1)..(1): n is a, c, g, or t
naggtgtgggttaaattctagcctgttactcctctcccagggccttagacaagttatttagcctgtctcagccccagtttcctcatctaaaaaactgaggatgatggctatgagtctgttgattggaagaaagtatgtgaaagtgttagtcgttcagtcgtatctgactgtttgcgaccccacagtctatagcccaccaggctcctctgtccaaggaattgtccaggcaagaatactgaagtgggttgccatttcctcctccaagggatcttcctgacccagggatcgaaccagggtctcccaagttgtaggcagattatttactctccaatccaccaggaatctctgttggtggtgatgagcaaaaatgcttggtgtccacccaacaggtgttcaccaggcgccccctcccttatcctggcctcccttatcactggcccacctccctccagctccacccaggatcctgtacctttcacattgacgttcatgatggtctctcgcgggacagcattcctgacgtcaatgacagaggcggtgtggatgaccactgaggtgccctggcaggcccccttcaggcactgctcatccagaatgtctccttccagcagggtcagcttgatcttgctctggagctctgtgtgaacaggaggcaggtcactggaaagctctctgcatctgaaagtttcctgataaaggtggcattttacctaggtcttcaaggataggtagactgaggggaaggagagatcgggaggagaggtgaacagcccatggaaggagcaagtcaacaagggcatagcaatcagaatgtgcagcatttcttgagaaacagcaaatatctctttccatcccatctccttccaaaaacataaaaaaagagagtttgagctatgaggagtcatgagtacctggaacacgaaattgtgaaagagactcatgcggcatgtataaaattcattaaggaaagaatttgcatttaattcaaattaaatgcaatggggaatcaggtatggatttggaattaaaggagaaatgtaagcaagaattgtggtgtaggaagcaaacccctgctgcagtattataaagcggatcaaggtggggggtggctaagaaaaagcaaggtgactgagggattaatcgggccatggcaccacagtttacatgacgaggattggaaccagggatccagcagagggagttgagaagagaagaagtacagaaggtttgactttcagaccttaccttccaggtcctggttcttactggagacgggctgagaggaagagtcaaaggcagcccgagttttttcctcttgagtgattaagagcatggtggtgctttttaacaggaatttagaatgagccccaatgctgaatttaactgcaagagctcttattagatatcatcaaaagcagatatcagtgctgaaaatgagctagccaccaagggactaacattctgactatcttagccaaggatcacagagatgtcatcagggtctccggctcctctgaagcccagggaggtggcacaacatcatcacctcagattagtgtggttgctcagctgagtcctactctgtgcgaccccacagactgtagctggccaggctcctctgtccatgggattctccaggcaagaatactcgagtgggtagcctttcctttctccaaggaatcttcccaacccggtggtcgaacccgggtctcctgcattgcagccaggttctttactgtctgaactaccagggaaggcccaccttagattagcccatgaaataaatgccacacaaagagcttagataagtaccctgcacttattttgtgctatttatttcacacatgactttcagctttctaatttccttccccagccatctcatgagacagggattccaatttccactttacaggcaaggccatccaggctcagaggaatagtcttaagtcacacttctaatgaaggctccagcctgcccacctgccttcaagccttgcttgctatcccatcacccacttgcaggacagcagatcagttcaggatcagtcaatttaaatgaaatgggcaatggaggccagagaacagcgagagagaaatccagagtgaaaagtctcctgcattgcaggtagattttttttaccacggagccaccagaggagccagccagacagcctgggttcaaatccagtttttccattttccaggtgtgggaccttgaacaagttaattaacctctgctacatctggtctgtatgtttgtgtcccctcagatccattgttgaaatcctaatgtgatggtgttaggagttaggggcctttgggaggttattagatcgtgaaggtagagacctcatagatggaatttccttcttcggttacaacttggtaaaaccatctgctctcctttaagcctgtttgagattagctccgccccagccccttccactcccaaaaggccacagagtgggacaaaggcagaggagttaactggagagcagaattttctgattgtgtctccacctctgccctgcctgtcccttccccttcctctctttcaaggctgacttcagcagactggctcaaaggccaagcgaggaaagaccgctcacccattagtctgcagggatgcagagtgacaagcagagggcgctgtagatgcctcagctggaacccctagctccctcctcctccaagcctctgtgggcttggccagtgttttgcatagactgaatatgcagtgtaagcttacctgttgtgagcggggttggagggagccccagagagaagctactagacagactagcagttgagagcacagatactgcagccagaccgtgcgtgactctttgcaaccctatggactgttgcctccaggctcctatatccatggaattctccaggcaagaatactggactgggttgccatgacctcctccaggggggcctccctgacccagggatcgaactggtgtctcctgaggtggaaccttgaacaaattagttaacctctgctatgtctgcatgtttctgtcccctcagagccatcgttgaaatcctaatttgatggtgttatgagttaggggcatgtgggaggttattagatcatgaaggtagagcacagataggattaatgttcttatagaaaagaccccagagagatccctcatgccttccactgagagagggcacagcaagatggtgcagctatgaaccagcaagagacctctgaccagaacttgaccctgcctgaattttggacttctagacttcagatggctcagtggataaataattcacctgcaatgccggacacacagggagtgcaggttcgatccccgggttggaaagatcccctggaggaggaaatggcaacccactccagtattcttgccggaaaatcccatggacagagaagcctagcggtgctaca

SEQ ID NO: 51937 - DNA, 1173 bp, Bovine  19866881112137
  misc_feature (1)..(1): n is a, c, g, or t
ntcccaggtgggcagtggtaaagaatacaagtgccaatgcaggagatgcagatttgatccctggatcgggaagatcccctggagttggaaatgacatccaaactccagtactcttgtctggactattccatggacagaggagcctggtgggctgcagtccatagtgtcgaaaagagttggacacaactgatccactgagcatgcatgccctcgagtcttatcctcaagaagctcactctagttaacatcacacagacaattaccacagggtatttaaagaagatgtctgtgttccccaaaagtggtgctctttccataaactttttgttccagtgagaataggagtaggacaggagtggccagaagagggaatgggagacaagaaaatgcagatagtacattgggatgcttagtgtgtgaaatgtagttttgtagggggtgtggggagctgggaaggaagtaggatccaaggaggattctctgcttgtaagagttttatttggtttttaagatgagagctccttggggatgtttaaatgctgatgggaaaggactaggagacagagagggtgaagacagagaagagagaaagggtaagggattaggcattcaacaaatacttgttgaattaactaatttctgttacggatcattgctgaagatattgaggttgcaattaataaactgcacattcccagcaaaaatatgcagagtctgagaccagacagaaatgacattcctttctccctcgtcatcagccctcacccacactccttgtcctcaggggaaggtaatagataatccgataaagggggggaaagaagggctccccagctgttagaggatggatgtcaagttctccaattcaatgacaagttccaaaagcatctcagcaacttgagaaaagtctaagcttttaagactgtgggtttggatattattttattagtaaagtaagcaaatattttacccttgcttttttttttttttgactttactttgacatagactagataactgttttcatcctcacctttcaaaatgggaaattgcacctacattttttaagctttcaagtataaggtggaccactattgtttttcttacccttgagaggatccatctcccttttttgataacagcaactttgggaaaataattcccttcccaacc

SEQ ID NO: 51938 - DNA, 1920 bp, Bovine  19866881181224
  misc_feature (1)..(1): n is a, c, g, or t
ncgtccggtctgtctgtgcttggaggctggcaccctggtagactaggtccgtgatgatgttggcagaagagtcctctgcatcttcatcttcatcactcatgtctgagctgcctcctcggagagaagccagcatcagtggggtgcacccatctggaggaaagggaaattccaaatagtatttaaggaggggaaggacattcatgttcacttaaccctattgctggaagagctcaatttgaagaaaattattcttttcggaaaaaaccctgtgcttcttgtgataagtggcaattgatttttccttgatagtatcctttctgtaaagaggagctagtctctaagttaaacaagcttttctgttcaagtttctaagtgctatgctttttttaaattggacaacattttaaaatatccagtattaataaactatatacactaaggtatgaattaaacaaattctctattcctctgttttgggatattatttttttaccccactaaaatctatcccaaataatcagcccttttgttgctgaacatgcattatgtgatggcttccctggtggttcaatggtaaagaatctgcctgcaatgcaggagaggtgggtttgatccctcggtcaggaagatcccctggaggagggcatggcaacttactccagtattcttgcctggagaattccatggacagaggagcctggcagctcaggcggtcgcaaagagttggacatgactgagcaactaacactttcacttttttcatcttaaattttataataataattttctttatttctatagatttgctgcataaatatgtagacataaacaaaaattaatgttgctaatacctaatttttattaatggattaatagtgtgcatatttttctgaggatttccattttgcttgacatatttttgatattcattctttctatctcatgtagcagtagtcatttatttccaatactattaatatataatattctgttgattgtgtacattgtcattaattattttaacccttatgaagatttgggttgtttttgctattgcttctgtgatgaatctgctcctataggtcccctgatgcatttgaaataattcctttagggtcatttcataggtagaagttgaatttctgaaaactggtgatacacatgaatcctaaattgtctccagtatggttaccaatctgcacattcaccagcagcacatgaaatccaatttataaagtcaagtttttctgaaactccaatagcatctatgatgaaactcctcttcctgtgtatgatagggacttctgtgtattccatgaatggcttcaagatcagtccattattcacatctatctttgatacatttatactttcttctcttgagtttaagttgctgagtaaatctatccattgagtttctattgttaataccatgatgtatatatatgaatatatttaactcttgaagatctatttgggtctatttgaaatttgccttcttttacttttcactatcaatatacctcaattttattattaaaggctatctcctggctgttttgtatgctttgattgactctctttttgctttaaattgattcttaattccaaataatgtgcttcattttctcttatttgtcttttttgtttttaatatgatcccatgcaagtaatttcacactattttctctatgctaataatattccttaattgcctcaagatattttgtcaagtacttctgtttctacattttctcattaaaatttcctcgtattaatatttagtgttctattaaatttgctcagtatattcactctgaaattttaaatacttttaaaaagtcttagtctcatttaagctatcggtttcattttggttaacataaaaataatcaggtatctatctatctttatatcatt

SEQ ID NO: 51939 - DNA, 893 bp, Bovine  19866881221298
  misc_feature (1)..(1): n is a, c, g, or t
nttacatacagatctgcaaggacagtgacagaggtaagccccaggagaatcggcctggctggggaatctagagagagctttttggatgaattaacactcgagcttaaccttgaagaacagttttaagagttaaagaaagaaatggcagggacagatatccaggcagcagaaacagcatttgtgaggcttcgagatctgagaaggcttcatgtgtgtgtggacacctaccactgtgaccggcgcaggggatgtgtgtggagagttggaagtgagtaaggagaaagagaagatcacccacgtatttattttctcaatgggcctgctcccaggtaatgaacgtgagaaccaggataatgagtgaccagtcaaggcctgacagccttgaaggtttttagcagcctgcacatcaccaggctgaagtgtttctaagcttctctgggtcagtttgcttagggagtcataataaccgacagaccgcagagaggaactctcctcagaggttagggactcacttacctggcgagacacatgatcattccacaggtgagctccgcagcactgaggctgttcccattgggggtactgtgcatggaaaaagaggggggtcgtctgttagccagaccaggattcccacttctgtccctgtggaaagcctccagtgcaccccgagcttgctctcctgctccatgagcttaccagttctttatttctcttgtttagctttatgggtcatttctttagatttttaaaaattgaagtatagctgatacacaatattatataagttaaacgtgtacaatatagtgatttacaatttgtaaagtttacactccatttatacctattataaaatactgttgctattctccatgttgtacaatatatgcttgtag

SEQ ID NO: 51940 - DNA, 1382 bp, Bovine  19866880408495
  misc_feature (1)..(1): n is a, c, g, or t
ntccattcatcttgtgatcatagtaatctcaaagattattcttgagcataaaaaaggcacaattagatttgacctgattatttacccaagtgcaacaagagtgttgctgctgctgctgctaagtcgcttcagtcgtgtccgactctgtgcgaccccattgacggcagcccaccaggctcccctgtccctgggattctccaggcaagaacactggagtgggttgccatttccttctccaatgcatgaaagtgaaaagtcaaagtgaagtcgctcagtcatgtccgactcctagcgaccccatggactgcagcctaccaggctcctccgtccatgggattttccaggcaagagtgctggagtggggtgccatcgccttctccacaacaagagtgttaatgtatcataaaggctctttgagtttgctttgcattttctgagtcatacatacagcactgaacagctacaaaggccataaattaacctctgcctagatattttcataaggaatctcagattttgtgtttttaaaggcctctattcttctatcccaaggccaggaagccaagcccaagaatctcactccactagattttactggcaatacctaaacatctaagtgaattcctatcttctggaagtctcccaaatttttaaagattcctagtctgccaagaacttacttactaaactttagaataaggctgggaccctgtaagccaggtattggaccagttttcttaggagaagtttggaggcattggctctatacttttctttcccctgaaaggcagcctgtcacacctgattttttaagagtttcagtctctaatacaataccctaggcaaaaatcttggagaacagattcttgttgtggctatgcaaatattttcatgaaaggtacgggatcatactaagtttctgaattcttgaaagaggagggtaagtgggttgaattgcatctgcctgctcctgctgctgctaagtcacttcagtcatgtccaactctgtgtgaccccacagacagcagcccaccaggctcccccgtccctgggattctccaggcaagaacactggagtgggttgccatttccttctccaattcatgaaagtgaaaagtgaaagtgaagtcactctgttgtgtccgacactcagcgaccccatggactgcagcccaccaggctcctccatccatgggatttaccaggcaagagtactggagtggggtgccattgccttctccctgcctgccccaccccacccctaaatacctcagagttctaacacttgcgaatgtgtattgtttggaaagaggctctttgcagattaattaagttttcttattcagtcccaggaaatgaattcttattctactgtatcttgg

SEQ ID NO: 51941 - DNA, 1330 bp, Bovine  19866880555170
  misc_feature (1)..(1): n is a, c, g, or t
naaattgttacctcgaatgaacataatgattgtaaataggatgtcccctcagtattgaatatcaagatcatgaacatgatgaacaaggcttcttccctaataattagaaaaacctccccaagctctcctttcttgaagacttattgtaaaactgagaagtacaatatccagaatgccgtcgtaagcaacagtcttaggttatctctctgttgttatttttgttttgtctttggcctgcattgatgagaacttatttccaagtaaaatgcgtgaatccaaacaaaacaaactaagcaggctagattttttagtgcatgttttcctttcatttttcaagtcacagaaataagtatttcattctgcgagagggctgtatttcttgtaagaatgatgtacctaatgacttgtaagaacttcctgtcattgaactcgagtttacttttaaatgtcttttaatatattcctatcatgattatcgatcatttttactttcatgatttagtgttcactacacaacagtgtctgttgctcttctcattgaacgtgtgtataagccagacagacattttctcccctgcaactattattcctctctgctagtattttaattatttatagctgtcaggcacttatttgtcttttaaaggtcttccaatcccaatcagaatgaataaacaattaaaaggaagaaaggttttgtagattttcttttccttttgattgtgtgtgttctatataacacttaaattattctttatgaaattagtacatcccaggaaaccagagatttatgccttaggctgggtgaatggaaaatatgtcagtgcttcctttgtgaggtttccagggtgccacaggagatttttaaatgcgctgcttatttgtgttctccccagatctttttcagtttattataatgctggagaaataattaaaatgttgcctagcctttcctatgctctacacctcactgaaaacatgtcggcagagcaagcaaacgttcatcatgtctcaataaaaaacagatcctgccagggatcatgccaaaaccaaccaagcatgacagtcaaatcaatgtatgttttggtttcaatttttatttttgcctttgctttagcaacgtgactctggtatatgttgttccctatggcttatcattttatggcatgacagttcctgaaatggacaaggcttcctgctaacctttgccatgtgtatatgtgtgacaacataaactataagagaaagtgacatttgactcagtaaatatttgtgttatgtcccctacatctgttttacagaacttcctttatacctccatctgtattca

SEQ ID NO: 51942 - DNA, 681 bp, Bovine  19866880559665
  misc_feature (1)..(1): n is a, c, g, or t
natgtaggaggatgtatccagagtattattagactataaggagagagaagtcctaggttagcaggactaccttctctgctttccaacttcttatagtatcactgactaacctcaggactgcttctatgcccaggaaatgcaataacatgcacatgcttcttaagtgatcttagctacatagagaatggaactatccaaaaatcagacagatcattacaataaacagagacaacaggaaagaaaagaagaagaaaaatatgatttggagaaacacccatggggcttttcttcctttcttaaatttctgaatgactaatttgtccctggacaccacaaacatcaattactcattttaaaactgctcagaacatttttttgagttttttaaaaacatttttcaatcattagtccaagtttatataagcagagcttagatacagtccctctgagcattcttatttatgatatatgggatgctgttcttttgaattgggtaaatttccattcaccttatatttaggcctcccaagaccttgttctataatatagaagaaaagcaacttggttccaccagaggctacatgcaaattatggcatgctagaagcaaaaagagattctccatggtcagcagtagtgaatgagaaacctctagttagatccaagaaggagagtgtggcacg

SEQ ID NO: 51943 - DNA, 980 bp, Bovine  19866880669919
  misc_feature (1)..(1): n is a, c, g, or t
ngaccaaggaagtggaaatatggcttggaaggaaagctgtcttaggagactgtgtaaaaggctctccatttatatctccttgtgacttttccctttttccctgtttgtcttccccattaacaatgtagagatatacaaacacacgggaataacagttgtaaaatgtgcagaaaatttgagattcctgtggaagatcctgtgtactcagagccactcaaatgggcagtgaatctgatcacttccttacagcccttgaagcatcacctctgaaggaagaacctcaaaggaagcatgacctctgaaggagaatgacatctgtattctcaggaggggtggaaagcaagggtatgctttcctcgccatcgtgctcttttcatgatcaatcctgacatgtaaaatcctgcccttactcagaactgaggtgaagaaatgtaaccagcccagaagtcagatgaagtgagaaatgtgccttgcccaggatttacatgaagtaggaaatacgacaagggcgaaagagaaaaccatacagttattgtagttagcatgtgtatgtttgtgtaagtgtatggatattctttggggcttccctggtggctcagctggtaaagaatccgcctgcaatgtgggagacctgggttcgatgcctgggttgggaagatcccctggagaaggaaaaggctacctactccagtactctggactagagaattccatggactgtatagtctatggggtcgcaaagagttggacacgactgagcgactttcactatagatattctaggcaacatcagattttgaggtgatgaaatagaaagcaatcaagtataatagggtagaaagatctggaaatcccctggaatatcatttcggaaggggaaaagattttccaactccctaggctggaaggaatactcttaatttttatgacatttagatttaagggacatatttaaatggattatgcaaattagagtgtgt

SEQ ID NO: 51944 - DNA, 749 bp, Bovine  19866880719215
  misc_feature (1)..(1): n is a, c, g, or t
ntgccttctgcgcacagtaggtgctcactgttttttaatcacaacatgaatctccaaattatattttacaccagaaaggagtacacagattttttccatttcatgaattttttcagttaacaaaaattgaaagtggttgtatatcagaaacaggtgtgtttcatctgtatatagtaaaacactaagtttcaaagagtggaaaattttggtcgttcatagcagaaggaactgttgaaccaacaacaggttcattgagccaatagccatgttaaaagaatatagacagtgccatataactagcaaaatgctcattcaaatgctttaagggtgcctttgatcatgtttaattaaagaaattttaaaatgtacttttcacttaaagttatcttgacacaaccacaacttagcattgttttttcaagcataaaagccagaaaaagataaaacatggcggccttctactctaaaccccataaataatgtataccccacccaaataaaacagttaacaataagacgtttctgagtgaaaggaagagaatttgtaagagccattcataccgtaacagatgtgctgtcttgcttcagccttattttatatttttcctttaccctttcctctcattgacgaccctgtggcataaagtttcatttcaaagatttaaaataggacatggaatccttaagagcaattgcacagagcaatctatcatgaattttgtgactcttatacagcatgcctagtttcc

SEQ ID NO: 51945 - DNA, 874 bp, Bovine  19866880758135
  misc_feature (1)..(1): n is a, c, g, or t
ntgatgggaccggatgccatgatcttcgttttctgaatgttgagctttaagccaagtttttcactctccactttcactttcatcaagaggctttgaattcctcttcactttctgccacaagggtggtgtcatctgcatatctgaggttattgatatttttcccggcaatcttgatgccagcttgtgtttcttccagcccagcatttctcatgatgtactctgcatagaagttaaataagcagggtgacagtatccagccttgacgtactccttttcctatttggaaccagtctgttgttccatgtccagttctaactgttgcttcctgacctgcatacagatttctcaaaaaatcctgggtaatttcatactaaataggggcatgtgatcgcttccttcttttgagctaatcatcccagagagggaatcactcctactttgtatcattccccagaggtgaacttcaacttctccaggaaaagtgagcacattttattaacctgcaccacatgaagtttgggaggttttttggttaatagaccaacaagctgtcattgtagagaacaacttctagcctgtgggcctggataaaattatagaaatggagctatcagggaaaatctaaaaagtgtggctccacgtaagaattgtacgtatggttctctctctctctttttaacatcatatgtgtttatactttcactaaatttccaaatgtgttaattcaaattagtctcctaagtattcccttctgtcggtagcatttggctgtacagtaaaatgagcagctgccacaaagcattcgctaatgctcccttcctcagagggagattagtacaaatttaaggtttgtggtaatccccacctgcagcac

SEQ ID NO: 51946 - DNA, 1464 bp, Bovine  19866880834762
  misc_feature (1)..(1): n is a, c, g, or t
ngctattgccaatagtgctgttatgaacactggggtacacaagactttattattttaacttgttataaatttttcaacctgaagctttgactgataaattcatgatataataaaaactatttgggcatttagtcatattatcccatacccaaaagaatcaatcatacttattagttgcaagaagtaaattataattttaatgtcaagctaaataaatctatgatattataagaaatatctatttttcaaaatagtatttattctgatagcttccatgggaaatgactatattaataagattgttttctgatattttgtcatttttaatgttatacaaaactttgctttgttattcaaatcctaataccatcttgacatagtccaaaataaatgcaaaccaacaaaaaactaaataacctaactctagtcacacctttttcaagatgcttataaatgatgccttttgcaatcctatattctaagaaccacagactctgacagtagaattcaattacaacctacccttggcagtatatagtcttctaatagaatgtcaaaatggaaacctttctgtttcagttctggctgagatttcaaattccaagaagaaaacaataacgagcaagtgcttccacattccacactgaggtgaaatactgcctacatcagactggcaaagaaaacaaaaatgaaaactgttttacaagccctagttaaatactctcaaacatttcaaggggttaagaagccaagaaagggacttccctgggtggtcgcactccactgcagggggcatgagtttgatccctgctcagagacctaagattccgcatgccacttaccttagccaaaaaataaataagtaaaaattttttaaaaaagaagaagctaagagaaaataaccttttttccttggatatagttgtcaaactcctatggcatttttttttttcctgccttccactcaaagtgtcagaaaagtaaggatggtattctattcttaactgaattctgtaagagggggattaatctaaccatttggagaccttgatatatgtgctctggagtgaaggaagagcactcaaagtgcctgagaattataggaggatggagagacagaggtggaaggaagtgaggtagctatcacacacatccctgcaataaaatgggctgtgtcctatacctagagttgtgccaaatgagaaagagctggtgaccagtaatgagtttaaaagggaccatctgcaggtttgatactacccaaccaaatgagtgtatcttcagaaggctgagagaagaatcctgagctgagggcaagagacacacaaaaagatacactacctgagtaaccagaagtgctggagaacactccataaggtaaacagttaaatgcttgttaaaacgagatcttgacagtactaggtattgcctttgggggcaggaggagaaggggcacgacagagg

SEQ ID NO: 51947 - DNA, 1229 bp, Bovine  19866880869680
  misc_feature (1)..(1): n is a, c, g, or t
naaaaaactaattttaaaggttattgtaggttatttgtggtccttctggtgtgcacacaccatgatgtcatcctgaactcttctctatttatatttcagtcttagaagtcttttgtctaagacttgatctcagctactagagacatctaaaatacttattattcaatactcataaaaatctagaccaaaaaaagttagaatagatggaaaaaagtcccagccaagtccaggcaagaaataattcaggcagatctgtcttctgaaatcatacctacgccatagacatctcaggacacagttgctggagaacttctcaagtgactggaaagtagccacatgtccaaatggctctcctggaaagtgattgcctgttgagtggaggtagatggacccctgccagagacatatcttctgaggaaggggaacaggggattccttgggcagtccaatttcttactcctcctgggtggaccactcgcctgtaattcccagatatgtttcactttgtttacatgacctcctgtggcaatttcacttcttcactgtagcagagttgattttttgtgtgtgtgggaatttttttgcttggaaaaccccttttgttgaggtagtcctcagtaaactaggaaatgtcaaataaacactggatgaagacagactagaaggccagtgagaacagttgaaaatgggggaagctaataaatctcttaagaaaaaagaaaaaacatttggcaattggaaagaacatatagttccactgatatggtggaaaactgacactttcaaggttattaggataccaagctgacattctttgcatcatcttcaaattcattcaagtatttaaaaaaaggcctttgagcatcttgatgtgtcagacacattgatgttagaaaacaaaggagataagtacattatagatactaaatacagtgtgtgtgtgttagctgcttcagtgtctgatctttgcaaccctatggactgtagcccaccaggctcctctatccatggaattctcctggtagtacaactggagtgggttgccattcccttcttcaggggatcttcctgacccaagggtctgacctgtctcctatgtctccagcattggcagggaggttctttaccactagtgacacctggaaagcccattcaatacagtacaacagggaagaagcctgtggagctgctgggatgaaggaactgtaattttaaattcagtgatctgg

SEQ ID NO: 51948 - DNA, 2074 bp, Bovine  19866880889105
  misc_feature (1)..(1): n is a, c, g, or t
natttggtgggccctaagtccaatgactgatgtttttataagagaaagaagaggaagatttggcacgcagacaaattgaggggaaggcggtgtgaggacagaggcagaattgaactgataggtctacaaaccaaggaacatcaaggattgattgccagctgctctcagaaactaaaagacctgggacatcttcctcccctcaggaccttcagaaggaatgatttttaaacttcccaccctcagaactgtggagaataaatttttgtcattttaagtcacccaattttgtggtcatttggtatggaaatcttaggaaactaacacaggtagtcagtaagaactaaatattatttataaatgccatatttctgctttaaatgcagattttactaaattgtatgcattataggtagcttaagacgaaaaagaaagggcttatttatatgtccagaaaatagaaacttaaaactgtaccaactgtattccaaacaaataatcacaagaaaattaccttcaccacttttcatattcagctctaggaaataaatgcttattccagtgaatcttgggttagtgtctgacttcatgaagccgtctagcagtgtggtgtgaaagttgtctgtgtgatgtcagtttcaaagcctgcacttgaatttattctttgaaatgtcaatcatttaaagtctcagagaccttttgtgtccatgatacaactttgccttgcagcttacagtagggactttaggtgagaattagagtaaaataaaactgtttagagacttaatgacctttgttattttatcaccatagtcgataatattatcatcataatcaataatatcaaacaaaagaaagtaaaattcgctatgggggtatagcatataactactttatagaaattttgatcaattttcccccttagggtaaaactgtattatggagaaaaagggcactgacaaatttccagggacttcccatgtttctgaaatatttacattaacagcatttcacccccacatacattatctagaaaaagctgagtgtctcttccgaactgataacttttctatgcgactcttccaatagcaatagatcaaataaacgtaaagttgtctcatatttctttttattaggtgatagaacaaagctttgtgatttctcaggagacctctgggaaatctcaaaaatagttctagatgtaaaatatatcctgaaaatattttcattctttcctcaattcagggacagttttcagaagacaaaagcaaaagagtggtcacaggctatttggacactttaagaaaatagaataataggtatctgagaaacgatttctagttacctagttaatcaaagtgacagtaaaagatataaaaaaaacaaatctagaagataatatctgtagtggatagccagtcccttttgcaaaggatcttcccaacccagggattaaaacggggcctcctgcattgcaggcagattctttaccactgagacatcatggaagtcccatttaatcaaagtgacagtaaaagattttaactgcaaatttagaagataatatcagtctaagaactttagttctttaatagctgaggaatcgttattcttttttgtttgtttctgcttaattaaataatcaaagacataagaaagtaaacataaagcacagaaaattgttctgaagaggcagtatgtcctgtgtaagcaagataacagagaaagtaaaaaaaaaatcctttcataacgtagatgaaggcatgaatcagttaaccaaggaatttagcccatcaaaagtgagcaaatgtgactaaaattttaacatgcttcatattaaaagcttcttttcagatttagtattacatataaaccagggataattaattccaccatgccaaattttgttctatattatactctttcaatattctggaacatgctgacctttggttggaggacaacctatgttctgaggacccctagggaattcttcggaagtctttgaggtcaaaactattttcacaatagcattaagattttctttttcaattttcatgctctcacaagtgtgcgt

SEQ ID NO: 51949 - DNA, 999 bp, Bovine  19866880910796
  misc_feature (1)..(1): n is a, c, g, or t
nacatgcctgctgtatctggaagtatattttatccttgacctcacaagaagatatttagaagaagtataaatatagattttgtttttaaagattctttcaacatagttcactggcattaaaaagtgatgtaactttcttatgccaggataaccttaatatacttggcaaatttgttttatattctttaggaacactatatttctaattaatgcttgcatttaatatggatattaacttttcatttgtgtcttttattaataatagaaaaggaaagctcattagaaacattaaagtttccatttctaaagatgaaaaaactttcttttagtattttatgctagaaactagttatgacttggtaattttgaaatagtagttagctatctatccctcttttctgtttagtatttgcttttcataggtgaaattactgtcacacacaagttaaagcagctctggttagtcagttgtttctattacaacacgcatatgtgctcagtcgctcagttgtgtccgactctgtgaccccaacgactgtagcctgccaggctcctctgtccatggaacttttcaggcaaaaatactggagtgggttgacatttcctcctccaggggaatcttcttgacccagagaatgaacctatgtctcctgcactggcaggcagattctttaccactgagccaccagggaagcccagctattacaacagcagcacataaatcttggattaacaatcaaactcttttatcactggatgctgacctagtctgttgacttcataatctgaaatgcctaattgactacttcattgctctaggttttgtttacatcattttttttttctttaattagattgaaatttcttggagaggtaaactaagttttttaccaacggcctgccaatgcaggagacataagagaagcaataaggaaacacggattctatccctgggtcaggaagatcccttgaaggacagcatggcaacccacttcaata

SEQ ID NO: 51950 - DNA, 665 bp, Bovine  19866880935947
  misc_feature (1)..(1): n is a, c, g, or t
nttattttgggtgggggataggaagacagccttatctttgttatgtatacatgaaaaagaacatttagaaatggcatcctcactggttaatattgttcttactataatttaaatgtggtaagtaagtgaatggttcaagaagagaccaaagaatatttccttggtggaagtttaagcacatttgcagaactcaacctagataaaatgtttctgtatttcagtggatacaagcctgtccaaactgtaagtttgttttatgaaggcaaaacatttatatttctccagttatcatgaccatttttcagccttatactgcagttgtagaaatctgccctatttttaaaattaaaagtgattgcattgcaacaactgaatgtttttctagacctcagaagtagctggtgtattttagaattcaaaattagtagcagagtgttatgtatatgcttaaattttatgttattggtgttaggaagtgtatctgctggagattatcttctggttttcatgatgccatcaggttttctcatgtggtgaaagagagttttgagatgcatcctatttctttgtgctcaaattttgtcaacctgaaaatcactgctgatgctgactgcagccatgaaattaaaagtgcctgattctttggaagaaaagctgtgccaaaa

SEQ ID NO: 51951 - DNA, 1674 bp, Bovine  19866880936742
  misc_feature (1)..(1): n is a, c, g, or t
nttggttttgttaagattgaaaaaatgcccaatggcaaaagaggaatgggcaattttcagtggatataactaaatgtgaacccaaacctcaaatgagcaaatgtccaagcagcgtgaaaaccagtgcttttatgattctaagctagccaaggaattctagatcctgttaaagaaatagcaatttagagaaacagtaatctagaaatttttctttaaagatattgaaagcagaccatttgaaataaagtttaaaacagttgactttacactcagggatttttttttttaaatcatcctttcattttgagatgattctagatgttgagacaagagttccaaaagctacaagtcatttctgaaaatcagttttaaaacacagttagatgaacacattttttaattctgtcaattgttgacaaattcacttgaacttttcgagttctaaaaatgtttaaattatctgccaagtattaattcaactttctacatttgagtaaatgttaattttttttaaagtagtgtctctggtaagggtggggcaggtatgtgtctgtgtgagtgtgtgtgtagggaggaaaaaggggaatgagattttaatcagtgtcatgcttttctcctcacttgatcagatttttgttgttgttttaaagatcagtaggaaatagctcacatttttagacattgtagtgctgaagtgttgtttcattattattataaactagactgttgtttagaatgtgaagtggtatgtttgaacccatcatccatttgacagatatttaatgagcacctgtgttatgccaggcagttttgcaaccacggtttcagcagtggcaaggaaaactcttgtggcttagatggtgtcaccagtccaggttcgatgcacgatgctggatacttggggctggtgcactgggacgacccggagggatggtacaggcagggaggagggaggagggttcaggatggggagcacatgtatacctgtggcggattcatgttgatgtatggcaaaaccaatataatactgtaaaatttaaaaaaaaaatgttagctataaaaaaaaaaaaaaaaaagaatctccagcctacagtgctggagacccggattggatccctccatcaggaagagctcctggggaagggaatggcaagccactccagaatttttgcctggagaattccatggatagaagagcctggcaggctacagtccatggggtcgcaaagagtcagacaccactgagtgactaacatacatagacacaaggaagtctgagtacatcattcttcagacggcttctcagaaaaactagaatcatagtcctgattatctaaggaaaacaacctgggacgagaaacagagtatttttctcattgacatactcaatatattttgtaaacatgacatcagtttcctcataattgatgtaaaacatttttcatctgagtatgtataactgctatcctgtagcttagaaaaaaatctctttgattcaagtgatttcttgccttgagaatactattatccacaggatgatgacaccagaaggaatggattggattaattttttcaagcgaaaataaggaactcaatctaaactatgtaaaactcacctcactatgatttattgcttttttcaaaccattgaagctgcaaataaaatttatgacg

SEQ ID NO: 51952 - DNA, 1269 bp, Bovine  19866881067677
  misc_feature (1)..(1): n is a, c, g, or t
ncaggaatactggggtaggtagcctgtcctttctccaggggatcttcccgacccaggaatcaaaccccagggtctccttcattgcaggcagattctttaccaacagagctatcagggagtcccatatttgaaatagaagcaataaataggatgttagtatctgatggctgtaattcagtggggaggttcaggaaacactctattcaacgtatgtgtttaatgacgctaaattccttttttagaaacacacccttaaccattattgtcttaggataataagaaagcttcagggaaaaactttatatcctccatttctaagaaaaactaaaaattctacaatactttggccagacttattttttttcccttttccttaaagtaatctcaagtttccttgtaaattaaaaaaaaaatagtaaatgtccaacgcttccttaggctgacaaagataggataaatcctttcaaaaacagtaagtggaactgggagtttcaggaagtaacagacttcctgtcattagaagtagggtagtctacttcatacctaactctgatggattgtggaacgcataaatgtcctttgttttcaaccatagtacaaatcaccacgttatgtcatgtccttgtggtataaaaagcagtataaaattatgtaaaaaaaaaatgaactgtgcgttgagtgctgcatttaaataaatttcacttttgatacttaacatggctttcttgattcagataaaggaatttactaaattcagtatattcctaaaataaatattcttgccatgatactttattttccaataggatattgtcactatcaaatctggaaataataatattttcagtaagactttttgtaaaaactgaattttcttaaaattttttcttatctaatgtaaatgataaatagttacatttactttgctggtataactgctttcactttctggaagatgaaacagtatgatcatttaaaatggtatcaaagcttggtagcactctgttcagtttgtacctaggtaaagtaggtcccgatagggcaggaacagcgaaagtaaatctggaaacaccaattcgagtttgtagtttattttttataattcacgttcgtaagtgctagaaaagaaatagcacaaggatatacatactgatactgttgttagcacactggagccaacttaggagaaagggcaccatcaaagtaatgaggagccacagaactttaaaattagaccgattgggtttcattctggttctcacagtcatt

SEQ ID NO: 51953 - DNA, 1850 bp, Bovine  19866881116943
  misc_feature (1)..(1): n is a, c, g, or t
ntctggcaattctatgtgggctactccgtatgagatatttgccaattttcattttttccccccaatcaaaacactcattttgatttttaatttttccttagagtcaagagtttctacctgcttcagaatatgaatagataataattttccagcccaaaatttcattaatatttctttgctttaaaaaaaatcaggttcccaccaaaaaaaaaaaaaaactgtagtctacagaacatacaatcttaccaatatttttacctacctgtgggaaatatatgagaaggccagataataaaatatttctttttttcgcttccttggcaaactctctaatctgcattaccttttccattttctgacctaatggtactgattcataatcaagaaaatgcacctgaaaaataatataaaaggtaacaattagaataccattcacttttccttgattaacatgatattaaagaagctcaaaacacatacagagagaacaagatggcagaggagtaggtggacgtggagtacatctctctccacgaatacatcaggaatacaccttcagactcagaattgcatcagcagaacatcagctgagagcagacaggaggacaataccagtggaaaagaatatatagagccatgcaaaactcggtaggatgaaggaactagggggaaaaacaagagtgtttgtaggactggacctgccctcagcaggtgggggaactgaagcaggggtcccatccccacactggggcaattgtctgagtcagaggacaaacgtttaaaggctgggagtgaagaagctgatccatggcagcctaaatggaatgagaatcagatagtccttgctgcagccatacataccctggacagggacacaggtcccctggaaggtgcagcagctaggagctggagtttagggattgtggagcaatcccagggcaaggactgctgttgactttggagagatggatcaaggggatgtgaggcaggaaactgtggtgggaaatgcctatggaggaaagctgggcagtcatggaagcaaggcagtactgttgagtcatgcaaagcaggtggagccatcaccataccctctctctccccacacgccagcatcggcagctattgttcaatagagaggctggcacatcaaacacctgatgcattgaactacaaggcaggaccccacccagggtgctgctttaagtgactgatatgctgatctacagactaggaccccacgcaggggggcccctctatgtgactgacatgctaaacaacaaagaaggaccccaggcaagggagccctctaagggcctgaatgggcagagctacagagaaacactggccaaagaggccttctgattgccagctacaagaggctcgaaaaaagactctgatagggccataactcctgccatggaggcagtccctgtccccacacatttggagctgtcaggtcccagcaagccaagcagctgcagcccctcacactcagccctcactggggcagagctgccacaggccaaaaaaaaaaaaccaaagtcttgcatctatgtgcacaaggtctcttcggtcctgtctgactctttgcaactctgtagactggcctgccaggcttctctatcagggcaggggctctccaggcgagaacactggagcgtgttggccaatactgttgccataccctctagagcactgtatttcctgctgccctagcctcaaacccaaatcctccagggcagcctcacgagctaaaccccagtgcacaacccacacatagaggtggaaataaaaccacagttgaaaccctgggtcagtgggctaaggaagaagacccaaagccttcccat

SEQ ID NO: 51954 - DNA, 1209 bp, Bovine  19866881181256
  misc_feature (1)..(1): n is a, c, g, or t
ngaagtagagtaaaaatgcaaagattaaaatatatttttttagctgaaaaaaatggtaaatcatctgtggtactactgaacactctttccttatattcttgctgatgcagaatttcagcacagtacagtgattagaaacatgcaaaatataaacaatggccagagcctaataatcatcatgaatgatgtctttgtaaaacatctgtgttttttctgtccattaaaatgcagattccaaagagtgattgtagatatgtttgttattaaaccaactcatctaatagcattactatataattgccattatgcactcagtaagagaaagttgaagcttaattaaaatatatttccttaccagttgtcaaaggtgaataatgagatggatggaaaactaataaacttcactgttttccatacacaaatctttatgccaaacattactcatatcttcctgtcaatggagaaggtctctctgtatttccttagtgatcataataaataaggttgataggattctcagagacaataaacacacgtttatttacaaactattgtaaatttacaaactgttatctttgctaaatcctgatggtttagggcagaaaataaggaatttacataaaactaactctcattcctggaacactgtccttgggtagttccagattttggaactgttacccttaatctaaatggcatgcaatatctaatagtcaataagcccctaatatttctaagtattccgatttattgccattggcttagaattttaaatcttaattatcttgactttccatttcttctttctcgtttcccttcccaccctgcttgatgtttccaagacccctagcatgcacatcgtgttctctacttgattcagttaaacatttcaattttagagttctttgcacagctgcttctgcagtttggataattagtgttccataaaatgaaaataaacagagaaagatacctccctccctctaatgttctttaaagaaattctacataaaaactgctgtgatatatatatatatatatatatatatacacacacatacatacgtgtatcagtgaccactatctactggtttccatgccctgtgttgtcacctcatctgcctgtgggcaaaatcttgtcatttgcttccaatgaacagaatacaagaaaactggcaggatgtctcttggcgataatgttacagaaga

SEQ ID NO: 51955 - DNA, 766 bp, Bovine  19866881339388
  misc_feature (1)..(1): n is a, c, g, or t
ngtaattgatggccccgtctggcataagtgattccacatggtggctgatgaacgactcttgggttagcccctcctcttgttcaagaaacagacaaattagcagacttttctctcttctccatagaactatcattcgcacatcagtttatctatcttagatgaaattttaaatattttataagctggtgaaccctcttgttcttggttttgggggaaagtggagtctcataaatagaattgtcttaccttctcggtcatggggttgatggatggtcggagggaaagcagcatcccgggtttttcagaggcatgtctctgcttagatcagattatatggtgacttgcagtgtaactatgctagtatctctttacacaagaaaaatttcttttaaataacaggatcaatttggggttgctcaagggagttagtagaaaggcttagaacatggcagtagtaatatatactcacaaggtcaaaaattctcagcttgagaatggttcagtgtgctcattcatcactttccacttttgctcatgtacaagacacccaaccaggtgtaaattaaaactactgtactagcatgatcaggctttaaaaaaaagtatcaaatcccaatttactgctgtcaattcacataaaatataatctttatgttgtagatatttctgattgtgttgttcccaaaactcaaggacagaaacaaactgaatgataagcagggtcaatcttgcatatatataacaaatatcacctaaaaattataat

SEQ ID NO: 51956 - DNA, 647 bp, Bovine  19866881367936
  misc_feature (1)..(1): n is a, c, g, or t
ntgtttttgaggttacgaaaaccgaaaacatcaacaggactcaaatagctttaaaatctttaacacactctgccatgttggaaactacctgtcaaaacacattctctcaaagcaacctattcctctttcatattttatttgtaaaattattccattatccattagcctagcaccaaatccatttactgtatctggggatactttttaaagtaacattgtaaattgacatatcctgtgtatttattgctccttcccattttcaagctctgacgaagcccagggccaaggcctttgaagacagtctagaatcctgcaaccaaagggaacatgtcaggaaatgggcttcccgaggaggcaaagttgctagctgctctgtagctaggccacaggctggctaatgggcagcaggcaagtgaccacttagaaaaagtactgtaacaggtggctaaaaaggtgactggaactaggatttactttgttcttattccatgagcactcataggtcaatccatttttttcttacaggtggaatgatagagatttcacctaaatccttaaacccatttcataccatgctgctgctgctaagtcacttcagtcatgtctgactctgtgcgaacccacagacggcagcccaccaggctcct

SEQ ID NO: 51957 - DNA, 1341 bp, Bovine  19866881535869
  misc_feature (1)..(1): n is a, c, g, or t
nctcctctgtccatgggatttcccaggcaaggagtcggttgccattttcttctccaacactagagggagtataacatcataaatatttcctttcgattgttgccttctggtaaaccatcagcaaagcaagattcaagtgcaaatatctagaatctgtttcatacttttaaaaatgtttttctcattaaaatattatgggatattttgatatgcaaggaaagttgtcttcataaataattagtttagtatctaacagtaatatttttatttgtgtaggtaaagaattcacaattttaaatgactggtgaaaatagaacccagatcacttatttgtggttatcagtgtaaaacatcttggttctacatggagtacaacattttgttaggcctgttattgttgttttatttgccatggatataattccatattttccttgtaatttaccactttgtgttatagctttcctagacatttaaggtaaaaatgttttgctggacaactgacatgattacacagtatcaaaatcaaatgtttcatccttaaagaatgaagcctgcctgtcttagaaaaattaaaaatgtctgtttttcagtgataaaagcatgttcattctcattctagtatagatggctttgcatttacctctttttttcatatttctgtttaaattttttcaagtttctgtaaataacttaaaatattaaatttttacattagtctccaagttctgttttggattggactttacatgtttgaatatttgaagataaaaagtttaaaaatatttattttgaaacattaaccattaaaatatcaaaagttccaaagtaaaatatgtatgaaaaattgagatattagccttttattggtaaaatatattctaaactagaatttacataatcttcttcaagaagaaagaagcacacatatatttcatatatattttagtttcttagcgtcttgaaatgcatttctaacagattttttaaaaaatcaccttacagtcagcatcactggtcacaaaatttagttttcctaacttctctagttcattgaaaaatgttacttctgtttaaaatgagagtcttctttttcttttccattgcaattaaaaaacaaacaaatgctggcaggtgatatgtcagtgtggaaacagtcactttgattctggattgccttctaacaagtgacttggggtaggggtgacttcttgatatgctcttttgcttctttcttccgtctacttctgcttgcctggatgaggctgtgccaggtcagctcctctatcactctatatatggataaaaccgatatccaaccttcctcaaaagccagcctta

SEQ ID NO: 51958 - DNA, 760 bp, Bovine  19866881577053
  misc_feature (1)..(1): n is a, c, g, or t
ngttaggtttttattctcttactaacaccgtttttgttggaaacaaatcagaaagtcaggaaaactacaaatggaaaagatatgacatgtcaaccagtataacttcctacaaacgagattactacttataatttactttgtttgttttatcataccttacaccatcacaagagcaccgttatcctttaatcataaagtgagaacatttttcttgtttaatgcttagtgtaatactcagttttatgttttctcccttcccagagttgaaggaaaaaatgaagagaaatattttggccgcatgattctcctcccatccctgcccatgccaagtcttttcctttgagccctgaactgttaactctcagtgtactcagagccattactaagctaaaggggattctccccaccaggaaagaaagctatttatcatttactggagaagggataaagaaaaagtatccaaatctattctctggttaaaaatggctagcaccacgatcctcttaattgctatctccctcttccaaacttccttatctatgactctcaacactcttacccaattattcaggcaacattcaagtagttcataccatatggcaagcattttcctaagcatagggtttaaaaaattgaaattctgtaattctaaccctaaaagtgatgggaaaagagatggcaaaccacaattacatactatatgtaaagtgatttaatggaggaatgcacaagaagtggtgaagatataaaaagacattac

SEQ ID NO: 51959 - DNA, 692 bp, Bovine  19866881759085
  misc_feature (1)..(1): n is a, c, g, or t
nggtggaaattcttacaaattggcctccacgtggaatctcaaatcatgtttccactcaggtcaaaaagatcactagaattgtcttgtggtagctttggcctctggcttaactgcaattgtgcaaaatggaaaatgagggaatgcatccaggtagaattctggatgtagatttccactggattcttttaaaacctcaagtatggaacagtccctcctagttgtaatccagttccctgaaaagtgtccaaaacagaatcagaaattctgaattttcaaactgtgtttggcttctagtgtgctgggtgatcaggaacccttaatctctgtatctatatttttggaattgtcatatcacaaggttgatacaaaccaccttacagagaccctacaaggattaattaaggttaaacaaagaaaaaaatgcattagacaattcagccttcatctatgcttctaaacagacccagatgttttattaataacaactattcagattatttggtagcatcttcgctaagtagagagtaacttgcataatgcatttcagctgtaaagacttttaaaaaaaatatccaactacttttattttaattctatattactttcattagcaacagaaaacctattttttttttcttcatacacactaatgtgttaaagtcagatcttgtggttttgtgtggttcaaattt

SEQ ID NO: 51960 - DNA, 722 bp, Bovine  19866882211022
  misc_feature (1)..(1): n is a, c, g, or t
nagtttactgatgagatttttaggtcgttaactagtacttcctgcgaacctgtcttgatattttatcaggtcttacccaaaaacacatgcttgttttgagtccatgtgctgacaactatttaaatgcatcattccttatttattgcaacctttgcctgtgctttcatcttttcaaagattttgcatgatcctttggagtaggttatttagaaaaatggatgaatggatgaggtctaaccttctggggaaaaaatataagtgtcccataaaaaagagcaaatataaaccaaacagaggagaattggtcaaaaaaaaaaatagtttactgctatgtagaaaactactgcattttatttatttaagcattcattcaactgtggctagaattacatatttgcattataatatgagctctgaatgaagtgggaataccaaagaaagtcatttcagtttatgaaattacccttagcacgtttatttgttctctctcaacttgaaacccacaagtttttattaagagcatggttcgtatttcaaatagcaagaaatcttcacgtctccctttccttccccctcaaaaataaatctacaaagcacctggatttagaagaacaacccagatctattgccattaactcggaaaactagcaagcacttccataataaaaataaacagtgcatactgtaatcgatgaggaggcaacatcccacactggtttatt

SEQ ID NO: 51961 - DNA, 3296 bp, Bovine  19866880358204
  misc_feature (1)..(1): n is a, c, g, or t
nctcttgcctggaaaatccctggatggaggagcctggtgggctgcagtccatggggtcgctaagagtcggacacgactgagcgacttcactttcacttttcacttttgtgcattggagaaggaaatggcaacccactccagtgttcttgcctggagaatcccagggatgggggagcctggtgggctgccatctatggggtcgcacagagtcggacacgactgaagtgatgcagcagcagcagcattagtttttctgagcctcaacttcttcatttgcaaaatgataaatggctttggtattgtctgtctagcaggaatgctgtgagaattcagtgaaaaatgcagattcatagctcaaaaccctcacttgtggcagacacagccagccttcaacctgtagaagttattattacttcttagtttcttattcatgagatatttatatatgagatggagactaaactttgattcccacaagctttccaattttaaggaaatttatatgcaaggaggagaaggggtcggaacttcaattatacattcataagtcgtctttgtaggtttaggaagacaaaaatgagaaaccaaaaagaaaaatgaagacaggaatgagttacacttagttttttcttatttttccaagataatttaatttggcttttatttatcattgttactaggttttccctttcagtactaatgttcttagctattcattcttctatcaagaattttttatatattgagtactaaccctttgaggcacagcagaatttttttatccctccctccccacccccaatacctagcttgagaaacaagaaaatactgtcagaatggccaaattagaaatctcatttgagataaaaacacaaggcagcatttgatggcacattagaccatctgaaggtgagctttgtttttcaagaatccatactgtttggaaggtatgaaatatatctcaatgttaaaatggcagcataaatgttttaattaagccagtgcccagggtgggtgtgcaatgtctaattagaccctgtaggtatcggtaatatctacagttttaggcgtggtttctacccatgaaagaatagctttgctgaaaattggctgtggacttgcctacaaatggccagtcaccgcagaggtttctttctctccctgataatgtttggaaatggagaagtattttattgagtccatatctcattacaacatccatctcactgtcagttgctaatgaaaatgagaaagggagaaagaatgaggagaggggtcaattgggctcaggcaggggttgaagctttgcacagggtctgcctcttacagggcccctctcatagctctcgcaggcacatcctctgggcgatttgaattccagataaattgaggatctgtgtctccatgggaacagcatggagagaacaaaatggggaataaagttaatatttatagcccatgactgttgattttaagtgctggctttatccattatctcagggctgccacggatagaggaaggtaaggctcataggtgccttagtccccaaatctattcttttccatcccttttccaacccatccctaaaatgtcaagccgaaatagtgagcattaactgtaatgtttatttgcataactttccctgggatgtgtttggtagatgaaacacagactttggtgtcaagatgacctgagttcaaatctcagctctgccactaacctatttcttcatctttaaaataggaataaggatacttacctttgccaggtggtgggaggattcaaaataatgcaatttaagtccctgactctgatgcaggcagtcagcccttcacaaatagttattattcatattattgactctctgctcacttaaatgactcttgtcatattttgatttatattaaaaaaaatagggataaggaacagaagggcaaatcatattatttagcagagttcaaagttacccaggagaggttatatctagaattagaagggaacattttataattaaacatctggattctttgggcttaagaagcttaaataattacctcttttcaaagccctattttcttgatgtatgtgtaaaaaatacttgtcacattacctgtgacatctgtattttactgttatttccaggctgttggaggggcccatttcatcaatactgagagtcagacacagaagttacacaaactcacatacaaaagcttctgccagcaaaacctatttgttttgtcatggcaaccctagtcatttctagctggagagtgagtgaggacgtcattatcaagagaggtcgggctgagaacccagcctgagctgcaaggctacagagaattgtatttcagagtcaaatgatcatgatacaaagacaagccttctgtgtgaggcacttaggttttatataaacatagacatactgcccctggcaaggaaagtattgggctggaaaatgtgacttgatgagcaatatctgcatatgattttaagagcatgtatgaagctctgaagaatctatactggtgtttggtgaaactgtaaatgattcccatgatctgctgctgctgctgctaagtcgcttcagtcgtgtccaattctgtgcgaccccacaaagggcagcccaccaggctcccccatccctgggattctccaggcaagaacactggagtgggttgccatttccttctccaatgcatgaaagtgaaaaatgaaagtgaagtcgctcagtcgtgtccgactcctcacgagcccatggactgcagcccaccaggctcctacatccatgggattttccaggcaagagtactggagtggggtgccattgccttttccctcccatgatctagtggtcccttaaagccttggggacaaaagtgcgacctggtctggtcagaggtccactggctagatatggggactgactgggtgtacaggagacagactgtgtatgggaggttctgacacccagacctagaaggagggctctaaccataagacctgtgcccgcagacccatggaagaggaaaaaggggagctatcagtatcccaggaccaggatgcatggtcactgcatgtaagtcatggacatgatctggttccctcacagagagcagctccaatgtttttgctctctaagcgtgccatgcagcaaaggttggccgagagggggatactggtcacctacacacaggtcaagagaaaatactgtgagatgaggatccagatgtcatctcaaatgagctttggccaaggcatctcacatatgacaccagcaagcctgagtctgagt

SEQ ID NO: 51962 - DNA, 2091 bp, Bovine  19866880503196
  misc_feature (1)..(1): n is a, c, g, or t
ncgcccctggggagcctgaaaatgagctttacactgtcaagctagaccatatagggatgtatctcataatcttgcgtctcactttgctcaagtcaattgagaaatggggaccagcacatgaaattaaccgagaacaaaagaattagttcaatgccctttattaaaaagagagtataatcacaactcacaaaaatatgaaatgaatatgtcaatgattttatttaattaaattagttacagattcagtaaaatgctacagctagttcaaaggaaaattcaaagagtcatatatatgtaagcagtaagaaaggctgaaatgaatttgtcaatagctgggaaactgggaggggaaaatcaattgtatttccctctaatttcattttcatttacacagacaagaattgtctgcgatgatattggttatctaaaattttgattcttgtgaaatagctcaaagataatgaaagctataaaaacacagagaatgagataccctaaatgagtgtgcttaagcaacgcattgttttccatttaagataccagtccttttcttagtccatttcagtctttcataaaacctgctgctgctaagtcacttcagtcgtgtccgactctgtgtgaccccatagacggcagcccaccaggttcccctgtccctgggattctccaggcaagaacactggagtgggttgccatttccttctccagtgcatgaaagtgaaaagtgaaagtgaagtcgcttagtcgtgtccgactcttagcgaccccatggactgcagcccaccaggctcctccatccatgggattttccaggcaagagtactggagtgggatgccattgccttctccgtcataaaccctacaatgcttttaaaactcaaagtccttattctctagtgaacaatatttcttgaatgcttagttattgtaggttcagttttgcacctctgctgacttgagttacaaagtatctcatggtcaaatctcatcttgagtgattttccaaaggaagaataggcaatatggtggcttagatacccctatatgtaaaaatcatttgaaaccaacctaagacacattttcagtggccattaaactgcgcatttttttaaatacccatacaaacacatacacacacacacacacacacacatgcacacatgtgtgtatgtacccctggtactgctataggcagattccttttaactcttaatgttttcattgcctgtggtattggggaaatgtctgagttaatttttcttgtgcaataagagaaaacctgggaccagatcatcataataatatcctttgtacttggataatttcatatctaaagaggaaaagaaatgatcctatcagagaactttcattacagaaattttggatcctattgtctgtcttgatattttaatagtaatgaaaatgaattaaagcagctgactgttttcctataggaaacagcctggtaacattgctgtgccaccttttcaacacccatggactcattcaccacttcaagttagatatggtgaccttacacagatttttaggtaagtccttttttccacatttctactccatttctcatgaataatggcagtctacaatactgtttaatgtaaagtggtaagagccacagcatggtagatgaagacctcatattagtcttaaattatccatcttcattttaaaatacagtttatctatttaaattgttgaaaaaatattagttatgcttaggcttaaaatataaaggctatgtgaagacagggactttgctgatggttcaacagtaaagaatctgcctgcaatgccaaagacacagattcaatccctgtgtcaggaagattccctggagaaggagatggcaatccactccagtatccttgcctgggaaatcccatgaacagaggagcctggcgggcttacagtccatggggtcacaaaagagtcggacatgacctagtaactaaacaaccacaatgtaaagacaaccatcaagagcagataactgtcagagaagttactgatctgctcatatattaacaaaacccaagcaaagtactcctcaaataatgccactctggacat

SEQ ID NO: 51963 - DNA, 1408 bp, Bovine  19866880546726
  misc_feature (1)..(1): n is a, c, g, or t
nggactcccctggcagtccgtggttaagactttgcttttaatgtatgggtgtgggttcgatccctggtcagaagttaagatcccacatgccttgtggccaaaaaaccaaatcataaaacagaagtagtgttataacaaattccataaagactttaaaaatggtccacatcaaaaaaaattcttagagaaataaaccctgcaattatttgttataacaagataaaatgaaagagaaagatgttgccctcttcaatatcccctctttctcattctgacctatgaacagagaatgggtggtaaagaaaagacctaaggaattgcagatataattctgatacatagaaatgacagggctgtatttccctggtggtacagtggttaagaatctgcctgtcaatgcaggggacacgggttcgatccctggtctgggaagatgccacatcgcttggggcaactaagcctgtgcacagcaataaagacccagtgcagcataaataaataaaataactcaactgagaaaaaaggtcattgccttctttaaaaaaaaaatgacagggcacctttctagttggcatgggaaggtactttttcccccagaacctggcccaggcttcctgcagtttgggtggtgattccctgtgccaatgggaataacagctggcttctcaatagtcttccaaagcagctgccccatacaccttggtgctgtttgcatacagctttagttgctgacattcagactgttgctgaacatctctaataacaatactttacattttacactttttctcctgagtaaaatgtcttcaatccttagtcaaagaagatgcagtgaaaaatcaccctaggataaaaggcatgctcatagtcagggtggtgttaaggtttctgtaaattattgtggtcaggaaaaaagaaaatggctttttatatatactaatgttgtgacgtgtgctttttggaaacatttcaatttgaggtcaaagtagcataaaagaagaagggtagggggatgggatgaattggatggattttatgtatatatataaatatattgtgtatgtatgtgtgttcatgcttagttgctcagttgtgtctaactcttttcgaccccatggactgttgcccacgggggtcttctatccatgggattcttcaggcaagattactggagtgggtagccacttccttctccaggggattcttcccaacccaggaatcctgggtctcctgcattgcaagtggatactttattgtctgagccaccagggaagccgtgtgtgtgtgtgtgtgcgagcatgttttgtatactatcatgtataaaatagataactaatgagaacctactgtatagcacagggaactcaatattctgtacctcaagggaaggaaatctaaaagagaggta

SEQ ID NO: 51964 - DNA, 1820 bp, Bovine  19866880613452
  misc_feature (1)..(1): n is a, c, g, or t
nattgaaggcagtgttttgggtatgttatttctaacagtttcagtaactctgcaagttgggtgctgtcaatatttgacccatggataaggagaagtacaaagaagttttgttacttgctcaaggtcaacaaattgtaattggcagagcctccatccagggccaggtctgttggatttgaaagcccaccatctttccacccaactgcaccatcactcttcatcaaaaagcagtcccagctctcatctgactttatgtatatgcttatgtatcttccagtgaattatccagggcacattgtttatatttttatttatttatttattttggctgtgagggtctttgttgctgctcaggctttgctctagttagagtgccaggccttctcttgttgcagagcatgggctccagggcccataggcttcagcagttgctgcacgtgggttcagtagttgtggcccgcagcctccagagcaccggctcagtggttgtggctcaccggcctcgctgctctgctgcatgtggaatcttcacagaccagaggtcaaacccacatctcctgcattgacagctgactctttatcactgagccatccttggcacatttttaatcaccaaataactgccctctgcctcttagtgtgttcctgacttctttgacttgccacgtggcagtgttttgaatttgaaagctgacttgatacatcaagaagaaaataatggtgatgatgataacaacagcagcagcagccaccaggcttctatggtgtttacacatgctgggaactcttctaagaacttgcatatattaacccgtttaatccttacagtatgcctttgagatcaaagctattattatccctactatatagaggaggaaataaaggaaacttggttaagtaactttcccaatatacataagtaatagagccaggatttacatataatagtaagataaacctgctgaataaaaggtacatgtggcacaacaggattattggaaaccagccagagcaaggctcattccagaaacacaaataacctcaagctaattgtgttccgagagattgagtgaagtaatccccatgaatggagccaaataatttcaatttgcctaaagagggagaatgcagatactttgagcatgtgtgcacaccagagtatgtgtgaaaaagctagagtcagtgacagaaataacaccagaatctacagccaaagtcataggctgggctgagagaatatggccacactcgaaaatcaggacgttctatacacactgaatatattgcatcttaggcattgccttggttaacagctgaaaccggcaagtggcttctgtaaattgcaaacaaaattgcattatgtctgtggtatcaagagcactctggtccttagattggaagggcatgaaagataatcatttgatctgaataagatagaaataaatctaaggattcctcagttggatcagtgaatttccacctgaagaatcccaaggtttgctctggtctgtatttgttatttaagtgataaagctatctttggatgagagcagggcttttcaaaaggaagcttcttttatggcatattattcataaatggcagcaaacttaattaaactataatgtgaaataaagttgtccttttcccacatgtttattttgcctgtgaatgagagccttcatgaatgccaaaaagaggtgatttatgaaggtgggtgaggaatcccaagggcctcacaaatccttctagcctttcttccctcctccctctccctcttctccgctaacaacctagtagaactgccaagctggcaaactac

SEQ ID NO: 51965 - DNA, 1398 bp, Bovine  19866880714697
  misc_feature (1)..(1): n is a, c, g, or t
nactgactgcgtgtgctgtcaaaaggaaaagcaggctttgtccatcagggctggcagtgatatctattctctcttttgattttaactttacctgaaccctttgattcccttcttctcaagcattgaaggaattaaacttgggaagtcagcaagtgacgatccagggactcagagaaaaaaaaaatgtgaagataaagtccccagatgatccaacagctgtgtcttaattagtacgcggactccttctattgaaagattgcaagacagccaccagtaggcaggaaaaaagaaaacaaatgttttcacaattaaaaaaaaaaaatggatctaggaacctatatggttgaaggaaggagacaaatgtaactagtttatgcctcacatctcattttgcttcagatttttattgtactagtagctgcttcataggcttaactgttaaatatttggtagttttctctgtgagttcttctttaagacctaaaatacttgtgtcctataaatttgaaactacgaaaaatgcctccagtcttatttatttaaattatgatataaatattgtttaaacaaggttcgttttctaaactcaaaggagaggttccattagctaaaacagtgtcttcttccttatctttcctgtatcttccccagtaattgctttctttgatttgatctcatgaaaattagagtactcaaaagtcctctgcatcaccaaaccaaaataagcgagtttggaagcagaaatacattcaatgcgttctcttttgaggactcaccaagctaagagcttcagagtattaaagccataaagaatcctgtcagtttatagttattacaagaaaaaaaaaaaccccaaaaaacaaacccaaagttagtgttaatttttcacaacttcccttcttacccatatcaataatttcaacttattatccacccatttcatgaggttttcacactttctttaggaccttctgaccatccctcctactttaatgaaactacaaccaactttccaattcaccctaaaccttaattctgcaagcctcggcctttctgcaggaacttaatacaatccagtcaagtttctcacatttcatttgtatgttaggagggaaaaaaaagagctgcacttaggaaatgagagttagctgaggttctatcagcttgcgaaacagcttgatagtagcagaaacaatcatattatcattctccccactaccacactgttgaagataaaaagaaagggggcattgccaattttcatctaacattagttatgcaggaacttctaaagaaaaggttcaatgcacggagtttagctgactagagaagaatgctgtaacaaactgactttccagccaagtatctgcagaaaaaaggcaacaaaattccaaggga

SEQ ID NO: 51966 - DNA, 1774 bp, Bovine  19866880715637
  misc_feature (1)..(1): n is a, c, g, or t
ncaagcctctccaggccggaaagaaaggtggcgattccagccaaatgagaaacgaacacaagttgcacctcggaccgccagaggagccgtaggcggagaagggagagaagaggaagcgcgcgtgcgccggggagagctttcagtcggccacgcgcagaggtccggactgaggaaaatgggggaagggttgaaaacgcagatctgcgcaggcgcacggaaggccgcgcggtctgtgggtctcgagccaggctcgcaggcgcgcgcgcgcgcacggttctcgctgctcaccccaccccccaccttttcggcccgtagtgcctcgaaagcctgagggaaactggctgggaaacgcataaataacggcacaacgtttcctgggctctcctgtcaccgccaacccgccactaccaacaaaagattcagtaatattcattcctcctcgatattcactgccttttgagttatctagacgcaacgcaaggcctacctgacacgccgaaggacggttcccgggacttatctcaccggtaactacacagcggccatttccccactcaagaacgggaggaaaaccatagaggtatcttcgacgcgctagctcctctccgtcacttccgatttggggcgtggcctccggtgccgctaaatatctgaccaagtcccaccccactccaccgccctaaacccgctctccggccgcggtaaagatgttgcctgaggctttctgggaagtcgcgtggctggtctcgcgcgatgatctggcggctccgccttccggtcttcatcagccgcctccgccagggtggcggtagaaagtgggtggggtgttttggtgatgtgaggtcgtggttccacaccggggtattcgctggtctctctggtttgcattgagcgaaccctccggacctcgcttgcccccacttttgctcgtctggtctattttttctgtgggaccaactctgaccaggccggaaacaaaaggataatttcacactgaggaaaagacacggactctattagcacattgcgtctctctgccaggaagcgccgagttttttctcagacgccaactgtaagctaggaagtgtagctttttgtttgatagaaaatatgccagacgcacttagaagtagaaaaatggccacgatctgcgtccgtttcttgagtggcgtcacaccaactctcccacccgtagcggagttcacgctgcagtactccgaagtggcttaggctatcctggcggtttgcgtcagaggttgcttcttgtcctcggacgtggttaaagcattaccacttagacgcctcgagacgttggtttgagcataaaaataaagcaaaacacgaagcttaacgatcagttgtgctggtccagaaacaacctaatctgccaaaaatataaaccagattatgaataagggaagccacattttttcatttggataaaatttcaagtaagagtcgtagcacattttctattaagacttagctgcgcgtaattccttagggcctaaaatcgttattactttgttgttaagggacctgaactgcctgaaaggatttaaaagttctaattagtaaccagtcttctgtcagtaaatgcagtccagtgttgggccctagccgtggatttaatactgtgcttagggcattctctcatcacgtccaatttacgagctcaactagaaaaaatacctcatttttatgggatgtattctcggttatttcttgtacagcctgcccctcaacccctcaccactgtcagaatgtggaagca

SEQ ID NO: 51967 - DNA, 1848 bp, Bovine  19866880755618
  misc_feature (1)..(1): n is a, c, g, or t
ntcagacattgcagctccaggtcttgtgtttttcctggcagcatactggtagcatctgtctataaattcagcagcagtgttctttttaacgtggaaagcagtgagtgccctagcactaacagtctcataactggcacataaaaagaaaccctatgcttactctcctggtattttttaagttgtaaaatgtaagctgagccatcatgcctctcatacatacattcctccagtgtcagatgaaactgtcttacaccaagaaatgaaaatctccctaatcttgggctggacttcattgtgggtaaaaatttggttctatgtttatatcacattctaaattctatctcccaatccatcagcaaaactcataaaggcatgcaagagagcatggctattacagaaatgtctgtttgctcaatgttaagtatccattatcctaggggggaaaaagtaacatttcaacaacagtgtctttgaaagggacatacctagctgcttctcccgctcctcacgccgctccctcgcgagcctctgccggtcatcaacacgcagcacaggtggcgggtctgaaaaggagatgggagacataagaggagcagatttttaaaaatgatatacactgataaatatctgtctggtacatctgatgaatgaattgttactacatcttacctatagtaacattacaacaattatgaccatacttgtagtgatgtactttattataattttcctgagaatttcccagtattttctgcaatttaaaaatattatatatgaggttagattctatgagttctcatcacaagggaaaaaatcatttttcttttttttctttttatatctatataagatgctggatgttaactaaaaatattggaataaatatgtcataatacaagtcaagtcattatgctgtacaccttaaacttacagtttaattgatgctgtatgttaattacatctcaataagactcaaaaaataagtaaaagaaaaagacacacagacaaaacaaattatgtaaaaacataactgtgcctttggcttattttcatcaaacactattcatgaggttttatgttcctaaactactgaactcttattatttttatgttttaaaaagtcccctggggcttccctggtgacttagtggtaaagaatccgtctgccaacgcaggagacacaggtttgacccctggtttgagagatcccacatgctatggaataaccaagccatgcgccacaactactgagcctgtgctctagagttcgggagccacaattaccaagcccacatgccccagctactgaagggctgtgtgccctgaagtctgtgctctgcaactagagaggagtccctgctcgccacaactagagaaaagtcagagcacagccaaaataaaaaataaaaaaataaaattaaaaaaagtctgctccttaacaacaaatagaatcctaagtgaatttattctactaaatagatggtcagtcaccagttggacatgaagagcccagctttgaaatcagacaggcatgaaatcacttctggttctgtttctctcacttgctatgagacttggccaagttactcaccgagctctctaagtcttaagctgtgacatcggtttcatgggtttttactggttgtctatgaggataaaatagaccttatctaacattaccatatggattaaataaaatgatgcttacaacagcattagcacaatgtctgcttctgctaataagtcacttcagtcgtgttcgactctgtgcaaccccagaggcggcagcccaccaggctccctggtccctgggattctccaggcaagaacactggagtgggttgccat

SEQ ID NO: 51968 - DNA, 883 bp, Bovine  19866880757073
  misc_feature (1)..(1): n is a, c, g, or t
ntttgcttttttgcatttcttttcctggggatggtcttgatccctgtctcctgtacaatgtcacaaacctcattccatagttcatcaggcactctgtctatcagatctaggcccttaaatctatttctcacttattagtacaataattatcagattatgtaatttattaataatgttattttaaatattcagtagaattagtgctctgaaagtattgatgttaaatttatgaagtcaagtctccatgtttgctagaagcaagttcccacttaaacataaagcattctttgttctcacaaccacctgagctacctctgtaccaattactaattattcaaattctggaaatattgggttggccaaaaaagccgttcaagtttttctgtaagatggtgtggaaaacccaaatgggctttttaaacctaatagtggatacagacattgttggaggaactatgtatatagttgacagaaacaccctcatcatataggtgaacttatagcttttctttaaccccagatattatttctaggtttaagatttctcctagtaccaaaatgtatcagcccctgtaaagagaagatgccatagagaaggtactcaaaatgaaaataatttttattaacattttttgcacttaagccaatcccagcttgtgaaatttgaaaattaccatatgagcagtgccaatataaacttcataaccctaaaattagtgtctaaatagtgcagaaatgtgttaatatgtacaatttgtgaaatttgtaagagaacaagcaagcagaaaacgactttcacagtcagagtcaacgcgtacatagattaggcagtgaggccttctggagcaatgttttgtaacttccaaatgagaatatggggacc

SEQ ID NO: 51969 - DNA, 1327 bp, Bovine  19866880767475
  misc_feature (1)..(1): n is a, c, g, or t
ntacatgggtgttaaagttaggtttgattgcttattatgtgctgaaaattgttttaagaatattacatgtatcaactcatttaatcctctctacatctctgaggaaggtactgtctttatatcttaactcacttggaattaagagtgagagaagatgaagctggtgtttgtctctttgaagacagttgtgttttattttagaataaatatttgtttgaaacccattgaatttgtcatttatgtggcttttttggtgaggaagtatgcagacatcattgcctcctctagtttatctcaatacttttcaaaaactttcatactactgagcaaagtctaattaggtcaaaatggtttaaatacatggcaattgcaggctattaggaaagtttagtgagttgatttttgggggaaaaaatacttaattttgtgtaaattagtgaaaatttaaaatagttgtagcaggaataaacttgggagatgtgtaggtttaattttgtaaagagtagatcttataaatcagtcctgttactaatttcatgaggtctgattattgcattagatactagctagtatttagaaaagttagaatattggtgtacaggttctctttttcttgccgtcccaatctcttcttgcagcaatctctttagtttcttttatcctttttcatcttttcaccagaaagctatagggtgaactaggcattgtcacgtaagtccatttttatttctacagtcatgactgttgaaagcagagctttgagctccagctgttaagagacttaatgacctttattctactgggagacttatccgtcaccattccaagcagtattgcatacatggagtggtcagtttagtcccatttcaaagccataaagcacttatgatgacagctgggtaggtttactctgttttttaatattatgtcatttgtattttcttttcaggtttgttatctgtaatactctgatattatttatcttttttacaggagaggtaggcatttgtattgggcatggaataacatctaacgtactgctgcagtctgatgtcattgctctttctgacttctgcagctgctgcctttttttggattgaggcacataagtggaaaagtccatagaaatcttctgttgtttctttacaatacctgccatgcaggtgcaaatacagttttagttagggataattgacttagtacttacttgaataatgatgggtaatatcctttgggaaacttaatgttttataaatttaatttgtatctgaagataagttaaataatagaaactacttctcttgcattgtgattttaaccttttttg

SEQ ID NO: 51970 - DNA, 3026 bp, Bovine  19866880822806
  misc_feature (1)..(1): n is a, c, g, or t
nactgacagagaagcccaagagtggagggttttgatgacttttaagactcaagagttagagtagagaggagatggcaggtagttcaatctttccaccagagacggctacagccaatcttccctctctgcctcaaattacctaggtgaacatacaactgcctctgcaaatactaatctttctccattatccagatttctatttcatatttctattagcatgacttttatcctgtgaaattgtgctcagtcactcagtcatgtctgactctttgcaacccacttggctcctcagtccatgagaatttcccaggcaagaatcctggtgtcgggtgccatttcctactccaggcgatctgtgaaataatagcctatcatgtaaagcagcatttgattctttcttgatcttatttacaatataaggataatttaatcaaccaggaatgggtctattacagtagttctcaaactcgagtgtatattacagtcacctggaaggtttgttaaaccacagcttgctggacctcatcccagaatttctaatccagtggttctgtggaaagaacagaatttgcatgtctaataagtccctgggtgaggctgctgctgtttccagaatcatttgctctgttatagtcacctgggatgaatgatgattccagctgttcccccatcatcatgcttctctttgataaaaggaaaaggaaagagcatctcagttcacattgataaaaaaaaagttacattcaaaatgttgtacaactgattgcaactcaccagggtgctgacaccaggcttgagaacaactttaaactattgaccaaaggaagggtctggattacttacaaaggcaaaatgctgtcagttgggcagaatgtcaggattagtatctttctaagagtcagctagatccttttgaagaggacttcttgaaaattagatgtttctttaaatagaactatgacaagcactccctcattcctgtatttttttctgatcgatgcaatggcaaagcctgttttaatgagatatgattttataagttatttggcatcaagttacttgtgtttgatgagataattcatttcttatccttgtcatatgcataatactcaatttcttcacccaaggaacaactgatcaataaatatttgttgaatgaatattcaacatcataaaactgagtataattcttgtgttgtcctgttggctgcataaggataatagacatggtgctaaaaactcaagttgttaaggtgagggtcacaaagggagaaatcttcagaaaaaagatgtagtggggagacgtgttgttttaccgaggaactttcatgcaagagcctctgccacgacagtagattatgtagattactgtctgcaccagaatatgcagctgggggtgacatgggactgggacccagcctgcattctgttcatctactcatcaagccacgtacctgagcatggggctgccaccatccaaggaaagaataggtttgcctaattaatctcaaagatgcatgctcagttgctcagccatgtctgaattgctgtgacactttggacgatagcccatcaggctcctctgtccatgggattttccaggcaagaatactggagtggattgccatttcctcttccaggagatcttcccgacccagggattgaatctgagtcgcctgtgtcttcagcattgtaggcagattctttacccattgagccatcagggaagcccccaataccgattaactcttggcagcctagtttccctgtgtctggatttttctccattaattggtcattggccatcttgaaaatgttggtgggtacatagcactactaattgtttcacctgaacacttcatgcatggaaccccatggtggacctccaagaattctttgttgccatgcccccatcagcagaggattggactcttttctatgaatactgatggacagctttactttgtggatttagggattctgggaaggcctgataaatgatccccagaggaatcttaccctatttaacaactagagcttgacattccaatttaatttgatcatcttagctcaaggcatgttgaaatgaaacaagtaattaagaattattctgctgtcagtgtactgcttttagcactctgtggttatgtatgtcacagtactgagcagaagacattatggatttacttggctgagccatttcccttatcctaggctctctgggtcttgtctcagttttagtcctctcattttccccagtacttcctacaatctctgttacatagtaggccctcagcagatgtttattgactaaatgaatcaccaacaatcctatcacatccttgtttagtttattcagaaaaattaagattctatgttcataaccttaaaattttatttttaaggtaggctaaagattttgatttcttattttctgatctagatggtaaacccaaattagttcttcgcatctttagatttacagatgtcttatcatttggaataaaaatcacttcacagaaaatggtttgttattaccatctgcttctttcatttgactctgttcaattttcaaatgagctttaacattctactctagtacatattattttcattgcttttcttcatattttgggcatttgttctggcactatccattagaccatatcctcctcttacatggagcaatggctagcaaatggccgttcaccaagaactacatttcccagccctcattgggtcaagttgtggtcatgtgactagtccacaccaataaaatgtgatcagaaatgatgtcttcttctaggccaatataaaaaagtatacttcctctgtaccccttttttcttttgctggttgtcatagagcaataatgagccttgtaatctttactgtattatggattcctttggcacatattaaaagcctctgaatccctttgcagaatgtttgttaaatgtatacaaatctagaattataaaggaaacaaactatattaaataaaattattagactatttagaaaat

SEQ ID NO: 51971 - DNA, 791 bp, Bovine  19866880837313
  misc_feature (1)..(1): n is a, c, g, or t
ncgagaatcctagcactgttgcagttcagaatcaatcctatgagcttatgtattctgatcctaaagtatatgcaacacaaaggctctgcaagaggaagtgcagatttctgaagctagaaatagtagtgaatgtccacgtgattccttgtacttaaattgactaaaaatcctaaaatttggacttagtgaaaggccttatttttgtactgtaaattcaatacaccttgaattttatgtagtgtgtcagtttcatatgtgtgagtctaataagctttttttttttttttttttttaatttactttggaaaatcattgtcttacattctgtccccaggtggttttgttgaatcatcattcacctttctcgatttagcaggcctggaccaccacttcacaacttttggtggtactagaaaacctggtactgacctccttgtgatttgctgatcgcctgacctgtagctagcacctcagactagggccagttcatcactagctgaaccattgccgccttagtcataatgcatgcttaatatcctactgcatagacctagatctgggacatggcacagtgtttctcaagtattgatagtataactcgggtgacttaaaggtattgaaataaagtaattaccggtgatatgcttactttctctttaaatgatcattttggataaaaccttaaagaaaatgttttttcactgataaatcacctgaggtcaaagtacatccagtttggctttatttcactctgcctccatcagtacagctattgaactttcagttttcat

SEQ ID NO: 51972 - DNA, 3145 bp, Bovine  19866880943377
  misc_feature (1)..(1): n is a, c, g, or t
ntgagctgtattatgtgaatatgcacaaaggcacattctttgttttgaaaaggtgcttagttatgtattattttttaaaagtttagtgactttgggacagttggtcagtatcagtactccataagttaggcagctatgtttgtattatacctgttgtctcataaaggggcatcattcccattttttgtaggtacaaacttaaaaagtttgtttgagatgggcagcagttacattacaggagaacttctcattttttgttttgttctttgggatgtaatactcatctacttgtacacaaagccaagtacttttcactttttcagattgttttggttaatgggataatttgtaatttggggaacaatctatttggatgcagttaataaaaaattaaagttgggatgtaatagctgcagaattttaggttagtgaacaagaaataagttgcggtattaccctagggatcatgccatcctgatttggcttgtgcccttgccaagaagattaatatgtaatacacattaatttagatttatctcagtaggatttttaaaagtctgtatctgtatgtaaaagatacttcttaccacctattttatttactaaatgttattgataatgttgtaatgacatttttatactttgttacgtatttgtgacgggtaatttttttgggaaaatatcagttacattatctcatttatgcatagtagattgaaataatggaaagcagaacaataaaaattttgataattggcagtaatttagcagttgagattcttcagtaaactgtctgggcagctctcaaatgcttgggttactaagcatgtaattatttactttcatgatgcagcatgtttttgttgaaaagttcagttttattggttttgtgtattttagaacagtacccacctcatatacccaattttcagaagatttatacaataacactattggggatgtaattatattccttacaagaaagacatttctttctttgtttaacctttctgtagcatgatgacagagatgatggtgtggattattgggccaaaagaggaagaggtcgtggtactttccaacgtggcagagggcgctttaacttcaaaaagtcaggtagcagtccaaagtggactcatgacaaataccaaggggacgggattgttgaagatgaagaagagaccatggaaaataatgaagaaaagaaggacagacgcaaagaagaaaaggtagagattttcaacttgttagtggttctgatatgttcttttgtgtgagtttcttgggccagttagttatttgatttttagatacagtgattattttgaattatttcactcttcatatctttgctaatctttattttatttctctctttttttttttttaggaataggaaatctgaagtaagattgcaacagagaacagaacttgcacccaccatttttttttacatgatttttgttttcaaataagaatgtaagcattttacttaaaattttactgtttgcaagtagtctagagaaattttgttttgaatcttcaaatatcttgaaaaatagtagactgtatgttgaaaattgtactgaaataaagtagaaaattgttacgtaccatatttgtaactatcaacttttaaaaaaatatatacttttactgtttttgttacatgcattgtaattctgctttgtctataagatatggtcaagtacagctctggtgaaagttctgattctctcccctccctgtttgtgttaatgtttattctgaagtaaacgttagctctacatacagatccctgaagagcaattgtctatagagaccacactaattattttaactgtatacatctgtttaacattctccttaattcaaacacactacattgtagggtgactaatttttgaagtataccatggaaaaagttgttattttggtaaactaagctaatttaacatctcatcaaatgtttaagatggtaaaagaagctttgccaatagctcaaaagtactagctgttaaaagttaaattgaaaagtatgaaaaaaattttttcttaaactgaaagcaagcagtgggctataaaaaacatttttaggagcctttaccatttgcattcaaaattcagtgttctctgttttctttgaaagtttgagtcatggtcttagatatcagttctttgagagaggaatctggtttgtaataatacaaacaaaacccccattcctacggaacgtcttacttaaaaaagaaaaacagaacaaagcctgtaattctgatattggtatggttattctgcagaataacttgataatgttaaaaagatgtgtacctgacgtcatatctcacatacttatttgagcttttagacagctgaatcactagttcatagtctaactataaggaataataggcaaacagaatatactgctcattagtagtattttaagaaacttgttttccaaatgtcaccaataaaaagatttgacaggaagtttgtcacagcattgatctaccttgttttttttccccactatttctgtttcagtttgtaaaatgggtttttctttttctttccaagggttctgttcttcaggaagataatctttcaaatgtgaattgcctttaatttatgtttatgatgatatctcttagaaggaatgaatatcggaaatagtaaaatttcagtgctaagtctgctctgtgagcataatataaaagtagtcaaattcattttgttaattcagcaactgaattagttgtatttgtttgcattaaaagataatgattattgtgttagtgtaaacaagcattttaagtgtatggctcgttcatgctcactgatgatttaggatgcttctggcaccttgattgcagtcagaggcatttacctaacagctatatgaggggaaaaatagaaaaacaaaactcaacaaatgtgatgttcatggccctaagatccttaagcattgcatgatttatcttactttgtttttccgaaattgagcagaaaggaaacactgtaaaaacaaatatatgttgcattaatcaggacataactaatattctcctagtcagcatagcacgtaattacctgctaaagcaacatggatcgatctccaacacaggaaaatttcacctccatt

SEQ ID NO: 51973 - DNA, 1545 bp, Bovine  19866880992122
  misc_feature (1)..(1): n is a, c, g, or t
naccagaagctccggaatctcatagaaacctggaccccaggaggtttctagttagatttccaaccagagaggtttggaaaagattgcattgaaccttcgacccactcacggcttacccatctgtatttcagattcaagcgctcacctaggagtactaacccctttcactatagctgcagagttactgtgccatttgcactgtaaggaacttggctggggacagtcaacatggttcagtttaacaaccaataaatatattgaaaataaccaatgaaaacaaaattacagaggctgttttgtagctgagtggccatggtctctgcagccaacctccaccttcacctcagcatttctctaactttagaatcactacagcgtcagaaagcttggacaagagaaaaagtaagctgggggagggttggaaggcacacatccacatatagaataaagctgaattccaaagtgttgggaattttattttcaaagtgctacagaggggaccagagagcttgtttgttccactttaattacagaaacacgagaaaatgatacctctctggacctcagttttctcatcaggaaaatggtgttcagaatacattgttttaacattttaagattaaatgagataaatttatgacagtgccttataagatgtacaactcagtaagaactaaatagatatcagcttctttccttgatttccactgacatttttcattaattttcagtcacccaacaaatatttcttgaacatcagttatgcagcaagttctgaatggacattggcgagcacagtaaatacagttcctgtccttgtggaagccacatctgttgaggaaaacaaaataagtaaggaagcaggagggtgggagagagagagagagggagacagactgatcaaagctgtcatcagtgctatgaagggattgaagaaggttcagagataggaaacagcaggggagaaggggacctgattagatagctcgaagcataaactgatgtttgaatttcatttctctatttttctattgatcttaagaaagaaaaattgtcttccaataactgtgttgtaccttacccagttttagcataagtttcacagtgtcacattactctttggaaagactgtgatcaactggcagggcagaatcgttcagagagaggcttgaccatggaagactcttctggacatggatagtccagttagctttcattttgtcattacatttccttttctgagaaaggtcacaggagaggttttgacagagcgatgcagttgatatttggaatcttgactttcttgatccttttcagttgagctgtagagcagcgtgtgcagtggaaactggcctggttgccatggtggataatgtcttgacaacagacatgggtcaggtgtccgtcttggatcttcgggcttgtcagcagctcttgacaaagctggtcatgtggtttttattggctcacctgtgcattctgatgggaacagctaagagcaactctgctcaccctccgttttttttagaagccccagggagaagt

SEQ ID NO: 51974 - DNA, 736 bp, Bovine  19866881085823
  misc_feature (1)..(1): n is a, c, g, or t
ncttataaatgaaagccttagtaatagtttctagtaataaagtgccaatgttatcataacagcccagttattcaactctgcaaaacagatgtattctcatttttcttatcagaaaaccaacatccaaaaagctaatcacgttcctattatcaagatagtatcagtaatggccacgattggaaccaagtaatacccgttccaagtccctaactttctcattacaagacagttgctctcttttaaccctgctccacatttcaactagaattttatggcctgtcatatagactaatctacctaggaaatatcaaattgtcaattaaacagagtccccttaatgactgaattccattcttaaaagtcccccgaccccaatgccagtcattcagactcctttctgaagtttaaaagcattcttcccccaaatctacaaatattccaatggtaacacagtttttattccaagtgttcatttgtaaaccagttcttagaatgcttatttcttagtccagatcaaaaacccagtagcatggcgattacttctcgttctctctttgaagaacctaaagatattaatttaggcacacataaatcaaggaatatttattctggatcacccatttcacctctaacagaaaactttatataatgtgtatctttcctattataattttcctgtctactcactgattctttgccttttgcttagaaatacttttttttcattagcatttaa

SEQ ID NO: 51975 - DNA, 1951 bp, Bovine  19866881153200
  misc_feature (1)..(1): n is a, c, g, or t
nttgtagacttttgatgatggccgttttgacagagtgaagtgatacttcattgtggtttgaatttgcattggtctgataattactgatactaaacatttttaaaatctgcctattggttatctctatatgtcttcttttggagaaggcaatggcaccccactccaggactcttgcctggaaaatttcatggatggaggagcctggtaggctgtagtccatggggtcgctaagagttggacacgactgagtgacttccctttcacttttcgctttcatgcattggagaagaaaatggcaacccactccagtgttcttgcctggagaatcccagggacgggggagcctggtgggctgccgtctatggggtcgcacagagttggacacgacttagcgacttagcagcagcagcagcaatgtcttctttggagaaatgtcttttagattttttgcccattttttgattaggttgtttgtttctgtgcctctgagctatgtgagctcaacaaaacagtatattgttaaaagacattaaacaaaagaacattaaaatcacttaactgtatagaattaaatgtcaaatggcagtatcatgtatgcacatcccctgatgccaaacttaggcttccttctcagaattaatgaaaattaattttgcttattctcatttcatatcgataaaataaaagtcacataaggaaataagatttatttttttcactgctgtatcctaatgtcctgaacagtgctttacacttggtaaaggcttgacaaatatttgttgaatgaataaacaaattatttatggtgtttattcaaaaagacttgttgctatggatggtgtattctatttttactatagttaatttgtacgtaatatgctgacaacagtggctgacgatttgccttgttacaagaagtctttcaaataagagttcagtaaagaatattttcataaagactagcaacattatgtggtacaggtatcatataacatatattccattctgaagtattcatatttgtgacaaagcgctaacacttgaaatacaatatttaggatatattttagcaaaaagaacatacgttttttcctaagaaataaagaaaattaacatatacgactaaaatcatcctttacccttaaattgtgttttccaagcctatagcctttgttagtatatatcacttataacacaatttcccaaagtacaatgtacatatcaaaggatacgtaagatcttactgttataggaataagcttttttcttttcctttaatagtaacatttattttaatgtactaaggaaaatgtaactagtgcatgaaatctattttttattgataccaaattgatttaagtacatttaagtaaaaatgaattcatttgatttaaagaaagatactaagtaaatagttgtgtaagaggatatagtaaagaccataataatgccccttggatgagtgaaaatggggggctctgaccttcattcttgcttggaacaagacacatcctgcatccttacgaggaccttcttacaggactggagtctgttgctttaccaccttcaccagttaggctttcacatggtagaatggcttctaaccttctcagactcaaggcttctattttatagcacataatttataatgtcctcctgtactattttgataggaagtccatagcctacttgttcacataaattaaaaaaaaaaaaaaatcaatccaaggtcctggcagtattataaagcaaaaagacaagacaagccacattgaatgaaaacattacataatgttttcatatgtaaatgcccagggataaccctccttagaaggcaccatgatgtagtcagatactgcacccacgtgccgaatcgctgtgaatgattctgtgaatgtagctactactagagactgcaacaagtgtgttatatcagtaacacaacccatta

SEQ ID NO: 51976 - DNA, 2786 bp, Bovine  19866881203245
  misc_feature (1)..(1): n is a, c, g, or t
nctatgaaaaacagtatagcagttacttaaaaattaaaaatagaattaccataagatccaacaatcaggtccatattcaaaagaaccgaagacaggatctcaaagagatatgtgcatacccatgttcacagccatgctattcacaatatctaaaagggaagaagcaactcaaatgtccatcaacagatgaacagattaacaagatgtggtgtgtcaatacatgtgtgtatatgcattcttaaaaagaatggaaatcttgtcacatgctacaatacggaaggacagacttaatatgctaagtgcgagtagtcagtcacaaaagacaaatgcagtatggtttcattcatgtgaggtatctagtgtgatcaaattcataggaacagaaagtaaaatggtgcttgccaggagctgagggataaggaaatggaaagttattgcttagtgggtacagtttcagttttgcaagatttaaaaagttctggagattggttgcataacaatgcaaatatacttaacatttttgaactgtgcacttaaaaatggctgagaaggtaaattttgtttttttgtcacaattgaaaaatgtttaaaagataaatttcaaatttgatctgtcagtctcagttacattttcaagtgcttggtttcaattctgcagtgcagctctggaatataaattatgtgagtcgttttctgacagtaagtatttgcctacatatttaattgtaaagaaatgaaaaggtagccaatagatcaaacacagaaagaaagaggcacggaaaagataaaacaaaactggtgagaaaatacaggtagtggattaagtgatgacaaatccctcttatttaatctgttggaggattggctctcacgctttcctcctggtgtgttaattttccttttaatctctaaaaagatatttttcctttggtaaacacttttccctacccaataagtatccagtgttcagggccaaagctgtcctaattgactattactatttggccacagctaggctttctgaagcatcaaggtgctaatgatggtaaacttcccagacttcaaaggtagttttacttctggcttcaagggttggaggtctgactcaatcgtgaattaaacgttgattcttgaaagcttgaggggcttgaaagaaaactgcctataggcaaagccatcaaactctcacaactcttgaattatcctcaaaggtctaagcaaaatccttttaagtgtccatcagctttatacattgaactgctctgggaagttaagattgaaaaaagcattgttccagcctttcatgggtcatgctattaccatgagagaggggcaatgagatctcctggttgactggggggtcctttaacactaaaatacaaatgtctacatctttcaacagatgccaaataatacacggcttaaagacgaagaaatattcctggagacatacaagtgacctcattgcatttacagcatggtgaatactgagggttagttcagccaccctgccagtaacaacaagtacaaattatattcttcacttgcaaaatgtgattctgtaacagagcccaacagcctttcaagaattacttagcaggtaattagtgttttcaaaatactttgtcactatattttaagatctgggccttgacacgcattagctaaacagacaaaaagtatttatcttgctttttggtgaaccacatttagactgcagccagcttctggatatggttggaataaaatgcaaaggcagcagtccaggcccacttccccttcaaagcttttcttactttcacacataaagtatgccagtattgcactgatttgttttgaagcactcagatggcagtccagccactcagacatgcttgaacaaagaatggttttcctcttcaaatttagattttctgtgggagtagaatccccaagtggggaggaagtgtaggggcaggaccactcagcctggcagactcaagactggtgggtggacgtgatgatggatgtcggcatggcccgctctgacatctgcattgcacctcagggcggtgtccactctgcacaacaacagcagacttgtgctcaccagactcaccaggcttgcgtcccaagagctactcaccgctgtgccgtgaacagtcctcctccgcgcggagccctcgggtggtgttacaaagaattttggtcgctccagtggatttctagagtgtgcacctctgtagggcgtgatgttgatggggctgcaagatgctgaacgaggacaaatggggataactagggtgcaggtgattgttttacacacaagagtgccagaggagcagttgaaggaaagccaaaagcgggatcaggacaaggagcaaagcagagatagagagaaaagtagggagaagtgttattacctaaaggcctccagaaccatcacgctcaattctcctcatggtcctatttacagtgtgtccaaaaggagggcacgtccaagtgaaaaatcaggaatatataaactatttggctatttaaatactttaattaaagatacagacgtcagccatacagaaagcaatggtcttatattcctataaacagatggttctggtaaaatgctatattagtgacagataattttaagataaggattgtttataatcagatttgtcctaattagctttcagatggaacaaaaggtggaaagacagcaagtgagcaagcaggcaagcaagatatattgcagctattttgggagtaaaattcaacagccagtggggaaaaaagcaactgaattttta

SEQ ID NO: 51977 - DNA, 1045 bp, Bovine  19866881397953
  misc_feature (1)..(1): n is a, c, g, or t
ngaatataaatggactgtgttattccagctttcagcctaaatgaaaaacaacccaaagcttccacgattacatcagggtaatactggctgcttcgaatcatgtggtatgcaaatatgtgtatttttcaaagaccagatctgtactattcagaggacccataagactctaaaataagtatcatttcattctagtcattaacaggaccccagggaaccaaagcctgttcaacatgggctctaatatcaatatttctcagcaattctatgaggaagcttgtcacttgaaatatgtattgctttctgagaggcattccagatgaagagtctgtgtctttcctttattcctacaaccatatcattaacttttcttctcctccttctcttcttcctcctttttctcccctccctcagattttatcaaactccttgatatcatgtggggttccctcatagctcagtcagtaaagaatctgcaggagatccgggatcgatccctgggtctggaagatcccctgaagaaggaaatgacaatccactccagtatccttgcctggaaaatcccatggacagagaagcctgatgggctgcagtccatggggtcacaaagagttgggcactactgagcaactaacactaacaaatatgtagttaatattcactgattgtaatttataccattgttctatttacacactatttatccctccattcttacaccttcttataaatgaatatcttgttaagacttggcaggctgactaaaaaaaaatctttctaactaatataaatgttaaaccttatttcagggagaaaatttttgtgatgtctagcacaactctaaatattttcagagttcactgcaaaagcagttttaacaaatccaccaagaaagtgagccttattatggagtcattaagatataatctatttcacctcaaaagaaaatccaagcttttgctcactcaggacttaaaactaaggctcacatattttaagtggtttgttctgaacggccagggaggatcttattaggacagaaaagcct

SEQ ID NO: 51978 - DNA, 1447 bp, Bovine  19866880355056
  misc_feature (1)..(1): n is a, c, g, or t
ncggttcttcctctgctgagggtggaaaggcacagttacgctggagaaccacacaaccttcccccccaccagcccctcccagcggacccaagaggagcctgccccctccactcctccagccctggaattaggaccactagactactcttctgcttcctcctattatgttatttccatcttgggtttctagaaagcatttcaagtaaatctgctgttatgtctttactggccctggaaacgactagaaggaagaaccctgacccttcttggaatccccctccggcatggagtaaacacgccagggctggctgcacaaagattgctgccttgaagtgaagtgaagtcgctcagtcgtgcccgactctttgcgaccacatggatagtagcctgcaccaagctcctccgtccatgggattttcaaggcaagaagtactggaatgggttgccatttccttctctagggaatcttcccaacccagggatcgaacgcaggtctctcacattgtagacagacgctttaccgtctgagccaccagggaagtcggattgctgccttgggactcaccaaaacacgcagtcacctcccccttcagcgctttatatgctttcccaagtgcttccctctccttgtttctatttgctcttgtcacatctgagcttcgcagcaactcagtgaggctggtcaagagatacgaactccctgtctgatggatgaagccactgttaggcacgaaagggtgacaggacttgccccgggggcacagagtaaacctacggcagaacccggacaagggctccaatctaatcccgatttagggaaggcactttgatctccctagcctcagcctcccacggccaggagagccagtgagaacggccccttctcgggagcaggagagagctccggatgctactgccagcccagcgcgatgccaggccactgcctgcccagactgtgcccgcattctgcccgcctgccctccgcccccgcacgtgatgaggacactgcaggaaggagagcgctcttgaatccaaagaacacccacagcttgctgccctcgggggtgagcctgcctcgctgccttccctcgggggactgggattactggggcaaggaaagggaaggagattgtaatctctgtcccctgtcccggcctgccccagccccgccagaggctgccccatgggcagctcttccagagcggggagaacccagactcctgcaggggagtctcctacactcactgccagatggggtggtgaggagactcctaagggaccttcactgcctattcacaagttaccccgaagttcccccgaacctgtactcgtctccaggagcacagacatgactcattcccagcggccagactgagccctgggaagactcccaggatgtgatgaacgtgaaacttaccccctctcccccgtccccggccccacttct

SEQ ID NO: 51979 - DNA, 1287 bp, Bovine  19866880515390
  misc_feature (1)..(1): n is a, c, g, or t
nccataggctccatttgctgccctccccatggcctgccttcctgcaccctcccaaaggtgtctctgagccaggctggatcccctgtggtttttatctcatacttggccccctccagggttcccctgtgactcagtggtaaaagaatcatcctgcaaggcaggagatttgggttcgatccctgggttgggaagatcccctggagaaggaagtggcaacggactctagtgttcttgcctggagaagcccatggatagaggagcctggtgggctctagtccatgtggtcacaaaagagtcagacacgactgagagattaacattttgggcttcccaggtggcgctagtggtaaagaacactcctgccagtgcaggagacacaggagactagggtttgatccctgggtcgggaagatcccctggaggagggcatggcaacccactccagtactcttgcttggagaaccccatggccagaggagcctggtgggctacagtccatgggatcgcaaagagtcggaagactgaagtgacttagcatgcatacaacccctccatgcctttggagccccaccccttacaggctccacccagctgtccccttgcaggggtctcttcccctgtgatttgactccccaattgtgcccgaaccctcagtggctctgggatgggctccctgcctgtctccagggtgaggacagggtgggcatgctgttcccctgatggaggccaagtctgatgagggctggggacgtggctctcccttccacctaagtgttttctcttctcttctctcagagaggctgcaggccccaggaggccccaaccggacagggcttccctgcccagaatactcctgcccggatggcctctgcatcggtttccagcaggtgaggctggggagcgggtggtgcggcaggccagagcccccagtgccatcaaagcacgagtcgccctgaccctgctgttctgaccccaggtgtgcgatgggcagcccgactgtgagctggcggggacagcagggccctccccagaggagcagggctgtggggcctgggggccctggagcccctgggagctgtgcagccggacatgtgggcccggggtgcagggccggagtcgccgctgctcgcccccgagcctcccggtgctgtggcactgccccggcccagagcgccagactcgggcctgcttcgcggccgcctgcccaggtaaggggtcgcttgggtgccaggagcccagtgtggcgggtggggcctgtggagagcaggggggaagaggaggagggcc

SEQ ID NO: 51980 - DNA, 1305 bp, Bovine  19866880761074
  misc_feature (1)..(1): n is a, c, g, or t
ngggatgacagagtatgagatggttggatggcatcaccaactcgatggacatgagtttgagtaagcttcaggagttggtgatggacagggaggcctggcgtgcttcagtccatggggtcgcaagagtcggacaggactgagtgactaaactgaacagaactgaaagaagcttatgtcaaagtagccacaaagttgtttaataggagacagatgaatgtaactccatatatactgctagaaaccaaagctttgcatgaaatcttgaatttacggggagggcagggggttagaaaagcaaatacccatctgttcttcccctcatcccttcttctcattcatgaatttcaggagatacagccccttaggctttggtggccccatgtgggcagtatttatttgatggctgattttgctgtgccagttatttcctttaccatttactgtcattttgtaaaacacactctgacccttttcccttccctttctttttcttggcaatacacaatgaataaaaacatattggtagtgaaaaaaaaaatgaggtctgagtttcaaacaaagctaaggaaatggtaatgaatgtaggtttaatgtagttgtggttcaaatttgatgagaataagcaaggaaattgatgtatctgtaaaacatcacttcttttgttcagtgtgattttgcggcagtcaactcaacatgttttataagttcttctaagatgtacatttttatttttttatgcttctgaaattgggatgcattttaaagcaggccacttgagttactttaattggcatctttttttaatggcataaaatagcagtgcctgttaaaactagcagtatattagagttaatgaattatgctaataaatgtatggtgaataagcgtttaaattgcacagaaagagaaacccttacaattcattttaaggtttccaagtttcagtcagtagttctcgaactttgatgtgcatcagaatcatttggagagctcattataacaaaattactacctcttcccaccaattttggattcagtacatttacatttaatgctgatactgctagtgtgagagcaactgccataggtaatttgaaaaaaaattaattttttaacctcagtgtttagtaccattaatttaaaaatttcagttagacttttatgatgtcacacctagaaaattagcattgccttctacattttctcattacttccattctcttctcattcagaaccatctttcctataaaaaatagtattatctgttagtactatcttctcaaaatatacacacacacaccttca

SEQ ID NO: 51981 - DNA, 1464 bp, Bovine  19866880891319
  misc_feature (1)..(1): n is a, c, g, or t
ncctcagagatgaccctcggtctccctgcttcttgctctgtcttctgtcttccttccctttgcccagtgaattttggatcccggagaccactccacggtgggtggctgcaaatgcagctgtgtgcagtgtcgttctccaacatgactcctctacgatggagaaacagtgggtgatggagaagggagataggtgaagggaaagattgataatgtaagttggatgtggtcgaggttggcttccccaagaggtgacacttagagtttttcttttccatctagcaattcttacccaagtagatctcagcctccttgtgttcaggtggcatcaagaaggccagagggaaagaggttggcaccaggagctctttctctggccttggccttggccaggccagatggagggtgctgcttccatccatcctgacctgacatcctcttccattgcagagtgatcatcactatgctggtggccactgctgtctgctgttacctcttgtaagtactgctctcccagctcctagtccgcgggggcccttgtcctcccttctttcctcctctcccagccctgctctcgcctctgtcctggtaccgacacattcagctcttgaaaggctgagtctgtaaaccacagaagaagaggggtttggagtagcaaagagagcgacgggctgggagttatgaactctgggttctggttctgagtgtatcatctggacaagctctgccatgtccatgggctgcagttgtctaatctgtgacacgagtgagtggggcccactcggtgcctgttgtccccgatgggcatcagaatcccctggagagattgtaaaacacaggtttcagggttccaccttggactcactacatcatagttctcacagtctgcacgtgggaatctgtatttttatttaaaatttatttatttgtctgcatcaggtcttagttgcagcacacagggtcttttgttgtggcatgaggggattagttgccccacatgtgggatcttagttccccaaccagggattgaactcacatccctagcactggaaggcagattcttaaccagtggaccaccggggaagtccctccaggaatctgtacttttaatgcatgcccctgagtgcttatgatgctgactatttagaaccactgggtgaacagtggtcttcaaacttggcaaagtcagtacatatagaatactgtcctatattccaagtcctgggatacagaacacataccaagagatgggagtgcctggaccatgtgaggggtcaatttccacatcagtagggtctaggtgttctctttctgtaagtgcctttcatggtagcccctccccttttacaaaagagacactccaccattgctccccagttctgtcagcctgctccatgtttaaatctccctggctgccaaactgacgaataagtccaagctctggttttgagggaggcctctctcatg

SEQ ID NO: 51982 - DNA, 1309 bp, Bovine  19866880933232
  misc_feature (1)..(1): n is a, c, g, or t
ntgcccgggagcgccggagtgcctcggggcgcgcaggccaagggctcggggcccgcggggtctacaggggcgcccagcgcgcactcgtcgcacccgaaagggcgctcctcgccgctgtgcaggcgctggtgcgtggtgaggttcttcttccagccgaagctcaggccgcagtgggagcaggagaaaggcttgggtccgggaggggaggcggtgggggacgaggcagaggacgtgggcgaggccggcgcgccgggagagggcggggtgcggccggccgccgcgtgcaccctctggtgccgcaccaagtgctgcttgtgcgtgaagctgcgggcgcactgcgcgcactggtagggcctctcgcccgtgtggatgcgctggtggcggatcaggtgcgtctttttgcgaaagcgcttctcgcactcggggcaggggaagggccgctcgcccgtgtgcgtcttctggtgcgagcccaggtggatcttctggctgaagcgcttgccgcactcggcgcacgggtagggccgctcgcccgtgtgcgtgcgcaggtggcgggtcaggtgcgccttcttgctgaagcgcttgtcgcactcggagcaggggaagggccgctcgccgcggtggctgcgttggtgcagcagcaggtgcgcgcgctgcgtgaagctgcggccgcagtcggggcaggcgcacgggccctcgccgcggtgcagccgctggtgtagccgcagggtcagctggtcccggaaccggcgctcgcactccccgcagccgtagggcttctccgaggcggtcgggacccacccggccagcgcgagcccacccagtgtccctggggcccccgactccagcttatacgcggcggccagagaccccaggtcaggcgggggaaaggggctggggcgtaatgccagatgctggggccattccgcctccttgtgggcctcccgatcctcctcctcctcctctaccttcaccttccgaatcatccactcgtcccctgaaaggacaaaacaaggcgagtctgttaaaccccacgtttgtggctcagctggtaaagaatgcgcccgtcctcaatgcaggacacctgggttcaattcctgggttgggaagattccctgaagaaggggaaaggctacccactccagtattctatcctggagaattccatggaccgtatagttatgggcgtcgcaaagaatggactgactgactttcacctgatctgtttgtttgccaataggaccaccacttcctgaagtccctaagcctagctcctgctccttccactgaaaagttcctggaaatgtccaaa

SEQ ID NO: 51983 - DNA, 2711 bp, Bovine  19866880991133
  misc_feature (1)..(1): n is a, c, g, or t
nctggattctctatatcttcttccctggtgaggagaatgatcatgtactcgatgaatttgtccccaaaaatgcgttggatggtgctcagcaccatgtcatctttctcattgaaggagcccaggggggtcaccagcaggaaagcatgaggacctgggtaggtgttgttcacaaggtcttgttcaatgtcctttgaagatgagaagtctggagtatcaatgatcaaaacttgcctctctctccagattctgctctcagacatgcacctctgggttactggcttttcactgtatcgagtctcaaagacccgcttccccagaaggctgtttccaactgcacttttccccacaccacgcttccccaccagcaggaccttcagggctggcggccaggggctcggttcccatcctgtcatctgctgatgctgctcccctgaccctgggacaaaaggacagattcagagttgattctcacagtagaatacagagatgtggacagcttttaggatagctcataaacctcttttgcgtttttgaaaatctcttgttgccagtttttgtagagaacggccatgatgctctgaaccaggagacctgtagtcccagccagaagctacccatcaaagtgaaagccatgaaaagggccatgaccaacttaagagaggtgtaaagggcttgagatttctcaggaacgtgaaaacgttaaacgtggccttcactggtcttgagccttggaattcctcttattttgctaccaaagttaagtactggggcatgaagttcatggcctaaggcagaaccatggagagtgagtttaaaatgcatcttagtggtatattcataaaatagaacacaactcaggaatttaacaaaaagtgatggactgatatgcagcctagatgggtctccaaaacacgctaagtgaagaaagccaaacacaaagccacatgctatgtaatgtcattatctgaagttcaagaacacacaaaattaactcatatcaatggaagtctagagagaggctcctttcaagaaaggagagtaagaactcctaaggtgatggaaatgccccgtatttttagctgctgctgctaagtcacttcagtcgtgtctgattctgcacgaccccatggactgtagcccaccaggctcctccgtctatgggatttcccagacaagaatactagagtgggttgtcattcccttttccagggaatcttcctgactcagggatcaaacctgggtctcctgcattgcaggcaaattatttaccatttgaggcactcgggaagccccaatcctgagggtatgtgtgtatatgtgaatgttcttagttgctcagttgtgtccagctctttgcaaccctatggactgtagcctgccaggctcctctatccatgggggttctccaggcaagaatactggagtgtgttgtcatgccctcctccgggggatcttcccaacggagggatcaaacccaggtctcccacaatacaagcagattctttaccttctgagccaccagggaagcacaatcacaaggggaaacaaacctaaatctacttaccaccattccctacccatacgcccgttctttcactgtcagtgcagaattcaataaattacatgaaacattcaacaaacaggcactatgttagatgattttgcttcactgtaggctaatgtaagtactctgagcatatttaaggcaggctgggctaagctatgatgcttgggacatcaggtgtattaaatgcattttgacatgcatattttcaattcataatgtgtttataaggacataaccccagtgtaagttgaggaagatctgtatttctttttaagatttattaatatatatgagaatgctcaggaaggaaacctattatttttaacagtgggggtaattacaaagtaaataattacaaagtaaattttgaacactggcattgttcaaaataaaattgttaaaatgaggttaaaataagactaaaaatggcagagagcatacatgataatgtgatgtcattttcaaacacaggatatttaacttccagaatccactttaaagagaaatcattaacagtcttcaaaattcacttttacatagtgttacattattatacatgtaactttaatacttctttttcatattaatatatgttacatggtgctcttccactgatcactaaaagatataaacagagtgacatcaaaagacaaagtcataaaagttgttattgattatgctaactgcatatgtgtccctgtggcagtagcaattgtgttttagaaattatttattagaaactaatgtaaaccatagagcaaccaagactctccccaagtgttcctctgactcattctctagcctgaaattgcctaaacccagcacctgatgcaaagagctgactcatttgaagactgtgatgctgggaaagattgaaggcgggaggagaaggggatgacagaggatgagatggttggatggtgtcactgactcaatggacatgagtttgagtaggctccgggagttggtgatggacaggaatgcctggcgtgctgcaggccatggggtcacgaagagtcggacacaagtgaatgactggactgaactgagcacaaattttgttattgtcataatcaaatacttttcagttttatattcttgacattttttattattaaggcagacttttaaaaacaattttatt

SEQ ID NO: 51984 - DNA, 2753 bp, Bovine  19866881095410
  misc_feature (1)..(1): n is a, c, g, or t
naggaatgtgttatagctactggggctttccagccattgctagtggtaaagaacctgtctgccagtgcaggagacataagagatgtgggtttgaaccctgggtcgggaagatcccctgagaagggcatggcgacccactccagtattcctgcctggagaatcccatggacagaagagcctggcaggcaacggtccacagggttgcaaagagtcggacacaactgtagtgacttagcacacacacacaaacgttttaactcattaaagaatccataaatccatgttactgaggtttttaaaacttttttaggtagagaaaggaaagctttacaaaaacctttaccaacaagtcaattaataaaggtaaaaagcaggatcgaaatacaaaatcatcaatttatgaccatcattgtaaaaacttagataagaatcattaacggatgcttaatttgttagatgaagaatatcagggaacaggatacagaaaaatctgctaaacactacttcaattcattatccaaattcaacttcatcaataatgtaacaaagtaacatcatttcccttttttttaattaaaaaaatttttttcatcatttcctttagatgtgaggcacaaaagacataatatcacttgtgtggtcattttgctaagatactgaactttaaataatgaggggacttccttgggggtccggtagttaagaagccaccggccaatgcaggggacacaggttcaatccctggtccgggaagatcccacacgcctcggagcaactaagccagtgctccatgtctactgagcttgcgcacgtaaaacccgtgctctgcaacaagagaagccactgcaacgggaagcccgtgcaccaccctgaagcgtagaccccacttgccgcaactagagaaagcctgggcccagcaatgaagacccagtgcggccaaaaagaaattaaacattttaagtccatctaaggatgacttgaggtgtaacacacaaattttacatctgttctatgtttatcagcattcgtttcaaagtattcatttctgtgagttcttgagaagagtgtcataatctaccattccccatgcttcagactttctgttcctgtctggaatgttccttgccccccacctactgaccctgtatgctctaagaaaccgccctgcgctcgcaggaaggacctagcacacctcctgcgcgagacggaatgtctccacgtccatcgtgaagcttcagccggagcagtgtcagtggagcaaacctccttcgtgcttattttctggaacaatcatcatttcagatgttctcctttatgcaaatgaatccgtttattgtcccaggtttttctactttgagggtccaaattacattacccagatgatctcttagcaccagaaagtgacataaaaattctttgttatactgaaaacctgggagttttgtttacaaaatgtggtcatcttgactatatactctccaggctgacgaccttcaggtactcagtatgggcttgttgactaagtgctactaaggtttgccccttgccaagctagaaaggactcggtgtccctataaaacactcctaatttcatctgactagcctttgatgtgacaggcttcaccttgaaagccagaggcggcattattctcattacacggtcatcaaaaatggctgactcaaaggtcagccttataaaacttcaacgtcgcttgtaaatatgagtcataatctgaggaataagcttgtttctcttataactaataatgtcattgctggggtaggccatgatctgcacaggaagtgctccttaatgtacatggtgagaaatgtttgttttttgttttttaactgaaacactattcccaaaagctgtggggaatttagttatggggaaattcaataaccttagccattctttaaaataaacctgaaaacaaactttgatgcttgtatgaaaatatgtctggatttctccacatctggggtttgcttaaagtaaaacccacctaagggttgtccttgacagctcagtggtaaagaatccatgtgcgagatgcaggagatgagggttcgatccctgggttggaaggatctcctggaggagggcatggcaacccgctccaagattcttgcctggagaatcccatgcacagaggagcctggtgggctgcagtccatggcgtctcaaaagagttggacacgactgagcacacacacaagaccccctgaaatccttttgctgttcttttcacctttactggctcaaggtgacctcacctctgctcagggggtgatccaggcctagaggctttgcctctgctgagggagcctggaatcccctgggattcgatccttcattcttgaggctcatagctctgatcccagggaagatgcaggaaccctgggatgagtcagtgtctaagctgttgtcaggtactgacatcctcagtgtaggcaagctgacacctgcgtatagaaataactgaggccatggaaggttctagaaagcacgaggggcagtcatggatgccagggcactgaagcattcccaaacattggccgcatgcccaccttgcccccggctctctaaagccacaccagggactccctccaggttggctgagggtgatgccatcaccggggaaactgagcctccctggagctgtgctgctcagactaaggcaaggagggaggcccagactgaaggtggggaggagcgaaggaggctacaggaagcactgaatcaccaa

SEQ ID NO: 51985 - DNA, 815 bp, Bovine  19866881113094
  misc_feature (1)..(1): n is a, c, g, or t
naagctcctcgcaggctgtcccttccccactctcctcccctggaggagaaactccagtggaaacgcggcttaaactgtgtttagaaaagacagctatgacctggagcatcgcacttcctcccctctgcacccctctccgccgcgcccccctccccacccccgcagcctccttcttcacttcatcgtggctcccggcgcccccttccattccgcagcagtccccttgcgcccccggctttccactgacctgggccctcccttcctgtcccccagcactgcgtttggcactgccagcccggctgttactgccccccaggccaggtgctgagtgccgacggcaccgtctgcgtgcagcccggtcactgcagctgcctggacctgctgactggggagcggcaccgtccaggggcccagctggccaagcctgacggctgcaactactggtgagggccggtgggggcgaggggcggcgtgcgggcaggatgccacgggtgagggcagggctagtccactccgtatctcacacacctgagctctcccggtctcagctgatgcacactaggctcccacaagctctgagaagatgcagcaggtaccctaatccctggtctgacaggtggggaatctgaggcagccagctctggggatctgggagactttgaagagctgggcttgtgctttgaggggacagggggtgggcgctgtggtgtttcctcctgctgtctggcttcctttagccgcagacgacctgtggtcacttccccataggactgagtccgcaggatccctgggcatgcctggagtgggtcagggag

SEQ ID NO: 51986 - DNA, 1077 bp, Bovine  19866881128120
  misc_feature (1)..(1): n is a, c, g, or t
ncgtggtggggatggtgcgggagggtccctcctgggcctctcctgttttactggacacccatagcccacaccccggacagctcccacagaactgtgctgaccgcttgccagccagccacattctatgaggtgaggggcttaaccctcaccaagggctgggatgtgtgactgtggcatgtgtgactcgcacgtgcacatgtggaagtgtgtgactgtgtgtgtaagcacgtgcacatgtggaagtgtgtgtgtgcgcgcgtgcgcgcgcgcatgcacaggttccggcaacatgcctcctccccctccctccctgtggggacatatgctcacgtctctgagtgccctcaagggtgcacacatatgagagcgtcgcaggagcccctgtttgtgtccacgtgtgtaagaaggtgccgggtcggaacctgggaagtcacctcactttaccgggggaggagggctggggacgaaggcggacccttctttatttgcgcccctcgcccgcccccggggtcgttttgcaggaaggagcgtgtgtgacaagcccagccgtcccatctgtgagaaaagggctgtgcgggtgggttctgcgtggcgcccccggcctgcggcggcgccgacagagagacttccacgggaacctgaggcggcggcgagaacccggagggcaggctcgagggtgtgcacggctgccatcttcccgccggagccgggccgtctcagagtctccccggacggctgtctcgtttattcagcggtttccttacagtcactgctctcccccacccccaccagcacccctacgagggcccctaggactctggcacgaccccccgcttccgctcccgccgtctgcccgcgcggcacacctgcaccaggatgaagcggcaaccggcgcggccgcggaaggagaagctccgcccatcgaaggtgacgtaatgcccgtccccgcctaccgcgcactcggcggcgcacggcgcctgcgcgcagagccagcggccgtccctgcactcgctgcgggcgcaggggcggagagaccgcgctcagggtccgcgccgccggggttcgggagtgggggtg

SEQ ID NO: 51987 - DNA, 974 bp, Bovine  19866881140312
  misc_feature (1)..(1): n is a, c, g, or t
nctgccaatgtcactttatttggaatatgctagaactagaataggggatgggggacggggcatgggaggaggggtcatgatggccagtgcaggcatcatcagggaagccgtcagcgctctgagaaatcacctcctggaggacaaataagagggagatgcgctatcaaaaaaggcagggtaatcgggctgggaagggatggggctggagagagggagggtgctgagcaaactggcaggagaggaagggagagccgccaggaggaagaccgcagtcacggtaagcttctgccccaggcgttctcagcgcccttccatctctttctcaccccccacactgtgtggtggcctcgggttaacgtgtaccaggtgtttatagagaacctggcacttcgcatacagcctctcaccaagtcctcccaacaagcctgtgcagatcgtcacctgggtgtaaagacgaggtcatggaacctcaacaaggaaggaaatggatgagctgggattcgaacctgatgtgcctgaccccgaacatctaggcttaagtgtgattagagaacaaaccaacaagaatgctaagaaggggaatggagcagagcagaaggactcggaggaggaaattcccgcgaggggctgtcgggtaacgcgcccggcctggccagctcctggcctcaggtgaccccagaccccggcctaagccccggccccgcccccgccccacccaagaccccgcccacaaagaaccccgcccctccgggaaccccgcccacacccaccctggcaggcgctgcactggcagctgtgaatgaccggcagcaccaccagctctgtgcggccgccagggcagcgcaggttcaggatgcgcaccgggttctcagggtctaggcggtagctacagcagtcacactgactctgcaggtacggctcctgggcgagagggagcggatggctgagctggggaggggcaaagagtttgccca

SEQ ID NO: 51988 - DNA, 1412 bp, Bovine  19866881183121
  misc_feature (1)..(1): n is a, c, g, or t
natttgacctggaaaacctgtggatatgattcaaagttattttcataatctttgtcttctaggaaatttgtagtgacgcatctggatgtctgtgtgcattatgctagagaagcagcatttagaagttgattggatttagaattttcttctgtattttctacacaccttattaaggatataaattgttattaactgaaagtgtaactgtttgaatggcccatcagcttatgtgcatgcatgtttttgtttttttaaatttttggccactcctcatgcaggatctgagcagaggttgcacccatgcagtagaagacctgagtcttaaccacaggaccagcaggaaagtccccatgcagatgttttgaatgaagaactgtttgatttgaaggattcagacatttacaacttagttaagaaatttataagttttaggtctagaactgtatgctgttttttgaaattatataaggagattgctgtgggttttacctaaacgatttgaaatttccctttgtatatgtggattaaagtttaacaggtccttatgccagtgttaaaagtaagctagttcatagtagtgcaaacaggatatgaaaaaatttttaaaaaatatttccccatgcaatttacctacttttattactggttttcaattttttctttctgattgtccatcaagcctatgttgacttggtggaattacagttttactcagatcaaaatagagcttacatagtttttacaaacaaaactgaaacattcccacagcagtacttctcttttgggggctttttatatttgaggccttgtttctgggtggaagttgagatttcattgtattaaaggaattttgtcattttttttattaatgacctttttgctttaatttagcaatttaaatatactagatcatgttctatgtaataatactttattatgaaaaatacaagtgaaaaatttgtctcacttgaaaaaaataaaattttttacatacataaataacttctattttaaaggtattgctattaaagagtcagcaaaagtgggagatcaagctcaaaggagggtgatgaaaggtgttgacgacctagacttcttcattggtgatgaagcaatagaaaaacctacatatgcaacaaaggtatatttttatgatttttataaaaataaataacattttatttcaaaaaattagttcgtttagtaattttgccacttaattacaggactaatactctcagcctcttcacagtagaaatttcttctttctctgtgacttcttccagccttgctttaactgtattattttttcctccccaccaagaggaatattttagctccttcacgtaactggtatttactttttcaatctcagagtcatcaatgtgattgactttctcttgcctccacat

SEQ ID NO: 51989 - DNA, 908 bp, Bovine  19866881278855
  misc_feature (1)..(1): n is a, c, g, or t
naagatgttaaatgtaaaatattgcaagtgcaaaatgcaaaatactaggtccactcttgtctgaaacataagcctctagtatgtttcaatcctgactgggattggacacaaggggtaaaatctagctgagccccttttgatgcacataaaacagactattgatgtgtgtgtctgtgtatgattgttgagcgtgagttggttgcatcagagaaataagccgtatgtccatttaccatcttcagaagataaaaccatagcatggagttaaagacatgtgatctcaggaactttacagctcacttgttaatttactataccttgtagaaattttattgccatttttgttatattcagaagaaatagtgatagtataaagaagaaaaggcgttttcaggagcataaaactgactttagatagagacttgcaaatgagaagaattttatgtttataactttcagaaggttttggtattatatttcaaaacaaacaggaaattttaaaatcatttgattcattaacaaataggatgaggttgagatctaaacagttcacagaatctcaaacatttagcggacactgactgtccggggcaggctgctgctgctaagtcacttcagtcgtgtccgactctgtgtgaccccatagatggcagcccaccaggctcccccgtccctgggattctccaagcaagaacactggagtgggttgccatttccttctccaatgcatgaaagtgaaaagtgaaagtgaagtctctcagtcatgtccaactcgtagcgaccccatggactgcagcctaccaagctcctccgtccatgggattttccaggcaagagtactggagtggggtgccattgccttgtaacttactcaggatagacaagaataagaggcagggtcagaacta

SEQ ID NO: 51990 - DNA, 1654 bp, Bovine  19866881311095
  misc_feature (1)..(1): n is a, c, g, or t
ngagagttctgagatgcaagatctaatcgctctctgcctacatgcagggagagggcagaaaggggacgacaaggacaagtggagccaccctcgcgggtccccatatccagtgatggcacagatagagaggcttctcggatctttacccagggacgccaacagctcatagttcatctgcatcacgtctctgtacagttccttctgccacttgtctagcgcgccccactcctcccgggtgaaatacaccgccacatcctcaaacaccaccgggagctcctccaacagcccctcctcagaaggatcctgcaacaaagagtagcaggtactcagtactcctctcacatcagacacccagcatgatgctccagggatcctgctcatggcctgtttctcctgggaagcctgccaagaggcccagacgctctctgaagaattcagctgtccaccaaagtcaaaagagcaaacgtgtggcccagagtcggtaggtaacaactacacaaacctcaccgtgatcctagaagaaagggaagacccttcctcttctctctgggaaggaaaggacagggcactgaggaagagggtctcgcagagcctcgtggctgcacccgtcctcgagagcaccttctgctcatctaccattgcaaaggtggccgctgtctctgagccactgctgagtttccccatcaggatggaaagagcagtaaaacaacaagtaaagatgatcctgttcagtgactaggttaacacacactttactgctaaaggaatttaggctataaaaggttagacctgtttatcatcttctaatcctaaacactgaggcaacatgaagggaaatgagctttgtcccttttctggattccataaaaatccgaacttactaactttacctacaatgttaggaataaggaacgtctgagctcttctcaacagaatactaaaaggggctgctcaaaatgacttgtagtaaaaccccgcttatatggtggggggcgggagttgagaaaggggggatggatctggctactcagagacctcaattaacacagcttccttgcagggcaattttccaaagaatcagaaactaaacctgttgcatttgataaacaggcctgaggtgagaagtggagtctggaggtctcatcagtgcagcagggctgggaggagagccctgggctggcggccaggggctcagcaggagggcagcaccaggagcccttgttctctggctacatcttagctcttgcccaacaaggtgagtttaactacgcttgctccacccccttctgtgcagcattaaaaacacattacacaaagtctgaagaaacatgagtccaaagttaaagctgaaacatatcttttacattgattatttaagagctctgcagctgtttttatggttgtgggttatttctggagttctgtggtcattttagattctggataaagatggcttttctgaatgtagctgttctcttaatgtcagaagttagagtatttggccccactaatatgttttgttatctgccaaaaggagataatagtagtagggctgttgtggtcagtaaaggagctgatacatgtaaagcacttaaaataagacctggcacagctgaagcaggcagcttatggtaacgtataatgttagcagcag

SEQ ID NO: 51991 - DNA, 994 bp, Bovine  19866881326761
  misc_feature (1)..(1): n is a, c, g, or t
ntcaagacaaataatcccaggattctgattcatgcaacaataagcatttattttcatgttcatagggcagcagcacagatgccaaacaatgatggatctcagctggactttacctggtggccccgcttcaagctgtgggtccatctgtgctccgtttctgtgaactgggctcgggtttattccctgtctgttcattccagagtcccagttggaggaatagcagctagcaggggaagctttctcttggaaatggcaaaaatgcaaaaagtcaagtctgacgacgcaagcagatcacaagcctctgtttgtatcacatatgctaacatcccatcagtcaaaacaagtcacaggaccaagccctaaagcaagtgcagggaaacatacctccttctaatgggaggatctgaaaagctttgtggcaaagggcacaagacagaaaaagtgaacaaggcgggggaaaagtttaatctaccatgatctgccctctcggtcataattacttacagctctaccacatgcaaaatatactcagctttatcccaagtcctcaaagtctcattcaatcagacaaagttcaggatctacgttaggtccgggtgaggcacctggaaacctatgacaagttatccacccctcacacagcccgaatccagtgacaggacactgcagacgcacagtagtggatcacttgcagtagacttactgcaataaacattattttcacaggctggacaagacaggaagcaggtatgagtatgcagaagaaaccaccacgtgcccttctacctttgggtacagccacagcctcctccgagacaccgatttcagtactggctggtcttattcacaaaaatgctgcataacaagccgcccccaaccagtaacacacaacaataagcatttactgtcgcctccatgggtttgcaggaatcagctggtctaggctgggctgggctgggtgagtgggcttcaagctctgggccagctggccttg

SEQ ID NO: 51992 - DNA, 1390 bp, Bovine  19866881408235
  misc_feature (1)..(1): n is a, c, g, or t
naggggtcggggggcacggcgggcagcggcggcaggggctgtccccgggccggcttggcgcccgccgcgtggttacgctggtgcttgcggaggtggtccttgcggatgaagctcttgccgcacacggtgcaggtgaagggccgcacgcccgtgtgcgtgcggtagtggtcgatgagcttggagcgctcagtgaagcgcttctcgcactccgtgcaggggaagggccgctcgcctgtgtgcagcatgcggtgccggatgaggtgggccggccgcgtgaagcagcggccgcactcgccacaccgcaggccgctgccgtcccgtgcgctgcccgccgccccgggcaccccatcgggctggcccccacagctgcgctggtgtgcgctcaggctgacctgcagctggaagctcttcccgcacgtggcacatgtgaacggccgcccccccggggggggctgccgggtgcttcttcagacccggcttgtggccgaagcctttggtccggccggggtatttacaggggtcgttgaagggtctcggggcctggccggggtccagcacagcctctccgttgtcggaggaggagaagggcagcccctcgggcccagtcctcgggttgaggcccgcaggaggcttacacctgaaattccagccccaccggaccccccccgaagagccagtcccctggagaggtctcgtcctgggtcactgtgggggtgggatcccccaggtcacgctcgggccgggcgggctctctcagccccagcacggggtcctggctggggaacgagctgccctggctctcccaggctccttcctggacaggactggggaagaaccttgtggcctggcctggtccaaacagtgtcccgtgggcttctaggtcagtagggtgcactggtgtggccaccacttcttcttcttggacttctgtttttatcacaatttttacatctgctgagaaagacagaaaagaccaggtatcattctgtcccccttcctgcttagaaagggaagatctgatactttattctggatattcagccccaccaaggccactctgagccctagtctccaaggctcaggatctagttcagcagaggtgcccaaggtggtcaggcaactgcctcaaactgtgggtgaggacatcgtgttccagaactttctctacaggtaaagcaaccatcatatctgctcaccttgttctagagccttcaccacaggtaaggaaccattgcatctccccatcacttcccattttcactttggctggtaaggctaatcatgaagctattccaaggaaggaactcagaccactggtggcaatgcacagagctgggctcaggcacatctgagactggacccggctccccacagatcagctgcaacttca

SEQ ID NO: 51993 - DNA, 1250 bp, Bovine  19866881700529
  misc_feature (1)..(1): n is a, c, g, or t
naacaggaaaagtggagggacttggtgtgtggacaaaggtgaagcctttggtgatgattagaatgcttgagatgaagaaaacgtagaaagacaaaattggtatagaagaggcatataccagtcgtgtcaataattaagaagcgaagggtaggaagtataatagagagtggataagctgagcagctaggtagaggacagcagggccaggcctcggatgaggcagggagaccctttcttacgagatgtgaggaccatctcattctaggcaccttctttgcctcaactctagaccctgctgggccctgtgggacactgacttaaaatgtagagaaaagagcatgcataaataaaaatacaaagaacaatgaataccaaaaaaataggggggaaatggaggaagcacccaaagagagctccacagagagaggatgagtaaagagcaatgtggaccaagcagagaggaaggagagaaagggagacactgtcccgtttgaggaggcagtcatcagaatgcaggcacaggggctgttcctaacaccactgagaaagataaggtgttctcagtgatccaaatggccctgtaacccctcagataaaaataagattctccccaggaaaggaaagacaaacgccaaaagcccagagctgagggaggaacaaaggaaaacacggaatcagtttggggaagaggttttgtggattccctgtcccttcctttgttcctctagagtcacttctaaagtctaaagtcactttcaaagtggtcttaaacttcagggactcttttgtatatgagtgctagttcagatttaagcttgagtcatcccatgtcatcccaggaatgtagacaatagaaggaatacctttcttgtagtttcagctctagactgaaaagctgggggaagaaacttcattttctttttttgcacaaatcagaaaaacagctactgtgtagactttcctttttgatctcagcagatgaactggactgatagtgtttattcagatttaagacattatctgaatcttggtttgagtagatttgggatctatctgtaatattaactagatcagatagcttttatattttcatatgtacacagaggatcacctcacccttgtcaatgtccatcagtttttgaactttgtgaactggccttgaaacattacaacaatgttttgttgcaccaattttataaactttttcagttcaatatgtgctatttttcagagacaaagtaaagtttaat

SEQ ID NO: 51994 - DNA, 1055 bp, Bovine  19866881760342
  misc_feature (1)..(1): n is a, c, g, or t
nactaaggaggaacttggtgcttacctggtgtcattttcccttccaggctcctgtgacgtttgacgacatcacgggtgtacttgcttcaggaggagtgggtgctgctgagtcagcagcagaaggacatctgtggttctgacaagctggtggcacccctgggtatggctcctgttcacttcccccacagcattcccaaccatgtctgactgtgacatgcttgcgaattgtctggaatctgaccatttatcccccagcatcttgatgctgtttatccactcagtcctctatctgtcttaactgcctgtggattcacacatcatgctttctcttttccacttaaactggccaagagaagtggggaaatttggtgtgccagggctagacctggatgcctcggcatatcccagggcaccgggggcagggggagccccacctgtggactgtgctgctggaaggtgggttttgtttcagtgcccagaggacactggaggtggtgggcagcggtggaagaagcctcagatctgcagcgtggaaatctggtctcagtgccggctctgccacaaggcctggccaagcccattagcctttttgagacttggtgtctttcttcacaagctttcctttttcacaggcttgttgtagtggtttaatgaaatgaaacaacttaaaaatttgtgcccaagtagatagttttcatcttttttattttctgaatgtcctttctctcctctgtggatagacttccagtaccatggacagaggtgattgtagttcattgtgtctatgtgcatatatattcttctgatttcaatttgatgatcatcaccatgcatttccttacttcttttcatcttggcccttgtctaaggtttatggggccaacagtctcagctctctttggatggaggggttgcgttctttgtgtctactaaaaagtttaaaaactgatgattcttttaaacgagaagttgcaaagtagcactgggccagatttggcttacaccttttttctcttttttttttggttgacttctttaaaagcttaaataagggg

SEQ ID NO: 51995 - DNA, 988 bp, Bovine  19866881874772
  misc_feature (1)..(1): n is a, c, g, or t
naccttgaggaacttgtcatcaaagggtgagggcccatcactgctgaagagaccatgaagcaaaaacccgtgagtggtgcaacaggtatagaaacctgctgggagcccccaagaaatattgacactggctaaaaattattccatacagcatgtgccatgcacaactaacagttttatatacattattttgtgtaatcctcagagcagccttaaaaggcaggagtcatcatcacccccagtgacccaagaagaaagtgaggcttgaagggatgagggacgctcaaggtcacagctgggcaggaatggacaagctgcatcagtggctcaccagactttatcttcccaggcgcgggggcatggggctggcgcgggcttggctgtctcctcctttcgacagcacgaccttctctgccctttggacccgacagcccgcctgttcccggttgtacgcggcccagcgcggacccgggaggaggactgggggcgccgcgcgccgggaccagtgcccgctgccccgctgccgcctcgcgccggaggaggggtgggcccaggcgcagaggggtccccagggaggctgggccgcgcgcgatccttacccgcggttgggtcctttgggtacgaaccagggcccagcgatgccgatgaggccccagaacgtggtgaagatgacgaccgggagggcgaaggagtgcgccgtcatggccaggcgcgggatgcgggtcagagctgcggatgctccgctgggtacctgtcacggccgggcaggggactccgagcatgcgcagcaggaccctgccgccgcgaaagagcgcgttctgccgccccgctcgcgcatgcgcggcagctagacactcgggacggaggggacctttgatccgcccagccggtttcctataggatttacgggatagaggcacatatggggaaaagctatgctttattcggatagcacaaaggttagaatcgaacaggttttcttaaaccgtgt

SEQ ID NO: 51996 - DNA, 2306 bp, Bovine  19866880722558
  misc_feature (1)..(1): n is a, c, g, or t
ngcagcacagctgagtctttgttatggaagcatttcatcttattactgtactcgatcacatattgtacatttttttcacacaactcgtaaatagtgagtaattgttatatatcttcaaacttatgttttctcaaaacacttactttattaaattgttcatggcatctgggtcatatgctgtcacctgtccaatgatgctgccttcctttacatcttcatctacttctatcaaataaaagactttactgaacacaggaggctcatctatatcttccacagatattttaaccacagctgtgtctttgaaaggccccaggtgtaagaatcgtggatcagggtgagtgttacttgcatccacttttaaagtgtacagcatcttgttttcaaaatctaaattctaaagtgaaatgaagtaagaaaaattagtataacatagcagacataacaagcagagaaaatatcaaaatgtaataaacatccctccagtagttccagtaattttggttaaataagtttcccaattattgcttcatgggtatatcaaataagttagtacatttttaattttgccttacatgtttataaagagtagttgatgtaacagtataacattaatacttatttgcacttattaataaattttatattttggtggtcacaggtaaatgaaatatctaataaataaataggctatttatttattactatattatgtattattattttaaagttataaaaatttgaaatcagcagaaatataaagttgagatttagcaggctattcatataagttgcgtacgtttggaaatgtacatgaaataatagtgttgtcgttgttgtttagtcgctaagtcctgtgtgactttttgcgaccccatggaatgcaacacaccaggcttctctgtccttcactatctcccagagttcactcaaaatcatgcccattgagtcagtgatactatctaaccatctcctcctctgctgcccccttctccttttgccttcaatcttctccagcatcaaagtctttcccaatgagtccgcttttcatgtgaggtggccagagtatcaccatggcaaaataatgtcacggagaaatataaaaatgacttttgaggttacttgatcctagttgtacttgttgtttactctaagcaagagctgttgaagttttatagcaattttaagtgtcagtgataaagatgcttaactcacttgaagaaaactcacaactattcccatttatgtgaaggacagaagcatataaaagatggaagaaataatcctaggctttcttacctaaaaagcaagaataaaccataaaatgctcaatgaaaaaatgaagacagcaagaagaaacctgtttgacagttataatcccttcctgtgtatccttgtcagtgatgacatcgaacatgtctgctccatctccttccgcaatgctgtattccacctcagcattttcccccacgtcagggtcattggcttttatccttccaagaggagttccaagaggtacagactcaggagaatgaaactgatacgtacctgaaaattaaatcaaagctgtttcatctttagataacaaaaactttcatttcctctgctctttttattaaattaattttaatttaggagaatttttcatcatatcgaattgtaagctgtcaaaaatttacagatttattaagtagggaaaataatttataaaggcagaactctctcattttgtaaatgagaaatctgttccagaaagaataaatggatatctcaaggttatttagataatagatggtagttctgatattagaatccagaactttttgacttaagaggggaggaaagcaattgtttactgcttatttgaagtgttcagtattatcattacacattattcatttgctaaattatttagaacatacatttattcttatattctaactcaaggacagaaaaaaataaattctttcatgacaggttcacaaggagatccaaccagtccattctaaaggagatcagtcctgggtgttcactggaaggactgatgctaaagctgaaactccaataatttggccgcctcatgagaagagttgactcactgaaaaagattctgatgctgggagggattgggggcaggagaagaaggggatgacagaggatgagatggctggatggcatcaccgactcgatgggcatgagtttgaataaactccggggagttggggatggacagggaggcctggcgtgctgcaattcatgggggttgcaaagagttggacatgactgagcactgaactgaactgaaa

SEQ ID NO: 51997 - DNA, 1498 bp, Bovine  19866880829872
  misc_feature (1)..(1): n is a, c, g, or t
nttgccttaggaaaagaatcataaagcaatttcaagtcctcagacacaaacatttgtcagttgaacttgtaatatcctgatgttagttattaaatatagtgtgagaagtgatgttaaatgagggatgttggaaggtgccatgtgactaacctaaggcaaaataaaagggaaaaaagagtcaggaagtgaaatgcatggagcaaaatgagtatgacatggaaccagaggagagagatatcaaaagaaaaggaaataataggttaaaataagttgcatttgaaaaaaatatctactgtcacatacagagagtaaagaattaaccaagattttgtctatttcaccaatatttctgatctaatagcaataagcataacttttgtgatactgggtacttttcatgttttcctttttgtctgattctatccgatttgcctaagttgccagtgagtcaaacaatgtttatatcattagagtcacttctagtgtcttgtgccaaaaataaaaaataaataaatacatgactagtgggaaattttagtattaataattatttattttgttttctgttcagaatttgaaactatctcagcactgggcacaaactgggggataattcacagtgaaaaaaaggaattagtgtatgtgtggaatagaatgaatgtgattggtaagaggacaatagataattagaaaattctggatggcagaaagaatatgtcagctatttcaagatacagcagaaagaggagtgaggcaataactctatttcatcaaaactggatacaagaagggagttatgtattccctgctgccatttgatcgtgattgttaatgagcaagttttcacttgctgcaactggaatggaattaagtctgtctaagggtactgtcttttttctagttcttttttttttttttcttttcttttcttcttccctctgctttaaatcctttggtctggattataggcaagatatagttcattttgactgattaggagacagaagcatctagaagtattcaaattacttgtttttcatatacagcatactattcttaattacaacaaattattcatcagcagagactaatatattttagtaacaattgtatattacacttttatttgctctgccttatataatacatcaaattatttttactcatgacttaatttttgaagaaatttttaaaaaatcttttagatacatgcacatgaaattatatcatatctagctgattaatagtgaagtaagtccacaaatagtttattctttgaggcttactatgaatactgacctaatccaactacctaaataaatcacattccccacattatcctactgaatgaattgacaacatgatacctctgcatattgccattagtcaaatactttaaaataattattagtgacatgtaaaattgatgtaaaaaaataactatcactttcaacttctagacttatcatataaaaactcttaccttgcctacatactg

SEQ ID NO: 51998 - DNA, 708 bp, Bovine  19866880894541
  misc_feature (1)..(1): n is a, c, g, or t
ntttttttgttaattaattttgtaactgtaagacggaggatggaacactatacatgagcagtatcatacgcagtagctccttgggctaaaatgtggatttttaaaaagatatatattttaattagcataaataaacaaaaataggaaaattggttatctgatttcatttattcctaatctaatcgttatttttcttttcttttttccccttcttagaacatgccattctcttttattatagtgtattctcccgtaaagtgctagcttttcagttaaaataatttctttgggtcttggtagtgtttgcaaatgcagttatcacctttacccttccactcctaaatcttcattgcttgatcccatcttaatccaatcttcgttttcccttctctcctggatcagataacataaatggatttcttagaacaccctttacattttatgataccttgtttcccaagattgcagtaatcagaaggtggaatgaacagcaaaatcagtgagaaaaaaaaatacatcaatctcttttttagtcaaaaagaatgtgacagtgagactacagagcagcactagtcaaagttgtattcgcatctatgcagcagcagcagcatcttctggacaaaaagaaaaaatgtgaaattatagcaataagactgtaattagtgaaaaagcagtcacctgctaaccaaactcgaattcttttcaggt

SEQ ID NO: 51999 - DNA, 1207 bp, Bovine  19866880896653
  misc_feature (1)..(1): n is a, c, g, or t
ncacacacacacaatatacatgacatatgtggtttccatgcctgtaaatgatttttccatattgtattgcttggatatttatgactaagcttcattgttcaagttatactgtatttacttggcttgttagcctaaaataaacagaaaataactaaatcattgcaataactccaaagcagtatgacagaataatcgagtacactttgaagctttttcattagtaatcttcattttatgcattcactgaatttttccatatatttacatagactaagccttatttacttcagaaaaaaactcacttttgcaaatttgaccttgtcttgtatacctgtatacatataaataagatgatttttctcataaatgttgcaagttctacagtaattcaaatgtctactgtgaatataataagaatggtcctgggctcttcacatataattcaaattgaataccaacataaactttcgtttcctctaaattttctgatccatagcgaggaaaagaatgttaccaagtaaaaacctcaaaaaatgcttctgacatagaagaggccattcttatcacaattcacacatttcagctaccttttattctatgaaattccttgtgacataaatgcaaactctgcttcttttcaggtttacgcaaagctaaaaagagagtctctgtttctagccttgaccggaaagtcagaaaagagaatgtgtactctatgattccagcattattcaccataaaaatggccaagatgaagcacataaccaggagtgaaatgacatgagagaaaattaggattcattcatcagtcatattatatctcatagaatacaagtgaaggttatagccttgaacacatcattttaaagaagcgatttttatactcgggggagtgttaactacagcaatgcattatcactctcactattttattccaactttagagaaatacttgtttagtaggaacaacttgaaacagtattatccattgtgctctcagtgcataaaattcattaaatataaaaacccgtgcgtcaaaaagaaaggagtttagattgaatcattgtcttatatcatattatttgtatatgttgctaaattcaaccacacacttaaaatgcactaaccacagaattcactttagattatttgcttacaaagtttaatatatttacaaagaaagctgttctatttctctaacacatgt

SEQ ID NO: 52000 - DNA, 1792 bp, Bovine  19866881190692
  misc_feature (1)..(1): n is a, c, g, or t
ncccagcactcacacttattttggatgggatcaaaaaatgagacaaattcatggctcatgaatcccatgttgtgggatggcctttgatccttcagttcagattctatcatagaatttgcactaaaattatatacattgtatatttttttcaaaaatagctaactttgttcattcctgtggatgccagatttcaggaagaggcccagtgaactttacctcctggtattcacatactatacagccctctctgagctgtataatcaacacaacatggaaatgacagcataaggtattcaaagctaggttataataaacattgtgattccaccttctttttcctttaatatcttgtaccagatgcctactgccttgtgaggacactcaagtagctggagagattcatatggtcaggaactttggcttctgtcaagagccaggaccaactgattagacgtgaatgaggaaccatcctggaaatagttcctccaatcagagtttagctttttgatgactgaatggcagtttgaaccaacttcataactacaacttcatgaaaggtcccgaaccaggacaatccagctcctatgcactgggttttctgacccacagaatctatgtgagatcaaataactgtgagataaagtaaatggattgtgttaagccagcatactctgaagtgatttattatggaacaagagattactaagagacctctttccttatgtttctttttttttctattttttactttacttttttctttgaatcctaaccttccagaataaaatatgttcttatcattattgatctgggtcatggcacccatatcacataacccttatatttaaatgtgacatacttagtgaaatatccatatttcagtctccattaggaattttttcttttgtagttacagtagggtttcgacagaaaaaaaaaaaatagctgaatattggatcctgagattaacagatgttagtcaaacaaattatctttttggttcagttaggtgctatcctttctttttattttctgtttgaggctatgactcaataatttgcttttctgcttatagtatcaaaactgtttgttttaaaataacagctataaaatatcaagtacataattttacaaatacctattgacttttttctttgacttttacattaagcactgacatttcaattttgacagtttatttaccacataattagaatgagtaaatttctcattaggacaaagtgaaaagaaaaatgttgccagaaatttctcatggaaaaaggaatatcatataagataaacatgtatataacataaaatatagtacattaaatattattcacacctgatgtgaaatgttgagatctttttaaaaatgtgttcacactgctcaaattcagttttaaattattctaaatctgtggtccgtttcttccttaactctcagctctgttctaaattcccgattgacatcatgatataaattttcttagtaaatatttttataagcttagttttattgcatgtctatgttttcaattcatgcttggcattgttttcttaacattattactattttattattaattgtagtgctctgtcttcctcaattgcttggctgctcacacttgataagaaaggaattatctctacacctggttgcatttccatttctcttcctatagtggaacagaatttcaacaaattgaatcaaaaattaaatcataaaactgttttttcacttttaagtgtttcctaaattttaactacttgtttatatcttctttttctg

SEQ ID NO: 52001 - DNA, 1173 bp, Bovine  19866880462214
  misc_feature (1)..(1): n is a, c, g, or t
naatgcaaaaaatcagacgtgtgtccttaatatatgtaagggcttgcctcagacgcgtggacatgtgtatttataagtgcgcagacagaagtttaaatattcagacacattttatgattgtcctctgcccgtcttctggctaatggctcctcctgtgcccaccaatacatcaatacggtcgtgtgtattgaatcgcgggcaggaatgaggaggaagcgagtgctcagcctagccggtcggagtacaggaccgtaaatcggggaccctaggcagtcagcgcttcccgcgcgcccgccatgttggggagccctccctgccccccgcgccgggctgggtggccggggctcgccggcagccgggggagggcctttcataacccggagaattttcaaagtgcgaggaagatgataagaatagatttctacaagtcccgaccacgtgattggcgaaataattaattcagcacgtcccttaagaaacacggagtcgtcattaatctgccacgcaaagggctctctcctacttgtgcagggatcccaagaatatcacccaccgaggggggctgcgcggcgcccccagccctccaccctcggcccccggtggcggcggcggccgcggcgggcgcgggagtgcagccggcaggtaaatattttgtcgacttttatttcttcggatttaaatccttaatgaacttagctgtcagggccgctgacaaatagttccctttgcttcctgatttggaagcgtgcgccgtcaagaagttgttagtggcttggatggtgacctttggttcagcaaagctttgcacttatgaaaaattactgagagcggccgagtgtgtgtgtgtgtgagagacagagagagagagagtgtgtgtgtgtgtgagggtgtgcggggggcgaggggcgagggtgcgcgcgggctgctcagaggcgacaggagtagtaaaaacccgcccggctgggggacgcgcctggcgcacgcgggccgaggttgcccggtcgcctgtgtctaccgggaacaatggtcgctgtcacggcatctgccgcctattcttaaaccggtgagaaaaggccccggccctcttttcaagcaagggtcgtaaatttttctttgcgtcataatggaaggctataaaatcgagttaaattttaccccaggcagattttaacc

SEQ ID NO: 52002 - DNA, 1940 bp, Bovine  19866880656938
  misc_feature (1)..(1): n is a, c, g, or t
nttgcattgattgctgaggaaggctttcttatctctccttgctattctttggaactctgcattcaaatgggtatgtttccttttctcctttgcttttttttttctcttcttttcacagctatttgtaaggcctcctcagacagccattttgcttttttgcatttctttttctttttcttactgaattattccttggctactcagaaaaatgcacttcccccatcttgtcaggtactacttgggtccctctcaggctttttcttgagtaccatcaccttctgatgtgaatactttatgtttatttctgtgttttgtttttctgtctcatctgctggcatataaactccatgaaggtggaagtgggtgtgttttgttcactgctgtatcttcagcacttaagtcaatgcctggaaatagcctaggaagtcaatcagttgttcaatatcaaatttattttttattgtacagtatttgtaaagtttgcattattttaaaaaacagagtagagcatgatcaaggaggaataaaaaaattatggattaattacctcctaaactattgaattttaataatttttattgaggttttaaactctttcatggaatatttagctaaaaagcagatccactaaaaataggtgcaattgctcagttgtaagaatatgagttcacaccttaggcaactcttaggttatgacatcagtttatttgagtgcaggctcagacaaaacatcttctgaagtatcaccgttggtagagtctgtttggatatttaatcaaaacacaatgtcagtaaatacagccctagtctagagtttatagtcttcggtgagtagcttacaagatggtcaccatttgtttttctgtttccttaagcagctatcttgatatccaaaatgtcctgtttataaactgtcatcccgggggccagggagcaaagtgagccctgtgatggatcaccctcagcaggctgactccgcctgtcgttcttgctgctctaattaaaagacggtgaagtcaggggtctaaggcagggatgacaatagggcagcagtccccaaaatagcagccaaggaaaatggatgcctttgagtgattgcatgatgtctgaattaatggccaggaaatgagcgattattgcatgcttaaagctgggctgttttataaagcttgtggtgtgctcaacgccttgtacttgaacttggggaaacgtaagagaggaatttgtttggttattgtttggctggagataatgcatatccaagcagtgcttaaactaaggagaaaaacagttactgttgttttagtattgacgtttctaaaataagcatgatctgatgaaactcattttgtagatgcatgtagtagctagccagttgttgacttagagagaccacatttattgccactgcctttgttcctgacttaagataatatttaaatagatgttttactgtggaagcaaagcttctaagatcacctttctttttttaaaaaatattttctcatagcacttctgtttggcaagtcagtgataagcatccttatttctctgtggctgattagttcagtaggttaagacatcacacaaaagaggccaaggtccggtgtttgattcctctgtgagggtgcgctcccctaggctgcactcctaaccccagacgccatcttgtaatggtgtccattcatcatgggcggaaacaggagagggtgagggtggatcacagcaaatccatcaccactgctggaaacccaactgatcatgctggcctcacagattgggggctgggaggggtcagggcagttgttttatgcaaacaacaatgaagcatgccaatgaggaaattgaggtacggctacgttatattgctacatttttaaaaattaatcactttaataaacttcaaatccacaatattttttgctactcttcagtcagtt

SEQ ID NO: 52003 - DNA, 1326 bp, Bovine  19866880674590
  misc_feature (1)..(1): n is a, c, g, or t
ntgaactcatttcatttctcctgcagtcttcccttcccactccactgttcattttggtggataactgactatctgcttaggctgtcaaaatcaaaacctagggattagcatccacaactcctctttcactaatccaattgatcaccaagtcctctgaattcttcctcctaaatgcctctcctcttcatccttattaagtttctccctctctaggctggattatggcagcagcctccttctttgttcttcccacttcctctctctcctttctcccatcagacacagtaccccctagagtcagctttccaaatatagataacaaatgtccgcatgtcccagcttaagacctttagtggctctcccttgcctacatgttaagtccagatgcccttccatggcccttacacagcctctctgtccagccagatgcctcactccgagctcctctccttgttataggtccataccttgctctttcttccctccctgctttagtatgtgttgctctctccacctggtagatcactccttcttgggcctaaaaaattcctatacttcaggaacccaaattcacctcttctgagaagccttttttgacactatgatcctttattccaggaacattttggccacacctctgttatagcatctgtcatactaatcttaggattctttttctaccccagcagactgaagggcatacaccattagtgactcaatttttatatcccagagctcagcacagtacacgtaggaactgttcagtaggcactgctgaagagagaagactctgaaccaagaacaagaggttcagtattttaactgctggaggagttcaggacactgtggaggccttaaggcttcagcttacatccatctgaggaaaatgatagtagaacatttctccagaaacaagctatttccacccaagaggagagagagagaagaggactgaggggagagggcaagagctgggactttctgtcctccaggggctctttactgtgggctgagacaacacgctaacttgagaaacttcccatctcatatcactgagaacagaaattaaaaagagagggtagcccagaactctcagaatttatgaccgaaaggacagcgggtgccactcaagaggggtataagagtgcttccccaccccctcacccaggccttcctgctgtgaacagctctgcctgaagcctgcccctcgcccccagctgtagtctgctccttcacggtgtttctaaaatgaacccccaacagctaacgtacaactactccaagccttccctcatatcacaaaaaagagaagaggcatatcattgt

SEQ ID NO: 52004 - DNA, 868 bp, Bovine  19866880680291
  misc_feature (1)..(1): n is a, c, g, or t
ntatgtttgaaattgggaatacaaacaactctataacatctatgtgcaaagtcgtggctccatggattatctaagacaaatttttaattcaaaactgacttcctctaccaaccactattactgatttgtgctcaggacagccaaactaattttaacattttccttttaaaatatatttaggaaagataaatccactaccagaaatatcctgtaaagttttacaaaaccaaacagcaaagctttctgaattatctgctgttctagattctctgttcagaattttaatacgcttggtcagaagtcattgctaaactttcagagtaaaaagcaagtataatgtaattttgagaataagtcatacattataaaagaacagagctaaaatatgtctaagcatttaaagtttggatttttttccccacgaatctgcattttcattctaatccacagtcaagagttaactaactatatttaaatttttgatagcactttttcttaatgatctttgaaaatttcacggacatgacctggtgccaaatatagtgcatctcagatgcagagcacttggggtgatttgccataagcatagtatagggagagctgtggtgctgggtgtcacaagtccaagaaggcaccccaccaaacctggtgcccattcctctaccccacgtggccctagccatcagctgtgtcatccaatttcttaggtgttcaactgcaaagtgaacaccataaaatggtagatggtttctcaaaatcattatccaagttccaaaatgcctgatccatggctctgatttaatatacagcatcatttagaaaagcttcttcaagcgaatccattcaaggcaggaacaaaaaatccaga

SEQ ID NO: 52005 - DNA, 822 bp, Bovine  19866880716519
  misc_feature (1)..(1): n is a, c, g, or t
naagtcctggtacaacttacttattcagcttttagaatctttagaatgatgaaatagtaaagtccaatgtctgaaaatgcaaacacccccccagccgtagggagttaagaatctctctgagctggatcacacagccacttccgctgtctggctcgatgtgagactgggtgtttccatctcacctccaacaggtcacaataggtacaaagtcttctttcccctagtccaagttcactacttgacttttgttaaatgtttcacaacagtggagtttgcatgtctggagttctttttattggattttgatgtctgattctgtctccataggcattgaaaccactcacacaaagattcagtttgaaacttgttttaaggaacccccttacctccttacatctggatatgcaggaccaccagcaatggtactgttctcctgtgttaccccagtgtaatgagtttataatcctgaatctttagatctactacaagcttaactgaaagaagcatttcaaccctaagagctatcatccagtgaattgaaggggaaataagaaaataacattgatgtgtgtctagggtccacaaatacagcagatgaactaatatattggctcaaaatttatttttaaaaaggtcttataatacctttttgttgagtaatgaaagatggttgatagatacctatgactagtgctaccatttttagcaaactatccccttttctaaataagggtccatatcaccagtggccagtctaattataggagaaacagaagagacagagttctgggaaagcatcgaaggtaattactattatcaaat

SEQ ID NO: 52006 - DNA, 825 bp, Bovine  19866880729714
  misc_feature (1)..(1): n is a, c, g, or t
ncaggaggtgagggttctattcctggtcagggaactaagagcctacctgtcacacgatgcaaaaaaaaaaaaaaaaaaagcaaaaaactacacagaggatctggaacacctaagtatgtcatcatgtgaagaatataaagtaaatatgtaaagtaatacagccatacttaaatagcagtaataaactgttaggcttagcaggaaatggaaaatagctaacggaataatgcagagtttgtttatttgtggagtggacggccatcatccatcatgttcccaggtcccctaccaatggcagcagctaataggcttgcttggggtgatgaggtgagcccaggaaaccactctttctgaattctaagggaagtgcagttgtcagccacacaagggaactttgtagcaagaacctgtgatgcggtagaatacggtggtggttagggtcatggcatttggaggtggtcagtgttatatctgtgaatatggatttttggagcaggagagggcacctgacccaaagcagagattagtccaaaagctagcacccaatctattgtatatgtagccttgaaagtttatctagcctggctaaatctcaattttctctctcataaaatgaaaaaataatacctaactcaaaaagctactgcaagtaccacatgagatctgggaaagtgatatgcctcagacttagaacacactcaacaatccttagtcaccgttaacctttagccaaagcagtggccacagagcccagaggccaagattccatatctttaaggccaaactaggagggcaagttttcccaggcttctcttcaccctcaga

SEQ ID NO: 52007 - DNA, 742 bp, Bovine  19866880741333
  misc_feature (1)..(1): n is a, c, g, or t
nctccctgcattgttctgggagctagctccacgtactcacgctttttatcctcttactgttggcttaatttttttttcctctgtgaggttaacatgctatttaagcttctccctcaaattcaagagaacccccaagttacccaaaagaatttggggggcacctccatagtcctcctcactaacctggtttttgactgcaatagtggcagagaaaaggtttagggcttctgggtccttcttaaagaaactgaaatgacagctaaataatattttggttcctgcatcccatccatcattttgtgtattgtgtcctggatgtgggagcacaggacagttcatcatgggtctttccccaggaccaaagcctgagaaagcggccccgtgagtgagtggctcctagctcctggaaaactgctatagggctaggccagactgggcctctgtgggaaagggacccagaaagcaaggagcactcccttaaccttagttgggacaggtctcagccagagagggacagactcccagggtcctggccatcaaaggagagcagtaaacttgtttggtcaatcgctgatgcttcgctccatcagaagttaaagtcactggacatttttcttctcttgctgccttggagctgcacgcctgccagcttagtcagctgaatccaattactgcgaacagcatttcatttggccccggtggagcagtcagttataacttccccgaaaatttcaataatctg

SEQ ID NO: 52008 - DNA, 1354 bp, Bovine  19866880831986
  misc_feature (1)..(1): n is a, c, g, or t
ntaagaatgacgaaagcagtatttaaaccgaaaaaaaaagtgatttttataatatgctgctttaaatgcttgtgttacaaaattaatgataaaattaaatattataaacatacattacctattttgttttcatgtataaaattgtataatttaggtgaacaatgtttaaactatcttcttaatggagagatgaaatttttcttgttttttattgccatatatttgtacatggcaattttcaaccaaaaatcaatagccatctaaattaatatttaatgaagagaaaaacaaagatagctttgaacatgaagtgacagagaaattttgtcattaccaaccactaaggattatcaaaggatttactacagcaaattgagaactgtactaaggaaggcaatgacatgggaaaaatttaagtggtgaaaaaagagagacagtaccacatatacaagatgattgctatgttattttcaactgcaaataaaataggaagtaatcaacatgccccccaaaataaggaaatcggctaagttattgtacttccacttaagagaatatcatgcagccattaaaaattgtaagtaccaagattttttacagctacatagaaatacttatgttttatgtttaataaaaataaaatgcagaattttattcaaattatgcttatcagggcttccctggtagctcagacggtaaagtgtctgccgtaatgtgggagaccctggggtttgatcccgtggggtcagaaagatcccctggagaaaggaaatggcaacccactccagtactcttgcctgggaaatccatgcacagaggagcctggtaggctacagtccacggggttgcaaaagagacatgactgatcaactaaacaacagaaataggtttgatgagcatgctaaacatttattcttttatatattttaactattttccctagtggctcagatggtaaagagtctgcctgcaatgcaggagacccagatttgattcctgggtcgggtaaaatcctctgaagaaggaaatagcaacccactccagtattcttgcctggaaaattccatggacagaggaacctcatgggccacagtccctgggatcacaaagagttggacacgactgagcgactaacacacttgtatcaaactaaagagctgggcattcaaccacaatatttgatattttcattgattttcacttaattgtccataactttatatcagttgtctgtattaaaaagcaccatcaggaacagtccaataaaattaccactatacctaccataggcatatttctattacattattcaatactttatgagaagtgatgagagaaaaacctcagatttcta

SEQ ID NO: 52009 - DNA, 1569 bp, Bovine  19866880883588
  misc_feature (1)..(1): n is a, c, g, or t
ntttatataaaatattgatattagctatctgggaatgaatgcgaatcaccaccagtgactgtgtattgcatacttattgtgtagaggatgaccatgtgcccagcaagcaggaaatagaaatgagtgtgatgtccttacctcaaggaaatcacaatctagtgggaataaagtttaaacacagaaacaggcgagaccctggcagcatagcataatggttgagacggcgggctctagccagttgtttaacaattggtgatgtggaacaaaatgagggctgtgctagtttgtagactgtgcctgtttctgcagtgtaggtacatgcactgtagcttctttttaagctgtcaatatgacatctctgaaaggcagagttggaaagagaggctaacagtaggctctctctagctggtgtgggtacaagcccgcaccagcacagcaccgactcaagagaggatctgcctgggcttgagtctcagctctgccgcacgctagctgtggttgtggtttagaaactaactcccttaggcttcagcatcttcatctggaaagtgggattatggtagcacttgttgcagttacttgaacgttccttaaggtgagccacgtgaagaattaagacagtgtctggtgcacgaccccaagaggtgtgacctgcaattcctatgattgatcaaattcaaagaagatggagagatggcttccaggtgaaggattccaggatttaaggacgtaaatttttttttttcctggtgggtgtggtggggattgtggaagaggacagcatggcaaaaccaggtaggtaagaagagaccagttatatgctgaaaattccatggagttctgtttagttggaatattgtgtttacctataaaggggcaggaagtttccaagcttaggggttaggctgggctgtgttgtgaggctcttgaatgccaggagatcagacttccctttgggacagtggaaacttaaatgcagtgactatttagatgcagaagatgacatgaggccaggcattcctgagagaactactcaaaaccaagtgacatgaatgtctgcatgaagtgaggcgattgctccaagtcaccgcttgggaatacatgcttattctatcattagaaacaagtattgactggctctagtcaagtctgcacacaacacgaagcccagctctcggtatttcttgactggtactccatctggaaacacagttgagccaatgaaagttttcagatgggtatatcttctataatcctgagctcaccccaatccaatttcatatctggtaacatatctggaggacgttacagagatatatgatttcaccgagtggggtctgcagttcacagaatcactaatacaaaataaatggttgccctttagaaatgacttgcaaatagaacttcctcaaatattatagcaggaagaacagtattactttctacagagccgattgagggaaaaaaattgctcggttggtattgttttccagaatgtcacctctttagaaaacactttattttaaaatggttcatttgctctggatctaatttctattatttcgggtg

SEQ ID NO: 52010 - DNA, 1665 bp, Bovine  19866880951900
  misc_feature (1)..(1): n is a, c, g, or t
naaatatttgagtagcatacccaaatagatttggaaatctatggctggtattcctaacctagtgaatcatgcacattataaaacacactaaaaaagaaaacagttgaaaaaagttgaaacctaaattccaatatttcttttccatacttgaaaggattatctagtacaaaacccctgtatatacacctaaccccactttagaaaacacggttcaaattaaataactacttatttgaagtttcatcagggaactcagccattcacatatccttgatcaaagacaagtcctcctctattctactgaaatcatctctttgaccacaaaaaaagcttggaaagaacacactcaaattaatgtggggtgggggggatacctgactacccaaccatctaataataggacccttgcattctaccagagtatttaaaatttcccccatacactttatactttctcacctcagagactttgcttaaactgttaccctctacccagaatatttcttcccactgcatgcccaaatcctacacctttttcaagaccaagcttaaaatgctacctccatcaagaaggcttctgtaactaaacaaatctaatttctcctttatctatactgctcatagcagtttgcacttgtcttatatcatatattgctttctactctattctattattatgtcaatatcttatcttcctttctaggcagtaagttcctagaatgtgaaaattcccatgatccttagagtatttattaaagactcagcttctcaactgccccaaactgaatacaatattaataacaatatatacaatatatggaaaaacatgaaattcaaattaagcaatatttaaattattttggtctaagtatcatttaaaaactaatctttatcacatgagttccaaagtaaaattacccacctttcagaaattaattcttttacaatcagaaactactatctcattttcatatcaaagaaataacttacactaagacattcttagtgacctatattaattcatttttaaacattacaatgatgtcccattccctagcaaaagatccatgaaaatgtttatcatttttataaagaagaaatatactattttataggcataaatttaaaacatctagaaataaagcaaatattggagcacctcagcacttcctattccaataacactattagaagtcttttaacccctttgtcctttactgtctttccaattttatctaggtaaaattatcttgagaattttacactaatgtctctttcactaggagcaaagctgattcctcttaaagttgcaacctttagtgagatacagggcttttttatggaaataaatttcaaagcttttcatagatagtttctatctcctataagtatttaggttggaggagaagcaagtttagaaagagagagaatacacactcttggacttgtgaaaaccttaacttaaaataaataacgtctaaacaaacaaatttatgctagaaatgcatacacggtaaaacaattctcatagccccccaaaatacacatttgattctcattctctttaaggtacctactacttttaagttttatcaacccccgggtggctcagaggttaaagcatctgcctggaatgatggagacccaggttcgatccctgagtca

SEQ ID NO: 52011 - DNA, 1084 bp, Bovine  19866880983650
  misc_feature (1)..(1): n is a, c, g, or t
ntttaatagtataagagcatatcatttgcatacaacatatgacaagaaaaagttcatggatactgcccttccttaaaagaagcctttctattgtaaaaagttcctctcctttgccgatgcttgttcttctggggaccccaatgacattattaatacaaagattccccccaggctagagactgactggagccaacctaaaggcatgaaggcatacatgtagaaacttgtgcattccttgtatgcctgttgactgtattttagtgtatacacactgaaggactacttctgttaattaaccagcttttaaattattaaaataaaatcaagtttatgacaaaaactcaaataacatagaatctggggtaaaggtaaaaagtaaaattctttctctcaacatccaatctcactcccagaggtgtggaaccacataattacatattcttgaatgtccttccagaaatattcaatccatagtcaagtgtgtgtgtgtttagaaaagttatttttaaaggatatttgatgaagcaaaagaataatctgacttttggttaattttattataaaaattattagtgagtatataatacatctttattttgcagcaacactttaatattcataaagctgtatatcatacagcttaatcattgccctcttgtcacaaatgatttcccatatcattctaatatagttatttatattttatagatcatttgaaaataaagctgaattcttcatcctaatataaaacaacatacattaaaatgaaaacaaattaatggcttatttatcattgtttttttaaacccttcaagttgaaaatgttagatggattttcctttgaggctattatggtgctgactctcatcaataaagttacacaaaattttagtgcatgaaaagaacaagattgcttattcttaaatcaccttgctgaattagaagtaaaaatgattgttatagagagatgcaatgaatttttcaaaatatattaaaattgtgagagtatctctttaatactaccactttataatttaaaacattagttcctaaaagttgtaagatttgcagcaataaacaacat

SEQ ID NO: 52012 - DNA, 1602 bp, Bovine  19866881128974
  misc_feature (1)..(1): n is a, c, g, or t
nagagggagtgacttgcctgaaacttgtgcatagctactacctgaggccaagaatctaaataaatcttttgattcctagcctggagcaatttccattaccttctgtgtaggatcagtgcaagttgcctcaatgttgaaatttctgaagtgcactcaagaccttttataatctagtctaaatttacatttattacttcatctttcatgactatcccatagaaatcttctgatccaaccacatttatttacctattgtccgtgaacttgctgggtacttttgactaatactgtgaccttctaatgagagtttccactcattcaaagtctagcataatttagttgactttatccatgaatctttctacaaccaacccattaataacttttcacgtttaagctgtgtcatttttaaatacttaactatatataaccatgtcccttcttaaattgttgcttttttgtactctcatttaacttcacacatctttgtgtgatctacccatatagattacaatcttcttgatagcagaagctatgtctacctttgtatctccttaagaacttaataaatgcaatattaaaatgttcaaatatttttaactgaattcattttgattgagttttgttagtagatggtttttaaatttggaatttccattctggcattaaaataggtctccatattcagatatcctaacaaccctctcttaaatgctgtcgacttgacatattcttttacattttattttaaatactatatatattattaatcatcattaaatggaggagtttaaaataaagtaacttatttcttggtctcttttagaaaccaaattttcttgtgacattatgttctaattaggttttacacagagatagtgttcactgactcctgttagaaaaccacttgtaacaacttctataggggaaatgtgtcactaatcaatagtaattattaaatatattataaagttttgatggtacaccaaatgaagaggacataagcctgcatttttatctctttgcatatttttaatcattttaggatcatttttaacacaagcataaagttcagcatttcaatttactattcaggataattttcttctcctattgtttagaaatacaaataacaaaattttcaaggctttctctacttattaaaatgcatcttctgaaaagttaatcatatttatcctgcttatttgcaccgattcagtccttagcaccttttcaaagctctgccatcaattgtcaacctaaaataacacttattttacataacattctctcatctaccttcttgtatatagggagtatagggatatgtttataataactataacatccttgtgcactaatactgtcatctgtgtcatttctgggtctatttctactgactaatatttctcacatttctttgcatgcctggtaattttttttttttcttgcatgcctgacattgtgaattttacattattgggtggtggagatatttatgttcctttaatattttaaggttttgttctgggatgcagttatttgaaattcagttccttttgaggctgtttgaagttatattaggcaggtccacttccagca

SEQ ID NO: 52013 - DNA, 1013 bp, Bovine  19866881131020
  misc_feature (1)..(1): n is a, c, g, or t
ncccgcgcccggggagtaaggggagtatataaagtggcctctgcgggcctcctggagcagctctgttcggcggccggacgcgggacgcgatgggcgcagcctggccagggactggagacctgccgcccgccacagccttggaggccaggccggaggctcgccggacgcacggaggccggccccgcgcgcgttcgcccgccgccctcagtggccgcgcaaaggctgagggggctggggagggaggcggctgcagtcgcccggtggtgactagagctgcgatcgtggtaaaatcaaggacgggtcggattagtctgtgcaacttgaaagagaaggggtaggcgttggggtgggtgcaggttgcttctattcctttcattttattattattatttcctctgaggttcgaagtggtctgggcttctctgctttaccagaatcagggccttcgaaacccacagatctctttttggcagacaccaatcttgctgggcatccccattaattcactggaaccgggcatcgattcttccttccctgctggctttactactttgggattggaaacgactatttttccgatttgctaagaaggggctctatttaccgtagagctggagcagctttctgcccacgttctcccgatctctcagcctgagctcttctgccttatgggaagacctggacgcgccttctaaatcactcttatttagcccagataactcaatgtaatacaccctgcatttaaggcactgggctcaccctattaaggcaccataaatttgaagaccgatgatcggttatcatgtaaccggcggcagttcacactgaggtgatccacttcaaagccgccctttgttttatgttttgatgtatgaatcctgagatggctaatttgagttgcaggacaaatggaaatgtagtggaaattacttttaaaaatcacaccactcaccacaatttgtgtgtgtgtgtgttctcaaaatttgtctctaactctttgtaggctcttcgag

SEQ ID NO: 52014 - DNA, 1418 bp, Bovine  19866881206419
  misc_feature (1)..(1): n is a, c, g, or t
naccaaattagcatctttttcctggtctgggtataagagtttgggtgtgtgtaactgctgaatcttttatcttaaagtgacaaggattagccactaggtgctccttttaatattcatcaatgtctcacacaggcagaatattgtttaatgttcaggacaatataattgtgccttttcttgaattttggcttttgattaagtggcgctggtattcaagcaatagaaacaatgatccatgaaaaaaacatatatataagataggtatcgattccatttgagagtaatagcaacccacaacactgctgtgaaattatcaaatttgggttggaaagccttaaagaatgaaggctggggaatttattgtgctatcacatattgcatctttgcaatagcagagaaaaagcatgtagcaattgcagctgaaaacatcgatgtaaatgttattatgccttcccagctctcagtcatattggctgctgacatctctcagtgccggttgattgtcagtggcaaagcaggtctgctgttgattggctggccagtgtcacatgataccacagcctgcacccatgtaaatcacccagtgaactgttgtgtgaaattgttcgtacaccctttggtgaacttgcaatgtgacagctcacatcagaaatagatcagatgtcttcagaccacatttgctctttggacaatccatccaggaacctgaggttcctgcagacccaagactcacattcttattgtctctaattcacatgccgggtcgtataggctttgctccctcacgggcacatcgcttgcatctttatttgctgagtctccctttacctttgtgttatgtctcctcacgaaccttcatgatgaacattctgcagtggctcagacagcctttcgcagttgatgtgatttccccagatctgataaagagcttagcaacgcgcttcggtctttgtgtttggataatttatgtggtgacgatgtcgcaaaatcagaattagacggacgttgagacatcttcttacccaggagaaaaagatactatggactgcatcctcaaatctcagtgtggacacattttgcttcacagatctcttattttctgaatacataataacattttcatatgctgatagtgagggtgaaaaatataacctttctggaggacaatttggcactagcttagaagaaaaatttgtaatgtgtacaaaaatgcagttataacaatgctgaaacagagttgtttataatagcaaagtagctatttataattatatgtatttataatagttatagatatttatgtattttaatacaattataacattaaaataaatgagaaaagaatagttagaccaaaaaaaaaaaaaaaaacccccaagatggtctgttcaaacatgaaatactctagttattggaaa

SEQ ID NO: 52015 - DNA, 1105 bp, Bovine  19866881350004
  misc_feature (1)..(1): n is a, c, g, or t
nttctagcatattttctttctcatagttgaattcatcatctatacacaacttcatatcctgtctttttatttaacattacatcatatccataagttttaatggtagcataatatagtattacactgatattgcatcattccgtattccatagctaactattctactaatgtagatgtagatgctgccagtttttctctattacaaaaagcaccacaataaacctccttatacataaatcatgcttagcaagaaaatcaattaggagacaaataattgtaataaaggtaatggggattcttaagacttttgttacattttgccaaatttctttccaggagggttgtatcaatttacatcaatagtgattgagaatgtttgcctttcaacctttatcatagctattgttacagttaatctttgctaatagataggtggaaaattagtcatactgtatcattcctgcttgaatttacagatggaagttgcttttttgcatgttttttaatgtaatattcttcttcagaagttatgctaattcacctgaattattacagttttagacatgtcatgaagccatcataagcccttgagctttctgttgcctcctaaaataaagtgcacctgccatctttatttcatttattcaccccatctagtcatgcaatccttagacaatctttatagaaaacactttgacaaaagtatcaagtctttaaaatatttatatcatttaaccccacagattttctttcagtaaaatgccttctgaggaccagtcacatttgatttgttttctaaagaaatgaggaaagtaatccccaaggaaatagcccccatcttttgcttatctttctctcacttcatttcaaaaaaggaaaacgtattaccaagaacagctgtcttgaaaatgctggaagctaagcaggtggtaccacctgtagctatgaaatcacaagctctgtacaaggctatccagttgagctgatatccagcctttctcaattttgttgggaacagtgtcaagcctggacaaattccagttcagaattctccagatagacagatagatgatagataaatgatagatagccactggaatagcaa

SEQ ID NO: 52016 - DNA, 920 bp, Bovine  19866881384496
  misc_feature (1)..(1): n is a, c, g, or t
ntaattatatggagaaacagaagagacagagttctgggaaagcatctgaaggtgaattactacttactcaaatggcctacaacactgtcgcgtgagggcaattagaaaataacaggttgagcatgggagtacctccttttgaaagtgttgtcttttccctattatataagaaattcacgtaattctcttaagaaattacttggctgtagtagggtgatcctgatgttggctggtaacctttattaagttgtaagggtagtttatacagttgttgcacttacctagcctatgagaaattttgcccagaagaaacttctcttgttcttctatattatccaagaaaaagtctttccagagttttcagacttaggtgtccctgtatagtgaatcagcatctgttttttgttttgttttgtttttttacattttaaaaaataattaatttattttttaattgaaggataattgctttacagaattttgttgtgttctgtcaaacctcaacatgaatcagccataggtatacatatatcccctcccttttgaacttccctcctatctcccttcccatcccgcccctctaggttgatacagagcccatgtttgagtttcctgagccatacagtaaattcctgttggctagatagcatctgtttttgattgatttgtgatgtttcctctgtcgtttgttgaaggtgtcagcaagcagtgaaatgaccaaaaaacaagggactacatttgactcagactaatgaagatcttttccttgttccagaccttcagcgtttgggatttgggctgtgaaacagttgtgtttatgattctagttagttgagctcttacttagaacatattcatttattacaaactattgaaatctaagtatgtttttgaagcacctacataccataatcattaag

SEQ ID NO: 52017 - DNA, 1881 bp, Bovine  19866881426408
  misc_feature (1)..(1): n is a, c, g, or t
ncaggacagttattcttagagtggctgaccttcctattgtggatttcttttatcttgactaacgtcagctcttctgtttttttcctcatttatttattttccctctaactggtggtgcttctgagaagcccatctgctcttagccctgcagaccgtgctgtcagatgttctcaagtgccctgggcagctgtggtcccccctcacacatactaagaccagaattcaagactccagtgagatgagaaaaatctgggctgtgttccgtattccattctatcccatgtcaccttttcctctcaactggacttttttgagtgctcacagagttgaatgggcacagaagccaggttctctgaatgctatttatacacttctctgatgagaatggtttggctttattttccattgtgcttcatccacagagatttggagttgtcttcttcttagttcagacagactttaacctccacctttgacttattttctgtttacaagtggcctccagccctggcatcacctctcctttccttggccaccagtgttatctattccatgtatgtctggtcaggaaaacatgattttcagtgtctaaagctccagtccccagccctcctttcctgactccacactgtagcttctgaccctctgggtggctgggaaggcagcttctggatttatcctgagcagttcccacacacactctattccttctgatagaaaaaaatagctcattagagatcccaggaattaggcagagaggagcttcctagctcaggatgaaggaggctgcacgtgtgtgcgtgcatactcagttgtgtccaagtctttatgaccccatggactggggtcatagtctgccagggctcctctgtccatggaattttccaggtgagaatactggagtacaggttgccatttcctactcgaggttatcttcttgacccagggatcaaaaccccatctctcctgtgtcttctgccttagcaggcagactctttaccaccatgctacctgggaagctcaaaggaggtcgcatagcatcataattaacagcccagattctggaggcagactgcttggatcaaatctgtctctttgtagctgtgtgactttagacaaataatttaatttacctggcctccatcttttaatgcatataacagtatctgtctcacagattaatagtattcgtaaagcatttagacctcagttcagtgcagttcagttgctcagtcgagtctgagcagcacgccagacttccctgtctatcacaaactcctggagcttgctcaaactcatgtccatcgagttggtgatgctatccagccatctcatcctctgtcatcctcttctcctcctgccttcaatctttcccagcatcagggtcttttcaaatggagtcagttcttcacatcagggggccaaagtattggagtttcagcttcaacattagtccttccaatgaatgttcaggactgatttcctttagggttgactggttggatctcttttgcagtccaagggactctcaggagtcttctccaacaccacagttcaaaagcatcaattcttcatcactcagctttctttatgatccaactctcacatccatacatgactagtggaaaaaccacagctttgactagatggacccttgtaggcagagcagacctggcaaagagtaaatgctggcggaagtgttactcaaatcatgaggatttttttcctcctcagactttctgctaactaccttgcctataactttgttcttctgggtggcaggcagacaagtctgtgtgtttggagaccaggaagcagatactacctgtctgcaggcccatttcctggcaaaggtgtggctgcagggttagtgcatcttct

SEQ ID NO: 52018 - DNA, 886 bp, Bovine  19866881654399
  misc_feature (1)..(1): n is a, c, g, or t
ngaacaaaccctctctcttatgtctcctgcattggcaggagcaccaatatcactccctgggaagcttggactaggggtagcgctcaccaaaaatacttaagaatcagttttgaaaataattttctttttttttttaatgcaaggagtggtgaccaaaagtgaacatagatatgagactaaaatgacaacaacagaaaagagcagctcaattagccaagtccatcagaaattataaatatgccctttcaatcacatggatagagcatgattgggatgagccattcctttaagctaccttcaatgccaggaccaacgctgcagacagaacgaacagatgtctttcacttagtgactggaggcatgtactagaccaaaatattcacaaaagtctcagaggttagaccatattaatgaccctctctttgctttgaactgagtgcattgtgaaaagatcaaggctgtttgtgcagtgtgatatatatagttctgctggaaccactttcacagtgtctcttcagcggccgtcttgggagctgaatcagtgcaccattaaagatggcagcaccaactcctgctgccagctccagctcagacagtgggaaaacaacgctcccaagctaaaactgatcaccttcattgatttttctttagttctgctctttgtaagaaacaattaatgtatagccaaactcactatccctatattttatatttctgggactgttagtgagatatctcaacagataatataaatttgatttgtgtgtgtgtgtgtgtgtgtgtgtcttttttaaagtagccaaataagcaagtgcatgggaagtaattaaaatagtgtcatttcaaatcttgttgaaggttataatgaggactgttatttcagagt

SEQ ID NO: 52019 - DNA, 1181 bp, Bovine  19866880438873
  misc_feature (1)..(1): n is a, c, g, or t
nagacatgtatactggtattattagactctaggtcctgttagttaatgttgatgcttttgtcttattaggtaaccagccttcagatataatttctttttcaacttacgtgagtagtggttctaatgtcagttcaattttcagagacctttaggtgtatcccatttgtctgttactccagggttagtctagtgcttggacagtggtttatattatagttcagttctcaaagccttttctgtgctgctttgggtctgctttgtgtatgcatagctcaagggtggcccagggcttgtgccaattcatgtacagaatcaggtgattctcttctttagctcatcccctccagtatttctcccatactcattggccctcacagtccactttttcctttcctctggaaaaaaagatgagatttctttaggagttttagcttcctgcactgctaatgtaacaattcaaaaccaaatggaaaagagaagggggggaaaaaaaaacaggaaacagccttgagtgggttgtttctttgactcctctccacagtctacttgcttttgtttactttttagagacctcggttgctttttttgtattttgtctggagtttttaattctttttttttttttttttaagttttttttttagagtttttaattctaatcggtgagaaagagagaagctaatatgggcttattgcatcttggccagcatttgcagtttattcaatttctttacccttttgataatacttaatactttggcaactgcacagaagtttagtcttcaaacttctaccagttttactaaaatgtcatgtttaatgcaacttcattcatctgattcagggaaaatgttggggtagggaatccgatggggattctatgtagcaagagagacaagaaaatagatgtgtcaagatgttaacaattagttaatctaagtaaagaatatatgggtgctcactctttcaactattttgtgagtttaaaaagtcataataaaaagttgatgggaaactctgatcttaatatattctataatcttaatctaagacactgatctaatcccgaggtcaacctgctggtgctcttcagagtatttttgattggtcgaatttggacatacaaatttggaccttctcgatttcaaggggctttcttgtttctagagaataaacacttt

SEQ ID NO: 52020 - DNA, 2094 bp, Bovine  19866880460842
  misc_feature (1)..(1): n is a, c, g, or t
ncataagcatttacattttatctctagctcctgttagagggattcctgacttacacagtgggggagttttatggttgtaattcatcatcgttcccacccaccttcctgagggtcctttccaggcactctaaaatcaccccaggcaagaggttgtcttctcttcctggttataaggagaccccagggtcctctgacaccgcccacactgtcctcaacccacctgcctcgttctcctcctccgaggacttggagacatcagtatttattaaagtgaattgtggtgtgaaagagatattttggcagtgttggcatctttcttaaacccaacgaggagctcaggcttgagagacaagcaccagatgtctgaacatagataactgtcactgtcagataactgtttctgaaaacccttccctttaatttatgcatgctctatgaataaatacgtttcaagtgtgcccgaagccgtttttaagtgagtaccagcgttctcactgtatggtatgtctgccgtcaatatgatgtgctgtcaagatacttgccttaatgaacaccgattttaaggtttcaaacattctctattttcctgacatgtatttcaactttccaggatctgcttctttccaggtaaaaaggataaaatataaaaacaagtatctgcctctaaatcagagcctttggtatcagaatttagagttaggagttttgaggcatatgtacacagatcaaaaaaaaaaaaaaaaaatgctgatttagaaccaagtgagtgttgtcagtgtcttcaaatgagtcaaaatgtctgaagtattgggatccaaaatgactgaaataatcctctgcctttgactttaggcatcaaagctgtgggtactagtaaatgtttcagtttccaaaaatctggtcccacactcttgcttgcccttgtagttcacattcgtcagagttgaataaatggcacatgcctgcgtttccatagcagacccccaccaccttggttttgctgctgctgctgctgctaagtcgcttcagtcgtgtctgactctgtgcgaccccatagacggcagcccaccaggctcccccatccctgggattctccaggcaagaacactggagtggggtgccattgccttctccgaccttggctttaagatggctttaatgctgtttgaagtgtcataggcagtggtggtgagacctgggtgctgatgcatgctgtgagtcaggaattctgatgcacacatccatcactatgattagtctcttttcctgtcacttcctgttcctggtagatcaatgggctaaaaacacctcccctcatcagtaattgtttacaaaaccatctgcatgtacagatcatgctgttgaggtttacaagtgcataccccaaatgaaaacatttgtcttgatgccacgttatatgtagcaatcccaccagaatccatgctccgcagattcattaaggagggcactggtgctgttagtatgtggatttcccattgaccaatgggggctctctttccactgaaatatgatactctcttcagtgagtcctgatgcacaggattcaagttcacatttgcaagttctaacagaataatcaagcttctggaaagagttgtttatacctgttgtctccatttcccaacttactatttatttccaacccctagcccccatcactccatagaaacatcttccgccaaaataaaaaatgacctatgacccactagatccagtgggcatcttcaggctccattttttacttcctaggaacattcaaccctggggaaccacactctctttcctatagcctcctttagctttctggacaacgtcctctctgggtgtctctcctcactgtctgaccctactgctctggctgtcttgtggactcattttccttcagctgttgcatgttgaggctcttcaaggtctttcctggacccctttctttcttcctttctcccccaaccttgcattcatgcttcaagtgctatgtatgtcaatgagctcacacacagatctctaagccctctaaggttagaggtctccccctctaagttgcaaactagttacctgtccagccgctaatta

SEQ ID NO: 52021 - DNA, 808 bp, Bovine  19866880480956
  misc_feature (1)..(1): n is a, c, g, or t
ngggctgggacacatctctacttgcactgtctctgcatgacccacccgacgtgaagactggtcagagaagggaagaaggagtgggaattcttgccggtgctgcctgggccacatccccccagatggggacatatgtgactcagcttccatgcctcccccaaatggggaccaccacattcatgtccccatcccttcttgggaaggtaccttccgtacagaatctgagctgatggccgtcggcatggaggggctccggcccaagccccctccaggtgacccttctgctccctggttccgtgctctggtgggcttctcacttacgatccgcttggcctggaggaggtgaggatgggcagtgtggcacaggcagggaagaagaggaggcttcctggctcataggcttcccctacccaccctgctcacctcagctttgttttccatggtcacagccagatccacccgctcccctaagcagaaggtgccagtgtgggcctctgcctgctcatcctcaagcatctcactggctgttccaggtccacgggcactccttgcccagttccggctgaccacccgcttcccctgcagaatgaggtgccatgccgtgagaccacatgggcagcactgggcagaagttggggggttgggtcctttgggtgcttccccaggctgggttcaagccctggccctccctggaatgcccactgaggagctgcctctgtgaggcgttcacataccagtggcattaggttatccaggcctggggccacccaggggcccaagacgccacagtggcccatctctgagctgg

SEQ ID NO: 52022 - DNA, 1305 bp, Bovine  19866880541063
  misc_feature (1)..(1): n is a, c, g, or t
natctttatatgaccagcctcttgttatccaggttacagcttcataatgtaactgacttagatgatctccccctgatcactggtttagtagctcctgacctcccattccctacccaataacacattttcacatcacctaatttttatttttagcactgattatcttgttaatttctgtgtgtttgtctctgccaaattgaacattagcatcacatgaccaaggactttgtattatgtgccactaaaacctaaataccttgttgtgcttggcatgtaatagatttctatttcttattgactgaataaataatagagaccgagacctcaagttgaggactttgctccatttgtgtcattcttatctgtaatattgactgtcccaaagacaatctttgacaggataaattgctatgaggagtaatgcctcagccaactttactgtttctagctgagctactgaccagtgcagagaagagagcagaaatgcagaaacagattgaagagatggagaagaagctaaaagaaatccaaactactcagcaagaaagagcgaatgaacaggtcattttctcttttcagtacataacaactaatgcttattgaaacaaatttaaaaatatgaaaatatagaaggtaaaagtcctgccagtgcccactcagtttttggtagtttcttagctactagtatcagcaaagttgagcagaaaagtaattttaacaggtgacttcaaatggaatttgtggcatataagtgatataatttattgacatcttagttatactctaaatcactattctgttacttctgactttaattttttattctagttatgttcaattaaaatgagattagctaaagaaatttagtgtgtatttgcttgccactacttagttaagtacagcagtatcagtttatactggtaacataaatttaagaacttctgtgggacagacattctatatggttagtaaatatcttgggaaagtgtatagtaaagctaattttggcactaaaacttgaaaataggtagcattttctagataagagggacatactaattttgtttatttaatgcaaatagcaagaagaaaagatgcctacaaaggagacagctgaactgccaattgcttcagagtctcaggaaatatcaggaatggctctgtccaattttgtttgcccagtaaactcttgtgccaggtaggaccacattggtggaagaaatgatacttataggaaggagggcatttagaaccagcctttgactctctagacttgaagtctccttaacttttatagtattgaga

SEQ ID NO: 52023 - DNA, 1697 bp, Bovine  19866880582921
  misc_feature (1)..(1): n is a, c, g, or t
nctcttgcctggaaaatcccacggacggaggagcctggtacgctccagtccatggggtcgctaagagtcagacacgactgaagcgacttagcagcagcagcagcagaaattttgccttgtccaaaaggatgggaaccaatcaggttatatgaatatttttgtcataatttcctgatttattttcccttttttttttttttttgccattgactactggtgttaactttattcctactgccttttattagtaggatgtctttgataaagtgagtgaccctctgtttcccaaacacttggaggaagccagacactgacaatcatctggtcctggactaaaattgcaaaggattctgcctggttcaggtgccagccctcactcttcctaaagagccatctgatggctttcagatgaatggatatgtttaaaaaggaaaggaaaaaaaaaagatttccttctccttgcatgataaacaaaattatttttcctcagtaacaacaatttaagaagaaaagcagtgaggtctgaaatattctcccaaagagcagctgctcatcgatggttagagaatgcttctgaaccagaaaacagcattactctcattcaggcaggattccaactttgccttttccctttctcctattttcgacctaagtaacaggaatcttagtgtgaataaagatggagttgatttagaggagctgagaaggaactgtagggctgaaaggtggttagcccagggtgaaaactgggggctggggtgaggggaaggcctggatctctggctgctctttcacttcactcttagcagagacaggcttccacagaagggagtccagtggtttgtaaccactggagtccagtggtttcttaattggtttagagctgacaacttaagtgatttgtctaaaaacaaggtgaaactatttaccccccccaaaaaatttggtattagtttccaaagctagctttttaatataaatttaacttaggcaatggatgtatcagtcctaaatttgaaaccaagagtcttgggtgctatctttatccatgctgtggcttactgtgtgatcgttaagttagtcaaatgacctcttagtattctagtcccgtttcagaaatgagactaaccataggaaaaattctattggtcaaaaatgctgatctgtttcctttgaccctgggaactcccaaggaactccagttaagacttcctcaaatcagtaaaatttatgagttgagagagcctttcttatcacccttaactttcttccttcctcttgtccttaatgaaacagaaagagcacatggagcaatatttactgctaaaccttagcggcagagaagggcaattcccagcagggcaaaaaggtcatgactgggtatatccagagaaggttgggttggagccagggagataaggtaagtgactgccactgtctctcctggctccgggcttggcaagatcagtgctggaatggcacaggcttgcgtccagtacctgctccagaaataggctctggatggagcacagcaagtaaacaaacatcctaccagctcttgctgaggtgtgtccctgtcaggcaggcctgcccaccaggactgttgtgggaagaggaaaaatgtcctggagctactccctggccttgcttggaatgagtcctccaaagctaggaacagctccagccacataaagcag

SEQ ID NO: 52024 - DNA, 1611 bp, Bovine  19866880623162
  misc_feature (1)..(1): n is a, c, g, or t
nacttgggattttcagggttaaatcctggccctgcagcgactgctcccagctcctcttgtggagtgagagtgaataacaatagcagtagggaaattaagctgaaaagccggagtggggtcgcagaatgctggcgagggcagagcccagtctgacaccttacttggcatcaccttgctttgttggagtataggtagagagtgaacagaccaccacctggggaagggccggggaggcacccgcccaccccgcccctcagttcttcagtggctatgccatgccagcttcctgcacacagcctactttttcatttaggaggagactcaggggggcccaggtatgtgggaggtggggggtgtctgccatgcacatttagggggtgatgcctggtcatgggcattgtcctggggctctaggtttccagtgattctctcctccatcctgcccctttctggcatcttgcctacctggagggagtcctgataaaaagggctggactaacatggctgagcagctttgtcccctgagtcagttcttccctttggtactttcttttcccagctcttggtggctggtgggcttttaaggttgtaccacaggtctagagtgtggtccgtgggtctcctacctgggaaccctggccccaaccttactgccatccctcccccaggtactgggctgtttggaatctgaactaaggtggggctggctccaggggctgggtgacaggccttcatccttcagggggctttgcagcaatacccaggttatggccatccactgtacttgccaggcaggtgtcctcacagactagacctggcgttctccacagcccagcaggcaggttcctcatctcagcttctcactgtccatctccttatcctccttggacaatctccgaggccccaggaagggggagggattgatagtatctttgagggactagatggactcccaccacccaagctcctatcctgcttcagtgtctcagagtctcttcctgtcctgtgatgaatatccagtgggagaaaaacaggtggaaacagctgcatattttgtccccagccttttctgtcttctgactctgggtttgcatcgcgccataggctccccaggtgcttggttcagaggaaagtggggtagccagtccatgcacagctgctggtagcctgaccccactagacttttgcactctggaagaggggtcctaagaaaatccaggctggaaatgcagtgagggtaggccagagttattgcagcggatgctggaagggcttcagtggggaagaaggcagaccaggacaggcttctctcattgcctgtttctgtcctgcaggttggagatactccatgacacacactcggaggaagtctcttcccatgctgagttcaggccctacaggccgccaggagcccctgcaaatggaaggcagcagtgtggagcagcgggcagagggcgtggagccaggtcctcctgagagctcggagcatcttacagggcgccgcaagaactacccactgcggaagcgcccgttagttcccgagaagcccaagacctgcaaagtgctgctgacccgcctggagaatgtggctggtccacggagcgcagatga

SEQ ID NO: 52025 - DNA, 750 bp, Bovine  19866880626699
  misc_feature (1)..(1): n is a, c, g, or t
naggaccaacctgtttctaagaatcaggctccttggactcaagtcaccatggactatttctgctttgtgtagtttctccaccattgtcaaaaggttataaataatcaataccgtcatttcatgggtaataaattcactgtgttgaagaagatcctggaaatagaaggacagaaaagtatttaaattggggtgacatattcaataccttgcttactgctgctctgtactcttcctggttctctgttagaatgtgggttcctttgcagattggttgttgtcccatttttaacaatgctgctctccagtaagatcgttcatacagggtgaggctggcccatagtaggatctctatataaatggtagtttaaaattatcctcatgccaacaattttggagaattcatattaccatcaaaattgcagcaaaaccatcattatgttgtatacctgaaactaatataacattgtatatcaactatacttcaatttaaaaaaagaaatgagaaatgaaataatctcagaaacattaaaaaaaaataaaaatgataggagaaataatctcaaaaaaaaaaaaaaaaaaaaaagccataaaattgtcttaagaatagtccaaagaataaaatcacatattataaggagttctctggtggcctagtggttaggattccaggctttcactcccaagggtcctggttcaatccctggctggggaactgagattcccacaagccctgcagcatggtcaaaaaaa

SEQ ID NO: 52026 - DNA, 1633 bp, Bovine  19866880651086
  misc_feature (1)..(1): n is a, c, g, or t
nttggaaggactgatgctgaagctgaagctccaatactctggccacctgatgcaaggaactgactcattagaaaagaccctgatgctgggaaagattgaaggcgggagaaggggatgacagaggatgagatggttggatggcatcaccgactcaatggatacaagtttgagcaagctctaggagatattgaaggacagggataacaagaacaaaagaaattagaaactccttctggcaggaaatcttgagaactggaactgagcatttcctgcctgagaggatacaaagctcggtctgctgcctactgcaactggatttttggagttttcagcaagcttaggcccacaggagaaccacatttctcggaaattcaagccagtgtccaagtgaacagtctccttccgccaggaataactccggttccgcttcatttgtaacaacctctttaaagtttttttcagctttgtgctttgaccccataggttgaagaaatagccaaactcccttgtgcatttcaactccaccctcaaccccaagttgtgtatttgaaaaagatttaatggtgatgattaaccaggtttgagaaccacagccttagacagtattgaggtgtaagaggacttcagagagattgagggccctcttggcaaacgagggtaatcctctgccgattcaccaaaacatcccctcatgctcccccgactcctgtctcccaggagattttctgtcctcgactcctcgcctaacttccgtaaccaggccttgatgcctccacaacgggatgctcgggcccgcggccgcccctgcgctggcgagctcagagtcctcagatcattcattgctactgtgtgagcgccaggcagaaaagcgcccgggtgaccacagaccaccgataagaggcaggagggtgagcctccctacctgcttctgctcctcgttcagcccattgactgcatcgtccacaggcaacagcgagttggtccgctgggtaatcaggccagcaagagactgcagcggcggtcgcatcctccagctcgccacgcgccgacccagtaaccaagccgcagtcgccatttctgccttgcccctggagctgaagcccaggcagctgagagccagccctgcgagctccaccaatccccggctttgctgcctccacccaatcggcgagggggtgggtctccagcagccaatcatcctcagctgaccgccgaaggacaagctatccaggcaccagccaatcaggcacaaacccggcgaggtgggtgtgcttggcgagtaagctggatctgccagggacttgtccgggttgcgtttttgtttttgtttttgtttttaaagtggaagagcagaaagtctttttgagtagaggatgcagtatctccgcggcgttaaaaatagcagtacctaattgcagacatctgtgggaaaacaactgttaaaaccataatcaggaaattcgcttgaacgtccctcaacgcttccactcaccgaggaaggttcgattcctggtgggagaaataggatctcacccgccagagacccgggtttgatccctgggtggggaaggttccctggagaaggaaatggcaacactctccagtattcttgcctggagaattccacggacag

SEQ ID NO: 52027 - DNA, 3420 bp, Bovine  19866880657228
  misc_feature (1)..(1): n is a, c, g, or t
ncaaggtgctgcaggcttggccataaacagcagctggggacccgctatagtgggcagtgttcagaggaaatggctgggtttggggcggaaggtcaggctggaagggaaacatcctggggcctcgttgtggctctgactctcctctgagacccctgggctttcggttccccctgggggatgtgggctgccggctatggagcaggtgacatgaggtggggtgggttgggagtgggacctgccaagtgctgtgtttctgcaggtgggaaatgaaggaagacaggcaggagccagagagccaggaggtgggtactcggacctaggatggggtgggctagggacatgagccctaaattcaccaaccagtagagccaacctcttgttttcagggaagccaaagcaccagaaagactccgaatgagaaggaacatgagcagattcagagcaggatggagcctggaggacccaccagtgccccgggtggcggaaccacccccaccccagcatcggaatcaccagaggggctgaaagaggagttgggagatttggcagccagtccagccagtccagccagtccgggctctccaccaaactcagacttggttcccctcgatctctccctaggaggtgccagtagctctgggcctcaggagagcacgtgtatgctcagttcaaagcctggggcccaggagagcgctgtgtcccggctggagggccaggagcagcccctagggtcgaccgagccccaggccgggccagaagcccagacttgttccaggcctcccaaaggggcagagcccctggagcccagagaagacaggcctggcaaggctggggcccagcagggcctgacacctcggagcagggcccctagaggaggcagccaaagggcgaggggtgcaggaggtgtgaggagcaggacagggggtcctggccctgcaggaagatgctgagaaaagctcatgggagcaggggaccaggctggggagaggaggggaggcgctgtccagagtctgcgccatgggtgtgtggtggctggtggctgtggcggcctggctgagcagtttggcaaactctccaggggagtgagaccgtgaaggccaggagccagcccccgccctcacaggtgccccctgtgcacgcatgtgctctcacctgcaggtacagcccctggtgcacgcccacgccacgcctggtctgtgaggctggtgaactctgtcccaagcctgctgctgcccaggccacaggctccctgccatgacaagaggacgaggcttggaagcactcagcagctggctcacctagcacccgtcacccccagggcctggccaccctctccagctgctggctcctggctcgtcaggtactgccagcttgtcaactgatgccagccgcagcagctggcatggctagcccaggcctggggccctttcctacactttcccctgccttgcacccatgtgactctcagtcccagaatcactggatgaccattgggggaacctcacaatcacctggctgcctactacctttcgggaaaaggaggctgaggcccagaggaagggaggccacagccggcagggacggagctggggacagaagagcagagctcaggtctcctctgtgaaaggaaggatctcgagaaagtctctgaagcagggtggggtgaagaggggacagatggctgtctctccccacagcagggttggggagctcatcttcagggatctcctcctccacccccaggttagacctgagtgcatcctgaatgggggagggggagcctgccacctggggtcgttttctgccatctccaacttcctcttcccaccacttccctgcactgtgtcatgccaaagcaaggtctcaggaagggactcaagaggcagagaaacagcaactctagctaagtacgacatcaggactcgtctttcctacttagtccctgttccccgccccccaccccaaccactgagacccacgtctggtgaattatccagactccgcacaagctgtggcttcctctcaattcaacaaacatttcctgagcacccactaccagcaatgcagccggtgggcgatggtaactttgccagcaagagggagggaagaagcctcgtcatccggcagatccaggctgcacagcaggagctgttcttggctgtaggtgcccgacaggggctgaagatggtggcaggagcccagagggaaccaccccaccgctgtgtgcaaaggtgggcacgcctttctttctcatcgggtgtcccctttgcccccaaacccctgcttggatctccccacatagcccggccgtggctgttcctctctgctgatggtcccaggcttcactggcttctcagggttctctctggagtgtccagatcatccccagcatttctctccactgtgaaaaagaggtctgaattgtggctcaactgtgaggccaggcttcctcactggctcttgctccacgagccaccccctctattgaggaggagggtggaggggatgacttttcagcagatcagattgtttcgagtagtgcttcttacacattaaggtgcagatgaatgcagactctaactctgggctgggcctgggaacctgcatttctcataggctccaggtgctgcctttactgcgggttcctggaccacactttgagaggaaggatttagattagaatatatggagggctgaggacagagacagactctagactcttaagggctggctgctggctctacatggggcggtggcaggctgcccctgccaggtgggagcttcctggtctcagagtcgggtgggaagctgaggctttgggttagaggcttgagagctggtggtgccaacttcctgtagtggggagtgagaaagttgattgggaatggggtgaggtgaaggtggttggaagaggtgaggattaatcagaggaattccagaaaggcttaggaacattctgtgcatgtagggagaagacccctgtgagatatgaaaaggcaagggtgaaaaattccaagcttaagttttcctcttgccatttggtcacacatttgtgacttcagagcatgaaactggccctggaacccatgactcccaaggacggagctggagtagagcaggttcaagcagagcccttgaattcagatgtctcccaaattgtgaaccagaatttggattctaagaattacaaacttcccccaactgccaatgctaccaactatacagatgtgccttcattaaagggtatgtgctaagtcatgttttactgtgggctggagatgtagtttgggcagaggtctgcttgaggcctcatgacaagacctaagtgggagaggaagctgggctaaagggctaaggaaaaatgggcttctctctttccgggtgttaggagaaagggatgtcatgggagtgagtcaggag

SEQ ID NO: 52028 - DNA, 1431 bp, Bovine  19866880769003
  misc_feature (1)..(1): n is a, c, g, or t
ntctataaacttaattccttgaaagtatccctcccaccaagaaaggaaaggaaatattatagaaagatacccagtagagacagaggcgagtatattttcaaaatgagaagcaagtgatttacgaaaatcatacggggagaagaaaggtaataaaggaaataaaatagtaacacagtccaaagattctccatttacttctaacatttactcttggaggactttagtgattcacaccatttgtttggacattcaggtaactaatctttattattaatataagtgtattcatttgacctaagtttgattttacctttctgataagagggtttgctgtttatatattctaatcattatcttccatagagatggtagctgtggtttctttaaagtacttattttgtgaatagatagggttgccacgacaacaacaaaagaaagacacccagtagatactcaatattttgagattgagttcactgacattcggcataaaaaattcaagctttccagaatattgcatcatccccacttaattttatgagagcaaggtttttgttttgttatagctaaactgatcttaggaatttagcatggagtagtgagcttctcctcacttaaccttctggttttatagaccattgccaaaactctcaagatagtgtgtgaagtgttatcatcggaccatgacagtggccctccccggatcccattcagcacccttccagtttctctacacgtatatcgctgaagtggatggggagatctcagcatcacacgtcagtcgaatgctgaactacattgaacaggaagtgtaagcaaacatttagcaattggaggggaaagagtatatggaaagcaaatccagcagaccaaggcatagtgaggttactgtattatgcagctctgggaacagaggaatgttgtgaagaacagtaactagggatcagaaagagaaggggaaatggaagagagagaatggtataggacagtgactcagagtgccacacagaccagcagcagcagcacctgggaacgtgttagaaatgcaatttttcaggctgtaccctaagcccatcaaatcagaaactctgggggtgagaccaggtacctgtgcttcagcaagccctccaagtgactctggctcacattcaggtttgaccagtggtggaggtggggtggaggaggaacagacagacaagaggtcagagaaagagagggtgatgagggcaggagccacagcagaattaagttggagggagagagttgttcatatattgtctttcttaagattacatattaaataaactaacaccccaatttttttccccaaacagtattggtcctgatggtttaatcaaggtgaatgactttacccaaaaccccagggttcggcggaataaaagcacactttggcaattttaaaggaagata

SEQ ID NO: 52029 - DNA, 1236 bp, Bovine  19866880828335
  misc_feature (1)..(1): n is a, c, g, or t
natacatcacacacacactccatttttggaggcagtttgggcaatgttagacaaagaaaatactctaatggtaggatttcaggtgctgtggctttggggagactcaaagcgattcccagtaccccacagatgacacccccatgggcatcttgccacatgctcctggaaggtcagaagtatgcagaattgggtaatgtcactcatgaaatacatgtgcgctttaacagagttatcccctcttgttgatgctttccttccttgctgaaccttaggaaggggaggccaccacaccccaggttgtatgaggggaaactgagacccagaaaagcgggtgtggttatagttcaaatcatcccaggcaggctggaggtctggggtatggagaaccctgtgttcttcctgccttcctcctccccctacttttaagagtttagtgagtgggacaagaagccccttcattcatgacgattagggatcctaaatttttaaacttcctgccgggaagtgaaggacaggaaattatgtagccagagtttctgcaaattacccaggtgtcctaagtccccagagtagcagatgctcttcatctcttgtcttccatcatcattcatccttgattgtccagggaagccgactccagcgctctgagagaccagcagatgcagatttattggcaaaacctagacaggcacaacgaactgaccccttgccagatcagagccaggtcctggtaataacatcactaaaccaccaacttagtgagtcacaacatgaagctgttaagaggcctccaagatcgttctagtccaacgcttacccttctggttgctcaaagataagaaacctgagtgaggcccagatagggaaagtgacttgcccaagatcatgaagctcatcatggcagaggagaggctggagacccggagccccagccccatgcactttccactgccttccacacccctctgaatgtcccatataggtggtagggaggcatgggccctcttgcttagccaagggcagatcaggctgtctcctagcaggtgggctcaatgtcaagttcagccctcccttggggacagaagagcctggggcccacccttacatcccaagcgccaggcactgggttaaaggctataggagacggcttcctgcttggccctcatccaaggccatttcacaatgtggggggaaaagcgctgggcttgaaagtctgggcttagtgcttccctccac

SEQ ID NO: 52030 - DNA, 1196 bp, Bovine  19866880836653
  misc_feature (1)..(1): n is a, c, g, or t
ncctgagttgacctcattgtcagttcccggatacagagtctggcacttccttccagttctttggggacggatggctgctcccaggatcccagactgagatgcctttccagcctcatgcctgtgggggatgggaggctgatgtggaaaagttgcctcagctgtatgaccctcaggccactgagacggctgggggagaggggagaaagacggtcttttgtgctctctcccacccaaaggccgatcgccccttttctgagacctgggggcatttcccagcatgtgcccccgactcagactgtctgacaaggtcagcacctgtatgaagtttatttatttttctctaactcctactaaagaaccctgtcccaagattttctgcctaagcctggcctctgttctctggctgagaaatggggggcaggcagcagagtagagtgcccctcaactgaagtgtgctgggggaaaagcccttaagagttgaactgggcgcgaggtcccttccagagcacagtggaaaagccctgcctctgggtttgaagaggattcacttccccttctgccagccctgatgccataaccactggaaaatgacatcacccttctgctccactccccatccaaatgtggcctccttgcctctgccctcagggttggggcaaaagagcaaaggtgtcccccaccctcttggggaatcagaatatttcaggccaactgggccccttgagacagatttagagtggtcagatttttatatgcctgtggcagttagggttgaccccaccatgtactgtaggaggctttgtgcttgcatctgccaagttgctcagttgtctccggctctttgcgaccctatggactgtagctcgccaggctcctctgtccgtggggattcatggggattctccacgcaagaatactggagtgagttgccatgcccttctccagaggatcttccacacccagggattgaacctgagtctctgcggctcctgaggctcttgtattgcaggcagattctttactgctgagccactggggaagcctaacacctatggacacagtctcaaatcccacatgaagacaggccctggcttgggaaaggaagggggggtggtgtagattctgggaagaaggttgttttcttattagagaattatagcaaatgccattagctatgagcacctgtgcctttggta

SEQ ID NO: 52031 - DNA, 2120 bp, Bovine  19866880856737
  misc_feature (1)..(1): n is a, c, g, or t
ngctcgttttagatagtggccctctcccactccaggacagcggggggttgagcgtttggctgggaaacagctgatccaactcatttcttggcccagcgcctcttgaacaccagattcaaaaactgagaggctctgagcttggaaagcacaggtccccagcgcttctggtggcaggtttccttgatagcaactgattgtactctggcctcagctggaaatttctgagatgttcatgccagtcccaaggagactaatgtactgatgtaactttgcccaggaaagaggatgcatggtgggaggagtagagtaaaagccagagtattttgattggatttcttcattccttggcaggataaagccaacttcttttccatgggctgagcaggctgagtgctggactgggcaagaggcgagaacacttcctgagggtcatgcttatagtttttctgtaaatttgtctccataagcttagtaaattctgtcatgtgccagacctggaagagggtagtctgagggtatcaagatgctgatggcatcagctgtgcctcttagggggcggctctgctggtgagaagaaacatgtaagccaagacaatatagatagggcattcatgggaagatcttccactgcagcttttttccccactcttcaaacacaggactatttctattttctaaatgtggagaggcacattcattcactcattcagcaaatattttttgagtattccccaaaacagaactgtgtactgactgtcataacgcatgtgatcccaaacttcacctaatcttttaggttccgtttggctttcccatggtagcctcagtctctgcatttccctttacatccaggtcttggaattcctaaatattttctctttagcaacgcttttttgatttgaaccccactctccagtgattggtaaggagagagttcagtgactagggaatcaagtctctcctcttgcttactcaattagaagaagccactctgtcagctctggtaggttctcctccctccccaaccccttgcccctcctctgtgccacgtgcacacatacacacgcatacacacacacacacacaaacacctctctgcaactcagaagagactattgctttgcacacagatggaataatgcacagagagataaattcactctgttagagcaagtccaccaaggaaggacaccacgccttccaggttcctggcctttcttgcacacacgatccctcccagagggagttaagaggcaagagagtcaagcagtatgggcttctccaccaagacccccaccttacacataaatcagtttccaatctaacccctccctaggggttgagttacaaacctcagtaaccccagggcggcctgcctggtaattcctattattcagctgtcagctggtgttttttaaaaacctcccttcccagtgatccagttactagagttttagagcccattccttgtctcagagagaaaccctatagccaggtgaaacaatggagagagctcggcagctttctacggggagctgggttttctcttctgctgaaagcagcctccccttaactctttgcattccctccccagtcttctgtgcctccctctcaggcgcccagctgatgcctttcggagtaacttggccttttttggggcaaaattttgcttcccagagctagcatcagttagcagaggaaaaaataagaaacaaaaaactggggcaaagaatggtttcaacagagaaagagggaaaagagattctgctgcggatgcaagatgcatgtgctctgaaccacaagtccaggattcttctgttcccagggtactgctgttggtaggagacttggagccaagacctccagcccagcaggtcctgacgctttgggctgcagagtctatcctgtgctggaagggagaaagggcatggggaagggtctgctttgacagtgatgagaagggggagtgaggcttctgacctccctgacccctttatccctgacagtctttttttggttcctctagctcataaggctgggcccctgctgcttaccttagaggctgagagcaaaggaggccaagttatgggtgtccttcacagggagcccaagggggcaag

SEQ ID NO: 52032 - DNA, 690 bp, Bovine  19866880891194
  misc_feature (1)..(1): n is a, c, g, or t
ntcctgccccatccctagctgcctgggccaactgagacagtgcatctcctaagggcagagtaaaggcctgggaccacctcttccctcagagagagagtgtttgggaagaacatagctctcacacacctgcttgatcacctgcaccacctcctggatgtgggagttgttaatctctctcttcaacctgttggggtgatcagagtttcaggtggggtaagagggcgctgagaagagctgggtgggacaaagtctccacagggtgtaggcaaaatgagaacttcattgtagaatcatctgtggctggcacatctatgtctggtctgggaaccagccagaggaataagcagacggacccatggaggacctgaggagcctttgggagccctgcgggccttctgagggaaggggcctcctcactaaaatgcactgttcctcaaggcatgcatgggcaagtgtaggtggaaatcagatgtcccaaggtttcgcgtccctcttggcatgtttaattttcccttaaattctcctctctgctcaaatagtagtggcatctgtgttttgcctaaggaggacattctctgattcagaggtgacagaagtggaatcacctttcaggaaccagcagactctgggaagcaagtcaggatccccttgtagggaggccccttcccactggagggttcctgctcagca

SEQ ID NO: 52033 - DNA, 1872 bp, Bovine  19866880915256
  misc_feature (1)..(1): n is a, c, g, or t
nctccattgaagacaaagatcagcttttatttttcttcatatccttcaaaattcttagcactatgctttacacagaaaaagtgcctggtgcatattttctgcattgaactggtaataaatatatgaagtccataatcttagactgtcaccacccctttgttcattaccttgctttttcacttcatgaaaaaaaatagaagccagaatttctaaacttcctgctacaaaacaaaccaaacttttatatatctgtatccattctttcatccttcctttcttttccctaagatcaatctctccacctaaactttgaattgcagcctctcttgtcttctcaggaatcttatcacactgactttcccttatctcttgtatttacaacctctctgcctcctccactgaatatattcacttcttacctttaaaagtaccaacaatcacactctttctctagttgccactgaatggctctctatttctgtcttctttcttcattattccttgagcaaattacgaagtacctatcatgtgctttgtatagtgcttggtgctaagactactgtagtgattaaaaacaaaactttatgcccttgtggagtatttttttttttttgtcaactctcccattactatcttttaattcaaacattcatatattaagaaaggcttccatactttaagtttttacattactatacagagctccaatgctattttagtttcatattacaggagatcacattcaaatatgtttggatttgacaatttgcttttacaatattgaggaaagattataagcattaaatagtggaagagtggttccagggtgccgtaagttcctgaagtagaaatctgtcaggtcaggagaggcttccctttgaggaagtggcatttaagccaaggtctgaagaataagttggggctaaagtgagaagggagggaaaagcagactgctcaatatgaataacacaggcagaagcctttctatggaaaagaatataccaagtaaaaggatctgaaataaggcaaatgtggctagaatagagagaacaaaagggaacatagtctaagataaagctggagatgccagctttagggaccaggtcaaggagggcctcttaaggaattttgactttttctgagaacagtgaatagccatttgaagggtgttaagcattggctgtaaattaagaagttaagcagttattggatggtatggttaataaaggacaatagtttatataaagggaacttagtagtggtgaaggaaaaaagtagattcacaaaatatttctgaggtaaaagtctaaagttgatttggatgtggggagagagaaggcttttagggatgattccaaagtatcagaaataaatttaaatatgtgtgtgtgcatttatatatgtgtatgtgttcctgcttagtccatggggttgcctaacaataattttgatgtatgcaaattatatatgaacaatttccatctgccactagaagcaagtcttatgaaattattattttatctcaatgcttttttgtcaaggaagaggtgggttagcataaatgcttgtgaaatattcttaacacgacattttgggaccatctcttcttttcatctctggttgtttagttatttttgactgagttattttaatccatggtctactttagaaactaagagtttggaggatgaacagaaagacagtcctgtggaagaactgaattctgaagtgagagctgcagagaaaggtaactgatttaattagggaggtaaatggggaaaaaatcctctgttctgagttttttatttaaatgagattaatgagatagacttttcaataaaacagatgatttgtataccagtattttaatgt

SEQ ID NO: 52034 - DNA, 761 bp, Bovine  19866880915996
  misc_feature (1)..(1): n is a, c, g, or t
nggcccctccagcctggtggccaaggcccagtccttgccctcagaccagcctgtggggcctttcagccctcttaccgcctcggataccagcagcccccaaaagtccctccgcgcggccccagccgccggcgctcctccaggccggtcttccccggcggggtcgccccgcacccggcatgcccagatcagcaccagcaacctgtacctgccccaagaccccgcggtggccaagggcgccctggctggcgaggacacgggcgtcgtgacacacgagcagttcaaggctgcgctcaggatggtggtggaccagggtgatccgcggctgctgctggacagctacctgaagattggcgagggctccacgggcatcgtctgcctggcccgggagaagcactcgggccgccaggtggccgtcaagatgatggacctcaggaagcagcagcgcagggagctgctctttaacgaggtgggaggagagggtgtggcgggcatgtggcgggtcagtgatggacctccaggagcacggacgcgcggggagagtgctggcactcaggcatcccctcctgcccccaggtggtgatcatgcgggactaccagcacctcaacgtggtgggagatgtacaagagctacctggtgggcgaggagctgtgggtgcttatggagttcctgcagggcggggccctcacagacatcgtctcccaagtcaggtgggcagctggaagggcggggccccggcactggctgccccactgctccctgg

SEQ ID NO: 52035 - DNA, 968 bp, Bovine  19866880970532
  misc_feature (1)..(1): n is a, c, g, or t
naacttttatttctagccagctttagtatgatgctgaaaaatgtcagctttagaggttaatttttttatttccaaaagtccactgttgaaatagatatttcttaagttgtttgttggcccttaccacctggaaagatgatgttttgctcacttttcagcagtgacagcaggctgggggaacttccttacctaggacaggtaggagcctgcatggggaataaaggggcaaaggtgccccccagctcctggctgacagacctgcatcttgctgaccctgagggagagacattgaatggagaggttgataagtctggtgtttcccacttttgcttgagaccagtatgatgctgctcaggctcccttggttcactgggggtgagcatcagcacggagttggccctctgccagctaaaagggcagcccacagggacctcaagggagccacagacttagcactgtctgagacaatagcagtgatcaaaggtgccagacgtggtttcttgcaatcaacttgggaaataggacaagtaatcacaaaggtgtgattttcctcagctccaataaaatgaaaatgcctgtccttgttatagagaatcagaagaatcaataaggagtttgaggagacatcgacatgtcctatgggcatattgtgaaaccactgctttcacgctgatgtgaacctgagggctgaggctcttcagcctggacaagtacagacaaaactgccctcctcccacatcgcctgtgggcctgttgcttcaggctggagtaactagaatggaagcagaagttcaaacgttggaaagaatgactgctcaccaacttcagcaagcacttactgcctaaggctttacacatgtcatgtgcactttataaggaccctttgagataggttctatttaacccactccagtattcttgggcttgcttggggctcagagggtaaagaatccaccgcaagcaggaga

SEQ ID NO: 52036 - DNA, 1591 bp, Bovine  19866881074795
  misc_feature (1)..(1): n is a, c, g, or t
ntagactctctcccagtcttaaaaaccttgctcgcctgtcgcatttaaaattttcaaacagcaaattaccaagagaggcagtatatgttatctctaaagatcttttgaaacttaagagataagaacttgtctctggctccttaggtgctgaccttcctaaagatgggaagcttgagcagataaacacaaaggctcatttcagatctagaactcagtgacaccctttcgatgaagagcatttgtgagtccagaagtggcctgcaagaagcaaactcagtttggctcacctgccggtcccgaacctgttcatgaattctctctgagacggctgctgtcttggcaaacatgaggaccccagaggtaaggcgatcaagccgatgcaatgggtgtagctcctttagttggtgctccttgcccaggatgaagatgaccgtgttgtgtcggaatcggccacaggggtggacaggaatggaagaaggcttgtctacaaccaccacatcttcgttctctgctagcaggcggatgggctctgcggtaactggtggctcatgcctgtgcactgtgttccgtaagaagtcattgtcctgccaatgacacaggcaactggtcagcccagggtccagccacctatgatcagtcaacttcacacacaacttccccccatcttccttactggatgaaagaatgggcatagtacatccttaagcagaaaaagcagtatacaccatgtattcttattttgtaaacacacagacacacaggtagaagcaggaattgaaaaagagctagaaggatatacccaaaatgttatctatctctggatggtgtgattatggtttttgctgttctgattatttgtattttctctacaataaagttatatttaacaatatatttttctaaaatgaaggggaaaatcctccataaaccatcacttattgtgaccttgaacaaacaccaagctgtaagtccagagatgtgggctctagacctggatttgctacaggcttactgcatgctcttagggaagtcacttaacttctctaggcctcagttcccttatctgtaaaatgtgagcgtcagtccagatctgtgcttcaaaactgtgactgattcaaaccactcattttccaaatgccttaccatcccctcacaaatatggtgagacactgttaatgacaatgtctggtacctcttagctgtgatggaaatttaaagaagggtcaaagcactgggctacacaattctggtctcaatctctgtcatttcacagttctatcctatcaggctctaggataaataattcaagtggaagttataagaacacgggcttcccttgtggctcagctggtaaagaatccccctgcaatgtgggagacctgggttcaatccctgggttgggaagatcccctggagaagggaaaggctatccactccagtattatggcctggagaattccatggattgtatagtagatggggttgcaaagaattggacacgacggactgactttcacttcacttacaagaacacaggtgttggaggtggcactgtgccttacttctgtgagggtgatcttggtttcctcaa

SEQ ID NO: 52037 - DNA, 1229 bp, Bovine  19866881075751
  misc_feature (1)..(1): n is a, c, g, or t
ngcgtccatgaggtcgcaaagagtcgaacacaacccgagcgactgaactgaattgatgatatatatgtatataaaatcatcctgtcagctgtggggaggatgaacggtaaaaaccagggatagtgagggagaaaccagttaggagaacatgaagtcatccaggtaagagatgactgtcctacaactaccacagtgggaagtgaagcaaagaagtgggtagattggggatgcattgtgcaggtataagcaacagtatttgctgatgggttatctgcagagagtgaaagaaagagaaaagtgaaaagtgattctgaggtttcttacctgaacaactaactagataatgatgccattaactgaagtgaggaacagtctgttctccacaaatatttgggatttaaggttattgttcagttagcttatcctcttcttgaacaacattcacaatttggatgtcagttgttgccctgcacatttagagctgccaaagttctacacaggtgacgttactttcaagaaaagcaataaagaaaacataagcctgaaacaaccagaagcaaggaagtactgctgagtcagaaacccttgcttccaccgtttcttcaagaattggaatatcaagagtaagagaaagcaggactttgttgcttactctgaatttgtaaatcaactatttcaggtgagttgtctactgaaaaaaattttcccactcaaactgatgttctagttgaggggttttcttcccaatgcttcatacaattaaagataattggagggcctaacccaaaaaaacagatgaccatacagcatcacagaacttatctcctctgaggtacaagttgagggcccagcactttaacaaatgccaggttcactcttcttctaaggcagtgctggattctcagccataaacatcaactcttattttccttaggaacacaagtcagtgggctgcagcctctggttgtcatagcaactgaaatttcacacatgaaatgttttgctcagaacatagacttagcgtagcacttttttttttgagcatatattttattttagcacatggaggattttgtgccattttcagtcatttcttccatctcaaatatattcttttctaaaatgccacagtgactaaagactaagaccaaaaaaggattgccagatttctctcttaattagacttttgattgtaattgctcccttggttgctatctacccttgaacaa

SEQ ID NO: 52038 - DNA, 1183 bp, Bovine  19866881108238
  misc_feature (1)..(1): n is a, c, g, or t
ntcagaagagtcagatttggaaattccctgaatagtaattagactttatggaaaatgagatctgagaaaaatttcagccactcagtggaaaccatctttagttgtaaggtcagagaaaggatcctggaattagacgcaaagtctggttcaaatcccagctctgtcccttatgagtcctgtgttcataggcaaatcatgtaactgacttatctgagcctcagtttctcatacacaccttgcagagttgatgtgaaagccctttggaaattgtaatatgtttaactattaattccctggtggctcagtagtaaagaatctttccacaatgcagaagacccgggttcgatccctgggtcgggaaggtcctctggagaagggaatggcaacccactccagtattcttgcctggagaatcccatggacagaggagcttggtgagctacagtccagggggtcgcaaagagtcagccacgactgagcgactaacacacaataactattaatgcctagacaatttaacactttcgaaaatgggttttaggattttgtttcgacctggttttggagttcttggggagctcttttggaagttgtacctgagctggtgttttcttggtttattaactagtggcttctctgccagcagcctggatcttttgttcagggagcccctcactgcttcctgaccctttaggatgctgtccttgttggtgagtagttttctggagttcagactatgcctgataaagttgttcaggctctagatggggaagcccggggcaggagccccagagattctctctagggtaagaagggtccctaggagccagccccagagtgggaggtgcccctcggacagtgcctggggaagagtgagcctgggggaggagctgtggagagtgctgtgcgtgagagccagtgctggggcttgggggccctgtgtttgctctgtggctggctctgtttatatcgctcgctatatttagcttctgagtcatcagcgtggctgactagagccgagttccccacacaactctgcacctgactactctctcttccaggagaagggccttgtagttccggacagtccattccctccccaccaaggcaagccatggggatggggttggctttgggtttttttttttttcttcccgccctggggcagggagggtgatgagag

SEQ ID NO: 52039 - DNA, 1837 bp, Bovine  19866881140945
  misc_feature (1)..(1): n is a, c, g, or t
nccacagagaaaatacttcaagagtgccctgcatttggaatagcaaaaagaaaaaccttgggtgtttcttttccacaagatggtaattctattcaagaagtcactaaaaaacaagcactggctgtagaaaacaaaatcattcttcacagtgagcaaaagcataatgtgataccctttgttcctactaatacattgtctgggggtcaaggtgagacagatgtcaaattccatagcacttctgtggaggaagaagtcatgaaagttgtaggccaggcctatacattggaaaaagccaaaattgaaagctgtcagttaaatagtacagatagaagaaatgtggattttacaggtagtcctgcaactgctatttgtggatgtggtgataattattcctgtttacctaatgttacttccttttttggtaatttggaaaagaatgtcttgtccttacatgataaagatgaagatttaaaagccagtcattgcccagtgcaaaatgatcttccttatgcaaacaattcagccagtgatgatgatttgaaatctgagggactgtctcattctgttccttgcttgttagagaaggaaaaagtcgttcaaaccaatacccaaggacagttacattgtgccccaaaagtgctaaaagatcaagatctaattaaggagcccccaagtctaatatcaaatgaaactttagtatatggtgaagattcagggaagatggctaaacttaactcaaagccagtgtcttttaagcttccaagggatcaagtggagccctctgttgataaggcagaacacagtttaaagaagacctttgttgatgatgtttctcagcatcatctgttaacccaactacctccattacctcaacaaggacagaatagtgtcaataaagatgaagcaatattgtctaaagctggaaataatttaaatattgttggaggaaattcctctgaacccacatgtgaaaacaattccacaatgctctataatgggaaacagtttactatggcctataaaaaagaaccaaagaaaaatattcaaacagctaaatgtaatacagctatagatttccacaataactcagccttgactaagcaagttattcaaactcttatcaatcctcgagaagcgtcagatcctgtgattgcatccagtgttgcaacttgtagtagtgtcaaaccaaatctgaataacttaaatggaaaaactgaagaatttttagatttccaaccagttcatttaccaccttctccagaacagttgcttgaattagtaaataaggcacaccgtgatatgagtatagtgcaagctacagaagcacataatgttaacacagtgtctagcagtgctaaagatgataaagatgaagaaaataacattccacataatggagctgaagccacctctgtaccattaatgacaactgtaaaagataaaatgaggagatgttctttgggaatatttttgcccagattgccaaacaaaagaaattgtagtgtcactggtattgatgatctgaagcaggttccagcagacacaactgatttaaatcacttagaaactcagccggtttccaataaggattcaggcattggaattgttagagctaaactgaacttaagtccatctcaatatataaatgaggaaaatctccctatatatcctggtgagattaattcctcagactctatcagcatagatactgaggaaaaggctttgactgagacataccaaaaagagactttcaccctctgaaaataaaatggaagaaacctgcaatagccaaaaaagaaccctgggtacaagatgatgatgatattcagaatgagaa

SEQ ID NO: 52040 - DNA, 949 bp, Bovine  19866881170199
  misc_feature (1)..(1): n is a, c, g, or t
ngagtttgaattctttctgtgtttaactcaatggtatatttatgcaccaacatgggttaaggtaatacctaactctagggttagagatcactcaagcagtgtcctttgaaaccgcaaggtgaaactacaaaaaaaaaaaaaaaaaaaaagactaccacagtgggaaaagttataatacgatgaacgcacctaaagggaaagatctttcatttgaatctataaatttcctccatgtactgagatgcagcacttctcttctacgactagaagaaaaacaaaatttgtctcctctcctctaactttcctaacgtctaggtcattagaaagatgacagcttcctctctccccttgcccagtattttattatctttacaaccttctcagaatcttaagctcgactgaagtaactactgcttaagtctatgatgtttgtattaaattttttttttttaaaaatcagataagcttctattattgtataaggcaaggttgttagaaaatcccacctgcccctacctgcttctgcttatgtaagactcatctaggaccataaccaactggagatacctaactctatcctatattatgccttaattatatttcaaacccattttgaaagtatatgttagagacaaataagactggccaaattctgagtaaagaaaaacaacaattcaattgttgggaggggaaaatggaagtaaagtggtgttaaagtatcaatactgattcttcttttaactaaagaatctattagtaggtgatagattgttatacttattctgggaagttaacagctatgataaggtaagatggaagatgggatatttagtagtatgagcaggcttgagggaatactaaggttctgagaccaagcaactcttattaagagagcatttacttcctcaccaaggagattcaattctctgctttggttttatccattcat

SEQ ID NO: 52041 - DNA, 1489 bp, Bovine  19866881186874
  misc_feature (1)..(1): n is a, c, g, or t
ncccctgccaacttagtatttccccacaaaatatctggaaatcaaactcacataactggctgttgtgcagtctcttcccatatggagtaaaacttggaagcatagagggtacagctgtcatagacgctgtattgcctcgaggctggcgatgaagaagaaaactaaaattaccatggttttacattctgatgcaccatatgcagaccatgcctaattattcaagaggaattaaaagagatgctaaaaatactcctctatttgaactttgttatgttaacaaataaactggattagagtccttaccctgtattccaaaggcctgcctgtgttccaagggccggcttgcagctcattctctttgcccctggacacaggaggtgctatccatggctggactgtaggcttagatggctctgctctagaagcctcatcagtattttcatcaaaaacaataattctagtattactttgcatctgttgaggaactggattttggagacctctgttctggcttggagctaagagaaaaatattaaactttcaaaatctaaatttaaaaatcttcaccaatttagatgcccaataaggtacacctgaacctttcccaaatcaagattacttctactaccatagaatcagagatttttttaaataataatttttaaaaaccttaatgcatcaaataattaatttttaagtctattctgcatttgttacttataccctccccttttccctcacctgtaatcttttacatatagatatccaaaaaacaaattctgtatcttccttcagtcatcattctaacattgtttaattttatcaggattaactgaaatcttaatattcatttttctggtaaaatttttctctcagctgaaatgtactgaatctaaaaaaaaaccaagttagctcacttattattggtattctgtttagtggggctgcttattagactcaagcttcatcatgatctggataaaatattttttaggactatattctctgtactctaattctcagatctccaaggaacattctgagtattacaaagttgatatatcaggatagggataagagatctaaatatctggtctacgtgtctaactgctataaatgtggttaataaaagcttactgctctctgtatcttctggtcaattttgctgggaacctaaaatttacctaaaaaaatagtagatttaaaaaacagctattgctgatcatctttaagtatacaaagagagcccaatttctcaccctccaaaactgaagatcaaattaatacattctttgtgaatttggtacatgtaagctttactttgataatacttgctatattactgcatatctttcaactaataactgaaactcagaaactctagttgcttattactctagataaatattagattaagttattcttttttcttttccttctgtctgtctttccctctttctttgcattataagagtcccagagtaggtgt

SEQ ID NO: 52042 - DNA, 1432 bp, Bovine  19866881209697
  misc_feature (1)..(1): n is a, c, g, or t
ntgagattcccaggacacaatgggtatggaagtgttctgcaaaccaaaataggcgggatgtaaaggattcttactggtgttaacaggggagaggacacttccaatgccagagcatcttcccatgagggaccgttagcaattcagggatgctctgggactcaccatctctccaccacctactttactcccagaagccatctttgcttggctggcaccaatttcttgacagattgggtaatgtgaggggggtagaccattcaggacagagaccccagcccaattatgactccaagaggctctcccaaagaaaaggaagtgtcctgataaaaaaaagcctctgaaaagtgagagaggcccaggaggctgctgaggtttcccagggctcttggttgatgaaggggcccataggatcccaaggactgggtcccttagtcccactgaccttcatgccccttggcatgggggccaagtcagcctcccctgatacatggagctgcacacatgacctttgcccttctagagggtgggtcctggttggcactgtgggagcagatgagcccttcgcaggtcacaaggagagcttggcatttcactccagagaccaccccccttatcagtcctccaggtgtggggagtaagcagcagcccagaccggggctagaacacctggcagggtttaaagtccacaactggagagcgagacctccccacgctgatgtggggaaacactatcaggctctagcctggtgctgctctggcctcatcatccctgacaggctctgtgccccattcgggcctccctgggcctccctcagctactgtagcctgaagtgtgggtactgggcctgcggacccaaacatctggcagatctggttggctgttgggcagcaccacagggctgccatcccccggccccccacggcctttccaggacaagctactctggtgtgaggtgggcagagaagggtcgtaaacagtctccttgagcgccagccacagtgtgtcccgcttctcattgagctggccccgttcaggtactgtctgctcagcttcatccaggtcctctggggaggcacccacggaatctggcacacgggcactgggctcagaggtgcttaagcaggtctcatcagagacgctgagcccctccagggtgctggctgaggagcagaggcaatcagagggctctacgacctggggcttgggcctgggagggtgggccggggcttctagtgaggcctgcaccagctcagccttcttccctggggagttctgcctggcccgggttttggggctgggtccagcttgcttgtagggagaggaagtctgcagggccgggcactgactgaaaactgcctggtggtccaggaacagctctcttggggatgcagggcctggcgggggccgggagcagtaggggccatcatgcag

SEQ ID NO: 52043 - DNA, 1118 bp, Bovine  19866881351466
  misc_feature (1)..(1): n is a, c, g, or t
nctggcaggtagtaggtgctgaacaaatgctggatgaatttaactgaatttgggaatcatttcatataaacataattgttaaggcagatgaaagtattaggggagaaaatatagaaatgaatagatgaatgttacacaaggggttagttagaaaagggacaagagaggagctaaaaggaagagtcaggagaaaagaacagtatcaagatagagcaatatcatagagttcagggagaagaacgttacaggaagaaaagaataatcagcagtgtcaaatactgaaagaggtctagatggctaaggactgagagagaccaaatttgatgattatgtgaaattttgcgatctttgaaaaagcagtttcaagacaaaactaacaagttgggatactgagagaccaaactgaaaggataaataagttcatttattaaaaaaaaaaacacaagattacggtctaggttatgaagagttttccaaagagacttattattttgggtatttcttgattatgttatgaatgaccacagtaaaggagttgctccaatttaatgtctcaagctgctaaccaggcttcagcatagtgctactagcaaagtagggaaggatttagatacaattaaattatcttttggaaaagtattcaagatattttacctatttccacctcggtaagatagttatcaatcttcttaagtgtgttgtccatctcatttatccttttatgaagtttctctctctcactctaaacacacaatatcatagactgtcaagttaaacctcaaaacaaaacattataacattataaacagttcaaactgctaacataactgctacatctaatttatgatcaagcaaatctttttgtttgcttgttgttatttttgttttggccccgtgcagtggaagtgcagagtcttaaccactggatcaccagggaagtcccatgaacaggcaaatctaaaagatcaaaacttctagtcttgtcttaaaaaaagttttttaagcatacataacagattaatattaattcatattttatactttattttagatttctattaatatatataacttagagtttataaaaatgatctatggtcaaataaatttgggaaaca

SEQ ID NO: 52044 - DNA, 986 bp, Bovine  19866881383740
  misc_feature (1)..(1): n is a, c, g, or t
nctctgggaaggcagctatgtcttcacctctctgacttatagataactaccaagtttcaagtgctgtcaacatctttttttaacgttgagtacttttcttgaagcacctgcagccttctggggactgaaagagaaccctgaacactgagtctcacggtagcttttgaagtaaaatctgatttttcatagtaacgacaggtatgaaaaacgctggggttagagtccacaataaccgaagttcctcaatcaggagctcggttaattactactgagcagaccaccactagaacatatgtaaatagcgataatcgtgggattctatgcactgttttttgctacattagaaatacactaaacgcattatttaactctgattcccagaaaatgtctctttccctttttctttatacgtgagatcagaatgctccaaaagctgtctttcaagagtcaaaccggaggtttcgaagtcgactagtaaatcatacttgcaatgaataagcaactctttccattccgcaaggaaatttaccgtcatcggttcaaatcagtggcgaaaaaataaaacctatgttcgacgaggatgggattcgaacccacgcgtgcagagcacaatggatttatgcagtccatcgccttaaccactcggccacctcgtcccagaagcctactccttcctggtagctatagggagtaaaactaggggggatgtgacgcaatggaatgggagccgccattttgtacggaagcaaagctccgatcttttttacagcaagaaataaaaagaagatggccgctcccatgcagtgaggaatctgcagtggggaggaataaaggaaaattccgtagaaaatgagataaccttgaaagaaataaaattggcatacaaactgggaaaaaattttcattgaagtaatcttaaggagggtctgccgcctaaggggcggggctgacgcgttgagcggctttgcgcctgcgcttccgctagg

SEQ ID NO: 52045 - DNA, 1791 bp, Bovine  19866881390049
  misc_feature (1)..(1): n is a, c, g, or t
ntcatgtccctccaattgggtcagcatgagctcagctctgtaagggatcttgtctgaagtaggaggcagtggtcaggaacccatattctcctgtctttgagtcttaaagaggagacaaaacaaacccgggggggaaaaaaaccacaaaacgaggcagtgtgaagttggggcccacacactcatagtgcatactggacagtccagtacggccagtgaggggtgagggggacaggggagtcactgtgggccaggcccaggggaccccgctggggagaatttggctcagcaggaatgatgaaaaaggtcttctactggggaaggggagacaaggcaggagggagcatgcgtattctcaggacagattctctttgcacagaatgagactggaagtgtgcctggccccaggcctcttccttcctctgagctctcactccttgaacttggtcttcctctgaatccatgggatgtcagtggcctagggagggaggtagccacgtggagagctaggcagggggcgagggggtgccagggagttcaccccctcagccggggagcatctgacaacaggaagcagctgcagcagctccagggctgtgtgctggtgtctgtcgctctccctctctcccggcagcagcccccgcagaacaaactgttcttcgagaagctctggggacagagggcccacacctgctccccaggtcggtttggacaagtcagcagaggcgtgccatggcccagcagccccctcaccccctctcttgcatgatgcaatgtaacacaaaacaagagctttggggagggaaacgagcgctgtctcttcacaaaggcctcacccttgaatttctaaggatgtctctaaaaataggacctaagctccaggtcccaaactccaaactgagtggagatgctgagtggcgtggcttttcagaaagagcacaaaatcaaaatgcaggattcttctatcttaaccctgccagggaaaagctgtgtgaccctggacaagtcacttcccctaggcagacttcagtctccttctttgtaacacgaagagttgggatgggtgaggtctgggtgacttccagtttaaaatgtgagagacccatgctcagaggacactttggggctgctgtgaaaactagagcttgagtaacagagagaaattaggatgagactctgattgagggctagataaaatagaatggaactcgggatttctctggaggtccagtggttgagatcaatgcaaagaaggtgggtttgatccctggtctgggaactaagatcccacatgctagacggcatggccaagaaaattaattttaaaaagaaaaggaatgggatttaatttaggacctgagatggtagagttttgtttcccccagatccccacgataaagagaagtggatctgttggactgagaacacctcaagagaagctcatttcatagaaggctcccaacacttggtgaagagctagactccttctggatagtttaaggtcgtccatcagtcacagctgcccacccccaatttacaatgagctgggaggaggaacacacctgagagcagagcaaggggtgcagtaacacaaagaaggaaaaagcccagccttcctaatgctcttcttcatggaagctgctccttaaaattccttcaactggggatcgagcctttcagaccacagtcaagctaaaaataaatggctaacattctgcctttctaggacccaagggtatccttggagagactttcagcagagtgggggctggaaaagggagagaagcgggcagt

SEQ ID NO: 52046 - DNA, 1615 bp, Bovine  19866881426455
  misc_feature (1)..(1): n is a, c, g, or t
naccttcctgaagaaaaaggtcatgaccccagtatctccatttggatttctgatgctacagtttgagaaactgttatatttaatagaatgattgttgggatgggagtatattgacataatgggcttccctggtggctcagtggtaaagaatccacctaccaatgcaggagacttgggtttgatccctggattgggaacataccctggagaaggaaatgacaacactctagtattctggcctgggaaatccatggacagaggagcctggtgagatacagtccatggggttgcaagagttggatacaacttcccaactaaacaacaacatattgacatacagttcattcttcctcttgttagccatttcacttttaaaatatttcctggacacatcttcacttatctttatggccttaagtatttagagagactcctaactcaggaaagagacgcagatcgtcccttgataggggaaagacaaatatcagtcttggacaggattgccaaactttaaaattgtgttatcctgttttgttaaacatccatgagacccatcaacatgtcacaaagccaaacctgggaataattatttgaaaaaggaaagacaattctggaagaagcttttgaggaaggacagaaagaagagtcagaatagggtttacatattgctaagaaatgtcttggaaaaacaaaagcatttggttaatgatgtgcaagaaaaaatatgagaaaaacacatgtggaatgatggctaatgaaaaagatgagggtgtaatgtgaaatttgttgggaagccatcagaaataggatagtcatccatgcagtaatggccaaggaggttaacagttctgttgtggcagtcagaatctgtcttcagtgatggtaaggagaagaagcaacagtctgaggaagctggagaaccagatcctctggcttgttggtgctctgtgtcctgggaaaagaagaatctttcatggaatcagtcatgtctttgattggtgaagactggttcaggaagttaaaatttccactcatcttttctaaaatcagttaacatgatgattaaaatgtccttccctgaagaaagcaagaggcatttctgttgcctatggcagagtctgggtgacaatggcaggcaggtttggaggatgcaagggtgcctgtttctgcctgatcacaccgaactagggactcagcacacagagaggggaagacttcttccagccccaaagactacttccaccttgacaaggtctaacaatataaagattgtttttattgccaaataaacttatgtcagagaatccactaagagcaacaattaaaaacttttaaccaattcaacgtgagatgtacataatccttttcacatcctcctggagagaaaaaactcctcaaatatttaacatttatcaactgtaggtttgttctttttttttttacatggtgagcttttggtggtaacttgtagcaacaaaggtgtttgttttgataagtgggttcaagttgatgtggcttgcttagaaatgaaaaccagattgcgaatcataaagcttctgttggtcctgggcttgatgtccacttatcccctccaaaaggcatcatttacccattt

SEQ ID NO: 52047 - DNA, 1333 bp, Bovine  19866881433192
  misc_feature (1)..(1): n is a, c, g, or t
naagcagaggctgcgtgaagagatgaccaacctagatggcatattaaaaagcagagacattgatgcttttgaactgtggtgttggagaagactcttgagagtcccttagactgcaaggagatccaaccagtccattctaaaggaaatcagtcctgggtgttcattggaaggactgatgctaaagctgaaactccagtactttggccacctcatgcgaagagttgactcattggaaaagaccctgatgctgggagggattgggggcaggaggagaaggggacgacagaggatgagatggctggatggcatcaccgactcgatggacgtgagtttgagtaaactctgggagttggtgatggacagggagacctggcctgtggtttgatccctgggttgggaagatcccttggagaaggaattggcaactcattccagtactcttacctggagaattccatggacagagaagcctggcaggctacagttcatgggatcacaaagagtcagacactaatgagcaactaaatttcacttcttgtaactcaataaagctgtcatatatgtaattaagcacacacacccgaggaaaaatatttttacatttgtccttctccttaacagcatgaggactagagatctcccacttgccttccatatgctcctgtcctgagattaaaactccaagtggatcagaagatgtatttgtcagaattcttaaatgcaaaatactgaaaccaactccagttaacttcataagagacagaattattgaaaggatattagtgcctcataggattcataagagagctggagaacaggctcagaaacagccaaaatcaagataagccaagacttctgagaacctgccacatgacaaaagggtgaattttatggagtgtgaattgtatttcaataaagttttttgtgtttttttgtttgtttgtttcagaatgtgtctgaaatacagacaaggagaaagctataagagaggtctagagagggagtccttgtggaattgtataaagccttgctgctcaaaatgtggtctgtgaattagcaacatgggaaacatctagcaacttgttggaactgcagaatcttttccctcttcccttcaggccccctgagtgagaatctctgttttaacaagatcctcagatgatctgaccgcatatttaagtttggaaagcactgacataaaccatgcaaagtagactgttctcatacctttggacatccagcatcttctcaacactcttctttgtgtgggggaatttcccacattaagtactgtttccaagaggtaggatctagaaacggcttctcagactcc

SEQ ID NO: 52048 - DNA, 1078 bp, Bovine  19866881487736
  misc_feature (1)..(1): n is a, c, g, or t
ntgctccttatagtactactctgagtaaggaccgataagctaatatttttttctaacaagtgtttgacttctaccgccttcattttaattttgctcttgggctttctactaccaaggtaataaaagaagatcttgatttcaaaacagctggggaactacacactaggctttatttagtaacttacaaagaaaaaaaaacccacaaaacctggtacagatataacccatcctcagttaagttcaagtctttaaactccaaaacaggagtattaggaatccaacttaccacagtgctgatcttctttttcccatcagtagctcttaacagacatttgttgtctgagggctcaaagccctccacagaacccttccttggaatgggtttagttcggccatcatctgcatgaaaaatatatcctggtgaacacagtcacagacttaacaggttgacaaaaagttaataaatcgggaagggatacaaagaggatacctgatccacctccactgatctagttctgttagccacattatctgctatcatagatggcttggccacatcttgggaacctacctcctactcccaagatggtaacattgtaatatcaaagcacattaaatctcactaatcatggcgcggcttggaatccttgacaacaaggacagccctgacatgactggggcccactagaaccggaactgacttaggtggctaagtgctgggggccgcaccagccccaatccctaatactctggcccctcagctctgaatgggcccagtataaagtggaggaaggtaggggaagcagaggatgcgcagcagtaagattttgcctgaggctcccagtctctgggcacccgggcccggggtctcgctcggcctcccagcccccttccgaaggccttgccgcgtccacagctgcttacacttcttcagggtgatgaacacgctgcccgacaaccggcacttctggaagagcctagtcagctccgtcaggaactggaacacaacaagcccggccccgttaggcaaccacaaacccccttccggcctcgtcaagtccctgtccctcccgaagaa

SEQ ID NO: 52049 - DNA, 1546 bp, Bovine  19866881544557
  misc_feature (1)..(1): n is a, c, g, or t
nctatagtcctggaagcatctttatgtttataatacacacccatcacttgaatctgtttcacgtagttactgttgggttataactggtctcgatttctgtgcttatttttctctctcttctacaaatttaaggtttttttttttttcttcctagagaaaggagcaggaggatctctcccagaaaggcagctcctcagctgacctgagttcaggctgcctacacttgggctccctgtgctggatgaaacaggcccactgacactcccaccctcaggccaaggggctcggtcgggccctgtttcaatccaggagaacaatgatcatgtgaaatctagaacacacaggaggaagcagagaggttaaagcagctgcggtctccaggttggcctggaaaaagcctgacctgaactgcattaaattcattttaaaaaagtaacctaggactcccctggtggtccaggggttaagtatccacctttcaatgcaggggacacgggtttgatccctggtcaggacactaagatctcacatgtcatagtgaaagattccatatgacccaagtatccagagtactgcagctgagacctgatgcagccaaaaaaatatttaaaaaaagtaagaagggaaaaactgggcctcactaaagtttatacttgaatgttcatagtaactttgtttggaataattaaaatggcaggacttctcaaacatccatcagtacatgaatgaataaatggataatgatacatgaacgccgtggaacaccagagtaaaaaggaatgaactacacaagagaacagggcggaaccgcaaaatcactgctggtgaagaaggtaagacataaagaatccacactatataattgtctataaaattctagaatggtgtaaaattccagaaaacgtgaactaattgataatgacggcagatcagtggttgctcagggaaatggaggtgggaaggggaggggctggagggagccattaggaagggacacaaggaaagttttgggtttcatggatgtgttcattatcttgattgtggtgatgttttcatggcgtaaacttattaaactgtacaatttgtgccatttctggtatatcattttggcttccatcagagccataaaaacagaagcaacataaccacatcagaaaacaatttgaaaaatagagaggcggaaaatagtgattctcctttatttccatggtgggcaggcatggaaagtattttgtgtgtcagcttcttttaaaataccaattatctcacatcaggtcttggggatatgtgttattatcttcttttctagattagaaaaagccaggattcagagaagttaagacacttgcctgaggtcacctagcccgtgtgtagttggtcccggttggggaccatctgagtctagagcctggacccctttcccacattatgttgtctctcttttcaggaatgctcttctgaaaaattccagcctgctttggtaacactgtggccaaagggctttggtttatggctgggtggggagttattatccatcatgcacaca

SEQ ID NO: 52050 - DNA, 1671 bp, Bovine  19866881569774
  misc_feature (1)..(1): n is a, c, g, or t
nctcatccagctcttttgactctttctgcctctgttagtggcagcatatatataaatacatgtatatttataaatataaaatagcaacatcttttatatttgaagggcaaaacatcactatgttcacccattcagcaagtgcatgttaagcattcacagtgtggaagggattgaatttagggccatgagggatccaggggacatataagccacaggtcctgctgtcaaggatcctataatctggtggagaacagaagacattcatgcatgattatgagctagaaaatgctcaatgccatgagagtcctacaagaaaattctttgaggattcctcaacctgagagattactacagaggtagaagggaagtcttcagagtggaggtgcagttaatgctgaaccccaatggatgggcaggatactaaacaaacaggctttttaagcaaaggaataacaacggtaatggcagttctttcagtaggtggtcccaaagatggaggcagcccagctgagaactattccgatattatcccaaatagtccatttggagtgaagcagaattgtgcagaggggcacttgagcaggagaatatggttctagctggatcgtagagagccaaaatgcccaaccagggaattcagacttgatttagcagctagtaggaagccggtggatgtttttggacagtagggaacatcagagtatataagaaaaattaacctgcaaggagatgtaacatggaagggagtgagggataactgaagctggggacggctgagggcagcgtatcagactaccccaagccaatgcagggcactggccatgggagtgaagatgaacagacgggcgccataaaagtgggatgacaggactggggtttggaaaggagggggaggagttgtagaaatcttggtgactgacccaaggatgtttaagggggaaaacatgtaaagaatcaaatgaaatgggagctggtttgtcttggccttttttttttttttttaattctgtttataataagctgtttgaatctggacagggtttctcagcagccacattttgacatttttggccagatgcttctttgtggggctgttgtcctgtccgttgtaggatgttgagctgcatccctagcatctacccaccagatgccagcagcaccccccataactgtcacaaccacagatgtctctaattattgccagatgctctgtggggagcaaaatcacccctggttaagagccaccaacctaaactgttgactgaagagtcttactatggtactcttcagcctgttggcttcagaaataatgggtctgtttcattctttttaaggtaaagtcttttgagaaggacaggcaaacagagaaacgtgtgccggagtctgatctcgtggaccacgttgtacagaaactgaggactaaagtcagtgatgagaggactaccaggtaacgtagtaaacaaaagaccagaaaaccagctgcagctgcctacatagaattttcattcatttactctaagtgtcagtttgatcctttggggagataaagacaggtcaggataacttttttttcccccaaggtaacttttaatgaaccatagtacagcttctgaataactcaattatataactccgtgtaaaactagtcataacttactctcagcatttgtc

SEQ ID NO: 52051 - DNA, 1417 bp, Bovine  19866881599142
  misc_feature (1)..(1): n is a, c, g, or t
ntagtacatcttccaattcccttgttgtgaaaaatcaggaaaaactaaataatgtgttaatgccaatacttaaaacagctcagaaaagcaaaattgcacatgcaggattattggcctgtgactcagcagccatcctgtgttgcggttcggggcgtggacttggggactgacaccagccgccctgcctccacccttgatggtgcgggagtgtgggcaagttctcttacctctctgtgcttctgttttctccttgctaggatgaaatgataacagcccccagggggtggggagtggcaaggatgaatgagagtgatggtgactaagatgtggaatgagagaaatagtctcccgagatagctgggcaggttgggagagagaaggatggtagtggaagaaggttgtgctgtgtaacatgagagaattcctaaagtagcccattgaactgtggattacactgaagaggcatggtggactcctggggatgagggagagctttgaggtcagagtttcttgtcctgggctccaagtggtgccatcagtctagggtagaaatgttatatgaagggaagcaggtgggcagctagatcttcatttgttcagcaagctcttaataagccctatggatgagatttactggtaaggaaggcagaccctgcctgtcctggtagagcttgcataatgggagtggcactaaacacttagttaattagtgagatattcaggttaggtgcctgtaactctagtaggggctgcctgtggttctgttggtgttggcggaatgttgggaaggcctggtcttgggtcttgttccccatggctgtttcattcaggaggtcagcacttcgctgggaagcccgagggccgaactcccatgttggcctggttggccagtttcttcattcaagatactagatagcacctctggtcttggcaagccatcttagacatctaagttattggttcctggagtgtcctggtggttgaaccagccacatatcctttgccattcctgggcaagtgcctggagcaagctaatgagctgttgtgttttatggagaacagggcatcagttcttgaggcttcctcctggtgggcctgttgctgagccttgaggctctgtggccctgttcctgctgtatctcttcagcactttcaccgccaggaacaaataggtcctgccccagcgggagatttgcttctggcaggggactgagtctgagagggggagggtctgcaggagacttagcccagagctccactgtccctcagcctggaataatcctgtatggagccagtggtgggcagtctggggaaagttgcctttgtctcctgccctttgcaaatgtttgtgaagcaaattttctagactgctacccatttcccactgggcttggtacaccggcataagagcccctca

SEQ ID NO: 52052 - DNA, 1675 bp, Bovine  19866881909228
  misc_feature (1)..(1): n is a, c, g, or t
naatgttattagtattcactgttgttgttgttgtttagctgctaagttgtgttcaactctttgtgaccccatggactgtagcctgccaggctcctctgtccatgggattctccaggcaaggatactggagtaggttgccatttccttctccgggggatcttcctgacctagggatcaaatcctcatctcttgggtctcctgcattcgcaggccgatactttaccattgaatcagcagggtagcccctattagcattcacagatagtctttagtccttttattatttcttcaaccagctacagctggtacagtttttcacttgaccttcagatcctagccctgcttctggttaccatctcagactccctctggccaaagcagggactatctaaagcagtgatctcagtgtagatggtcagagaactgtttgctactggtgggataaggaaatgtgaccaaaacataaatctgtatacttttttttacttcatcaagaaaagctcgcttagtgacatggctgattgaaattctggtgtatctctttctcccctagcaggacgttaacaatgagtttgaggcctggcattgccagcagaccattctcggaggaacagtgactgcagggccattcttgacctcttctggtgaggccagagggacccacgtgaggttggggacagaaccatgttcattctgtgcagctggggctagagcagaaccagttgggccatgtggaagacagccatggaaggacgctgaaaaagctgaagcaaagtgagaaatattgactggaatcatataaagttttaaccttagaaacaggggaaaacaatagctttgcagtcagtcagtccctgtgccaggtctccaagtaggtggatcttgacttctggttatagggcagactagagtttagagaacatctgctcagtagggaaaacctaagtatgctggataagatgtgttgtttgaaaagtaaatttaaaagcattgctgagctggcagaaacgtaaggaactgtcttggaggacagagatgaaagggcggtatgaatcagcagggggaagtagccactggagcccacttttgtccttgaggtctctaatgatctccagtgacccaaagcctgcgttttagcaggccatgtgtagggggctcaggacgtagagcctgaggctgaggaactggcaaccttatgattaaaacctcgtgaaggaggaaaaacttgctctggagggggagtggtagagaccttgcattctcatgtatgtatgtgtatgtgtgtgtgtatgtatgtatctgcccttctctatctatctatctatctgtctatatctatctctgctttggttgtgggtggaatggagaaaaagtcttccatgagtttccaactactagcctgcatgaaggtaggttttgggtttgagttcacactacttgtagggcctgagaaagcccaagttgaatgttcagttgaaagtggtcttaggttggcagtactcctgagtcctgatagaaggaaagggaaatctcatctagaagaatacagtttaaattcttgccgaatttccatgaattcacaataaagacccccttctcccctcaaaaaaccataaggaaataagccaccataaggataattaatagaaaaaacatactaagaatcagttccaca

SEQ ID NO: 52053 - DNA, 1292 bp, Bovine  19866881921267
  misc_feature (1)..(1): n is a, c, g, or t
ntctagtctgtaggtgacagagtgccagagttctatacaggtttgtacaacaatcttggcaaacaattcatgaaaatgacttcttggatgcttgtggaaatgtcattctatccaagacatactaatgtccctttataagtgctacataaaaatctgttctacctgtgtcaaggaaacagagaatttcccacccttccttgaacagacttgctaataattactgatctcaaaagcaagtctaatcttggacccactgtttacagttagccaaaaaaatggaaataattaaactaaaaaagattgctttttatacagccttattcagggcgttgatttatttccaccatttctaacacagtaggaatttgttagatatttcctagtggaatactctgacagcttcaaactatgttgcctaatggaagcccagttgcaaaaataatctcaattgctttaaggaattataatcttaaaaagaaatcattaccagaaactgcattcaagaaaacatttagttcaccttaacagtaggtggttaaatgttaatatcaaaatgatttctgagctgatttttttcaaagcagataattagggaaagaagtgaaatgactcctccttataaacaaactgtaatccaaaagattatataagcttttagtttggtaactaaaatgctggttttaagtggtgcttagattatcacaaaagatagcttaaatacatatagaacctgaatgataatacctgtgctatttaatcacccacctaatcacagaaaggaattctgtactaaaattcctttctggtcaacagtggcagtcacagcaaacatacaaagtccccttcatacaaacaagttccattctgacagtgttcataagtccagtttgttcataagtcctataaaattagcctgggtatccaactaacaaaactggctatacagtgctgtactataataggtttataataccttttccacaagtaatatataaaaaacaaatacaaaaaaaacccatttttaatcttatagtacagtaccttgaaaagcaagtacaacagctggcatacaggggctggcactgaatgaacagtcaagagccgtcactgactggaggaaggagtagagacgggaggtgggagagctgaaggaccgtcagcactaggagagggagggcaagctgcagtttcgctcacacctgacagtgatggagtgcacgtctgcatctttcaaagttcgaaacttgtaggtttgtatgtaggggacctacttcacgggggaagtctcaatt

SEQ ID NO: 52054 - DNA, 1153 bp, Bovine  19866881934266
  misc_feature (1)..(1): n is a, c, g, or t
nggaagtccttctaggtagagcctgggtgggggcagcctcccggatgcctgcattgcaccctcacaggggagatggagccaccccagtgtgtggaggagctggaggatgatcgattccagcccgaggatggggagccggggacccagcccaggagcttgctctctgctgacctgtttgcccagagccagctggactgccccctcagccgtctgcagctcttccctctcacgcactgctgtggccctgggcttcgacccaccagccaggaagacaaggctacccagactctcagcccagcttccccgagccagggtgtcatgctgccttgtggggtgactgaggagccccagcgactcttttatggtgagtgctcttagcctcaggactcctcccttagagatgggggaaaagaggggactttccctccccaaacctgctctttgctatttccttccccaaattgagcagcaggggctattgatccctcaactcttcacctgctgtctttctgctcatatactgctgcttgcctgtgctcctcaggccacaagcaggacagattttggccttgccattcttttctgctcatttgtccctttctggagggatccttgggtccatggtgtctccttgggttggaagaagggtacctgggtcttggcttttacatattatggcctgttgagtggcccagccttttgtgtcgtaatagtgatgtaccttccgtaaagtggctagtgttgccctggagaaggctgggggatctgtgactcgctgttgacactgaaggggaaaacccagcttgttctgggagagaagtttcctggaggcagaaggtcccccagcccagttgtcacttgggactttctgtgtttggaaggggaactggagaaagaggttgggcctgcctaggctcattgccagcaaaggggctgtttccaaggctcagtcagataagaccctttcatttgtgggcttcagtggttggttttattagcagtttgccctccttggcaaaagggcagggttagatagccagtgttcttcatttaacacaaagcttatggagggaagggtggttcagaggctatcttgctgggtctgatggagcggattgaggagacgctgcagttattcccagaaggagctgca

SEQ ID NO: 52055 - DNA, 673 bp, Bovine  19866882252716
  misc_feature (1)..(1): n is a, c, g, or t
natcctagggttggtaaaaaaaggcaataattgcttatgccaaactttccctggcttttaaggtgggaacagaagtgcagcaggtgcttaatcagcgtctgacgagaatgaagagacgattgcagcagacagagctgggctcaaggcccagctcttcagggctcactgaacctcagttctcaaatctataaaaggaaagtacttcccctgtacgttttttaaaggtgcaaattaagatcatatgtgtttgggggtgcagagaccgatgagggaatgagacaatgaaccccaagaagtaggctggaggtgtagacccagagcccccatcctcgtcgcctcctgccagaaccagtaacagaaaaacccaagccccatccgtctcagctcactgaacactgctggggcatggtatggaccaccactatcccacccccattttccctgcctcctcctcccccaggtcccagagcaaggctgtggccccggaggccagcccagagaggagctgctccctccacagctgcccccttgaggacccttccagttcttctggaccaccaccagcaacttccaccctccagcctgtgggcccgtccagccccttggcccctgctcactttacctatccccgagtacagcaggagtaccgggggggggaagctccctgccaggg

SEQ ID NO: 52056 - DNA, 1136 bp, Bovine  19866880385874
  misc_feature (1)..(1): n is a, c, g, or t
ncctgcccgtgatgaaagttttagtatctgactccggcagaagtgatactgtgccaggtcatcacttatgctctaatgtttataaatagatgtggtgaggccaaatactttataaaaaagctagattataagtaaaagaagcttgtttatacaaagccagctaaataagctattgcagtgtactttcagttcgtaataatgggagacttgtttatttcctttgaaaggtaaacatttttttgtttgtttccaggccttgggcttccatgtgtcttgtgttttcacatgttttccattgtgtttttgtgtgcttatagggttcaaatttaaactgttaggtacataatattcagcgtgggcaatattatatttctatcttatatggtttctacttttaaataaagattacagaattgtaatttccttaagggcttaaattcttggtcctaaacaaaacttaaaaagctaaaccttgggaaaagggtctttgaataagagaatatagaggtcttcgcattctttctttgaattttcgtattttctagatgccattgtgggtctaagcaaacacatatatatttttttaattcacgtataatcctcattgttttatactgtatgatattagagttcatgaaaatataaaatgtcccagcataactgtaaactgtttttaaaaaacagattacatgagataactactctctgtatctctagagtaaggcaaaccattagcattcatgaaaataaagatagtgattcatcactataaactttcttttccattttctagaactgaattctcttagagttatggtattagaccatagttaattcttacattgtgtttatttgtttgttttgagttttcttcttcacaatgttaaagagcttgaatgctttgttcagaaaagtcataggcatgttttactgattagctagctacgttggctgtcctgaaaccttgcaagtctgaccaaaataaaacacaggcagcataaatgaaatctcagttgaaagactaggtacttcaattttggcttaacaagcaaaacattgtacaatatttatatagttaaagtggctacacaaatgaggaaaaactaaaaaatattaataaattctgcatatttcat

SEQ ID NO: 52057 - DNA, 1816 bp, Bovine  19866880490824
  misc_feature (1)..(1): n is a, c, g, or t
naccactggaaaaaccatagccttgactaggcggacctttgttggcaatgtaacatccctgctttttaatatgctgtctaggttgatcataacttttcttccaaggagcaaacgtcttttaatttcatggttgcagtcaccatctgcagtgattttgacattcccccaaaaagtgtgtcactgtttccattactcccccatttatttgcaatgaagtgatgggaccagatgccatgatctcagttttctgaatgttgagttttaagccaactttttcactctcctcttttcccttcatcaagaggctctttagcccttcttcactctatgccataagggtggtgtcatctgcatatctgagtttattgatatttctcctgacagtctagattccagcttttgcttcatccagcccagcgtttctcatgatgtactctgcatataagttaaataagcaatgtgacaatatacagccttgaatgtactctttttcctgtttggagccagtctgttgttccatgtccagttctaactgttgcttcctgacctgcatacagatttctcaggaggcaggtcaaggtggtctggtattcctatttctttaagaattttccagtttgttgtgatccacatagtcaaagtctttcgcctatgcatgttatgttatgttatgttatgttatgttacctttagggtctccaatatctgctcctggcttgacctacaacttcaaagatagattctcttcctgtgggccacagtcaaaagtctaatattctaagtactgtatttagctgcactctgctgggcgtgaagctgattaaagtaattcacattaacttgtgaatgaaacataaccttcttaaaaggtatatttgcgtttaataggagtcccttaacacaaagagggggaacaccttaattttctaaatttaagacagttactattcttagagcctggattctcacttcccagtcactcctcagcagaatgcagttttgcttctcttgctgaggctaatcactgtgaaaagcttttagggtgaagtcaatggacagggtcaccttttgaataacttttatatttggggaaattcccacattatcctttttccatgtagatatcagttccctagcctcctttgcagctaggatgcaggcatgctgattagatgctacatgcaagattaagcttgcaattgagcagtgtgaataaacagtgcttggggcttctgcatggggcttccattttcctgatgtcattgttggcagggctttcagacacaggaggttcaagatcaggtgcagaagtggcattggtggcagtagcagttgcactgaaacctagttgctggcattttgggcccagaggtagcaatagcagtaattggtactgttgcagaagggggacctcttccaggacctgagagtgggctctggtctaaatctcagaaatgaatttttcgaggagacacatgtgctgacaaagcaagagactttattgggagaggacaccctggtggaaagcaggaggtaacggaacccggaagaactgctctgccacgtggctcgccttctggggttttatgataatccagttagtttctgagttgtctctggccaatcactctgactcaaggtccttcctggtgacacatgcatcatacagtcaagatggattccagtgagaaggattctggaaggttggtaggacatgtacactggagtctcctctctctttttgacgtttcccgaattcttctagtgggtgaaagcctgttagttctgcattccttactgaaaggttgttgttgag

SEQ ID NO: 52058 - DNA, 1638 bp, Bovine  19866880554657
  misc_feature (1)..(1): n is a, c, g, or t
naacaagaaagtctgtactgctacagttcacatataccttcatgataacgtgtaacagttcatgtcgactgctacctaaccaatatatgccctacaataaattgcatacaaaccaaatataatgtaagctctagccagcaggaattgtgtatcacagtcaaaggacaaaagccattaaagatgattttaaatagtaattatataacaagcctgtcacaaaaggccacacgctatatgattctatttatattaaatctcgtccagaacagacaaatccagagacagaaaatagattagtggttatcagggctgtaggagaggaaatgcgaaatgactgctaatgggtcatttaggacttctgggggtgatgaaaacattctggaattagacagtggtggtgtttgtaccactttgtgagtacgccaaaaccactgaactgtgtactttaaaccggtgaattttatagtattatctctcaataattttcaaagagaaaggaaagagaaaggaaagagaatgcttagaagacctttgaggaggtaaattacatgcaccatatagaaactaatactaacactttcactgcagatgaaagatataagttcaggattacttctccatttttccatgttatcttaaatatctccagaaagggggttagagtaaagaagagacctagagaacaacctttatctacaagagctaaaaggaaaaaaaaaaatcaaatatatacatattttatataatcttgattatacatatttcgtaaaaatgaccctaataaatctataataaatgagcgatatgaaggagcttttctttctcagagaaaagttgtctaaaaggaaaagtgaaaacaaagtattcagactagtcacaagcaacagatacctgcacttgaatcctgtaacaacgggtgcagccgtggtgccgagactgtgtatgagatttccaagttcttgtaaagcacacaccagcatatgctggctggcagctacatctgcagagccaagccgggtttccaaattaccatcactcattacagcatctgatagaaacaggaaaattaactaggcatcactgttttattaaaatgtattacaggcaataggtatcaggagtaaaaacatataaaggtaaagaatacctccacttgatatatatgaaatccttgaggcagtaactaaaatactaaaataagacttgcatctacagagaaagaactgaactaatataaccaatttagttcaagcaagctgagtatagatgccttatcactcttctagcaagtggccctgaaagggagaactccataagcagagtggactttggacagtagaagaactaagatgaactacctgttttaaagagaatgtatcttaacttgtatagaaagactatgaattctaaggaactattaaccaccaccctctaagatcaggacatctatgtaacagttcttatcaagttagataatttatgtctcatctatcatagactgctctactctgaaaaaactgacctgtattataaaagtagcttcttttgtattaacataattatataccagtccagcttttcaaagggacaatttctttagcactgttttaaaagagactgtcttagaagatccatacc

SEQ ID NO: 52059 - DNA, 1045 bp, Bovine  19866880575340
  misc_feature (1)..(1): n is a, c, g, or t
naacaggggaactggaacagaattatggtcactgtaaatcaggcactcaatgtattttcaatattgaacgataaatatgtggagaaagttgtgattgaagaaggtaagtagatgcttttttccccggacaaaatgtttaagtctgaattctaaaactttaaagcagagtctatactaataagaggtattcctttcagatcatcttcattttgcttcatctctcctacacaatatgaagccaaaatttagtgttttcattgtatatatgtcaccatcttttatgtcttccaaacaatatttagacataattagtgttttggttgtattaacatctctctcagcttcttttgcttcatctcccacaaatagtagtcagtcagaatttagcatcataattccattcatatttcttctcttacctccctgaaactcttgagtacctctcagcatcctatctcccttatataacgtctctagtcacttcttttttgtgctctatcccatacaacttagcttgctttttctcctactgatctcactttatcttctaaaataccattctgttgctaataaactttcctctatttctaacttttccctaacaatattaaaaaaaattttttttcttttttgctataatggaaacctgacgtcctcctgaccatgaacttccctgtaagtgacagtgattctcaagaccaggagatggacttgacatttccctggctctctcgtggttttcaaactataattcttctttgctccttctctgacatcctcttgatacatcattctcttcccatccacatctctgccttttactgatcttcatatcacattttcacagtgattaaagatttgggctcagggtcatgggtattttttgctgttctgagtcttatcattctgctgctgctgctgctgctgctgctaagtcacttcagtcgtgtccgactccatgcgaccccatagacagcagcctaccaggctcctcagtccatgggattttccaggcaagagtacggagtcggttgccatgccttct

SEQ ID NO: 52060 - DNA, 1382 bp, Bovine  19866880769631
  misc_feature (1)..(1): n is a, c, g, or t
nagtgttctctattttgccttggtaacccgttgcccataggtatctgagtttcactgggaagatccaaagccataaagtccctgccctgagattgtctcccatctttagggatcgcaactgaatttattccatttcccaggaattagtgcaatattagaactttctaaaagcattaatacctactccgtaagcctgcatctctaaggtgctgtgttcacttttagctaaaaaatcaaattttaagtctctccaacacttaacgactacgattttcaggccttccctgtgtagtatttctaaggtatttaaatgtttattaaatgaataaaattaaccagtatttattctaaaagcattcacatatatgcatcaagcagatcacttcaaattctgcaagtttgaatttttttccaagtaattccatttatgaacactagtttaatgaaacagtaacttttaaaaacgaaagacagataatgtgacatacactcttggtaaaaaactgagaaacagaatattaacccagaatattaaacaaaacaacttttagtcccccattccctgttcctatatcaactaaagattcttaaaataatttaaagcacttggatatccttggaaagtaatattaaaatgtacagtatttctgcattacattttcatagtattagaaggaatagtaaattgcatattctttcattcaaaatatggaaatatgaaatattaaaacattttacaaaattgtaattggtttgtgctgggttttacctagttttaacacagttatttttattacatactacatacatttgagggcataagaaatatatttttcttgattgtacaaaatgattcattgcaaaatgcttaaatacagctctctaggaacatttccatgttcttatcagtgaccataaagtgaagagaaggaatttttgagtgtcagtgtagaggaaagtgggatggaaggtgactgagatccagagtttaggtgactggcaagctcatccaattaggaggctgcagagttatggatgggacccaggattttcttaactaaaaatgcttcagattagtgtgctcaagaagaaggggctagggaatctaattacgactgtagaaacttcaaaactcagttaggtgtgtgtacagtaacgcctgcctgttgccgtaagtgccatgtccgccacaaccccagcttcagcacacttgctattagcagctgattctttttacagagattcacaaatgggaatcaagttctaacccctcttcttttccagagttacagtgatgctgcatgcttcttcctttctctctcccaccagcggtggcttgaggagataagaatgttgccaggtagatccagtatagagacgtg

SEQ ID NO: 52061 - DNA, 1331 bp, Bovine  19866880785623
  misc_feature (1)..(1): n is a, c, g, or t
naattgaggcttaaagagttacagcagtagtagaagagcagacaccaggagcctagactttgctgtcagttccttgattttcctctctctactccagtgccttcagatagtcactgatccagtagtacatttgttggaactagaggaatgaagtaatccagcagtagtggagtcaaatatgtttcttttaaaagggaagggttttaaagagtacccacttcgggttcttgtacaagtgacaagttgaataaattacaggtcctgcatttgtcagtcatcaccttgctcgagtactgctcttgtggaagtgtgtcttcccagtgtctcctaaagatctagaaacagaaaagagccgaggagactccttcacatggcaggtaaccttggaaggacgtgctggtgctctctgtggtaggttgagtttggtctttccctttcctctggctttttccatcttttaacttcacatatacttgtatgttttaacttgagggggagaatctgcttctggtgatttttgttattgaaataattgatatgttggcaattataatagaagtatcatgtaaaaaaacaaatttaagcattcttctctttgggatattttattataatatgatctacttgagaaatgtcaagattgctttgtgttaagtgggcattcatttcccttttcagaaaaactagggttgaagttaattaatatcaactaagtatggtttctatttagctttttatatatgtgaaagttgtacccttctacaacacacagaccattaaaaatagtatccacattgaaaatttaagctaaggaaaagacatggaagcacagactttttttgaagcacattttcttagaaaagcatcttttttaagagtaaaaatgacacgaataaacaaaaccaaaatcaatgcttccttgaatctgagtctaaattttaaatatttacttttttctatatatgtgataactccttatagaacttgtatgtttcaggtaacatctgtgaaacctaacatgctgacttaaaaggcaaccgggttcctcagaactagtgtagaattggtagacttgaaggtccactttgagtttaagggctgaataaagccccaagaaagcaacattttgttgatttggttttccgtctcttttagtaattctaggaagtttgatttgtttttttgtttttttcactttcactggaagtagaagccactagtttcctttttttactagagtttcaagaatttttttggttttcacacatttctttattcttaaaaaaatgtgaatgctgtaccaaaatgaatgctttttttcagcttcatta

SEQ ID NO: 52062 - DNA, 884 bp, Bovine  19866881217109
  misc_feature (1)..(1): n is a, c, g, or t
naagcagagggccaccatatctccagggaccacagcgggcttgctcagtgaggatgaccaggatagccaagataagctaaatgtcagttcccgcctctgtttatttttgaggatcacacattgccaataatgtcttagtgaatttccccctggcctggcaaggtggagattgggagtcagaatgaaattgattaaaacaaatgaaagaaatgtgtatttcttgcaagtccaagatttcatatccactgagcttataattctttttgcatctcagaaatgaagatgacatttccccttgtcacatggaggagatatagttactctgaaggtggaagtggaaatgataaggactgtaagttctgtgagggcagggatctaatctgtaagtcttcagtaagcaggtattgaatatgtgataagtgaataaataaaccaaatataaacagttatttttgcttgacaggtgtaggtagaaaaactgggagagagaccctccctgagcgtagagggctggcctgtgcggcacgaggccggaacccgtgggatatccacgcagcttgagctatggctgacagtggcagaacgcctcaggcccgggctctcctgcagcagtgcctgcacgcccggctgcaagtacgcccggccgagggggacgtcgaggccgaatgggtggaggttcaaagaggattagcgatctacgtgtgctttttcaagggagctgataaagaacttcttcccaaaatggttaatacactgttaaatgtgaaattaagtgaaacagaaaatggcaagcacgtctctatattggatctacctggcaacattcttatcatccctcaagccacccttgggggtagagtaaaaggaagaagcatgcagtatca

SEQ ID NO: 52063 - DNA, 783 bp, Bovine  19866880504100
  misc_feature (1)..(1): n is a, c, g, or t
ntttaagcacagggccactttctaaatcaattcaatttctaccaaaatttctcatcataaaatttctgcctgaaagagtccagcaaaaaatgcattccctgccaggttcctctgacacagctcaggtttacagctctccttcagaatttcagcaaccttggctaaatcaccagatgggtctgaaagaatgtcattacaatgcccttatgggagttggcaaatagatgtcaacaaaagctttgtgctttatccagaacagtccatgctgagaagtccaaaatctaaatctcactgctgaaaaatctgcaactagaaaataattcccccctgaactctgcagccatgctccctctttgctcactctctgtctcctcatttttctttttaaggaagaagcccatgttatttaaacttcaggctttataagaacaaaatattttaaatgagttacagtttcaaaagttataaaacaggctaaatcaaagacactgaacaatagcagcattttggggggactgaagtctctgggtacttaaaacgattcatttgtgtgtggggggtacacctccacaattttacccttttgtgtactatctcctttgtcttatatttgttccatgaaacagacggtgggtccttctctgagaaaagataaatccacatgaccagttactggcactgttggaaagttctgtcttctggattacaacggtatccccccagccccaaaactggctttgcagaaagcagggcacaagcatttccaggaggaaacctgttagg

SEQ ID NO: 52064 - DNA, 800 bp, Bovine  19866881136699
  misc_feature (1)..(1): n is a, c, g, or t
natctctacattctgtttttcacttttagaaatgattctgccctcttgacctgttttgaccttcataatactatgaggtacaatcatcagctggccctatttctcatcttaatggtttttattaatttatagggatggtggattcatttcgatatttggcaaaatcatacaatattgtaaagtttaaaaataaaaaaacaaacaaaaaatttatagggaaaagagtgaaataatgggacaattcaaacacagcattccaaacactcacagctatacgagcagtgtgctttcattaagggaatttattagctgtaaaaactctgaacttggctccttaagcccaagattgcatcaggtatgcaaaacagaaagaacataagatctgtaataccctcgaggctggtagggtatcaaggtactccttggacatgccatcactgtaatgaattttgaatcagtaacactgtctccccagcacatactgggcagagtttttcaaatctctggggaaatacaaggtagaaaatggccatataaaagtgaaactaaaataatacattttagttgtgaaagagccagcttgttggtgtagcagttttgttcatatatgcattaaacaaaggacaaaattttgagcatcaattctatttgggggatttaattagaccaaacatattcctactaagatttacccttattaatactgaaccttagtccaatatatagcatcatttagcactgtaactgagggaaaaatatggtcttaaagagacccccattggatggtatagagatataga

SEQ ID NO: 52065 - DNA, 1162 bp, Bovine  19866881187397
  misc_feature (1)..(1): n is a, c, g, or t
natgcagagacttttctagttgctttcaaatgaggagtgatttccaagtgaggattgaatgtaagcagacatcatccagaggccaaaaatataccatttcagctacttgcatccgtttgtgcgatgtttttttccccttttaatttttcacagggctgcaaatacagcccagagaactgtacattgaggccatgcgcatatggttttatttactattgcatgcaggattttgttgggctataaaagaaatagatttcagctgaagcaattagaacagtaccttctaagaccactgtgcacatgagcacgtacccctggctgctcccctggaagagcgtgcgatgcactgaaaggagatgaggggaagcgtgggaagctcttcctctgtttctctaaccctcggaacatgctgtttgtgagcctaaacatgggcggtgtgatcggcaaggacaggctgacacgcttgggtccacacttacgggtaagggaaattgaactgaatttgtttgtggatgcggattggagagagaaacagaagactgtatagaaaattaatttgctgcattttgagtccctttctctctcttttaacctgtcaaggcaaattttccaatgtgtttccacccacagtttagcataagtaaaaatgtctagaaggcactctggcaatgtttttgaagtctcctcagctcccacaagcatcaccatgtaaagcccaaatagccctgaaaaagtgacttcgctgtattgctcttggctcagttcagttgtgtaaccagtgactttagagtgtgacatacacgcttctgtgtgtgtcaagaaagcggccaagtcagagataggaactgtctttccttgcctgcagtcacaggccaaaggaaatgaatgaatctgttcaatgacttttgaagctctcagctgcattgagaattaaaacaaagagtttccagagatctgaggaggttaggagagagatttctaggaagagagatactgtttatttctgctttttaaaaatacacttaatgggagtataattgctttacgatgttgtgttagttgctactccacagcaaaaatgaagcagctgtgtgtgcacatatgtcccccctatttttggatttcttttccacgcaggtcaccacagagtctagtgagggtg

SEQ ID NO: 52066 - DNA, 792 bp, Bovine  19866881743997
  misc_feature (1)..(1): n is a, c, g, or t
natatccttgtaaccattgactttgaaattttctttctaaacccctttgataatttactttgtaaaaaggcagatgagaaagaagaggacaaaaatttgagtaaagttgcattgactttccttgggatggcatttctattgggacttatgaatgcttgtggaggaatcattttagagctagaaaggagtttgcagagatcatcagatacaagttcgttattttataaaagcgcgttcacactgtatgtcagtcagactgaaattcaaaacacaatgtctcatatgaacattacctacagaggagagtgacagacacacggttttctgttttaagaattatttggtctgcagtataaaggatatatcaagagatgagtcactgtcctttgatcattgatgctgaaggtaaatgtctttaagatcattttctccaggtatgtctgaggttgtccttgcctgggttgctggtgtgtgcacggccccttggtttcttgtcccaaattgttctcaagtgtttatatttgcagcagttattgaagactgggttttaagctctaagattaacttggttcgatcaggaattgcctatgatttctttggagtcctgttaaaatttctctgcctattgtttttacaaagtgagttttgctaaatcagtactcagagtatttaaaaattccagcagactgagtggacttcaatgcaactgcctacttgcatttatgactctgaaataaagataaatttggcctttgacacattttgtaactagtgtataggtcaagcaactct

SEQ ID NO: 52067 - DNA, 1873 bp, Bovine  19866880381128
  misc_feature (1)..(1): n is a, c, g, or t
ntgcttattcctgtcctattttgatgatcacagctttatgttatataggttttaaaatatcttaaggcatattccccattttcctatgtttaatcttggctggaaaatgtttttaggtgtcttttttcctagaagaataaatgagtggtatattttatgagccatgtgtatgtaaaatatatttccattgctttcacatatgaacacacacacaaaatcaaaactttgactgggcatagcattcttgagtctacatatttttattttgatgacctataattattcttcccctaaaatgtagtattgcagagatgattgaatttgatgcttaattttagataatttatatataatgtgtagcctttctgaattttatataatggctgaataggatattcagtggaatattcttccacttctttcttctaatcaaacgtttttttcagtttgccttcaggatttggattcagtgattctatcttgagtacagtgaatttttcaatgtgtaaatatgcttatagggctaatgaaaaatattttaattatatttttgaatttctcttctaattattctgtactcctcagacacaactccaattctaaaatttagttttgaccctgtccagttttgtgtattaatttttcaatcaccttttctctccttggtctggtgtctttgctttttgcctctgtttcaaatctaggagagtttcggaacttattcaacgtcactaattcagtattccgtagattgatctttctatttaatgcctttaatttgaatataaacactgtaaatcccacaataatatgctcaataataatgtgaattttcatataacaatggactcttcttcagtataagcaaattgccaatcaggagcagttaaagatattatcttcttgggatgacaggaagacggggccaataaagaaacactgggtttcttgggaagcatggaagaagaaatggtaccttgttttcaggattatttcagtttaattttgctgaattgggcagttaaaaagtatcatcctcctaggaaactcctggaactgctgccactcttcttgaaaacagccaactgcagagccaagaataatctctattgacatctggtggagtaggtaggcttcactaggtggtaccaatcagtagcgaacagcagcatcaatttgggttgtgcagtttaatcttgccataacataattctgcattgtatgcagttaaatttgacgggtattaaacccactccggtattctcacctggaaaatctcacaggtagaggagtctggtaggtgatagtctatgggagtggaaaagagttggacactgcttagcgactaaacaacaacaataacagcaacaactttatccctactcatcatttagtttcaaggagcccttccttagctcacccttctttgtttacatcatgatctccccccctttttaggggcttttaggttcttttatattcctgcatttctctaaaatctggacagaagaaatctaggcaaacccacaccatattggatattcttctcacagagttcctcctagttctttattcctctgccactttccccgttcatatactttaagatctaaataacctaacccacagtaactcataatttactcccctccatgacccccacttactctgttgtttctcagagtagctgaatgacttagagagatggtcatgattgggttggaagtaagcctcaatctgaaatctgaagttcacaccatacagttgataaatagctactcttttattgatacttgttgatcacaattaaaacacttgaataggaataataatagtctccgaagataaaatgtaccaaaaaccaatattttaa

SEQ ID NO: 52068 - DNA, 1662 bp, Bovine  19866880442895
  misc_feature (1)..(1): n is a, c, g, or t
nagtttgcaacttggttatctttcattatttacaaccacagtggttaaggactcctgtgcgtctgaacatctgttttgcagcggcagagcctggggtgggcaggaagcacgtgcctggggttctgtgatagggatccagtgatccaactcagtgtcaagggggcaggaccgcatggaggctctcccaaggtgggaggggaaggatatatttactcactttagcagctggtgctcaggctgtgggcagagtgtaagtggggctatacacaggcgtttggcacccaggacaggatgtcaacgcggtgcctgtttaaaaccactttgtaaatcagcattcgaattgtaccggcctacacttctttttagccggtctgctcttcttccagaacctactttgttctcatttctcctctagtcagaataccaagggcatgctgctttttttttttttctttttacagacagggaccaaggttcagttgaaatccgaggctcctggacccagatccaaggtggaggacacttgtcaagctgggcttccttgtgctttgtcacctccaggacagagctggctcattgtcggggggctggtgaaagagtcagtcaccccagagagtctgtggatccagataccagtcaccctcttgcaattcgggcagcagaacagctccaagacttcctgtcttggcagagctgtgtcctcctctgggatcccagggtccagccttggtgggaactggatcctgtgatccttcctgttcaggtcttgcctcagagaggatgccagctgcacccaggggctccatgcaattaagtggcacctctctgattcatagtaaagccttttgtcctgggatgggctggctttggagaggaagggcatgaaatatgttctgttagcaggtaagcactttgcctttgtaagagataaaaggtggttctgggagtttccagcatctaagttccaaaattttgtgaatatgttgaagagatgactcagaactcaaacttggcacccgcttttgacatcagccgtgttattttctccagcatccatctggcgcctcggggctccaaggctccttgtggccgtgatgtctctgagatcttcaggggacttgaggtcaccttcatctttgtgtccccagaacttagtgcgtacctgacacagagtaggtgctgtagaaatcatcatcatggataaatgcgttgattgcgtgacctgtatttaatacaactctttggaaatattggagctttttatttttaagataaaggcagacataaagcaaatttgactctgttgcctaggtaatgtacatttttatctcatggcgtctgtgacattgctcttgattcccttgtacttctctgtgacttctctctaaagaaagagttctcctcccctgtgcacagtggcttggtggttccagggttctctccttggttctgttcttgtcccactctgcacattctccccggggagcaccatccatccctgtggcttcacggccaagtgcatgatgatggctccaaagccgcattcctgtgcagacctttcttgcactaccagacacctgggtgtgttgcgatggatggtccacgtgcatctcaggttcagctctggcaaagccaatcttgggttgcccactcctgccccat

SEQ ID NO: 52069 - DNA, 2203 bp, Bovine  19866880518965
  misc_feature (1)..(1): n is a, c, g, or t
nttcttggactgtgtagcacttaaagacctttgctgcaaaaaatgctcagtaatatagtatcagtggccaggaataaagttagagacacaactcttgaatagaaatgttgggtttggaaaaatcatcggtaagcaaaaccaactagaataatagtgttcaatgaaaacgttaaccactagagggagagttactgtaaatatacaagtttaaatgaatttatgtgattatcagaacaaaagagagagaaaataaagggaagagaattaagagggagctaagacctgagataaatacctctggttgggaacgtgggcgagggtagtgttgatggataagtcataggcaagtgtgtgttttcccaaaaaatgagttgaaagataggggttgagagacttcttgagttagactaacatatttagaatgaatgttaagtggtaaaatcatagaaagaaatgaaatataggctttaatgccccaagtcacaggaaaagcagactgaattctcccatccatcaaaaagccacacaaaagaaagcaaagactgttaaagagaatctgagtcatttttccaagcctggatctgagccaggtgagcacgcagggtgttgttcccttggtttttgacacagttgaaagcatattatacaagacagtttatatcttatgggaattaaggtgctattttggagtctccagaaaattgccatggtagaagtcatttaaaaaatatacattttagtttactcactaaaaatttagaataaagtttgagaggattttttcaagtttgaattcagacctaatttcagaagaggagtcttcctcctttggattcatctctctatatcagggattggcagacttttcctgtcaagggccaggtagtaagtaagttaggctctggcagccactgacctctgcatctcagtgtataagcagcgattgaccataggccgatgaaggagcaaggctgagtgctaataaaattgtatcctcagtggcagcgagcagggtgggtttggcctgaaggtttgctgacccctgcatctgtttggttcagagtgaggtcgttgcagtctctttgcagtcaagcccctgacatatgaatgactttctttccaagagcatcttaaatccaacagagttagtctaggtacccaactaacacacttggctatataatactggactataataaatggcaacccactccagtagtcttgcctggagaatcccatggacagaggagcctggcaggctacagttcatagggccgcagagtctgacacgactaaagtgaaatagcatgcagtctactataataggcttataatacctttcacccaaatcatgcataaaaaaacaaacacaaaaagtaaagcatttttaatcttacaggacagtaccttgaaaagttcagcaatacagtacaatggctggtcaacaggggctggcaccgagtgaacaggcaaggagagttactgactgccggagggagaggatgtgggagatggtagagccgaaggagcgtcagcaataggagacggagggccggctgcagtgtcactcacaggggacgccgatggcacaggctctggttccttggccggaaatagatgcatgttcgcctctttgaatgtcttagctgggaggttcgtatgtaggagactttaccatctttgcactcagaagttaaggaaaatttctggcttccatgcatcttccttgatggacaagtttaactatgtatcaagaagtaagccttatctctctgggtgagaaatggaaatgagagaatgcagtacttggcatataatctattggataggatgaaccgtttttttttttttttttggtaaattactgggtgggccaaaaagtctgtttaggctttccaaaattttttggccaacccaatacgtaagcgatattgaaacacccaatattttatgtgaaagaagtgcttggttgtgtcgaaatgctgccctggcccttgaagcatccttggctgagacagcgtgcatctttttcgtttctgaattcagatcaaactccagttttaaataaggaaaccaagcagaaggcaggcagccggcctgtttcacaaaggctctggatcagcagctccctccccgaggggggtgactctggcctgggagccccatagccacacgcggggcgcttccccacctccgggcgggg

SEQ ID NO: 52070 - DNA, 3149 bp, Bovine  19866880540720
  misc_feature (1)..(1): n is a, c, g, or t
nttttttctgcttttccctttcttccaaataaaaataaattgctttctcttcatccaaatttatctgataccaatatttttcaaatattttggggtctgttcatataaacttgccattttcatgataccatataaagatggaatgagctagaaagtgttttcccaatggtgaaaaaagtgttttggtgaacaaagccataccccccctttcttttgactttatttcctctgtcttttacattcagtaaccttccaaggcactcttcattcatggacagtttattgggtacctgctatgtgccagctccttggaacacacagaagtgtttcttgcccataaacccccctcagagcagttggagaagcgatttgggggtgcctccacagctgcccttgagtctctcactgctccacaccaggctccttcagagtggctggctctgcccgtctcccccttccaactggctcttctcagtgaccatcttcagttttctgccctgcccagccagccacagacaacagggatgacccacctaactgcctgccgcaaaccttctctatgtttcccagtgttaaactgttactctcactaaaagatttctctgcttctgttttccctgataccaggcccacctattcttcctttcaccttgttttgagctttctctgactttgctggtggttatttttccacccacatcttaaatcttgtttctcctaccatgacttcacttatcacataaatattatacacaattttcatgtccagcctgtatccccctttgtgggcatctgacagattctctggtgtcccacaagaactttgacctcatgtccaaggctaaatgatcttttccctcaaaccagttctttttcacgttttcctaagccaaaacctggggaatttaactgaatactaattaggtggggttttttccctttaattcaaagctgattgtgagcaaacattgcttctgaagaataaacagactgaaaaatactcagccgttatctttttgtatgcttttgtttgatgctattaatagccagtttgattttactcttaactaaaattgtattcataatacatttatgaaataatcataccaagttttttcttatgccaaccagatcctccaaatgtacatattattggaaatctgccttttagtgtatcaactccactgattatcaaatggcttgaaaatgtttctcaaagaaatggaccatttgcatatggtagaacccggatgatgttgacttttcaaaaggaagtggcagaggtaagttttaactttttatggttgttttatcacaagatcaaattaccagaacaaaataaaaagaatattatcagtttggagttgagaaaggtaagggggtttggtgtctcattattcagtatatagactttggctcacataagcctgctaggcattctcatgattggagtgttccaagtttgtctctaaaaagtaaaccctcagagcagtgaaagcagtttttgaagcaaagaggtttaaggagggaatctgcaggctataagcagttcttttttatgacatatgaatatagaagagtgtgtcatgtatattcacggctttgtgtgtgtatggcttaatcaaaagagcagccgaatccccaccacccaagtcaaactgttgttgttcaattgcatctgactctttgcaaccccatggactggagctcaccaggcttccctgtccttcacaatctcctggagtctgctcagactcgtgtccattgaatcggtgatgccatccaaccatctcgccctccgtggtcctcttcactgtggtattgaccatctagcgatgtccatgtatagcgtcgtctcttatgttgttgaaagacggtatttgctgtgaccagtgtgttctcttggcaaaattgttaacttttgccctgcttcattttgtactccaaggccaaacttgcctgttattccaggtgtctcttgacttcctacttttgcattctagtccccctgtgataaaaatgacatctttttttggtgttagttctagaagatcttgtaggtcttcatagaacccttcagcttctttggcattagtagttggggcatagacttgattactataatattgaattgtttgccttagaaatgaaggattatttctgattcttctgatgaaggaaatgaaagatcattctgtcatatttgagatcgcattcaggtactgcatttcagattctttcattgactgtgagggctactcccatttcttttaaggggttcttgcccacagtgatagatacaatggtcatctgaattaaatttacccgttcacatccattttagttcactgattcctaaaatgttgatgttccctcttgccatctcctgtttgaccatatctggtttaccttgattcatggacctagcgttccaggttcctatggagtactctcgtttacagcatcggacattactttcaccaccagccacatccacagctgggcgtcgtttcccctttggctcagcctcttcattccttctggagttatttctctgctcttctctagtagcatattggacacctactgacctaaggggttcttctttcagtgccatacctttttgccttttcatattcttcatggggttctcaaggtgagaatgccaaggtggtttgctgtttccttctccagtggaccactttttgtcagaactctccaccatgacctgtccatctgggtggccccctacacagagtggctcaaagtttcagtaagttgcacaaagctgtggtccatgtgatcattttgataagttttctgtgattgtggttttcattctgtctgccctctgatggatgagggcaagaggctcgtggaagcttcccaatgggaggtactagctatggtttggaaaacgggtcttgctctggtgggcatggtcatgctcagtaaatctttaatccaactaaagtctttaatcccattaaatctttaaatccaattaaagttaagttaataattagattactaacatctctgacaccctcttgtatgcctctttctgattgcatctcctgttttccatctattaccaggataatctataccatgcatttgcaatttattattccctacatagtttatca

SEQ ID NO: 52071 - DNA, 1306 bp, Bovine  19866880645752
  misc_feature (1)..(1): n is a, c, g, or t
ncttctaaaattttatcaggcaacagtctaggcgagaaattaaaagttaattgattttggtcaaaggtcactttgtcatggtaaattacagtagaaacggttatctgggaagatgcttaaagtaaatgtggaccagagtgagtttaaatggaataaacccttttccatccctaggggctttctaattacttgtccgtcttctggatgtgacacgtcttgccaaatctttttgcttccgaggataaaggtcagaggtggtgagtggtttgctctggacactctctactctattcctcaacaaagacaagttacattaaattaacgatgcttaagcttcagggctccttctaaaatcctgggacaggccccaacacatgtttaccagtactcttgtacaagttttggaagaaagatcttttcatcttcttttttaaggagaataccaaattgtatgagcttcatatccaacaaaacctggattctcccagacctacaacccctctcctcttcagccttcacctctttatccaacagcttctgcaaatgttagacacacacacacacaaagcagcacactactcaggactccactatggctgtcaggacttcaccttccagacggggcccaggctgacctcaagaacagccttatttctcagatagggaggagggcagagaaaagagggagacttgattattgctaaagtggatgaaaacgaaattctggtgatctcaactttctcatagaactgacctgaacattattcttaaattgaaaactcagtatatgtcagtttaactccccatggtaaacagcgtacgggggacatggcttttttttccaatgaattttttaaatggtggtaaatcatacacaacataaaatttgccattttaaccattattaaaatatagcttaatggcattaagcacatgtactctgttgagcaatcgtcaccaccaactgccagaactcacttcaccttacaaacttttggggccaacccaatactttctgtctctatgaatctgacaactcaaggtacctcatggggcctcccaggtggctcagtggtaaagaatccaacagccaaggcaggagacacaggtttgatccctggttgggatcaaactccagtattcttgcctggagaatgccatggacagaggagctgagctggctacagtccatggggttgcaaagagttgaacacgactgtgcaacttaacacacacacagcacaggcatgcaagtgtgtgaaattaaacagtatctgtcttgtgactggcttaatttactgagcat

SEQ ID NO: 52072 - DNA, 1215 bp, Bovine  19866880713196
  misc_feature (1)..(1): n is a, c, g, or t
nactatattttacattgtggcaaatccgtggtttcacccactgcatgctaaatacgatctaattatcttcctcccaattctctccttcttcacttgttttacgtgttaggtaagaatccacttgtcagtggtgggtcgggatctgagatctctccatccgcaactgtgcagtaaggacaaaactcagaaaggtcccttggctttgccccactggataagcaaagcgaaggccatctgccatcctgtgcttcagtatgaatgggtatgtcgcagaaggtctccaggggggctatgtttgtgtgtgcatgcgtttcatcccaaattcctccagtccgctgcagaggagagcgaggggcctactgttatgggggtactttagccataaatgaccattatatttctgagcagcccctcaattccccttgctttcctcctggttacagcaccataattctcggccggaaagggagtgtaaatagctctcccgccgctgatgccacttagcgggctgcaaattgatgtggatggctctttagctttggagactgtgtgtttcaccttcacagcgcgcatgctttcgttggcctggggcttcagcgcctgagataaatccttaactagagcgtggctctctgcactgcaacacatcagaaccggtggatggaaatctcaaacattttggaaatttacaccttgtcactctccgagggcaatgattttaagaaattatgccttctctacctacctttgcatagtataagtctaaaaacccggcaccatctctaactccagctgaagcgctgaaggtcagagaggttaagacaagcccaagctttgtgcccgtttcttattattatgctaatcatatgcatggtctttctgcactcacacagtcattttcatgaccccccaaaatacatcagtgtttcaggtaatgttaatatttaaaacagtggcaaatgactgaaaatttcaagtaaagactcacattttgcccttagcttgtgatgtttgggagaatggaggaaagataggacctaaaatgtggtttttgctttctattaactctttcttggtttggttgtttttccccctggctttggagttcatactgtaaaattcctaatgacctgctttctcatgattttgctggatgggtgaaaattaattttaggacatatattaatatattttctatgaaattatcttgggatt

SEQ ID NO: 52073 - DNA, 3168 bp, Bovine  19866880716753
  misc_feature (1)..(1): n is a, c, g, or t
ncacaggaaaattgattcttccctttgcctaaatctgtttttgtttttttttaattactgtacatattctagtattttaatcctatggtgtaggggaatcttggagaagggcatggcaacccacttcagtattcttacctggagaatcccatggacagaggagcctggtgggctgtagtccatggggttgtgaagagtcggacacgactgaagcgacttagtacataggggaatcttgtgtgtgtatgtgcgtgtgttttaaatgcatgaaattcaaagtaaaaaacctgtcattgacaactctcatgtatgataggtggggtatacgtgatgtattgatgatgaatctgtgtgtaacattttctggtgtgtgaggtgttttcacatatatgatttcttttcacaaaatttgtattattgattggtgaacttaagcaattgtgttgtattaataacatccctgtttacaaaataggaggtgaggttgaacacaggaaatgccctgctctactgcttcttaagtggtgtgacttgaacctcagtcttttgatttcaaatcctcaagtcttgtctttactaccagactaatatgagagcctaaccagaagggaacatttctgagttgcttaatatttaatgttaactatttttatttatgaatcatagaagaacatattagcatgaggtcatggagttactgtgagggtgaagtttaggaaacaaagcttccttgggaaaaccttctgaaacatggtatgtttggggatgatttctgaatgagtgtctagctgaagatggaaaaacacttagtccaggattagggggtaatttttaaaaacaagtagaaagaagagaaacatgcttggattaagtgcagttcatggttagtatgcaggcaggcgtcagaggccatggccgagtgtatctgaaattcactgggatcgtggcttagacatagacttcatggagttcctgatcatctggacaattctagagcagtaagagtgggtactgagcagcccttctttgactgcattgtgctaacttgggctaagaggcaaagtggctagaacacaggaggaggagttgatggactccagtcagcctcccaaggtgtcagttgcgtgtgggttaaacaaatgaggaaactccaggcttgtctgccccagagggtcatgagaagccctagatgtgaggagcgcaaaagtgctaactctaaactcaggggcattttcccacggcctccctcatttgctcgtcaagcccaccctttcttttgggacctcaaaacaggtggatgacctgctacacttatacgggtcagcagtggatggcgttccccgagacggcacgtgggagagccaggttgacgttcactttcaggatcgtcaagccgtgactgtgatggtcaagccggaaaccagggtagaagatgttctgactctggcctgcaaggtagtggattttgctgtagaaatacacttctgaatgggataatcattaatgttgccctcctttgcctgcttaatttgggtggtgtttaagacctcactttctacaggaaggaacaaatttgttaattaacatattcattatagcattctctttctccatgttttagaggagtaagttgagtcatggcccaatgccttcatgaagaacttcagctattttactgaaattctgtatatactcctttgtatctgggataattatgaagtctctttcgttatttaaggtacttatagatggtattctgtgagaaagtggcatgaacttttgcggtggtttgatttgatgctagttttatcaagtttctccggattaaatgagtcactcaataccactcacagttgcttcatggagattgttatgagatggtgtttcattcattattcaaactgggttttatttctgagaagaaagtttatgatatattttcaagagagccctctgagatccatgaaaccgactcagcagcatcagataatatgctttcagaccaccagatgggcgcagtagagctgaaatattttttaagttttcagagaaaatgcaaacatatgaaatggttaaaaaactgtcgagtttggtagctctttaccacaaatgcttattagataatctttcattttagtcctcctttttcactttgacttacgccctaggattccagatatttgtatatgcagcttatactgttaatgaatttaattttcttttgctccattatgtcaggtgattattcaggcagtcaataatattattcagtaccaataatatcaagttggtaaatattctgatagaggaggtcagatgtagtgggtgagttagatccagttagaacataggcttgagataatttctcattgttgaaaatgtgtctgagacagaatgtgtgggtgtatatatatatttatgtgtgtgtatatatatttatatataccttttccttgtgaaaaatggttggaacaggaaatcgtaattctgaagtctgcagagtatgagatggttgacatttcacaaattagtaacaggaaacaatttaaatttaggtacctgtctattaaaagagagcagttctgaccaccatcactgcttcaaaatacatctcttgcttttagtgataagtggtatcatttagagaaaatcttcttaaaaataatttcccttttttcttttttgcacactgaaacttgagctcttgtatatacttaaactcagcatattatagaagatatttttaaaagaaatttccacttttatttttagtgaacaatggtgcatttagaaagaacatttaacatctgaatagctgtctttttctccctagatgaggcagttggaacccagccattatggcctacaacttcggaagttagtggacgagaacgttgagtactgtattcctgcaccctacgaatatatgcaggaccaggtgagtgttcttcggctttggtaagggaccgatccatgggccaaggaaacccatccatggccccttaatttaaaaaaatagtgtcattcgggggaaaaaattctgtttaaattgtcatttagcttggaaacaatcaaaataaatttgcaagatactgtgacttcagatcctctgattttgcgggtcttcccttttgtaggtttatgatagatagaagtctttccactaag

SEQ ID NO: 52074 - DNA, 958 bp, Bovine  19866880719353
  misc_feature (1)..(1): n is a, c, g, or t
ngagcagccgctgctcagctcctgaaggaatgtgggccaacactgtcacatcacttcaagttttgaagaaaactcagatttctagaattttacctaaaatctcattttaaaatttggaaacaaatcgaagtgaaaacaaaaccaagactgacatcacagtatgagtgcaagaaatgagtctgttgcctggggatggcccatggatgcttggtttacaagagtcactgtaatagatgatcagccccatagaagtgtgaaacacagcgagcagggtacaggccccaggtggcttcacgagaagacaatcttggtgtcagagtggaggatggatcagagggactgagtctcaaagccagaaggcaaagtaggaggtcattgcagtaggccaggagaggctaccggagaaggcaatggcaccccactccagtactcttgcctggaaaatcccatggatggaggagcctggtgggctgcagtccatggggtcactaggagttggacacaactgagcgactttactttcacttttcactttcatgcattggagaaggaaatggcaacccactccagtgttcttgcctggagaatcccagggacaagggagcctagtgggctgctgtctattttgtcacacagagttggacacgactgaagcgacttagcagcagtagcagcagcaggagaggctacattcagttaactcaaggattggcagtctaaatgcaccactgaggctctatgaacacttattgaatgatccagaaattagctggcacttaaaataactaggatgtatgaaatagtaaaacccaaggagacaaaaatgttttcctatagagttaaaatatcaaagaactcttttttctcttttttaagaactagatctatcgacaaccattctgctttcattttcaaatgaaaaatataaccgcatacacaactaattaaattaatatag

SEQ ID NO: 52075 - DNA, 1417 bp, Bovine  19866880722953
  misc_feature (1)..(1): n is a, c, g, or t
ngttttattttttttggcctgaggctccctgactagggattgaaccctcaccccctgcattgggaggtgaagtgtccaccctgggccaccagaaaagtcccctgtgagctcttagtatcctttcaataattctcttttgctcagcatatccagagctggtcaaactgcccttgtcttgtatgtcgtgttcccccttctttaaaatgattctgaaggctattcagtgttatataaagagcactagactggaagttaggagatccagactctagccctgactttccatttaattagctacagataaggctgtttctagggtgggggaaccacccaaaacattaaaaattaggctaaaataccttctcagtttcttacaggctgagataatcaggctgttgggagcactaaaagcaaggaaaagaaattctgctaaattaaacccaacaaacatttatttaagaccaatttaaaaaacatttagaaagaggagataggaagagagaaagactttggaaaaaaacaggatacgctgcttggtaagaggtttagctctgaaacaaaagcgggacttctgaccctggggtttgcaaaatgggtgctaaacaataggattaacgtggcaagtcttctcagtggtccttcataacaatttccagggagacaatttctgagtacttgtctatttctaaatagacactttctatttatattaaaatcgatgcaagtttcataatataaaatttgaatatatttgaagataaaatatgtttcaaagataatttattattgtgactacatcttagaatgttactgtaggtgtcctggctgtctcttactgaacacaccagtgggagagtttgaaaattactgaaaatggaaaacaaaggagaaagttaattatcaaatgttgtgggcatggcttaggcaacattggctatctgcccagtttaagaaggaaggagaatgcattagtagaagaaaagaataaatggttaaatacagttctgattttcaggaaagagtagacatacatgccataaatatatgcaaatcatcttagcaccagggtcatcaaagtgtttttctgctgctttggacttcttacctttcatttttgacatcattgaatgtttcatttttgcctaaaaaatttagtttccttttgtattagtaagaaatgcatactcagggagcaactccatcaatacgaattgttgaaagaagttatttctcctccacttttccaattttgccctcagggagaagatggccattatttggctgtgtggaatttcggttatctttgtttctgaactctttattctaattgtttgacagttgattttataagatttttatatcattgtcaaatgtgatatttgtcaattgtcatatttatcaatttgtcaattgggat

SEQ ID NO: 52076 - DNA, 1131 bp, Bovine  19866880733723
  misc_feature (1)..(1): n is a, c, g, or t
nagaataagaatgacagaaacagcagaattcagtttggaaatctgtagcagattataaattcactaaaattggggaggcattttttaaacagaagcaatagtcatgattggattctggaatgaaaccacaaaagcttattgactcaaaatacaatatataaattatagtatgatatgataccatgtgataaaatatggtatggttaacataatgacacgatgtaatataatgaacacaatacaacttaaatgaacaattgtagttattatggccctaagccagcactcccattttcctccccactgtctctctcatttgtaagactcatgagcatactggttttagatagtctacaattataggatttcaggcacaatattatgtgtatacatttcaaaacacaatataacagtctgtaatgataatttaatattttgttttacactaccacttgatttaacataactgtttcctaaacctttttgcctaattagaaccactcacccttctttgccttcacctcccccaaaagaacaacagagtactgaataggctaaaaggaataccttttttgaactgggtaacagtaagatcaaatgacacatttgttttcaggtgtaacacttgtaattccagccttaagacaatcctctgatggtaacactgtcaatgtctctaaataatgaagtgacagaataaaaagtcaatatgcaacagccaagcccaataaaaatctgcagaagggaaagtcatctttcatgaagcaccatagaataataaatgggcaagtgatcctctgagcttactttgtcatatgttacaacaataataagggaactacattctaatggtgtttttgacttcagtaccacaaggagcttcccaggtggcactagtggtaacaaacccaccagccaatgcaggagatttaagagacgagggttcaatccctggatcaggaagatcccctggagaagaaaatggcaacctactccagtattcttgccaggattcttcaatcccatggacagaagagcctggcaggctatggtccatagggtcactaagagccaggcatgactgaagtgacttcacaggcacacaccataagagtattaacaacgtgtatg

SEQ ID NO: 52077 - DNA, 811 bp, Bovine  19866880735292
  misc_feature (1)..(1): n is a, c, g, or t
ncatgcatgctcagtcattcagtagtgtctaattctttgagaccccatggactataaagcccgccaggttcctctgtccacgggattttctaggcaagaatactgaagtgagttgccacttccttctccaggggatcttcctaaaccagggattgaacccgtgtctcacgtgtctcttgcattggcaggcagattctttacctcctgagccacctggaagcctgagaccaccaatatttatcacaaataagtacaggatgttggaaatatcagatgacccggtagtttgaaaggagtgagatcctgagctttgggaaggaattttgatccttttaaatgtaaaccatttgtctagcctagggctcagtgctggagagtaatagtaatgtgcttcaggttctggaataaacctccatttcaactttgaaagaactgcttatgttatttgtttggggagatgactcaacacttctggcataagctgtaaatcagctcagctgaattgcgtttacacctggaaagtaagaagcttaccatgagcattctcccctgattactcatatattcaagggaagaaagtcttgactgtatctctaccctctaatctaggaattctagattcctagaaatctcttcattctgtggatggagatacccattagttcagcaggactctgactgataagaagttaaaggtctcccaggaaggaagcatcctgtggttacctttgccagcatggcactaaaatacaccagtatgtctccctgtccttcccaattcaaaaccctctcctcaccttttttgttcctc

SEQ ID NO: 52078 - DNA, 1577 bp, Bovine  19866880769566
  misc_feature (1)..(1): n is a, c, g, or t
ncaaccagggaattccccccaaatcctaagttttgaaactaaatagaatactttgtaccaactaacaggtaatattttatataaatgacaaaatgtgtattaaaaatcatgctaccaatggaaataaaactacaaaatgagtttcagataaggtattattaaaataaaaaattttagtagaaaaaaatcattattaataggaactatgcttgtaaaatcctgtcttataaatactaatcactagacacatctgtttacaacatttttgaagggttatgttggaagttaagaaaatacaagtaatctgcccagaactcaatgtaattaaaaagtgttaaattctgcctctcactccactcacaatattttcttttcgtggactaaagtgaaactgttttagctgaaaggttcctaatcagtttaactcagaataattgaatctgagtttttgaagagaccctgcgggtcatccatctatcaagcctggtcctggtcccgcttccaatttgagaaccgtctccaggatcctgatagatggacccctcccttctccctaaatacacggagggatgggaagttcccagctctattagaaagcacattccactgttaagtcaccaattgatagatgagaactccttccccggacttcagatgagtcatcctaaaacttccactaattaagttcagcctttccatcattatccgcacacacattctacaccccccttctacccagtcaccctacaaacagcagcagtcaggttcacggttcttcccggctctcccctccttttagaccatcttcacaatgaagccagagccaccgtgtaaaacagaacagatggacaccaccagattatgtttttcgctaaaaatcaaatgcacatggaagacagtcctaaaggcttcagtctgcgtcaccccgctcagagtaaaagaggccacaggccctctctggtgccacgaagtctgggaaacgttggggccccaggggcgaaggcaggatggaacctacttcccgagtccccacgcgtgtatagacggttcccagtccaccagccaggaggcccaagaactgagctcaaggaaggtgagggagaatttgctgccgaaagaaaggacctaaaatgaagcaaaagaatggtgtctgaatgcagaaggaaattttttaccgtccagaggacggatcagtctcctaacagggctgtttgaaacgtatgagtgaagcaggactgggagctacattcttaagaaacagaaaccatttgtcagcaaatgaaatgtgtacaagtatccttcagcacacacacacaaatgctctgttctattttccttaaaataagaagctctaggaacttccctggccatccagtggttaagactttgcttccaactcagagggcacgggtttgatctctggttggggaactaagatcccacatgttgcaaggtgtggccaaaaaaaaaaggaactctccagaaacatcttctatttttccattacagatacagaagtagattgcacttttttcactttgctcccagttctactagaaataaaactacttaagtca

SEQ ID NO: 52079 - DNA, 2102 bp, Bovine  19866880833955
  misc_feature (1)..(1): n is a, c, g, or t
ncagtagcttttttgctgctgcatactaaaatctaagttccctgtagacatagcagagttcacagtgcataaaaatagcattgccaaatttctaaacattagacatgtttttaccccttttcctaaaagcaaaagtgaaaagagatgaaaaaagtaaattaaaaactatagacacatatagtatcagatatttatatagttattttgaggagcatttgttgtaaaaattatgaaactctgttagataaatcatatgttgaatgaattcattttttaaagaaaaagtagaacaaaagaaaagagttcagaaaggccatgcattgaaatatacctgatttttaaaataaaattaaattaaatatatcaccaacatcttgccgtttgctgaattaagtatattgtatttttgttttaggaaaggttgtgctctctgaatattgtataaaaatagcttatttcacaaacttatattggcattagtcggttcaaaccttttttccccacttaggcataatttattcatccaagtctcccagtttcaaatgaaggctaactgagaccacagcactcatcacatgatgctcggctcagagggtgttagagtttgggttccactatttagaagcttacagggtagcagggaagtggcaggacatgtgtggcagtaaaataatcatttaaaggtgagtacattctggagtggccgagattgtccacctgggggccactgaagcacaaagagatcttgctaaaggatttactgtagggagaatgctctctacatggggatcaaactgacttttgtcaaaaattacatggcatgaagaagaaaaggaggaaaataagtttgaatttctgtgtctctcaaagggtcaattgaatcagctcccaaaacatcaaacagcaaggaaaaacgactcctgcttccaatcttcttcctgcagtcacttctgatgcggtctgctaagcccagagggctttgtgctttgtttggtgtccattttcctgccttcatctttctcattgctcacgtaagtttgcagcacgtttcatctttacatttatgaagtcacctaaaatctttttgagagttatttagaaagctacttcttacagggcactgatgctgatagcctcaggaccacagttcaaaagtgagcagagagactaactcatcatttcttatccccaaaccaagtggcacagttcaaagtctcctgttttgccaattttaactttttggttttaggaatctggtgaaagtcagaattatcatgctttttatattttatatcatgcccagcatacacagaaatgtaataaatattaaataacaaacacagaaatacattcatttctctgcttcttaaaacataagacagttctatacaaatccatacacagatacatttgcaggattttcgagcagtgttttcccttaaagtttaaaactgagaggaaagttttcctgtctaggtcgtgaattatttaacttctgagtttaggaaaatttaaagtttaagaaggctagtctggaaatcccttctttgcatatccaagctgttcatctctcaaaagtcaaagtggatgccagaattccatagatttcatttttcaagatgaacattcatatttgaacatatttcaaagcagatggtttacagttcatgtatttgttgctgttttcctgccacaacaactaaatattgaagacacatatttgtgatgaggagagcacttccaaaccgtctctcccgctgctctctcacactgcgtgctctaatcccctgtgtgctgcagggaaaggcgctgaggaatgaagcagtgaattacatccatttgatttaatagacagcagaggggtgcaataacataaaacaagcttcctaaaaataaatacttttttttttgtagcagtcatgaattttctggtagcaaataagaaatcaaatgaacacgtattgaaatattctgttttcatgatccatttagatgaactggaaagttttaagccctctactatcttataaggcagtttgccaaactgtgggactgtttgatcacagttaagaaagaagaggaaaatcaaatgaaggtttagt

SEQ ID NO: 52080 - DNA, 976 bp, Bovine  19866880836139
  misc_feature (1)..(1): n is a, c, g, or t
nagtttgataccctggctcaggaagatcccctggaagaaggaaatattcttccttcgtattcttgcctgggaaatcccacagacagaggaacctaatgggctatagtctatggagtcgaaagagagtcggacatgacttagtgaccgaacaacaacaactgccctgaccccactctattattaaacattaagaattcatagatggtgtttccagaaatccctcaagtctgagaagaggtgaaaattatgttgcatgggattttttagagatttgaggattaaaataagattttgatgactttctggctaatcctgacgatacatgaaaatcaattttagtggcactattataacttttcttatattatacagtttgttgtatcctacaaacaacttaggcaaataaaatgagctaacattgtggagatatataaggcttatggagatggtgggtgttatttgaatctaaatatatattccctaaaaattgatgttcctagttacagccatacctttaaaacattcataacaccagttaccagatgcattcatatctgttgaccaagcactggaatattgactctgtcaactcaagataaagaagcagagataagaattatctgtctccaattattgtaactattgcatctttatttcctttccttgactattctaaaactttaagtaaccagattggtgataattggtcttcgataagtaacaacccatatgaatgctccatgaatcacagaaacaggtaaattcagacaatatatggatattgagatatgaggcaagctatcaaggaagattcaaagtcctagccaaaagtaagttcacatcaggaaaaagcaacaacaggacttcatatggataagacacaacctaggaaaactgagaggtagcttccagaaaagcatccacttctgcttcattgactacaccaaagcctttgactgtggtggatcacaacaaa

SEQ ID NO: 52081 - DNA, 1537 bp, Bovine  19866880842969
  misc_feature (1)..(1): n is a, c, g, or t
ntataggaagtaaagcaaattgtattgagactgaggagaggataatggaaatattagagacttgataagagtcttctagaaattttaaaagcatccttgtttttataccttctgtttttcttatacctatgtatcacaatcaggatgaaaagatgacttaagacatttcggcaataaggaaatagaaagtttttaaagatgtgattctccataagtatacttgtaataatatcattaccaataaatgccagttctcattttaccatcattattttaaaaagaaaggaagaatattagcacactgcaaaagctgaaaggctccatggaggatcttttcttcatgtttttcctttcaatatcctgaaaaatccaatatgctcacatgtgccctaaccttggccacttacacgctctttcctggaatgataaacttggaggagagtaacgtatcaacagaaatttggttgcaacaggttgcttcattctggtgttggtgacagggggaaaaaaagagcagacagtctttcatatttcctgtctctgaaatcttccagggctttcttgttttctgcttattagcaaacctgttctctctgccttgtcttttgtcctttctgctagtacattatttttccagtgacttcatttctccccttgagttagccaaaattcatttctgatgcttgcagtccaagcatccattttaatgaagacacaaaggctaaatctggggagattacagtcaagtaagcacatgctagatcttcagatcggaatacttttgaatgacagaggccaacatgtccttttcagcattctatttttttagctgccagcactccagacttgtcagaaactatgagtccacacagttcccacttacttactactcagtagaagccagcagtatatctctgagctgctctgacacttaaggggagtggacttctcacagataaaacatgagcctaggatgatttcatccatatagccatggtcaggattagacagcactaaaatgacctacatctccttaagctctaagtcattggtggcagatgtaatctgctaccacagagaccgaacctaaccactcaacaaattagtgtgtagatgaatttaattttcttattcaaaaaagcctattttacattatttttggcatttgattctgttaaaagatgacttaagtcagaggaaccaaagcgttcgattcaatttaatgagagaaaaatttattagtgtctatagctgcattgccttgaggaggtaaagaagagtaagttgatcttttttctaaatgggtgtaactgggctacttctcatgcagactatgcactcaagttgaaagagatttttgcacaaatgccaataatggttttaaataatagaaacactcgcttgaagatggctactcatgccctgtttggaactattgtggtctatcaggtcaataatattcatttagaaaagctctccaaaagtgttttcatacaatagtcccgaagataagaaagggccattaggtctcccaagt

SEQ ID NO: 52082 - DNA, 781 bp, Bovine  19866880847879
  misc_feature (1)..(1): n is a, c, g, or t
natgtagtagagtcgtaaataatacacattgtgataggaagatcttgtcaaatgttatagaacttaaatttttaaatactgagaaagtaactgccaaacgaatattgcagagccacttcattagtctttttttctcctgctgtctatcagatattcgattccagtggcagccatggattttccggaactcagctacctcaaagctccaataactccagtgaggtaagcgaggttgcagacagcagccgtcttattttccttggatgacagaaatgctaagttaaatggggcatgcttaatctttatctgaacctgttgaaaataatctttacctgaacctgttgaaaataaatttggagctcaaatggtgccgagtaggtaaaaggtgttttcagaatgccagttatttttgaaggtgtcttaaactaatgataactccatcttcaaagtggtatcagtcaggtcagttgctcagtcgtgtcaattctttcagccccctggactgcaacatgccaggcttccctgtccgtcaccatctcccggagcttactcaaactcacgtccattgattgagttggtgatgccatccaaccatctcatcctttgtcatccgcttctcctcccaccttcaatctttcccagcatcagggtcttttcaaatgagtcatttctttgcatcaaatggccaaagtatttgggtgtttcagcttcagcatcagtccttcccatgaatatagctagattgaagtggtatatagctagactgaagtcaaaatagcaa

SEQ ID NO: 52083 - DNA, 986 bp, Bovine  19866880869146
  misc_feature (1)..(1): n is a, c, g, or t
ntcagcgttactggttggggcatagacttggaattactgtgatattgaatggtttgcttggaaatgaacagagatcattctgttgtttttgatctccattctgaaggagatcagccctgggatttctttggaaggaatgatgctaaagctgaaactccaagtactttggccacctcattcgaagagttgactcattggaaaagactctgacgctgggagggattgggggaggagaaggggacgacagaggatgagatggctggatggcatgactgactcgatggacgtgagtctgagtgaactccgggagttggtgatggacagggaggcctggcgtgctgcgattcatggggtcacaaagagtcagacacgactgagcgactgaactgaactgaactgatggtgtaggtttggatagtactgttttgtggctttatgaattatttggtatagacgctgaaaaagtgagtttcaatctgtcttgtgggtctgcaggtgaacgtgcctttaaagtcagactccattgcattttgactccatgttcttctttggtctgtggctggggcccttctggcagcccagtaagctccctttgtttgtgggattcgtcaccaagcgatgatgctgagtccttgttgacagtgggtgcatgacccactggtgcaggtggttttttcctggaagggtgtcattaggagggctgtagcagtggatcatctgtaattccattaaaacctaaaggaagtggaatttacatcatcctgctgtgctcttctaagggtcttttaatccatctgcttgcagctaaaactgataaagcctttaaggcttttctggatgcccggaaccccaccaagcagcactcctccacgctggagtcttacctcatcaagccagttcagagggtgctcaagtacccgctgctgctcaaggagcctggtgtccctgacggaccacgagagcgaggagcactatcatctgacggg

SEQ ID NO: 52084 - DNA, 3429 bp, Bovine  19866880872562
  misc_feature (1)..(1): n is a, c, g, or t
ngagctggtagacgataagctgacagcaggtctccaccactgccgtcgatcactgctgtgttcaccttgccctcgggatggtgctggggagacacagaagtccccctagtacttcttcaggacggcatgtttctcattccctcatcataatgaaaagaagatggatttctcaaccacttcctccgggaggaggtaaatctggcatgtccttgggtttctctgcaagctggtagccacgagaacactgctggttaacaagagtcgtcaggactgggtgcctttctcagttaaatttcaggtccatgtaggactctgcacaaattgatgctatcctgttgtaggaaatggtacttgaagcaagaaattgtcaaaaccatgtgacaaattaagtccctctatttcaaagaatccaaaattgctttatacggacttccctaatggtcctgtggctaagactccatgctcccaatgcaggggactcgggttcaatcactggtcagggaactagatcccacatgccacaactaagacccagcatagccaaataaataataaatatttttgaaaacttgctttgtaagttctctcatggccctgggggctgggagtgtatattcagatgataaagacatctgtgaggcaagaggaaaaacccagtcagctcctgcaccagcttctgctgcttctcctgttccagaggctgcttgttcaaaacaagctgtctgtttttattagggaattccacaagagaaagtgtgtttgctgagactctcattccaatgacgtgaaataataataaaatatgcaaacagagttcccatcccttgttgggagagggggaaggaaggtgggagtgagcagggtattccagaagcatgaagagtagacaacaacaaagttcttttttttttctttcttctcctttaaaaaaaaaatggtaaaataggaatgtttttaaaactcttaacccaatagcagggaaaagacttcattaatcctgtaactttggggaaccactgcagatggtggtggtagttttaaaatctagaagagaacactgcaatgccaaaatgatttaaaaaaaaaatttttttttaatggagatgtattctttacagtataaagatacagacctaacttgttatagaaaggttatacatagtcctatcaaaaactatatctgatttaaaagcctggcatgtgaattttaaagcttatggcttatttaacctttcttttttttttttattttatttttttttatttaacctttctaatgagaaagtttgggtgaaaaaccaaacagtagccatgaaatcagggtattattgtcctgattaaataataaagatttattaatttatgtgtctgttaatttaataagtatttatgtaatgtgctagacaaaagccagatgtttttctgcatgacataatttcctcattctattactaaagtttgtaaatttctttttaaaaatgcattggaatgaagctgtttaaaagaatcaaattgtctatatgtattggcatgcccatatgtttatttcatatctatgtaagtgtgcagagtatagggtgcatttgataaacatttactatagttgttataggataccctaagactttctttttcttccttttgagatatattggaccaaggagaagttggcaaacatgtaaatctgagctcaaggtcacattttagctcatttaataccctagctttgaaactgaaacccacaaattatatatcatcgtcaaatagtaacttttagtaacaaattatatatcatcatcaaatagtaacttttaataacataacagttaatgtgatttattctcactactcacaggtatgggcttcccaggctcaaatggtaaagaacccacctgtcagtataggacacctggctttgatccctgagtcaggaagatcccctggagaagggcatggcaacccactcttgcctgagaaatctcatggacagaggagcctggcgtgccacagtccatggggttgtaaaagtgttggatatgacttagtgactaaacaataaacaccaccaccacacctgtatacctaaatggatttcatagctccacttacgaggagaaagctgctagttctaacataatggtggaaatccattctctacgtagtttaagttcaaaactcacttcccatgtgaagatcttgtccgtataccagatggctccatgccaacaaccctcaacttcagacgtggcttaaattgtcttagcccgtgaacggaagttgatctgtttttcctcccttcccaactcactcagaactgtgacatccaaactccaaaccccgaatactttcaataataataataataataagcagcacttatataacagaaagttacgaagacagtgctgttgaggggcaaatggaaatgacccaacatagtgaacagggctgggaggaagtacaaggaattcaggaagagtccaactagagatcctgcgacgaagtccaagaacaagtttaatgggacgagggaattgaaaacatggaactcagggccataaaggggaactggagagaaaaggtgtgctcttgttttgtatgtcttgcatttcatggaaagtttatgggttcagcaaacacatttccttggctgagggctccagtgaaaataaaggctggctacataaccatctgtcactcaagaattgactggacctctttaaggtatataagcattaaaattgatattttatgttgattcagaaaatgcttttacattttcagatatgcttatcagatttcataagttatggaaaatgaaacaaacttacaataacatgagttttatcaacgtagaacaatcagggaattccctggtggtctggtggttacagttccatccttccactgcagatggtatgggtttgatccctggtaagggaactcagatcctgcatgctgcaccactaggccaagagaacaagacaaaacccaaagcaacaagatcaacaaaaacagtcaataccacaggcatgtttttccccaagggtatgtcttttgagggggaagcccaagattgcccacatgtaagttacacggaagccagaccagggcgttggtaactcgggctgatcactcaaagctcactcacaaatgtaggagtagcatgctttccaggaagcactgaggacctctgtctcctttttggggatacggggagatgctttccatctcagggctagagcagagacagtgtcagccctggccaagacagatcctctgcaggattaaatgtgtttttttagacctggaatcttgagcaaccttctaaacaagcattgaccttttattatggggtagtaaaattaccttttgttttttaacaaagtaatcttaccatttttttctttcaagaataatagttccagt

SEQ ID NO: 52085 - DNA, 1768 bp, Bovine  19866880898201
  misc_feature (1)..(1): n is a, c, g, or t
naacttgggccataaaaaattttatctacactcaggtttttattcagacataaacctacatgcataccttggtaatgataaccttcttgctgaaatcgccagaacctaattattctttcacacgcatacaagaccatggggcctaaaacccatttccaagcctgcagagagcggcaaagagagaagaaaaggaaatgaaaatggaatccaaatattttcaatttgaaccaatcaatatataacgcgacggggtttagacattttcctttaactttgggccagttaccaacaacaaagatgtctccttgtattaaatactataacattcaattatgccttgaagtctacaagcttatttaagagattaaactcttctgtattggtttttatgcttacttgatcaatgatgcctttatgtaattagaaataattgaatttgcaaagaaatagaaagtagattgatgtttatgttatatatgatagggtcataaatgctcccaaactcaaccaaagtcaaaggcttacaaactacattactgagtcaatacaggacatgagaaattcaacaaaaaacatttcaaatagtaattttgggggccaagaatgcatcataactttgcgggtctgcctaaaacaactcacactctcacaccacgcatgcacccatgtactcacacacacatatacacactttcacacacatgggcatagtctgtgtcatctgaaataaagcaaagttagtttcacagtattgtaaatctagattaacagaatcagaacaaaagcctcaatacttgtctggagaattgtgacagggaacatttccattctgtgttagccttttctgagtataatctgccgtattaaggttccacggggctacccttgtaccaggggttgggttacaacctaaggtgtctgcttccttaaaagagaaggaatgggaacttaaaaattttgaagatttaatcttcaaatttaatcaaacaaccttctgaggcatataatattctctttattttgcagaagaggggactgcggctcaacaagatgacacaaattgtccaggtcacaaaggtgataaacaaggttcacagtgaagatgtgaaccccagatggccttgactacccagcctttgctcttcccaagtaatcgtgcttctttctgttcaatgaagaacagacacttgattcacactagagactcattaattcattgaattttaggatgatcaaaggttcttggaaatctagcctagttcttttaaagaagaaaaagcaacattccaagaatgggtataaattgtcagggacacggggtgaggtcgcagagagccaggagtagaacccaagccttctcctcatttccctcagttctctccctggaattctaaatccactggaccttactcttagaatcctatcttaatagcaataagggcgtccctttctcctgaacacggatattcactaaaccttcaccaaccgactcctcatcttccttgttcattactcccctgctcattagccttctctgtcttgtctgtctgttggcaggtcacaagcccttcagcattatttttgcttttgttgtctttcttgtttcttcgaagctcttttgtttatttctaggtctgtttgcatggcacctcttctcacctacatcaaccttctgtgctttttccctgggagcctcttgtttgcctgataaaggctccatttatggaggcaacacaaagcaattgacccacttattcttttcgcctca

SEQ ID NO: 52086 - DNA, 1027 bp, Bovine  19866880922182
  misc_feature (1)..(1): n is a, c, g, or t
natataaatactttctttttagcttttagaatatttggtaaattcagatcctaactgtgattcttcaacagttttattcaaatatagtactagtacttattttaacttaagaagctatctattgtcattcatgtagctctggatgaatgagttttaatttgaccctcaagagtcagtctagccaaataataacaatgaaaatgcatgagaacagcaatttcaacctggctatttcacagacaagcttattttatgcatcaatagcaaataaatcaagaaattggatggacttgctgaatgcctttcaccgctctaagtaaatccatctagctagcgtaacaagcagttctgaagattggaatgtaagcagagaagaaatattgattgattgctttatttagagtagaactgtaacaccacctatgcaaggcatttagcatatcaagctaggcagtaccatcttgttgctatacacttaactgcaagatagattagacactggtttgtggagtctggtcccataacttagagccatctctaacagcacagcagctcctactaaaggcattaacttcggggagatgcaagtggctgctagctggcacatttgctttccatatgcaacagtacaggttagcagagcatctgtgggaatgtcaaaattcacatgtagggtgcattgtttccaatcaaccttgtaggcacttggaagaggaagaaagccaaaatcatgcaccgttttcgatgtttggacattgttatggacacataatgggtcttccctggtggctcagaaggtggagagtctgcctgccaatgggtcaggaagatggacagaggagcctggtgggctacagttcatggggtcacaaagagtcagacatagctgaatgactaacactttcatttcactttcacttcaacataccttataaagttttctatagaagagagttatatctgaaaatcaaacataaatgatatcttcaattgctccaaagagtcgccttgaatattgtaacaggta

SEQ ID NO: 52087 - DNA, 1116 bp, Bovine  19866880962343
  misc_feature (1)..(1): n is a, c, g, or t
ntggcagttcccaaacgtgtctgcactttacaatcacctggggggcttaaaaaaattagctgaggcccgcagccattcctgagatctgatttgtagggtgtgccctgggcactgggagttttaaaaaagatccccaggggttcctactgtgcagacacgtttgggaactgctggggtacagggaaggaaggaaaggattggtgagccggagcctgaatccgagccctgactcctgtctgttgtgcgagctggggtaagttacctaacctcgcccagccctgacttcctcgtctgcagagtggagataatcatgctggtgattttctcatctgtgtagtgaaaatatcatgtacgttacaccatcagtgacaacgcgcgtgatgtgtctggcacaggaaatagtagctggcgtcatctctcccaagggtaaaataacgtttagtccacttcaaagacagtgaaacgccctgtggatgattaagtgaggttggctttatgaaagtgagaataggtagggtgacaggctcgctgccctcacacttgccttttttttttttaaccccccaccacccacaattgaattgttcatctgttgctagcttgttggaaagaatgatgcaaccttatactcagagataaggccattgtgtttgtctgttttcccaggatggggtgagtcgccctagagttttgtgactaggatctgcccggcagatcaatctgagaaaaactgggaagtgaatgtttttggaaaggccagctggactccctgggttgggtgggcacattcactgattagagctggccccgacgtggtgggaagtaagggggtgggtctgtcattatgtccccacaccgtgcctgtcagctccttggtcctcagcgagttagagtctaacccctgattgtaatttttaatctaagaactctcttccactccttcaatctttattcacttcttttttgttttgccttcatctcaagaaaacaaaaattaacttcacagagaaagtaaagatcaatcatgtgaatgtatggcaaaaaccactacaataaagtaattagcctccaattaaaataaataatttccaaaaaaaaagaaaagaaccacaaaca

SEQ ID NO: 52088 - DNA, 1414 bp, Bovine  19866880984761
  misc_feature (1)..(1): n is a, c, g, or t
ntagatgggaaatgatctaaggttaactacatgaccattaactcatgtcttaaaatgctccaaacaattgggagctgttagaagtagagtgtagagtgattttcatatctgtcttttagaaggataatgtgaagcccattgaaatacttttctagtaaaggtgtttttagcttacaaataactagactgaaaatccaagtctacaagagaacatgagttaatcctaacacgaatacaagtccaatttgcagaattacttgaaaaaagttagttttttatttgagtccctgaaatgtatctctgagtactatttaggacttcaggagtgacagaaggaaatgatgtagaaataaaactagggcatttggccattagtcagtctcataaaaactgcatcagttacttatattaatagcattcatcattttatttatactaatacattcattcatttgttcatattcaaatgtttaaatgtgtcctaagaggcattactattgcagcaactacaataacagctaaatggaatcatgaattctgctttccttacatggaaatgagtttatggattaatgttttatgttcccttgggatgtacttagtatttaatatttttaagtcaaataatcctgttagagtatattttctccactggaactcctaagaaactagaaaagtataaattaaatataccagtatccaaagatatagcacttatattttttgaaaagagatcttgtttggtcatttataaatggtcacctttgtaaagcgagaaatagccttgtttaaaaaaccactgacattgttgttctattgtcacatgctggtaattgaaaatgtgtttctgtcagttctggctaagatggaatgtaattccatctaagatcttgatcttaaattggtagcaagaaagccaaagaggaaaagcaagaagtctttacttgttctttgcacaagtaattttgcactgccctttctgataatgtgagttattattcttactgactcttggaagaaagcaatgcgcttctttttttttaatttttttttacagctcgcagctctgttttactcaattgatatggaagtgggtctccgcctggctttggaacacacatttgtaatgtttattttaaaataaaatccagattgctttgttagaacaagcgtctacacacagtaaatagctaaatccttgccacaatcttctcaggttcatttttttttcctgcaagaccgtagatttgttctagaacacgtgtaaccttataacctaaagtataacaatgattacagggaattagtcttcatctcaaaatcatggcttcagaataactcagactgttaccagcctcgactggataactacccgaatctgatgtttcagaatgatcacacccgaaatgcttat

SEQ ID NO: 52089 - DNA, 1045 bp, Bovine  19866881008724
  misc_feature (1)..(1): n is a, c, g, or t
ncaatggtcatgtatggatatgagagttggactgtgaagaaactttagcaccaaagaattgatgcttttgaactgtggtgttggagaagactcttgagggtctcttggactgcaaggagatccaaccagtccatcctaaaggagatcagtcctgggtgttcattggaaagactgatgctaaagctgaaactccaatattttgtccacctcatgcgaagagttgactcattggaaaagaccctgatgctgggagggattgagggcaggaggagaaggggacgacagaggatgagatggctggatggcatcactgactccatggacgtgagtgtgagtgaactccaggagttggtgatggacagggaggcctggcgtgctgctattcatggggtcgcaaagagtcggacatgactgagcaactgaactgagctgattggactggctgtcatgatggcagacagcagtcctaaggactgctctgagtttctggcttatcgcaagatcagcactttgctaaaggcactttgaaaattcctgctctaggaattccctgagggcagcacccctagaaggcatttcctttcccaaaaaaggcttgtaggttgttctgccccaccccacccctctgcattctttgaaaaggtgataacttagacacaggctcttcttcagttctcagaacatgttactgaaaaatgttgtaaaagaatttaattttctagaaatgtctgcgtctttcagaccctctatcttccatttgactttaaaacatgccagaatatgctctgaaacactgtatgtgaaaatagatgacttaaaaacagcgtagaaatgttcaaggcaaaaggagctaattaataagcagccttcctttctccttttctgtcttttcttcccactgagcagctctaaatacttgatgtggagttgggattttatttttattttttaaattatagcctgtgcatcgtgcagacctctccctgagacatactggcctggtacataaacagctgtgtgctccaggggccgtatatattttatt

SEQ ID NO: 52090 - DNA, 738 bp, Bovine  19866881037752
  misc_feature (1)..(1): n is a, c, g, or t
nacgcctgtagacacatttttctgaacatttttctgacgtacctactcagtttgttgtcctttggtgacctgcattgtgggctgcaactcacagcagtggttgaatatacatttgtcattgaagggactaaaagatccccaaagtgttcctggcctgggtataataaaacagacagctgaactcgaactgactgaaatgctgtctagcctacagctacaggcaaagttaaggacacgagcatggcaatgcttataaattgactgagctatgaccaccggctccatggagtgtccaccatccttgtatgtgacttcctgaacttgaggttatcctgagaaagatcttcaccaggaagagcttaacagtccaaaagatcttccccaaatcagcagcataaactgtgcatttatacacgttctgagtatgtgtttttgtgtgtgtgtgcacatgcatacacacagtgacataacgactatggaaaatgaacgtctaagggcaaaaaacgaataatgatagttctttgtattgactcatttaatagaatcttcaagttccagtgtgtgggaggcatttgtaatccagaataagggttaaatgtctgtatttgcatctgagaatggaaattaggctctgccagaaacacaatgaacagcatcagtttctcatctgtaaaagtgcacaggatatgctagcaatctctccaaagccatctgtactgactctctcatgacagggca

SEQ ID NO: 52091 - DNA, 1752 bp, Bovine  19866881040880
  misc_feature (1)..(1): n is a, c, g, or t
nttagtgtttcttaagtggtcctccgatctgtgattactctgccctcttctgcattcattacatatgcatccaacaaagacccatgaaagaaaagaacaccgaaaaaaaacaggaaataacatttaaagtttaggtatggctaggttttcattatgtttgcttgttagtttgttattttctggcccaggacggagggtgttcttagttgtctatttctttaaatatgccaaggagatgaaattagagctgagtaatatctgaaattctaagtgatctgaatttcttataaaaattttaatttgaaaaattcatgcacattacccaataatcaaaactacaaggaaatatccatatctatttatctatctatacacacagcaaagcaaattctaaacagaacatcatctatcacccatctactcagaaacaatcaatatcataccttcaacatatttatgtgttcaatccataaatatttattgaaaaatgtactttatgccagactatcttctaggtttggtggtaaataagagaaaaattctctctcacaaggaacttacaatctgatggagagaaacagacttgaaacagaaaacaaattatgagcaaaataattttaccttgtagttaggttgctgtgaagataataagcagggtatacaaaataaaaggatttctgtttatctatctatctatatctgggagaatttcctgtttcataactactttgaaattcttgttcttccatttaggaaattatgttcctttttttaggagaagtaggggtcaatttcagaaatcttacacttgatgggcaatgtcaatcaaagcggttttcatcttcactccttgtctgtccagaagggaaacaaggtcattttctcttaacctctgacccacagagggatttgagggttccatgtacctcctaaaatagtgtgcaaacctttatacttgcagtttctagggtgtggtctagacatatttttaatctaacattctatgcaccgttgccgcaggaacatcctgacaatatcaggatgcatcaatatttattctaacatcacatctggtacatttggatcagctgaggtttgaagcaatgttttagagttctagtaaattttgctcctagttctcttggaaatctgcatctctcctctgtggtggggtcttcccatctctgcatatttttatttctgctcttgcaggatggcttttcttctgtacttgctgtgtgcatgaatcaagaatcacatacacacaaaatctaagttctgatgaatgcaaaaaagcagagctaaaaatggctacacaatcatatgctgtggtctagaatataataattttaattactgatcacaaaccaaatgaagtatgtgtgtgttgaaagctatgaaaatgagaagcagctgccttaaatccttacacgaacagagtttgtgtaaacaaacaaacaaacaacaaacaaacaatgatgaaagtggccttgttttcagggtactgcagcagacccttttgaattcctttatgtacacggtttttttttcattctgaaaaataaatgaaatcatctccttgtaattcattcttcccaatggaaaatgcactctctggtaactgtatttatgtatgcagaattttatacctcattgacattctcaaaatgagatctccagcaggaaaactctccaatacatgacaaggaatttttaaagtaccttcctactgacatgtcttacatactgaaa

SEQ ID NO: 52092 - DNA, 1248 bp, Bovine  19866881044831
  misc_feature (1)..(1): n is a, c, g, or t
ncaatagctttaaggcagaattggactctaagagaaagttataaagatataatagagagaagggaccaaaaaaacccccagagcatcaaaacatgtcagaaaaggaatcaaagaataaaggaaaatatgtgttatgcaatgatttttttctccttaaacctttgagtatgtatatttcttcatgcagaatcatatatcaatagtatgtatgtatgtgtgtatatatatatatcagtgatgcgtgttgaatatctgcctcctgtgctcaagataccatgataggaactatatataacctcctgaaactggtacagtcagtaatgatttcaggatggagcataattcacagggacagcagttgactagaagcagatgaccaagttattttatacccctgctactgatgggttgtgtgatctcagataagttccttatgttctactccgtggaattaaaaaaaaaaaacaaaaaaacacaccaataatacaatctatccattcttatgagatgtgcagactaggtgtcaagagtggatctcttagaaacctacagacttcaagtcccttactgctgccactgcaaagagaatcagatcaagcgtagcctggtgggcaggctcccaccaccaagtcccgcccactgcacaccaggctcatccttcaccacacccccttgccttttcctagcttctggtggtccctgagcaggctgtgcatttgcccttgctattggctctgtctgaaatgcttgctctctccttcttcactggataaattgtcaccatatccagggctccatgcttagccagcttctccctgagctgccagatctgggctgttgggcttccttatctctgggccccaggcacccctcctaccacacagtacaatttctcagattctgatcaccttaaaatgtgagactgtgccttatgcctcttccctctcctggttgcggcatacaacctcaataaatctggtcaaacctgaggatgagtaggaaagttggccagcaggaaaaaagagatagatcgagggatttcttgggacaaggtgctagatgtaagcgttcaggagttgccaaggaaccgggagtgttttggggtggacaaaagatagtgtgtgggcagcaaagagactcaaaatgatgccagtcatccacgataattaattcacattctgctatgacaagacaaagcaggatgcctgttctccggctttccctcacaaatcccggagagaatgaagt

SEQ ID NO: 52093 - DNA, 999 bp, Bovine  19866881116599
  misc_feature (1)..(1): n is a, c, g, or t
nttaattcttcttgtcccagtttctaggatacagaaagaaatgtagacttgtccaagggagcagcatgaataaaaaaaactttgaattatttttaccaagcacaaggctagcgagatgactcagtaataccaaggccaggcctcaatgtccgttactaacaaatactgtaaaacatttaaaaagaagtctctctccaggaactgagtaagtgggtaaattaaaaatcaaaaggaaaatgtcaattaagaaactggcacaatttgacttggtgattattgtgtttcaatatcaatggtaatattctgaaatttttttcacaatattctaaaatcaagagtaaataattagggcagagaggccttctccaaccccagaccagcaaggcagcctctgaacaggcaggtaattgtaggtctgtgtctgagtttagtgcaagactgagccctacagggcttctcttctctagaaataattacccatcaccacgaaaggggctcagcacacattcggagtttatagaataatcaccttctggtcctttgggcccaatgtacaataatctatggggattgttgagaaatgagcataaattatggcaaatttattaaatgtgaattctgggtatgcaagataacaaggatttggggaaaggatatgaatttcaaattctcagcaggtggatgtgactgagggcgtagctatgctcttctcctaattttgctcttctatggccaaccatccagcaatcaagctccaccttctctcccaggaccgaatcagagtccaattagcatcaaattacagttaccagctctaaactatctgtacatccctgaacaaccataatcacagaatttccttagactggaggtactgcagacatttaattttaattacttcagcatggaatcagcaacattatttcccacaggtattttattacctgttcttttcatgtggatgaacaaccaaaatgtcaattagaagagggctatacg

SEQ ID NO: 52094 - DNA, 3582 bp, Bovine  19866881119587
  misc_feature (1)..(1): n is a, c, g, or t
ncaggaggagaaggttgggggcctgcaggggacccctcacccaggttcacacaggaagtcacactgctgagatttgagcctgggtgtccgactgtgtgttccttcttcttgcccgccctctctcaactgttcacgtgcctgtaatggtaaaggaatcgaggatttttaataaaaacagtgtagaatctgaaagcttttatgagttcagagttttaagaaagaacaaaaagtgccctatatgaagccctctcaacagactgaggccagtagatgcaggctggtgcccgagaaggttccttgccaggaccgtctaatgtatttcctatcttggacttggtctggtctgggatccagcccgctcctctctgggcgtcctgtccagctggaaatgggtctgctttgtttccagttaggaggtttgcagattgaggaacagaatctgggctgcagctttcattgtgttgcaggtggcgttgggttacaaggtttcttttaaatctaccggttacatttctgagcttgtctcttggacatggttctttaagagttcccactactaagtgactttttgcattgggaatagggtgagaaactagaattttggattttggcatccatagtttgggaaatggcatagtaaataagcttggaaagcttctcaaactggtaaaagttaaggatttccaaaatcctttaaagagtcttcatggtgatgaatttttgtgcaacattttgttgttttttaaattcaaaatagctttttgtcttgtgaaaagtgttctctgtgttaggattttcatctacaaggaaggtaacagtagtgctttcttcatagaagattatttggagaactgagaaattgatgaagtaattaacatagggtgcttagaaccctgcctgccaggatgcgagttcaggaagcgttagttcttccttccctgtggatgggatcagctttatcaaatgatgtaaaacgaggatgatgagcatggagctgtgagttgggctgcaaagtggagttcacagtccactcgttttccatgagtttacctctctctgtccttccctctgatgcttcttccctgtttggccaatgattcctcatcattcactgagactcagcaaagcgttttctcggagcactatgcactctgtcttgtgcttccaggcactttgtctgtatgtggtctgtatcagctgaggcgttcattgtgggatatttagttgtgggtgacttctccatcacatggggagggcttactttcttttcgtacctcttccagagccaacatggtgccttgaaaggccgttcttaaatggtggttgatagaatgcatgaagtgtccattaaaattgttctcatatttcttcatgtttgacattataccatgattatgaagttgagtgatcctttgccgaatatttgactctctaagtggactttatgaataataaagtgctaaaaaacagtagttttctccatcttaagtgtgcaatagtaacaacatcattatactgtgtattaatctagactcttgtctggaatacactttttattcattttgcaacttggctaaatattggagggccttagattcttcaaggagaaaataaaatttttctccagtgattgccagtgtcttctatcagcggaggtgtcaaattcctctcatggactttcctcttcaggaggaagtgctaggagatggttgatagaataatagtcatatttaccctcaccactatggctagccatgagactgatttaaaatggattttactatgctctcagagagtgtttatacatataaacagaaaccaaggaggaccatatctggaatgtgctgaaatgaattaacttatcaagtgtgttggtggcatttgaacttggggatcagtacctaccatatgaaggcatgaaaccctgatgaatgttagccaaaccggaaccgagatacttactcattaaacggttcctttttgaactttccctctggaagatcctaatcattctatggaactgtagtcatcggttgtaattctcccttcatgactgtctgtcgaacttcttgttgggaagtgcactgcatgtcatgtggggaaattacttcattgtacatgagatgtggaagatgagaaataccacagaatggatgcattcattatgtatacttccaacccccgagagcagctcacttaaaaaaaaaaaaaactgtcttctgtatcagaattctgttgttataactagagagcactggtctcctccaggccccaggctcacctcacatgtcatccttctgaggctctccctggccttttcctaacacctcatcttttcttgaaatgttaccactccgtcctcaccatttttggaattcatcttccgaatggctgtgttgccaaacagcggttgtatgtgtatctgcatccttaatcccttctcagttggagtccttattaataaagtaaaagtgatcaatccataaggtttactttttgaagtgttctggaacatacatgacttttatcaatgccttcacttttctccattctgataaacaacaaggattaactgtttgaaagatacttgtatgtgtttgtttgaacgattcttgtattgtccagtcagagatgataatcatgctatattgaaaaaaaactggggttctgggttttggatagatttaagagctctgcattttgggtagttttgccaaaaatagctgtgtgatcttgaacaaaacaggacattctctctgggtttctgtttcctaatttgcaactttggtggccagggaagtcacattggactaaatgactttttgagatcctttcagctacaaaactcaatgattctgtgccgtgataggatataagaaagcagaagaaaaatgtataaaattttaaaaatagtccttatattatgctattatgctcactagcatttgggcctttctagatgacgggtaaccatcaccctgcactagtaaggaaggcaagatctgtgaacctgttcgtcaagaatatatatatccagaatgtgtaattagacattgctgacccactccagtactcttgcctggaaaaccccatggacggaggagcctggtgggctgcagtccatggggtcactaagagtcagacatgactgagcaacttcactttcactttcctgcattggagaaggaaatggcaacccactccagtgttcttgcctggagaatcccggggacaggggagcctggtgggctgccttctatggggtcgcacggttggacatgactgaagtgacttagcaggagcagcagcagccatgtagaatagatgtagcacaaagtccccaggtagaatataagtaggaggtgtatacactgggtcaaggttaagctatatgagaatgttgataaatgatggcactgctgagtcttagtaggacagactgtgaagagaagccagaagagactttagagagaacgggtcaagtcttgttaccgtctcttccagatggagaaagacagacaggagttctcaagcttgagtttgtataaatacccctttggcagtgcacgttcctgaaagtca

SEQ ID NO: 52095 - DNA, 1226 bp, Bovine  19866881163229
  misc_feature (1)..(1): n is a, c, g, or t
naaaatgtgtgggctgagtcctgtaaaagaaagaacttcatttactacaaaagttcagaactttcatcattttaccgaggacgactttctgtgtaacaaaaccttttaaagttacctgaggtattttaggcctctgttattcactgtagaatcctgaaagccgtgctttattcgggtaactgattttagggtggttttatttttggagactggggcggggtgagggttgggaagcacagatcacagacgtgcagcctattgtttgggacatttgttctagcgttgaccagacccttcctacgggaggaaatgcagaggtgggaccgtttgtcccttcacagcgagcgtccctcaacattagaaagatgaaagggaagcaaagtaaatacgctttgcctccgttcaaagtccgtcttctcctttttctgcctgaagcacttctcctgggcccattcagtgcccttccattgcctcctgcaccaaagccgcccagtgtcaccgatgagtcaattacagagggaaaaacacacaaagccattacaaggaagcaaaaaagtataaaaggcttggcaaaccctcagaacactgacacacagctaagccacaaaaaagcaaggacaggaatgatttctgtttgaaagaataagggtcagtaagtggaggaagctgagatgtgactgtttttcaagtaagggtgattggaactggatttgaaatgagaagttctctttttttttaaatgatacttttgtttatttcctagatgagtatatttttagcatgtttcttaaagagtgaaaatagtagaaaatacgtcaatgatgtttgttttataccaaatgccaccattaatgttctcagataaaacaacctaccagggggcagggaggagaaggatcatagatgagaatggcattaaattcagtcagggttttcgtttccatggggagcccagtgagccaaaggctgggggccgaggtttggaaataataatttaaatgaggcacctcacaaagtggaaagaagatagcagtatcagcctcataggacataaagtcagcttcccggcctccattctcccttccttccgctccctcgcccccatacaccccccagtccatcctcaagatgccgccagagtggtccttcccgggcccttcctcagatgacgtcttcccccctgagcagcctgcagtgtcttgccctgtgactcagagtaaaagtca

SEQ ID NO: 52096 - DNA, 1586 bp, Bovine  19866881187514
  misc_feature (1)..(1): n is a, c, g, or t
nactgctgttagcattccctatcagcatctcatttcttttttttttttttttcactttgggttgagtaacctttatgtgttgatcagtctgtgcagtctgtgctcagcttcccaattataactcttttcttcccattaaccaatacattttataaattacagtgtatctcagacttgcagacagcctgttcatcttaattaacaagtgctggcagtgataaattacagacggccaaaatcagtataaacaatatgacactgcattaagttagcacagtgctcacttactagtgaatgttggactcttaagtgctttcctctgcataaaaagcttagaattcattctccaaaatgaaggtcactcttttcctttcataaaatatactggcatcttagctattgctgtgaaatcttttttttcctctctgtctccagccataagcatggtacagtttgtggcctgttctttcacatttctgtctcatagagaataaaggaatactttgtttcagtggttgtggtggtgaaatactgtgaaagtaggcaaaagcagagaggtcacatgtgaaaacttagttctaaatagcgctctcgtgcttccaaaatctgcatatagaacagaacctataatgttaaattcatgagctatttcccaaagaaattctgaactggatttcatgaaaatgtaaagtcagttttccagacaagatttatttatatcaaatctagcatttaaaaacagctttacaacttataattcaaaccaagttatacacgaaggtctatatttagatccccaagcattatggaagctcctcattttccataccttttgtcagcagccttcagtatcttaactctcttctgtcagtcgccttcagttgaaccccaacaaggtctgatgaggagacaccacattcatgaggctcagttcacagcttctgaatattaatgataaaactccaccaagttaacttgcagatagcaacgagcaacacagaaatctggagaggtgaaaactgctgatggtgctagaagataaataccaggttctccatctcattttttgagctgtgggagaattaagacaagagaggcggggaagggagggagttgttgttaaaacaggatttgtcgaaacctgaaagctgaaaatgctcttgtgtcacagtatacagaggaggaattatttgggtgctgacagaaagactttcttttcttttaatattatgttttagtccatagttataatttatttttgaatttttatctatgttgggagatacagtttattacttaatgtccccaattaaacaatgtggtctgaaatatttttaactagattgtgctttgcaaatgatagttcagtgagactttctttttatcctggtgcttctgacttgtgtgaaatcaagatttacaaaattggtagctttcagactaaaaattcaaaagacaggtttaaacatatatattttgataaaagtaaaaagaaaatccagtaccagctgatgactagaatctgatcagtaaacctacaagtgtttttctaggaagggtaagaggtgggtatcctgaattttctt

SEQ ID NO: 52097 - DNA, 1465 bp, Bovine  19866881353124
  misc_feature (1)..(1): n is a, c, g, or t
nttaagtttttttaccccgttacatcgctactggcttgcccacgctgctactctaagttcaagaaataaaaccaccccatccctgctgttggactgtacttcacaactttcgaaatatgtgatttactgactcagtttcttaagaggggccaaatagaatgaaatatcaaaaccccagaaatgttacatactccaactgtgaactgccatatttctaataatctttttcttgcagtatcatctttcagaaagaccagcacgaaaaaacgctggtagaggttaaacgactatatatatatatttgcaaaatttatccaactgtgcgcttcaaacaggtgaatttttttgtgtctaaattttacttcataaaacgtgacttagggagtgggaaagcaaactgactaaaatgtaagctccttggggacagacttggccttgttcattcactctcatatcccacttcagctctagtacaaaggggctggtttcatgagtgtttacagaatgaatatctgcaccctcgagggtgagactcaacaagtaaacttttaaatatcgaacgccatgaaatggatactcttccaacctgtttaccaataaagtcccggcaagtttaactgcataaaaagccaaatcagtcagcacgtgcatgtattccttattggtaatacaccaagatttggaattccacaagcgcctttcaggagacgcgaagccttccaaagccagtgtttgctcggcgtccgcacagcctgccttccaaagcccacggcaaacacccctcagcaaacgacacactctacacaccccctgggcggtggggctccggagttctctcagagcaaagcggcagaagggtctgacctacggccaccgcacacctttgtgcctgaaccccgtcgcccgcccgcagggtccgcgcgaaaccccctcgactccactcccccagggacgcgagggagacgccggggaaacactgataagccacctgtcagccttaagtccagaagaaaattctgggatagctgcttcacggcttgcagtctaaacaacttaatgatttctcgaatcgtgggtaacggcgggagacggaaagtgccgagcgtcctggaggaagccatgaaccctgaactggctgtacagatcccacgccggacgttcctccaaggctcctcaagtgagggcagggggaggagcctgggagaactctggcccacctccgagcctacgtgattggttagaagtaccccgtcggaagcgaaggacgcgaacaggaaatccaggcgcacagaaagcgcatgctccccgtcctgctaagtgcagggcaggctgggtaaccgcgccgtgtttgcacgtgaggtgggcggaggccggagcgatggcggggcggggagaggcggggcctgggcctgaacgaggaggggcggacccaaggattgatgaatgaagttcacctggtggagga

SEQ ID NO: 52098 - DNA, 888 bp, Bovine  19866881373395
  misc_feature (1)..(1): n is a, c, g, or t
ntgccatttcctcctccagaggatcttcccgacctagggatcaaacctgggtctcctgcatcgcaggcagactcttcaccgtctgagccacaggggagtcctcttgccagtcaccaatgcctgcttggagacagggctccatagaaaaggatgctctcttgcaacaagtgaaaacctgtgctctcctcccaaagtcacatgaccacagagatgcagaatcagatgcaggaggtgctccttcctcagcagcacttgccctgcagagccttgggcagagctgaatagggagcccggacttgtcaacagcaggcagactccataaaagctggactgcccagacacctgattcccagagcatttactcgagggaaaagcagagcctttttttgccacctgccagaggaatggcaacacagaacttatcttttcaacagtcaagggacaccgctttctcttccaggggagaactctgcaccgtacccacctctatttgctttaaacctacatctacaatacttactctgaactgcgagggggtttcaagtatgttaaagtcagacgacgctgaaatcccatcctccagggtctcgagaaacaccttttgaaattcaagcatctctggcaagcttccaaaaagtgactccatctgagtgaagaccaggatttgaaaagagggtgttagcgatgaagatctagacaccgctctgaactcccagatgtacaaacgaaccacagtcattcaccaagaaggagacagaagtaaatcctttaaagaagacagcgtattcatgaggggacagagttcatacacagagggtcatatacatctctggtccctgtaattctagaatacgtttttaaggggatgtcaagttttcagaattcaaa

SEQ ID NO: 52099 - DNA, 1665 bp, Bovine  19866881384782
  misc_feature (1)..(1): n is a, c, g, or t
ngaactcctatacatagcaagctctgaactgatagcctttgcttttctccttaggtgatctttgtttatttccacaaaagggtgatggagtgcccaaggggagctactccctcctcagaaggaggaggttccttgtgagccccaggagcatggagaccttctggcttgtttccaaatggctcccgggggtgagacactttacaatcactctaggatgtcaggagatcagaatgacatctacgacatttttgagcacattctacctgccaatgtaagaccataagacagcatggtaacccactccagtattcttgcctggagaatcccatggacagaagagcctggtgggctaagtccatagggccgcagaagagtcagacatgactgaagcgacttagcaggcacacaaaggactgactaatttccattctgccctccggtggcctttgtgcctcatctcttcttcccccttcctcttgataaaacctgaattcctcagccaactgctagtccagaagatcaactcctcctcctctaaggagccttttttcagcacctactcccaaaactagctgaacttccactgacctctccttgttcaagccctgtaaaaattccatcctttcccccaaggcagaacattccttcagtgccttccctggctacggattttgactaaagtcttgctttgcacagagctctgctagactgtcttcaacattggtctaaatgctttacatattttatttaatctaattttcagaacaactctcaaagtaggtactattactattcccattttatagaaggagaaactctggcatgaaaaatgtacttgggggtaacttccaacacccagggtatgcagagaaatactctgaatatgctaatatgatgaggggtttcctcacctcatcactgttgacatttctggcaggataatcttttgtcgtgagggggccaagaaatagaaacaaggagaggattagcatttcctttttacatcattttagaattttatttttatttcacttttaaaaataagcatttcttagttttttaatttgaaaatcatcaagagagaaaaatttcaagaggaaagaaatctcacctttgttttctcagcagccacaattgcattactggttaatattgagctcatgattaattaaactttacaagcctttttatattatacataaatcgctttgtctcttctagcctatactcaaaattgattttttttccaaacaaaattcagagccttatattcaacttgtgataaatatcacattctatgttctggtctttcattgcaagccggcagttgtttaattttgactctctcactcaacttacaatctatctctcgttatttatcctctgtaatattggccactgcatttcaatgccaaaatagtgctgctgaaacagaatgaaagagtcctgttttacttcactagagacttcctgcttggaagtggaaacacatctacaaacattaatttaaattgttctaccagctgagtgtccctgcacctaatccttccacttgtggggccccacagctggtaccctactggtgccctgcttgaccgtaggtggtgggcctgatcacctaccacacaatcctccaagcatatcccaccagaatcattaagtgtc

SEQ ID NO: 52100 - DNA, 687 bp, Bovine  19866881449602
  misc_feature (1)..(1): n is a, c, g, or t
nttattcctttgtgaacagtgagcatcaaacagtcctaaaaaaaataaatagagcaaaatatgtctcaatatttctctagagttagaattataaaatactatcagaaaagggcactttatataccataatagtcattatataaagttcagtttggcaattccaagccacatttaattttctctgaaaattcccacatggcagagaagatattggtctttgtggctttcaagtctctttcggggaactgtaaaatgacaaccttttagaataagcacttcatccataaataaacactaaattacttataccaaataaagtcacctgtgtattttcattaacataaatactaaaataataagtagctttcctatataaccatcctgggatttatgaggtttagaattctgcattttagtttagtacaaactaggttagaacttgcagttcttcatctccactgataggtggggctaggaatttctgtattaattataatattttagcatattaaaatttatatctagatgaagcagatacttcaaagcttcaaaactgatgaaactgcatacttctcttttaagggataaaactgtttgcattaatatgtgaaatacactactaaaacaccccctgctgatttcacaggctttgcagggagttatgcataattttcgaaaattaaaaga

SEQ ID NO: 52101 - DNA, 1192 bp, Bovine  19866881483137
  misc_feature (1)..(1): n is a, c, g, or t
ncagcgtgtctcatccagctgtattgtattttcatcttcccaaatctgcccctgtcccttccaaggtccgatgcttctaagagtcattttttgtgctgtgctcaccaccaatcttccccagaaaccttgagtaacttaaggcacaagtttcagttctctttcctaccatctatcaaggacaattgcacagatcctgtatccaacccctgttatctcttgggccacaagagtacccagtgttgtcaatcctcaggggcaggtagatagttctggagctccagtgaggatacacacatctacccacatagtaaatcaaagaacaatgaaccaaaacactcaccatcaaaaagaaacatgttttcttctttttgtctttcctcttctaatcttgatatcaaacatatcatagtgaaaaagaactatccagatattctttttttttgctgtgccaggtcttagttgcagcatgtgggatttagttccctgatgagggatcaaaccctggccccctgcttctgaagcacagcatcttacccactggaccaccagggaagtccctatccagatattcctgcatcccagtaggacaaaattcagagctcaataccaagtacaagtgttttatgttagaataatgagcttctctggatataaattgggtatattttggtataatacatatatgtaacatgtatgctaatatattactatcaatatattataatggtgtatttttctgcagggtaggctataacatatatgtcttagtggttgtaaaagttgatgtcactcaaatctaaaacattttttcaatcacagagttataaatgatattatcaatgtagttgatgctaacatttgctaaaccaacttttctaatgatattcatttatgacacaaatacaacagtaaaaccaaatgcgggaagaaatagaaataggtgtgtaatagaaaagagagggatacctaaggatataaatttaatttgattttggctttcctgtagagtcgtttatggtaggaccttactgctggtagctctggtgatctaggaaggaggttctccagttttcctctccatggctctcagctactcgtgacctgaagtcaatctcagactgaaagtgaatcctcaggatagtggaatacagagctatcacagataaaggttcttcactctgcacactcaggg

SEQ ID NO: 52102 - DNA, 1534 bp, Bovine  19866881957537
  misc_feature (1)..(1): n is a, c, g, or t
nttagaacaggaagtaaatgtatgtactttcaatttctttctgtctcgtaagttgtggaaagaaagaaggcaagcttgcaaaggtggcctgattctcacttgggcactgcctgacattcattgagaagggatgctcttagtcctcaggatggagtgggcagtcgcccagggcatcagggagccgactgtgcggagagcagagggtggctagcccaccactttctgactcctccagagacagggctgtgcgtgtggggctctgaatcccatgctctcagacatccaatatttaaatgtaagtggaagaatacgtttcaaaacgaacagagtgcttttggcaggggatctcttttgaaattatccataactcgagtcctccattagcactcttaataaagagttggctttgtctcgtggtgacacggggctgttctttttttccagcatgtaaaagctctagctattttaactgtggcgacagctatttttaaaagctcctgggctcgttcttaccgaaggttccttgccagaaaattgaggcacggggcaccggacctgccactcctccgggtggtctctgcagagggtgatgttgtgcagcaggagactctcgggggtttggcctcgaacaatccggcttgttattaaaaaaaataataataaagccctcagattcgaaagtgattttgtgccttgtgattgccacggatacatagactatgacggactctacaataacactttcactgtcttgcaatctgggctggggtgcatttccctgagcttctttaaaaataggaatttaagaagcttcaagcaactttgaagagcccagaaaagaagtgcccctcggtggtatcctgtgttaaattgaaagtgtctacattagagaattcataatgaaggaaattgtttgaacacatccttttgtagactgttgaatctaattaggttacatcttgtcctgattgctgattcgggctaattggctaactgtactatttgggtcttttgtgaatttattgaacttcttcccttcctggtttgtttctgagcaccttcaagttgtcaagtgaagaagtcaaaagaagtgccttgaataatggtatgtgttcccccagtgacccagagcaggcttagtatttgacggggtccagaaaggtcgatgtaaaatgtgccttttaagatgatattgttgaattggagactgaaagaagaagttggccttcgtgaatggagcactggatcaagagtcctgtgatcctcctatattagatttcctacacatgcagtatcaactgaccccggacaatttgcttcggggcaaattccttcctttatctactggtgcacaggctgtgacgcgtggggtactgaggtcatacaacctaggcgttgctcactttctaggtgttttgagtaaaatacatgggtttattttttgaggaacatggtccttgcagagaaagcttagcatcacatgaagctttagtgtgtgcttcgcatcacactaggctgctcaggtcctgggtag

SEQ ID NO: 52103 - DNA, 1042 bp, Bovine  19866880506414
  misc_feature (1)..(1): n is a, c, g, or t
nagttggacacgactgagcaactgatctgatctgatctgatataggaagcattgaagaggaatggtgtgtgtgtatgtgtgtgtctatgagagtaatgttaaacccttttttcccatagtgggaagtcaatgagtaataatcaaaacttaaaaaaataaacaagaactgtagtttaaggctgttatttagatatgcagaggtaaattcccaaataaagagtggtaaaagtggctgactgaaatttagagtggaggatggagagggtatgaacatttccattataagattcatagagttgttagatttttaaacttatatgttcaacttagataaaaataaaagttattcaataatacaattaagcaaattaaaagaaatattataatatcaccagtatgagacatcttttaacaggagagtttagtggaggtgatggaattccagttaagctatttcaaatcctaagagatgatgctgttaaagtgttgcactcaatatgccagcaaatttggaaaactcagcagtggccacaggactggaaaaggtcagttttcattccaatcccaaagaaaggcaatgctaaagaatgttcacactactgcacaactgcacttatctctcacactagcaaagtaatgctcaaaattctccaaggcaagtttcaacaatacgtgaaccaagaacttccagatgttcaagctggatttagaaaaggcagaggaaccagagctcaaattgccaacaccagttggataatacaaaaagcaagagaattccagaaaaacatatgccttattgactacactaaaacctttgactgtgtagatcataacaaactgtggaaaactcttaaagacatgagaataccagaccacctgacctgcctcctgaggaatctatatgaaggtcaagaagcaacagctagaaccatgacatgaagtgacaggctggttccatactggcaaaggagtacgtcaaggctgtatactgtgaccctgcttatttaacttatattcaaagtacatcatgcgaaatgctggg

SEQ ID NO: 52104 - DNA, 4400 bp, Bovine  19866880511075
  misc_feature (1)..(1): n is a, c, g, or t
ncttccttctataatagttccctttgtagatttaatcatgttttcactggtgttgcaaaagtaccatttaaagtcttactcccctcccatgaaaccaaggcagaggttggtgtgtgtgtgtgattttattttcaaagaattttgttggtagatttttttaaaagctgcactagaggttcaactagttcatttccctttaatgatttactcattctacacagcctatatttcaaacagacagacctctgagaaggaaccaaggcctttcaagggtctgtgttgtggcgtgctcaacaaatttctggcagccccgctataggagtcagtgctcatttcctcacagctgtgaactcccttgcactccacacacaacagcactgccttgttgcctggaagactttctttaaagatacttcagagactctgctcaaccacagaggtgttcttgaatcctgaatgtgaaccaaggcaagctcccaccatcaaaccagactagcctaggacactactcacagtacacattctgggcaagtaaattgaactctccagtctttaagttgtttttactgtctccagccagttagatggctgaagggaaatgctaaccgacaaataatggtttccaaaggaaacctcccagttcaatgaaagagtgtgtcttccttattatgggagatgccatgtcacaagtgggtgttttgtgttcagttaaattaaaaaaaaaaaaaaaaaagattggtcttaaaaactgttaatgatagaacacatggcataaattataccgtaaactccaaacaactctgaaattataaacattgcttagtcaaggcttttcttataatgatgccctgatgtctctggcatagcccagtgatttcagtcaatattattttacttgaaaggaggaatttcttttccaaaaacagtctctctaagaaaacctatcttcccagctgactttatgaaacatctttctccagtggcctgtatcatgtcttgcctgtccaggaccacagggtgtgagatagcatagagagctagcagaagagagtcatatgatgaggagaaactacaagcttggtcctgacataggctggaggctgactcaagtcagtggcagctatgactaaataaagactgtcaggactctgaaccagcatacctgagacttggtgcagagtaagcactcgattcagaaggtcttccttggtttgcctatcagaacaattctccagggcagcagaaacaaggagatgtcttttaaataagaataatatttacatggtttataagggtgtgttattaagtacttactatagaccagccacttgtccaaatactttatgtacaatatctaatttaatcttagtcaactttgagataggtactattattacctctttattaagatgataactggggctcagggaggttaaatttctcccaaaatcatgtagcaagtacaaggaagcctagattctagcctaggttaaagtctatataatgaattattaacagctatgttatacctctttcctgaggattaattaacaaaatgtgtgtagaagtgttttggaagcagcacatgctatgcaaatgctagtaaaagtgctagtcagaagagcagacccattccacctcttgatagctctaagttttgttagtacttgtagagcagccctacagtacgagagaaccaagttggaggccagagaccaaagaggagactcatctgtggtcatcatggtgaaagccttttcttttgacactggtctgtaacaagtgctccactttccttcaacctaatttaactagagcccccttcatcatagtattttctcaaatgctcaccccaaatgatatttttacttgatacttgtcaagctgtaaatcacacaactggttcgcagaagaaagatgagaggccatgaatggtttgattcagtacattccaatgctggaaagggatgtgtgcctgctcactattttatggaaagttagcaccatatttgggcatccctggtggctcagaggtaaagaatccgtctgccaatgcaggagacctcgggttcaatccctgggtcacgaagatcccctggagaaggaaatggcaacccactccaaattcttgcctgggaaatcccatggatagaggagcctggtggggtcacaaaagagtcaggtatgacttacagactaaaacaaacaacagcaccatatttaaaaacaaaggtttgctgtgatatgaagaagaaaatttaaattaacaagaatgttatttttttaattccagaacattttttttcctggccagaaatggattagggaatcaatctagccagtgcacctcttcaatcagacaggtccctgccatgtgggtatgctttagcacaaatgtttcatgagtctctgagttcattcataaggcagatctccctaatgtcatattcattcactcagtgaatgatcattaaacctgtacaggtgctgtactatttagattataaacaatcctcgctcagaaggggtcacaatatagtgggaaattacaggagacacaggttcgatccctgggttgggaagatcccctggagaaggaaatggctacctgctgaagtattcctgtctgggcagaggagcccggtgagctacagtctatagggtcacaagaattgggcccaacttatcgaactaaaccaccaccacatagtataaataaaaatcataataaaacttgattatgctgtaagaatattgtgaattaactgctaaagtgatgcaggagagggagcctgtaattgcctctgactcaggcaagatagggtagcgtcagcctagctcctttctgtgttagtcctacagcaggcctcagagaagcaagaggtaattttggttcctaatttctggttcatttctcagtaacaaactgggacatgttgaaggctatagaaatagatgtttaaataaaatccagtcttttcacccatttgaattttagtgaatgatgaattggcagtcacagggctaatcccaggtttcgtggcctcaagaaaatacctgcactccaccttatatgtggcaccaagtccagctctgagcagattcagaagcttttattccagtggtactgcacagtcacataacacagtaagaggcttttatttttctaaaaaattatttgtgagaagtatggatatgtcacaaatataactcatgctcctgagtcgattccattgcttaagagctatgtgagaagttgagcaaggtacttagctgagcctcaactcccctgtttgtaacaaggataataagacagttagatctaaatatagcatacagaggaaaagtatttttcaaaccttaaaatgttatacaagcaataattaatatacaatatttctttcagctagtggtcactgtttatgttcccaagagacttttgtccgcaaaatcccactaaggagaccaatggtggataaattggtctttagaagatgttttggaaatgtatgtccaatacagaagctctgaaatgggagcttgttttctgcccatttcacattttcagcagattccagagtagcacttcctaatgtgattctgatagttgatcagtgctagatcatttagaacaatgactgttgaaaaaaaggtgcttaccatcatcaccaataggaatttgtaataatttggatttcagactttttcctctttctacttgaaaaggtgaaaaaaaagcctttgtggagaattttttttttttccttttcaatatgagacttgtggctcaaaactcaatccaaaccaaatttcaaatgtggaattataacccctacttctgaatggaaaccgtggagccccttagccagagtggcaattggcagctctgccttgttctctaggacacacacagtgggatgccaaccaagaaaaagaacaggcaaggagcacgaggggaaatgctaaaaccatctgtacagagttggattttatatgctgctggtacagcagggtccttgttatcttgcctagagtccatccccctcccctgactacaatgaaaagaagaatcagtaaacctctcttaccatattgatttcagagagtcagtgtggttcaggggagggcccatcagagtggggatcaggagacagggttctagcctggctctgtcattaatgcaccctttgcatttatgaaaatcctattaaaagcctttgcagtaggcccctggtcctctctgagactcagaggcatcatctgtaaatgtgggatgtttacagttagagtcacttcagatatcatggtgaggaaaacacactacaatgtatacagtattacttcagactttctgtggtagaaagagcgacccaggcctggcctctccagatacttgaact

SEQ ID NO: 52105 - DNA, 1492 bp, Bovine  19866880572195
  misc_feature (1)..(1): n is a, c, g, or t
nttggagacaaatattttacacagatttctacacatgtggtttgcacaccaagcaatcaggaactggagaatgctgtgtatactgacaattagtttacatgtcatatggtgtaaggtagtatgtagaggtgttacaactatgcttatctccctggccaccaacccaccaacagcataagcaaagtagactgtattatgtaagaaaagggaccattatctgccaaattctcaggagacgcaaccttaaataatcttcttttgaagtataatagaatcattttttcatttggttataccaaaactgtggttataaaacaaatgatttatgttgattaatataataccttaatgggcttagctgtgctaaaatttaaatgaataacaaaatatggaaaataacagatgcttatctctgctcagtcttaaaatttcactaaatgagaataagaaaatgtggtttaaaaccatataggcaaagtgaaagggtagaagagacaacagcagataagagacatcaacaaatttttgaaaaatgaaaaacagaggaaggaattagcagagctgagaaaactgaacactaagggcttgcagaagcaagaaataataataggcaggccagttcacaaggcaaagtcctgacaaagctcaagaaccaaatgcaccaaatcactgaattcaggagagaagcataaggcatcatatgtgggagagggagggcttgagagtctgtataagaagctttgagagtaaaattgaagattaaaagcttacttatgtactggagaaacactgaataaatcctagcagaagatggaagagaagtgccataatgggaacaagtgaattcagtaaaaatctacatactaaatggtgagaccacacctttttcccctcataagaacctctttatatcttttatctccaataacagtggcaaccaggattatattctacaagtaagaaattggaggattcttctgtgaacaaactggatagatagccttagacatttgcagtccaacaacaagatggccagcaaagctcctaatttttcatgctctagataaaatacgccagttaaaaagcccacccatgaaaatgagtttccaagcatatttttattgccttgcttttaaattaaaacacgtagacttaagaacttttccaacataaaagacagattaaagaaaaccaaaacttgtgggaaacaaagataatacagggagcagaacaaaacttcaaaaaaattatttttatctttggagagctgagtagatattgcatcaaagaaataagagcaaatttaaggcacaatcagagtgagaaatctcttaaaaatttaaatacagcattagtaaaaaaaatttaaatatttgagaatagtgactaatgaaaatctgatataaaatggaaagaaaacaaaaatggaaaatcagagctaaataaataaaaataaggcactcaatccagggagatcaatatctgaccaaca

SEQ ID NO: 52106 - DNA, 2857 bp, Bovine  19866880577207
  misc_feature (1)..(1): n is a, c, g, or t
ntgatcttcccatcggaattgatattcccaatgggattgaatcaggtctcccatattgtgggcagattctttaccagctgagcccccaaggaagcccaggaatactggagtgggtagcctatcccttctccagtggatcttcctgacccaggaatcaaactggggtctcctgcattgcaggcagattctttaccaactgagctatcagggaagccctaaaggcaagtatatttactgcgttcctcaatcctcagttcctagaactgtgcatggcaagtagacagacaaggtagaaagaatggctaagtttgataaaatgcatttatcaactaattttgaagtgtttcatctcataggatagtctgaatttcataaattagcaaactttctgaaagaagaaggattaaacatatcttttttttttcctgttccctcctaagggaaaaccaggtccaaaggggtatgccggtgaaccaggaccagaaggcttgaaggtaaagcaactgattttcttaccagttacatagtataatttacgaaaagataaatttatgactttcagaacaatataaaatgaacacatatcaaagattttattcaattcccttaattgagggaaccagttgtatgttaaagctggttcaaatagcatttgaaatactgtatgtctttatatctttatctgtatctagatatatgtctgtaaatatctatgactatgtctgtaattagatatgcattttaataaagaaatattaagattggtggttatatataggacaataacgggcttcctcagtggcccggtggtaaagaacccatctgcaaggcaggaggagcaggagatgcagattctctccctgggtagggaagatcccctggaggagagcatggcaacccactcaagtattcttgcctgaagaatcccatggacagaggattctggcaggctacagtccacagggtcacaaagagttggacatgactgaagcgacttagcatgcacgcacataggatagtaaactatgactttaggggctgtctgttccactggtagaaatctacaagttaaaaatctataatgtttaaatctacatttaaaaaatgtgtctgtgtatcgtcactaagtctgggtcctctaactgaaaatatacagtgagtctaagtacatactctggatcatcattcggtatttttaagattttatgacattttaaaaatgtaccactgaccaacttttttgctttgtgttgaagttttatgtgatttttagtaacaccaacaaatataaagtaatgcagtggttttttatgtatagcattaagtaagatctgaaagaaactaacttatgagaactggtgatcagtacaaattttaaatttaatgaaaaattgaattgtatcacagatttactgcttaatttcttaaatctggagttcagagctcattatttatattaaatatattatttatattaaactcatttttattatactggagattaagggacaaacaaacactctttgtttttaatagtaatattattattaaggccaataataaatatgagctaaaatattttataatgtgtcagcatgtctgggagtatctgtacctgactctcaagttacatagaaaaactcccagaaaatagatgcatggtatttataaatagaagtcttaattctcttttactgtaattaatccctgtactaccaagcaactagaaaattcaccatgagctaccatccagtcaaactggcaggaaactaatctcagtcattactgacatcctgcctcctccctagagttacatcagcatctgggtggcatctgtgttacctaggaagtgaaggaagttctttactgttcaatcttcatacttgtccctgaaatttcttctttggaatatcatatagctatttcctagacctggcattcccttgggggaacctggaactctgggggagcactttggagattgttaagagccaccacctttcacagaaccctaggatctctgttctctccatagacctggaggaattattcctctcttctttgcatcctcaaagacaactcacctcctacattcaggctgtctgaaaactcaagcaggaatgtaggtaatctgcaagcaacttttgctttctgcctattaacatagacctcccttaagattatgtatcacaaagggttcatctccctaattggaatttgagaggaccattaagtaggagaagttttttaaaaaattatatctatatatgcatgctatgctatgctatgctaagtcacttcagtcgtgtccaactctgtgtgacccaatagacggcagcccaccaggctcccctgtccctgggattctccaggcaagaacactggagtgggttgccatttccttctccagtgcatgaaagtgaaaagtgaaagtgaagtcactcagtcgtgtcggactcttagcgaccccatggactgcagcctaccaggctcctccatccatgggattttcctggcaagagtactagagtggggtgccattgccttctccatatattgtatatataaacataaaatcaattcctgccacaaattttttataaaactgtctaatgaactatttttttttctattgggatcatttatttttaattaatttattttttaattgaaggataattgctttacagaattttgttgttttctgtcaaacctcaacatgaatcagccatcagttcagttcagtcgctcagtcgtgtccaactccttgcaaccccatgaattgcagcacaccaggcctccctgtccgtcaccaactcccagaattcactcaaactcatgtccatcgagtcggtga

SEQ ID NO: 52107 - DNA, 1331 bp, Bovine  19866880648489
  misc_feature (1)..(1): n is a, c, g, or t
nacagcccacccggctcctctgtccatgggatttcccaggcaagaatactctgtatatattactttactgcctaatcattcattggagaaggaaatggcaacccactccagtgttcttgcctggagaatcccagggacgggggagcgaggtgggctgccgtctttggggtcgcacagagtcggacacgactgaagcgacttagcagcagcagcagcctaatcattctgacctgttgtgactacttatggtcccctgctaccttgagcggagaaggcaatggcaccccactccagtactcttgcctgggaaatcccatggacaggggagcctggtgggctacagtccatggggttgctaagagtcggacacgactgagtgacttcactttcacttttcactttcctgcattggagaaggaaatggcaacccactccagtgttcttgcctggagaatcccagggatgggggagcctggtgggctgccatctatggggtcgcacagagtcggacatgactgatgcgacttagcagcagcagcatgcacagtaagcattggaaggatttgttacataattactttttgagttcctgtgagtgagtgtaaattgctcagtcggtctgactctttgggatcccatggactataacagtccatggagttctccaggacagaatactggagtgggtagcctttcccttctccaggggatcctcccaacccagggattgaacccaggtctcccacatttcaggcagattctttaccagctgagccaccaaggaagccccgagttcctgcactcttatttaataatgctatatgtattttgttcttgctgctttagttccacattgcttcctcccactttctatagtttatgtccttgactctctgttctccattaaaatgttcacatccttaaaaacagactctactgtcaaggcctcaaataccattttaggcagatgatgaagaaatctaaaactctagctctgacttttttattcagctctagcttcaacagacctaattctaactccaacagatctttggatagttccaaaacagggtcctaccaagatctcagtatagtgtgtcacagattgagttagttgtcttccttttgccattggacagtggcataatttcttaatctttaagacttgaaatttcatctatatctcctcccttcccaatctaagaggtttttagatcttcttgatttcttttaataatgattctcttatttagcttttctgttgttcctaccatagttcatgatatgcttatttcaacacttaaaccaaatttatcctccaaacttcctct

SEQ ID NO: 52108 - DNA, 1089 bp, Bovine  19866880652178
  misc_feature (1)..(1): n is a, c, g, or t
nattgaaggtgggaggagaaggggacgacagaagatgagatggttggatggcatcactgactcaatggacatgagtttgagtaaactgcaggagttggtgacggacagggagtcctggcatgctgcagtccatggggtcacaaagttgggacacaactgagtgactgaacgacaagaacaacaacaacgacaaggacactgcagtggtgcagtggataagaacctgcctaccaatgcagaggacacatgttcaatccctggtctgggaagattccacatgcctcagagcaactaagccctggcgccacaactactgagcccgagtgctgtaactactgcagcccatgcgcatggaacctgtgctctgtaacgagagaagccagcacaatgagaagcctgcacactgcatcaaagtgtagcccccgctcgccgaaactagaaaaagccctctcatagcagcgaagacctagtgcaaccaaaaataaattatttttttaaaaagactacaaaatgctttgtaagacttatttccaacagtttgatagcattcatttataaaaacttgtaagactaacaaaaataaaagcacattattagatttttattatcttttacttaggcaagccagtattaaatattatgtttaacaaactgccagaaatcactgcttcattaatacaaacatgaatgaactaaattacaaagatgttttaagaatgggaaaaaaaaggtatgatgttctaagacatagttaattcctactagaagcagtttctcttattttgtaattagaggataatgcaaaaatcatctgtgtagtgaaacattgcagctataccccctttaaaatcagttgaagttcaggcagggatttgctttcattgtccttggatgtcaaatgctgttgccaacaagcttaaaaatctacagtacatcattccattcagtatgaattattatgggcatttgaaagtttttatgatatacaggtaatggaaagagtacagttaaaaaaccataataaatctgaagtatgagacgattgatatttttagacagagcctaagtaagttttccagaaacctcagt

SEQ ID NO: 52109 - DNA, 1070 bp, Bovine  19866880760255
  misc_feature (1)..(1): n is a, c, g, or t
ntttttgccccatctgttcctagttggcaggaagcacaagagcatgcaagaatggacattcagtaagattaattatatgattttaactgatatgttaggctgatgacaccatttacttgattcttcaaatatttcttcattaaaacccaatagttattacatactttgaaatcaagtaaaatctatatttttaaaaaagtaaaagttatttttaaatgcttgaactatatcaacaagattttatttcatggacaagtaattaccttttctccagaaagagcttgatctggggaaaaacctggatctcctttaggtccctaaataaaacagttataaaacacatgatgaaacataaattacatatatcatacttcatcagttgcatgtaatgtcatgcactatatacagtttatatggtattgaataaaattacacattttaaattaagatgaatatagattacttatctttttaatgtatatttcatttatccttaattttaaatgttgagaagattcctagaaatttcccagacatagctgatttttctaatcaataaagttatactaaaattgaaacatttcttttgagaactacatattgtgacatcagttcagttcagtcactcagtcatgtctgactctttgtgaccccatggactgcagcacgccagccctccctgtccatcaccaactcccagagcttgctcaaattcatgtccatcgagtcggtgatgccatccaaccatctcatccattgtcatccccttcttctcctgccttcaatctttcccagcatcagggtcttttccagtgagtcagttcttcgcatcaggtggccaaagtattggagcttcagcttcagtgtcagtccttccaatgaatattcaggactgattttctttaggattgactggtttgatttccttgcagtccagactctcagtaatcttctccaacaccacagtttaaaagcatcaattcttcagccctcagctttctctatgttccaactctcacatccatacatgactactggaaaaaccatagttttgactagatagacctttt

SEQ ID NO: 52110 - DNA, 1829 bp, Bovine  19866880893072
  misc_feature (1)..(1): n is a, c, g, or t
nttaaatatgagagcatatgacaagtgctctgcagaatttctgatgcatgtaagggctccacaaatgttacagctttatcttccaccctcaccacactcaccatcttttgaactatgtaatgagattttgtattgtgtcatagtcctttaaaaattgtttcctaaataataagaatctgtgtcctttaagtgtgagtgtaaccctcactcaaggggaacagctgtaagtgaaagaattaaaagcagatggggctaggcatggtcattcctttagggagagctggagagtgcaagaggaccagaggaaactattaggccaggataaattaattgctgcatgggagccatgaattgctattggagaagccctctggtgttaatcaggcaattaacacttgggttaaaaatagtagctaagttcaagttgaaacagatagggttgaaagcaatgaaaatgctctgaggcaattaaaggtgcatataaggtgaaaacacatatattttaagaaactgaactgctaaattagtaagtgttcatacaagattaaaaaaaattccctctaaccatggtattacatagataaaagaatgtaacatatagtattgaagaatttacttaggttaaaagacatgggtgggtggagagcttattccttcatctgtacagtacttctccactttaagtcaaactgtcttactgatattaccccaattctgtgtttcatgatgacagtctaggaattgctggtgaaatctccatgggcctgtccactgttatagtggatctgaagctgcagaagaaaaccataatctgcacctttctatagagtgaaaaccaaactctgaacctttagctttaaagataaataaagctctacagctcaaccttcattcccctttatttctctgctctcaaccggatacaactttttctccatcccccaaacagtgaccttttatttcttggttcctggttacagaaaagggcttcatctgtccatctcaaacactgcaaccctttccctgacacagctagagagcggcagaaattaccatgagttttggtgttcctatttatcgtggtagatggttgagaggtgatctgcaaaaagtcttaaactcgtacaaagatgtgtccgttttttacatgacaatctggtttcagtaacacctcactagcacttgctgaaacttcgtagacacatggtgatttaaaaaaaaaataaattaaaatgatttaaatgtaaagtaacccatttttctcctaaacaaaaattttaaaatctgaggacagaaatactttgaattaaatattaaatttatagcagatttttacaaatggttttacaggtaatatctttgaaagtttcctattaccttcaaataaacaacagaacctgtaaaaggtgttggagagctgaattaaagataaaaggttcaaatgtgctttgcctgctagagaatgtggaacttacacgttcatctggtctggagtttaaatttccactctaactctaattaatgaaaaattcaaacttcaaaaggcaaggaaattttgactaggttggtttaaccaagattagtctgatcaagacttttttttataaacccagttattcctaatttattgcagaatctttcttcctgaaaagggtttctgttcaattgtctgtggtctataattaacgaggctgactataagctagctgatttactgtgtagatgttgtagaaacatcttagaaatatttatgaaacataaataatgacaataacagtttagaatttctctgacatcctcagggattaaagcgtggtattgggggacag

SEQ ID NO: 52111 - DNA, 1012 bp, Bovine  19866881165434
  misc_feature (1)..(1): n is a, c, g, or t
nagacacagctggagtcccagcaagtcctctgcttgccaagccagacttcaggccagttagggcctctgctccaagaggggaagaagatgatttaacatgatccaggcgaggtgcatgtggactggattatggacaatttcacattttgttgcaaagagctaaagaatctacagtctcatctgatgttatgtatgaaaaaaaaagtgtgtttttcttttgttgttgactgaatcatgcagataaaaagagggaactggttggcccactcctttctttctacgtaagaatgctgtctttccaatttttaacaaagggatctcagacttttcctgcttaaatgacccaagacacatggttgaggtcactagaaggagaaaacaatgatggattttatagagagtaaacaaatagaaaagtcttatatgactgatggctctttaacttttaagggcgtgttctcaagtcaaagagctgatggcaccaatcggtgcagtaatttcaatgtgttcatgcagaaatctgctgaacccccaaattctgctcatctgaaaggaccccagtgacagactagaatgttgcttatttttcactgtggaaaggagaacctgcttatttgcctttactttactgtattgctttcagttctgtctggcagaagaacttgtgcatggagcagattcctatccatcacatacctctggccctataagctatttcatgataagaatttgtctcagaataaaaaagtcaggcaagtggaattctatttttcaaccaggaaataccaacacacagattaagaggtcaatactaccacacttgaccaaccaataaaaaatgtttctgttgaaataatccagagtcataatatcttcattcattcattaattccactcttttgaaaataatttttctattcagctagcataatacaattcttaactaagccatcactagaaactctgggccaaccacacagtcttttcccactgagaaaggtttcagattttt

SEQ ID NO: 52112 - DNA, 1541 bp, Bovine  19866881528070
  misc_feature (1)..(1): n is a, c, g, or t
nctttctcagcatgttaactgaaacccttgttgagcttcaggaggtgccactgaacgtctgagagaggcaaagttgcaatgcctttcaaatctttgatacctctgttcctgatgacaaatgccaatttgggttctgtgggcacacagaagtttctggcttttcttgccatcctaaccatttgaatttcagttctgtgtatctgcttgccttccttgtgatagggcttagctttttcatagataaactttgcctttcgaagcatcttttaggcaaattatttctcagcacttgatcttaagctctgtgaaattcttttcctttttcttaaggatttctggcatagcaggaacctttatttccttctcttctgcaccctccatggttccagccaggaaagaggccattttcattttaaatagatgacttcagtcagataagcaacatgcaggactcttcatatttttatatggaaaaaatattctttccaaacttgggtattatgaatacaccaagtttgctttcttgggcttctttggattttgctgtattttttattattttatttttcattttagggaattccaggattcactggtaatattggttcacgtggttaccctggcaggcaggtgaggtaactatatttaaacttttctttttatgtctctcttggttaatgcattgtatgttccaatttcaagagttaatgttcaaatgataattggtttattttattaaataatgaattactcatagcaaaataattccccaaaattctgatataaaaattgtaaaaattcttcaaaaattttattgcagacaaattttacttaaaatgagagtgggatttttaaataagtttgatatgatattcagtggaactttttaaattaaaatggcccagtaggctaataaaatgttaaacagtgttgctactgattttacaatattaccactgactaaaatgaagtaatgatttgagttaagaccgtctttgatatgcaacattttttaataatacaattataaatacttgggacacagttgccagtgctacatataccactatctgaatactttttatctaaattggattcaagtctttgtatactgttttgaaaattcattttaatcatttcatatttatttccctctaatttctaactttctctagctatttcacataggctagtaagagaaaaaaattttctttcttaggctttcattacttacttactcgtgaaattaattgttcatttagcatactagaaaactgtatttatataaaatatcttttttattctctagaattaaggaattgaaaatgccaaaagataatctagtgttaataaaattccattttgaagcctttaaagtatgtggagggtattacatgaatcttaccaccaagtaatgttttgtgtttatctgaaaaatatataaatacttaaacatatggaaattgatctgaagttaaaaaatgtacttattttctaaagtaggaatatattttagataagtaattagaagtgttctaaaa

SEQ ID NO: 52113 - DNA, 1536 bp, Bovine  19866881758381
  misc_feature (1)..(1): n is a, c, g, or t
nttatggctgtgtcctgcttggagtctgctgggcacagtggaggtattgctccaggactttttttttttttccttcaggttcttaagaccccttttcaataagccgttgatgtctctttctctgtttctgggctctcagtttagtggctgggcacctataaggtttgcaggcctctgggatgctgcccagcagttggctgtaagtttggggcagaattagaaaaagataaagaaaatctgttctatatcattgatctctacctctctgttagtcatcaagttagtaagtaggtacacttatataaggtgtggctcaactgacttgtcataatctcctaaaatcacctggctaagggatgatatttgatgtgttcaggttttcctgcctcacaccaggaatagacttgttaacatgtctagaaagaactcttgtcttccatttttctcccctgaggtcattggggaagtccacgagttgactgaattgcctggtgaatagtgctagttgtactttagctgtattggaacggaaaggtgccttttcagttgtttctaaactctcagtgaactggattactttgggcaggtgagaagtgcttcctttcatgttccattttcgattaaaacaacataattctgatatactctccttcagtgattggaatcctgagctattttctagtcttaccgatgcacatgctgccagttgaaaatacaaatttgaaaggaaaagtgccttcttttactcaaattctagatgacattaggattcatcctggaggacccaaggaaatcattttcatttcacactgctgtccccaactttcctcactagaatcacctgggaagtgtttaaaaatccctgtaaaacaaattaaagtcagaatctctgagggtggggttggggagggcagaacccaagtattagtagtttttagaagtcaccaggtgagtccactaatcagctatggtaagaagctgaaaaacaagtaggcctcacaccatctcttgagcatcacctgttccagaactgtggtcctcagggtatgatgccccagatctgcagcatcagcattgcctgggaacttgttataactgcaaattcttgagctccaccccgacctactgagtcagaaactctcagggtggagcccagaatctttaacaagccctctaggtgattctgttacatgctcctgtttgaaaaccatgatctagagtagcagaaaagaattttttttttttaaggtcaaatcttgtgtcatattataaaattaggtatgtgatttaagcaaagtattaatattaggttattttaagtacaatgtaactattaacagtaaatattctaaattgttttttctcagagtttggtacatacacaatcagtattagatcacttggttaaaaatgtgtacatgctgaggatccacttcaaatttatgaagtctctgggaaggcccagaatctggatttttcacaaaaaaccaaaaatgtggcatactaacatttagaaacatctcaggagacaccgta

SEQ ID NO: 52114 - DNA, 1126 bp, Bovine  19866880391584
  misc_feature (1)..(1): n is a, c, g, or t
nataatctgcttttctttgaatattctacattccagcactattctaatgctagaaagggatggaattaaaagtgaatactcaggaaagagcaggagttttacctggcaaagccaacgcctctgctgactccattagcatctcttagtatccttgtggaaatgacatgtccaaagggtttcagcatattctcaagttcctgctcgtccatagaaatggggagatttgagatgtaaaggtttgttgggtcttgctcttgttgctaagggaaaaaagaaacacacgcggtaagttctgaatattgagaaacactgtggatacatttcccttacattgccatctagagtccagtctccaacattctgctcaagttctttcagtgagggcagtgtttcttttcactgaattcctatgggctggaacgcttctcatagaaacaatgtcatctgtggcaaccatgctttctgtccagccttccttagaaaagactaatgaacttttattgtggttggacaaaagtaaacacggatgttctatgaccattagctggtggttctataaccactctaattgccttcaccactagttacaaatgttgcatttagagagtgttcatagtcatgtgtgcatgcgcgtgctaagtaacctcagtcatgtccaactctttgcaacactattgactatagcctgccaagctcctctgtgggattctccaggcaagaatactggagtgggttgccatgccctcctccaggggatcttcccgacccagggatccagcccacgtctcttacatctccttcattggcaggtgggttctttacctctactgctcccgggaagcccttcaccacacactaggcattgttttaaaccctgatatagactatttcattcaatattcccagtatatataatcgttactattttaaagaggacaaaattgagccatggcttgtctaagttacatagctcgtaaacgtcaaagccagggctgaaacctgggagatatcccccaagttcgcaggttttcctgtcttactatattgctttccactgaatcaatggggggaaaagtagtatggtcctagaacatcatttatcatcagcctcagcatcagttgggaa

SEQ ID NO: 52115 - DNA, 1772 bp, Bovine  19866880400973
  misc_feature (1)..(1): n is a, c, g, or t
ntcgtttattcaaatatataggctatgctgtctgaatgagtttgcttgggaaatgcaaagcaaaaggaaacataatttccattttagcatctctggatgtctgggtttgctcaatgtttaagctgcaaagaaaagtacatgctgcaattccactaaaaagcacaatgaccagacagctgatgggaatgtctggtctgttctggcctcctcctctgcaaaacagagctgcttacactaaagggatgtagggtggagctggttgccctaattctgaaataaataatttcaacaggaatttggataaagtttccagagatcattgatgtggagtaaacatatctgacctgaggccagaaaagcatctgtggtgttaacctcctgccgatgtttgaaagaaatttcaagtctaggagagttcaacaatgttttaattttccaatggaaatatgggatcattggcgaattgggaaaaataccagcaaggctctttcccatcaagaacacacataggtggtttaaatcctacgttaatgccaagatatggcctacaatgagaattacgtggatgaatgttcctgtgcttgccaatattctgggccaatgccactccaagtatgattaagaatttaaattagaatctctaggcttcaggcattgaaatcagtgttttaaagaactgtccaaatgattctgatgcccactgaagtttgagaagtgcactctattaactgctattatataagccagtgttacaaacacttgggtcttatttatgctgtttctcaattatttgttttaagccaatcctgtgatagggcatgagcctttgtgtaataattagatacatcctgtttaaaaatgcaaagaggtcaagccagcatttttgatgagctgaaatggggcgattatttgaataattcaggcctcagtctgatgacctgacatgcctctctttgatcagtttgtcttgtgttggggcacatttaagaatcctttctgttgggaatcttgctgctgctactgctgctaagttgcttcagtcgtgtccgactctgtgcgaccccatagacggcagcccaccaggctccgccatcttagggagccttgaatttgaaatcacagaaatgtaaaaataaaagacagaaaatgtatttgttaacataagtggaaaaaaagaaaaagaaatataatccctctttttctctcttgtccaatctaggtgtctcaggtcaaaatgtttgcagtccaaactggtatatatcggatggataacaaaaatgtcttaccgtatagcacaggggattgtattcaatatcccatgctaaatcataacggaaaagaatatgaaaaagatctttatgttccttcaaaaaacaatgcttacagcctgtattgtgatcttttcctatggtcacttatgccaaaccataggacttgttagtagtaatcattcaacacgattttagaaaacgtaatttaaagtgatttgtcttctttctaatctgcatgctttctgcctctgtttttaatatttctagaataaatatctagtggggtttgtgtacaccagacttttttttagcccctgtgaagtagcttccctggtggttcagatggtaaataatcagcctgaatgcgggagacctgggtttgattcctgggttgggaagatcccctggagcagaaaatggcaacccagtctagcattattgcctggagaatccccatggacagaggagcctggtgaactacaatctatggggtcacaaaga

SEQ ID NO: 52116 - DNA, 1401 bp, Bovine  19866880577554
  misc_feature (1)..(1): n is a, c, g, or t
ntggggtgagtaggtgaatagcattgatttctctcaagaagggtgttatgtaaatgctgcctgctagaactgcattttcatttcctgcattgatctcatcttaaagccttggagtcaaccctattttgttctgtgtattcctattttcacagaaattccatgttgcaaaatgaaagtgagtgactagagatgttgaaatcatgtttaaaagcctcttatcctatcatctttggctgttatttttttttaatctaaacaaataaattataaaagcaacaaatagttgtgtactttagctgacatcattattaaaatagcttctcagtggcttattttcttccagaaaatccatttttggaagatggctttgaactaggcccaatctataaggactagatcttgtttatcattgaggaaggaggattttcttaccttagagatactgtagttgttgtttagcagctgagtcgtatccagcccttttgctacaccatggactgtagcccaccaggctcctctgtccgtgggatttcccaggcaagaatactggagtgggttgccatttccttctccaggggatcttcctgacacagggatggaaccagtgtctcatgtgttgtcaggctgattctgtaccactgagccacatagttgagctcatcaataaacggctagaactgtcctctagtccaaaaactcccatctactcagctaggagaacaaagacagaccttcctcttctaagatatcctggtgggtccactaataacctgttggcagatataccagaaaagacttcctttaacagagctgtgacagacacatcagtgtattttgcagttacatgtcaatatcttggacacataaataggaaatttgaattggcacttgcatataatggctattcctatacttaatcctcaccaatctattttttttcctataatgaccagattctactttttttaatttgaagatactgttataccttaatttccaagttgttttaaatcctgttgtagtttattgaatcttttcagttaaccagaaacatcactgagctctatctctggtgatctaaagtctaatgacacactaatgtaaattttagcatccaaaccggaatacagtgtcgtatcatcatagttctctgttaaccatataatgctatgatttctcttttgcacctttggaattctcaatctaaaagtaacagaggagtaaaaagagggggaaaaatggatttagaacaatatccaaaccttggttcctagattcatccataattaccattcatttttcacagcttcagttctagttatcaaaaaatatgtgcttgatccaaattcaactttaatttcgagacaggcatccccagattaatgtcatattccagcgaag

SEQ ID NO: 52117 - DNA, 1177 bp, Bovine  19866880620208
  misc_feature (1)..(1): n is a, c, g, or t
ncaatttgactactcaggagttctcaacatatacttttgcttatttcacgcaagagcagccccgaagccatctgcctgccaacaacccgatccttcattcccattacggaggcagcgcccccacctcatcattcaaaggcaatcttcaaagggaccttgtttttgctcattcccgtcatgacagatgttttctatcatccacctccacatgctaactcatctgcgagggtctgcccacccattccctctctctgcagccagctgtggaaatagcctcagtgtcgtctgtggcaatactcattccattcttctgacctcaccgaagaccacatccaagagcaggaaaaacaaagagccctgataacttccttcaaaacatttccagggcaggagataggccagccccagacaagagccctttacaaggcatgtaacaaaagagaggcaagcttattggaaacactcaaatgtcaccgagtgagccaattggggtaatccccagattaaggaaaaatgaagtaacagcatctgcggccatgattcagctgaaaacatctggttgactcagaaccacttcaattagtctgggtacatatcagtcaatcattcctttcctttgattgtataaagttcccacaaggacatgtttataccccaacccatccaagtctttgaaatactgtgaaaagactaaaacatttcttcaatgaatacacaatgaacttgaactgctctgtgtcagagttacaccctgatattagaatatgttttaggaacaaaacttaatatgcataagaagacatctgtctccacgtgtttattaccacgtggagacttccccttgtggctcagtggtaaagaatctgcctgccagtgcaagagatggaggtttgatccctgggtcaggaagatccctggagaaggaaatggcaacccactccagtattcttgcctggagaatcccatggacggaggaacctggtgtgctgctgtccatgggatagcaaagagtcacacagggcttattgactgaacaacaatgaacgcttagaaaaattatagttcagcttcgataatgatacctgaaaggaaaaagtgaaagtgaaagtcgctcagtcatgtctgactctttgcaaccccatggactgtacagtccaggaattctccaggctagaat

SEQ ID NO: 52118 - DNA, 1537 bp, Bovine  19866880667124
  misc_feature (1)..(1): n is a, c, g, or t
nacacacacacacacacacacacacacacagaacaagtgctaaatattcaaaaggaaaaaaaaaacaaaacagtttgattgagaaagattctagttgcttcttggaaagtctcatttttccaaaactgattttcagtgtgttttgctgacaatcagattgttatttctttaaagagcttattcttggatgggacaccgatgaattctgctttttgagatgggtactgtccttgcctaatttatcttatagtgtctggatcttaactccttgccgctggatctagataggctctattactctgctgtactttgcactcctctttttattgtctgcacataaaaaggtgaatatcgtgagaacagacagacaggggtttattggtctgcatgttcatctctttggcataatgttgctcctctctctaggggaagtgtgcaggggtttatcaggcctactgtgatagagaggtataatacagtctgtaatgtttaatcagtgaggtatggtcagtatgtcttgctgaccgaacgttctctataattctgtgtaagtaccagtgagtagtagcataatttattcagagtctacagaacaaattctggctccagaatctgactgaagtaatcataatgtcatggaactgagaagaaggatgaacaggttttctatacatctccagaatcacagaccatcttcatctatgtttatccaaaatgataactccactcaggtcttcacatttctatgccttgaggttttcatggtaaagatttagaagggactaccctagtggtcccatggttaggactcggtgcttccacagcagaagacatgaattcattccctggtcatgggactaagatcccacatgcccctgtggtgcagcaaaaattaaataaataaataaaagacctacaaaataaatcacaaagccttaattttattcctaagttgatattggactttgccttctgtcagcatcactaatgagtagttaaaccatcagtgtctgtgagtgctattcgcaagcagagggggttgagtagcttaagaccagttaagagacaagccatagaaaccaggctctgaataattaagtgcttagtgcacttccaaatcttaaaattcatttaataggattgatttaaaaatacatcctaaccaatttttggatacatggatagtagtgtgaattagattcttgccactccttgccagaaaccatcaagaaagcttgtcatgcacacatcattttttatgatctaattctttagaatgagaagtctgcaaaatttaagaaaatattgtaagaaaaatataaatgaaaacactcactaagcaagctctgaaccaggcacgatttatctgatagctatttcctctgatttcttacctctttaagcctatgaatgatgaatcaattagcttactattattttttgtcatttctcatttaaaaagaagtctttcaaaggaaattggcatgtttacgatctttctttagaattcatatatttcaaagacatctgtcccatt

SEQ ID NO: 52119 - DNA, 1399 bp, Bovine  19866880743591
  misc_feature (1)..(1): n is a, c, g, or t
nacggagccatgagaactggcactcgggtgtaatgtgtgtgtccactgaggcatgactagttccctgagatacttttaggattaggaaaaccccaaatcctaaaatcctaggaacaggagctccagattcacctctcttaatctgcaggggagggaagcaaacttgttgacaaacatagcagcagtaattcctaggtgtggaatgctgtggtcatccttctcctttttctattagattcatactcgcactccatacttcagggaggtcttactaatgtcatgagcattcactccatttttaaaaggaccagggacaaatatatattatttttatagagagagaatcttggtccttttaaagggttcattgcagcccatgagtccagggaaggactcatatgatgtctacaagtatttgcttccccagcacattcctttgagcctctcataattaggacagtaactaaattggcctttttttattttccactggtgtcaaatacagctaagaggatttgccatacttggatattaaagctctttttgtaactggcagcatctaatcctgattattcactgtttgtatttctaaaatacataaaaccagaaacaaagctttcaactgagcccccaatttcacacccaagttgaccttggttgtccccagcctcactgtgactcatggctaatgaggacagcggtacttttctctcctcctcgtcaccctccccccagccttttgccagtgcctgcaggaccctgggtagaattgggaagaaattttattgggtgtatacttatttatctcctgtgcctttcacaattgttttcagtttcatcaggggtatatatatttttttcctgttttattttccttaatccaagactctccaaggaggaatagtagaaattcaaagtactcaacacaaattacttgcatttaatattttgatcatttatgtgaattatagatttccttgggcaacatatataagcataattttccaaacacactctagggtagcagatttaaaaattttatggcatattagaattaccaggtgagcattaaatattaattcccaggccacacttcaggccaattaaatccagttctctgcaagtggaacctaagcatcagtattttgttcaaagagctcagataattccaacataaagacaggtttgagaaccagagtcctcgagattactcctccatctcatgacacgttatagtagttaaaacagttaagagtgttgaagtccagcacatctgggaaattgcatttcccttcttagagatacttgtagattcacaataaacatttgcacactaaagaggagaagtactgagggaaaaaaaaacaaggacataaagaaagaaagagaggaaagagag

SEQ ID NO: 52120 - DNA, 779 bp, Bovine  19866880812672
  misc_feature (1)..(1): n is a, c, g, or t
nttttgcacaggcgtcgatggaatgctgttttgtttgtttttttaattttctactttacccaatgaaaacaaccatgtttttacgtgctgtgcaaatggttccttcatgtggtctgacagtttatttttgcatcatttttttaattaaagaaaacaatcccagaagaggacaactactactacaaacaaataaagcaaaacatggaaggttgacattcacgtggaagaacatttgaattcagaatttatctgaaggtgtagatagatttttttttttttaaacaggaaatctgatgtcaagaggtgggcaagcagaaatggaaacaaattgtcttcctcagtaattaagctactctttctttttctcttcttgtttaaatctagtgggttgggttttttttttattttatttttttcttagaaatatttaggtaaggtttatcttgaatcttaattgccttaattttaaggacgtcaaaggctctcgaggcaagctgtcaacgtcttgttaaaaccaagaaagaattgaaatattgtaccggttttcactggtacagaagtctaagactatgagtttttagggtgggaaaaaaaaaactgtacagttttaaagaaaatgtttttcttcatttgaagaaaatttgctgataaaagaaaccatggcaactgcaagaattggggaaatgctgggacttctcatgaactttgtcttaagtgttgaatcgttctagaaggctaaaacattttaaggtaaagttattaatgtggtttaaaaacaa

SEQ ID NO: 52121 - DNA, 1058 bp, Bovine  19866880830711
  misc_feature (1)..(1): n is a, c, g, or t
ntacagccttgacgtactccttttcctatttggaaccagtctgttgttccctgtctggttctaactgttgcttcctgacctgcatataggtttctcaagaggcagttcaggtggtctggtattcccatctctttcagaattttccacagtttattgtgatccacacagtcaaaggctttggcatagtcaataaagcagaaatagatgattttctggaactctcttgctttttcaatgatccagcggatggtggcaatttgatctctggttcctctgctgccttttataaaaccagcttgaacatctggaaagtgtattactgaatcctggcttggagaattttgagcattactttactagcatgtgagatgagtgcaattgtacggtagtttgaacattctttggcattgtctttctttgggattggaatgaaaactgaccttttccagtcctgtggccactgctgagttttccagatttgctggacagaatggattcagtgtggatggagaatccagaatgcggtccactggagaagggaatgtatcggtagacatacgcaaattgtcttcctgctcacaggaaatactgttccatgtaagtccatgtcttgggacttccctagtggctcaggtggtaaagagtttgccagcaatactggagacccgggaagatcctctggagaagggaaagactacccactctcgtattgttgcctggagaattccatggacataggaccctggcagggctatagtccaggggggtctcaaagagttggacttccactttacttgatcaaccattcataaaagtaggtacatttcaatgagtaaataaagaaagaaggagtgttgagaagttttctccaaaatactataattctccatttgcaaatttcatgacaatgcccattatatcctgactatagaatttacgtgaaaaaaaaaaaaatctagtttacagcacttttagacacaaactgcttcagttttattattccaataaaagcaatggcttggtgattctctgtttttctctcaccagggattccattt

SEQ ID NO: 52122 - DNA, 1731 bp, Bovine  19866880870173
  misc_feature (1)..(1): n is a, c, g, or t
ngtctgatggatgatttgatgctgtagagatttttcaaataagcaaggatagtgatgattgccaaatattgggctgaagtctttgtagaaaacatctcataaattattttagtctctggatactggatcatttgagattttacttgctacacttataggagatttcttttataagaaaaaattatagaaagcaagattcttgaaagagaagactcagcattgagtctttaactgctaaactgttttcttttcctccttccctttccattttttaatcttaattttttaaggcttaacacataactagagggatggtggaagcagaaaatgctgtcttggttagaaatttgatcccttctccaaaaccattcagaccatcagttaacagagttgaaagggatagggcgggaatatcactgaagattcccaccctgccacccccgctccggctctgcttgagatgaactcacattgattaatttttgagaggctaaagctgattagtattctctgtgttgacttcaattcctagatgtcattcagtgtacctggagcatctatcatgtgatgtgagcagacagagctaaaagggatcagcagtgactacaaaccttgtagaaggtattcatgtggaaagcaggctacaggaaaaggtatcaaaatatctgggcagcatcttctacatatttgccgatataactaaagctctcaagggtccagaggtggggagatgcttctctactctccgtgcagagacaaatggacagaggcagccagtcactaaatcacagaattcctgggtcagctttcttccagttcttacttttgtttccatcaatgtaaattttacatgtaaatgagggtagctcatttcaatgaagtgtatactttaaatgtattaacatgaattattcaaggacacagcaggaaagcaacagatgtacccatctgacgggggtcatgcttagtttcacttgatgaatgtttgttttgttgcttgaaaaattaatgcaataaaatatttaaaatgaataaagaggtttcaaatttacttggagaaaaagaatatttccttccaggaatttttttttttgatgtgccattggcattaagtaggattgtattagatagtttgtcttgatgttctatgaaagttgcagagaatattcattaagtgtagctgtgtgagcaccgattatgcattgagagagaaatttggaaatgtgagaaactcaaacatactgtatcactcagatatctcagaaaataagtaagaggatggacaatttgaaaccggttatttggtggaggaagatcgaagataatatacaatctgaatcatttactcctctgtgttcaaagcttctttagtggtcttctaatcttgaaacatatttgcaagtcattaagtcaagctccatttatgaagaaaactcaactgttatctccttaatgagaattggcttctcttatgggtaaatcaatggcattaattgttacttttaactttttatttgtttattttttgctgcactgtgtggcttgtgggatcttagttccctgaccagagaccgaacctgagtcctcagcagtgagcatgtgcagtcttaaccactggatcagtgaggaattccctcaatggcattttgtaagataaacctgcctgaaacattttctaaattattatagaaattaaagaaaaaaaatccaataacggaaaaaatataataa

SEQ ID NO: 52123 - DNA, 2009 bp, Bovine  19866880895687
  misc_feature (1)..(1): n is a, c, g, or t
nttctgcaaaagcttagggcttaagctgtctaggtctctgtgaatcttagttatatcaattgggttaaacacagatgtacaacatttggggagcaaaaggactgaatataaagggaaatataataatttgcatatcttacacaatcatttgtgtatcttagtactttatataaaatatacgcaataatcactgaaatttacaattaatagttttaagtcatgtcaacaggcaaatatatgcctcaaaccctattatttccatagtactttatacttaatttgtgtatcttacacaatcatttgtgtatcttagtactttatacaaaatatatgcaataatcactgaaatttacaattaatagttttaagtcatgtcaacaggcaaatatatgcctcaaaccctattattccatagtactttatacttactcatgtatttttaaaattatttttattggagtatagttgccttgcaattttgtgtttgtttctgctgtacaacaaagtgaatcagctacacatgtacacatatcccttcccttttggatttccgtcccatgcaggtcaccacagtccattaagtagagttccttgtgatagacggtgggttctcgttggttatctactttatacatagcatcaatagtgtatatgtatccatcccaatctcttaattcactccatccctctctccccgcttggtatcagatatctgttccctacatttgtgtctctatttttgctttgcaaataagatcacctataccatctttctagattccatatatatgcattaatatacgatgtttgtttttctctttctgacttatttcactctatatgacagtctaggtccacccacatttctaaaaatgacccagtttcaattctttttatggctgagaaatattccattgtataaaagaaatattacgtttcatttttttcaaggcagagatgagaaaatttccttagaagtaaattccccttattgcaaaatgtgctcagggtaagaatgctaacagctcacagatgaattcgctggagcaaattataatcaactggcttctagacatcatggtgcttacctcttttcgtataaagaagtaacatcaggaaaagtgggcacaatgtctattttctttactactctacactcattgcctggcaaagtgagccaatattttcggatgaatgaactcctgctccttggcatgtattagaacaattacacaattgtttataccaaaacagagaaattgaggcattcccataaagcatagcattgactcatgtcaagaaatgaagccatgcgaggggtaggctgacgcttcatagaggcctccaaagagaacaaggagttccttaaacacagactcagaggttctggaaacaaaagcggtcacatgcctggtctgacagttaaactggatgaagagaattcgctgaaatgagacagacgatggtttcccatctctgaactaacacaccggggttttacttgaagtgggttctattctttcagaggacacagagctgtcatccacgactattcaggattttggaaaaagtatggatggcagagtcagactgatcttgcatacctttcttgctcctttctagctctgtgaccttcggtgactcatccaaactttctgaaccttagcatctcagggggttaacgtgcccttcccaagatttctggagaatccaagagaacatatatgtagatacacaagcactgggcctgcagaggcaatatatgcaatgaaatgtagctcttattatcactgagatatcattatctactgctaacatagtgaaaaagggaatatttaaatttaacttttcttcaataaaaaaaagtccatataaatttatttggccagagtccttatttttcacaagtctgaaaaggcaaataaataaaaattccaacagaagataggcgaatatttaaaatcaaatggcttaaatgggtgctctgttaagatttttcatacatgcaa

SEQ ID NO: 52124 - DNA, 2502 bp, Bovine  19866881010102
  misc_feature (1)..(1): n is a, c, g, or t
nctgtacctctactcagcctctccctccgcccactcctttttgaggcgaccatcccaaactctgtccttagtacacaagatgctctaaaaaccgatctgtgtcacagacagatcccctagatggatggggaaacaaacaaacaaactaatgatagataccgtattggctcagtgggtaaaagaatctgtctgacattcaggagacacaggagatgtgggtttgcttcctgggtcaggaaggtcctctggaggaagaaatggcagcccactccagtattcttagctggagaaccccatggacagaggagcctggtgggctacaatccatagagtcacaaagagttggacgcgactgagcaactaacactttcacttttcattatgaaggttaaggttataatttaatgtcacactctttctagtcaataaatattaatgcattcaaagaaagaatatatatatgcatatgtatagctgaattactttgctgtatacctgaaactaatattgtaaatcaattataatccaatagataaaaatttttaaaaattctgcaactatacttcaattaaaataaatatttacttttttttaagtttactagaccatggttttaaatgatgtgcttagaaaataaataaaactccatagtcatcttcccagggagcccaagctgcagccaacaggcaaccaggcacactgaggactctttaactggatgatttgcagtttcagttatgatttagtaggactgtaattaaaaagcagagacatttgccaacaaagatccgtctagtcaaagctacggtttttccagtagtcatgtatggatgtgagagttggactataaggaaagctgagcaccgaagaattgatgcttttgaactgtggtgttggagaagactcttgggagtccctcggactgcaaggagatccaaccagtccatcctaaaggagatcagtcctgaatattcattggaaggactaatgctgaagctgaaagtccaaaaatcggttcacctgatgcgaagaactgactcatttgaaaagaccctgctgctgggaaagattgaaagcgggaggagaaggggacagaggatgaaatggttggatgacatcaccgactcaatggacatgaatttgagtagactcttggagttggtgatggacagggaagcctggcatatcgcggtccatggggtctcaaagagtcagacacaactgagcgagtgaactgaactgaactgaatgctgttttacctgtgataggtcctgttagcaatacaagcaacctcacagctaatattaaaaggagagacttgtgatgtgaatttatagaaagaaggtctcaaacctttatctttacatctgggatcaagcattatcatctgtttggattggacaaatcaaaagcctctattctgttccgtgagaagtatattggttttagtctatgcagaagtttttacagttttggagttatgtgtatgaccctataaatttttgccttttaaaaacttagatcctttgatttatgattttgaagcatcattgccttctttattaggactcagtgatgctgccaattcaggtatctacagtgaagggcagtggtggccaagataaatgaaaacaatgaattatccaaaatctttctttttctctaagtactttttcttacattggaatacaaatgccttatggaatgcacctttaggtgggagggggtggttcaggattgggaacacgtgtacacccatggcggattcatattgatgtatggcaaaaccaatacaatattgtaaagtaattagcctctaattaaaataaataaatttaaataaaataaaataaatatatatcattttcagataatctgcctgtgcactatatttacctttgtctccttcactaagagaattataatcaaatatagtaataaggatgaagcacaaccttacataaaagtcagtttggtgttttatcagtcacaaaggatactaataggcaccagaggggccatggggtcgagtgagtgagtggctagtggaaagacacttgtggggaaagcagcttgcatttttcagattgcattcagaatgtgcttagtgactacaaacagaatggaaggagatggcttctaaggtggtgcgagtggtgaagaacccgcctgccaatgcaggaaatgtaagagacaaagaccacagattcgatccttgctttgggaagacccccctggaggagggcatggcaacccactccagtattcttgcctggagactcccgtggacagaggagcctggtgggctacagtccatggggtcacaaagagccagacacaactgaagtgagttagcagcagcagcacacactcatggttattgcatgtatgaaaaatcttaacagagcaaccatttaagccatttgattttaaatattcgcctatcttctgtggaattttattattgccttttcagactttaaaaataaggactcggccaa

SEQ ID NO: 52125 - DNA, 1394 bp, Bovine  19866881357348
  misc_feature (1)..(1): n is a, c, g, or t
nctgggaaagatcgaaggcgggaggagaagggcacgacagagggtgagatggctggatggcgtcaccgactcgatgcgcatgagtttgagccagctccgggagttggtgattgacagggaggcctggctactgtagtccatggggtcgcaacggagacaactgagcgactgaactgaactgatgtgtgggatctaagaaagttacacaagtaactttttattcaaatgaactcatttacaaaacaaagcaaactgatttataaaacaaaaagagacttgcagatagagaaaacaaacttatgattaccaaatggaaaagaaggggagagaaatcaattaggagtatgggattaatataaaataggtaacagcgactccctgctgtgtggcacaggaactatgctcaatagcattctaataagctacaaggaaaagaatctgaaaaagcacatataaacatatatatattttttaatcgctttgctatacacctgaaactaacacattgtaaactaactatacttcatttttttaagttatacatattttaaagtacaatgcactgaccctttaagaaaaagtttttgtaaatatttaattcagtcaaaacaatatcactctgtttgcttagctctttgaaatactaaagaagaatacatgttgtaggtgtatgtctcaaaaatatttttcctaatcaatacttttacaatttttgataggttttcctcaatctggtggcttggagatttcagtactgtctaaattttataggctatgccctgcctcctttgtttttaatattttgggagcatctacagcagtgctaatcacacactctttctccatttctatttactggaaatccccaatataatgcatttagatatagaaatttttaaagactatgctgtggttttgaaaagttcatcaggaaatgatagtttctataattggaattctatatcaaaatggataaattccaaaattttaataattcctgaaaatgtcctgaggcaaaatctgttctacttccataagtgtttccgttttcttgttaggtagaagagacacgatctgaaatctaactctaattttccccaaggcctaaaagagaagaccttagtaattagttgtcttttttcatccaaccacttagtatctttctttttctttttttttttttttgccactgaatgcaaaaaaaaaaaaaaaaaagtagatctccataaggagaatattctcctctcaaatggctgttcttagaccttccattgtactttagcctcaatccatttttgcaatattacacaccttgtcacagtataagagtgttccttagttaaaaattatttaaacatattattttgagttttcctttttttaagaatttattt

SEQ ID NO: 52126 - DNA, 1399 bp, Bovine  19866881480545
  misc_feature (1)..(1): n is a, c, g, or t
nttgattaacaatgttaatttctgctgtacagcaaaagtgactcagttctacacatgcatacattcttttttatattctttcatattttttccattatagtttatcataggatattgaatatagttccctatgctacacagtaggatcttgctgttcacccatcctgtatatactagtttgcatctgttaatcccaaatccccaacctttccctctttgacctctcctctaccttggcaaccacaagtctcttctttattctgaaattctgtttctgtaccatgcgctgtgctaagtcgcttccactcgtgtctgactctttgcaaccacatggactgtagcccgccaggctcctctttctatgggatttcccaggcaggagtactggagtgtgttgccatttccttctccagggaatcttgctgagccaggaatcgaactcaagtctcatgtactggcaggcagattctttaaccctgagccaccagggaaggctttctgttcgcgatgcttgtttatttgtgtcattttagcttccacatatgaatgatatgtgatatttgtctttgacttactttgcttaatgtgataatctctgggtccgtccatgttgttgcaaatggcatttcattgcagctggaaagttttgaagcctgctgattacattattaaatagtcactgacctaagtcttgagagagaaagtagccaccactttagggcatggctatttttggctctaagtggatacaagaatattaagaatttccttacatttttatccatagcagatgttctattggagaaaaatggaatagtaaacagtgtaatccctatagagctgaaattagatcttgtgggaaaggaaaagttctccttgttaacatatgaaaatctgtgcatatttgctctcttcatggtcattatctgggtttgatgctctcactgggatgtcaagaggagtcttggggaatggggatgattctagcaatgcctgctgttccgtcagtggtgggatgatgagtccaagccagtcatctcagatgggaagcagagacttcagttggcatccctatcccacttttcctagatctatcaggaatcataactaggaaaccaactaaccttggaagtgctgaagggggtggtgacattgtgacatgccacctgaatgccccagagtgaagagcgtgtcacctcagcgactgcaaaggctgaccacagaattagcagtgatgctcagagccacagcggacactggggccaaggtgatgcctttcttgggtgggcacatcccagggccgatctgtgtgctggttatctggttatctaagttatccagttgtctaagcacctagttatctgagcccaaatcagaacgcctaacgggcattctagct

SEQ ID NO: 52127 - DNA, 1116 bp, Bovine  19866881714122
  misc_feature (1)..(1): n is a, c, g, or t
ntgtgtgtgtgttgtaatgatcttccgaagaaatgaatagggtgctgtagcaaatgtatggccatattcatgcccgttcagaatttcagtcgtttgaagaagaaccattgtcattgtccacaaatcaagtgatgacattctgttctaaaacccatggcatcgaaagccccatcggagaggtgaatgagactgaggaaaagggatgtactttgtttgcaatattgagtctgtttctctatagttttgtttcctgttctcattcttgaccgtcaggactctgagtacaaaaccatacgtatttgtgatataacagtacattacaataaaactatagagagagctcaatattgtaaaatgttaatttagcgttttctcacaggagaaaccatcccatcaggtgatactgggctgagttcaggaggtcctgtgaagggagaagtcaagcagagccaggaccccgcctggcccaggactacacacaggtaactccgactcagtcactgagactcagggcgctcacttagcccttcagagctcacctcacccctgccttaaagagcaacacgtgacccagtgttcaggttgtcctgagccttggacacgattttccattctctgctaagtgtgttgtccagaactaacctgtgtccccagttgaacttggggataagaactccaattgccaatgctgtgcttacatgaaatctgaaataatgaaatccttctttgcaacatgtgctccttagggaaattgttcttattgattcttattttatggaaattgttcttattggtgcctcagggggaaaaactgctggatgctctgctctgactccatcagtatgtaagagcaggggaagagaaatcaccttctcactcttagcagagggagaagacaattgaaaatagagggcagccgccttcattggttaagataagacagtggatatctttactgggcactatttaggggtgaaagcctacttcttagtagtctttctttactttccctttaatggtctctagtgcattagatgcttctagagaaagaggaagactctggctctctttatacctggtccaagaccatgtttttgggctagggaacaagaaggt

SEQ ID NO: 52128 - DNA, 1258 bp, Bovine  19866880490517
  misc_feature (1)..(1): n is a, c, g, or t
nttctgcagagaaacgggattgctggcaaggcttttgttacgagtgtcacactgagatcaatagagcatgaatgatgttcatgtcacctggtaaagtgaacaggtgaaacctaagtccaggaggaattcagttagcacattcatagatcaagatgcttccaagcttccaggtcaattctaactgttctttacacagtagttttccaccttcactggcacccacctatgtcctattcgtacttcactttccagttcaaataaaccttagtaagtttttcctaagacaacctaagtaagtttttcctagctaaccttccccatctaactctgaccagaagtgggaccgttatttctgtgtgtatctcttagaaacatttctgtgttggaaggaggaaaaaaatattttcacgcaaatttcttttagtaattcaaaagtgaaaacagtttacatcttagcagatgcccattctgtgggaggaatactctggtgatctgtaaatatgaactatatcaactgttcacgcttagggccgatgctctcactttgggaaagacgtcgtccacggttcgatgttctcaggctgtaaccctgagatgcgggccactggtgggcggggcttgaaaagctgcggttggcgtgtttatgcgtctggttcacagctgtcccagctggatagagtccctcagataccaagcagatgacaggcactgggctgatacgtgaggtgactgctgctgcctgctcacgggacatggctgtggctgcaggtatctttccccagctctgtaatcaacagtgccacttggcaacctgaggtcagccatggcggcagtatttacaccacggaaatcagcagtagctacaaatcaggaccttttaccttaaaaagctggctatgggacattaccaccatttaacatttacacgcatgggtatgtattataaattcaaaagcacagggctcagaatggatacacagattatagctatgttaaaatacgttaaaatctatgtgaggctcagaagcaaagaacagtgatgtaagtagagctttatgtttgttagatactttctctgtaaagttgagtgactaatttaaaacaaaatcctttcccagcccttgatatggttccaacttcttttaatgcaatagaaagtaaacgtaccatgttagattctaaaggaatcagtgaggtagggccccgagagcttgactgatgtataccaactccaagtgctgtgttctttgagccctgt

SEQ ID NO: 52129 - DNA, 1884 bp, Bovine  19866880610899
  misc_feature (1)..(1): n is a, c, g, or t
ntgacacacacctggggacccttcacgacatgtgcctaaaacaatttgaagggatgaggggtgcctttccctcattagaatctgcgtttcagctcacacccacagagtctaatgctgacagcagaggtgtgactaaagtttcaaatgtgtgcaaaaatcttacttcttaaattgcttaagaaatatcccaatgttcatgctccgttttgcatccaagagagtaatctggaaaaaaacacaagacacataagattgttcaagtgtgaacgagaagagctggagactactgagcctgtgctctagagcccaggagccacaactaccgagccccgcactgcagctgctgaagcctgagcgccctggagcccgtgctccacagcaagagaggccaccgcaatgagaagcctgcacgccacgactagaggggagccccgcgctgcaaccagagaagagcccacacagcagcgaagacccagcacagcctaaataaacaaaatgatttcttaaaaaagagttggagaagagaattaagacctatcaaactacaacataatgtattaatatgagaatgtattaaagtaagagaataatttccagtatgtaaatctgcagactgatacctaatatagcttcaaaatattatctccccaagctttctacaatatttccttaatggtaacaatcatatatatatatatatatatatatatatatatatgtaaatatatatggtaccaatcatatatatatatatataaaccaatcatataaatatgcatatatatattggccaagctgcagggcttggggaccttagtttcttgaccaggtattgaatctgggcccaaagcagtgaaagcactgagctaaccactggaccaccagggaattcccatatagatctattttattattgcataatctctgatgctgggagggattgggggcaggaggaaaaggggacgacagaggatgagatggctggatggcatcactgactcgatggacgtgagtctgggtgaactctgggagttggtgatggacagggaggcctggtgtgctgcgattcaatgggtggcaaagagttggatacgactgagcgactgaactgaactgaatcttaaataaactatatcaacattttctaaattttacaattttctcttagaacaacacagcccacatttaaaagccccaatttggaaatagctgtcttagcatagcaagaatcatatgagatttgaactctgaaggtattgcagcatgagctccaaccctgatttagggatgttaaaagaccaacactgttattttcagaaacgtaataaaattcttagtatttttctaaacaaatattttattttcattcaaagagtagatccagtagcccttttaaaggaggaggtaagaaagtgtcctacacttttttcagaatttaaaagggaatttataagggaaaactcctaggctgtattttaccaagtctaagatgctttcttttttggcatgcgagcatttctggaatcctcacaccatcccactccatccacagggacgtgagtcaacccctgtccagcgtgtcctgcccgttagccacgcagcgtgtcctgcctgttagctatgggttatggggttaccggcatggtaccacggcgctttgtgttcacaatgcttgcttattttacttggtaatggcccaaagcacaagtgtggtaacactggcaactcagatatgccagagagaggctgtaaagagcttcctctaagtgaaaaggtggaaagttcttaacaaggaaagaaaaaactcatttgctaagggtgctaagatctatggtcagaaagaatcttccacccgtgaaattgtgaagaaggaaaaagaaattc

SEQ ID NO: 52130 - DNA, 1165 bp, Bovine  19866881397074
  misc_feature (1)..(1): n is a, c, g, or t
nttcctcaatttcttcatctaataatggggggcggggagtgataccctcaaaactaggtaattgagaaggcggaggaagataattccagagtgtgattattaactcagtgttctgaatacagtaagctctccataaataatacaccctattattactatattcttcagaagacagagggcatgttgcacttggtactaactgaagagtccattttcaggacatcaagaccagaaaatgtgttcctcagccctgttagatccccgtatccaggtgctctgtatggcttggtccctgccccttgtggggaggttgcctgagttgcaaatttccccccttcgtacttgccttccttgtaccctctgaacaggggaagggtccagactcctcccgtggcctgtgcgctgtctgatgaggctcagtctgcagactggtctaacagctgctggtggctgggtcacacggaggcgtccttagaggtgtggtggttttcagcaggatagatcagattcttttaggagcggtgggccctgcgaagccgcctcctccttccactgagttttcacacacatgtgttgtgtttcatgtcaggatcagttgctccgggaagttaaatgtttcttgagagtagatttctgcccagtcttactgagaatgtcagactgagtttgtgtctctgggaattactttgactgtatcaagccttaaagggagacagtgatgctagggttcctttaagccctgagaaaaatttctccatgtagtagataaaattccagttttgtccccatagagtaagagaagattctgtttttgttccaggaagcccaaaagaaagatgctgtgcttctaaatttttctgaaaaattgcttcatgttcaggaggctgccaggtaagcaagaaagagtatggtgagacaaacgtggttggttgtttttttcttaaccaccttcttataaaaactgatattttacaacttctggattcaggtttgaactttcaaaagttttgtctaattgaacttcagaccttcctttcatttggttacagaggtgtgtttgcacctttggaattatgggggttttcaaaaattaatctttatttttaatctaaaaaaaaaccctattgcagtttattctaagaatatcatcagtgtaaaaatgtat

SEQ ID NO: 52131 - DNA, 598 bp, Bovine  19866881590564
  misc_feature (1)..(1): n is a, c, g, or t
ncctttagggcctcaagtgaattttacattttagccttactaagtttaaggagagatggaacttctgcattacttaaacccaaactagtgcctagtttctgaactgaaaaagccacaggatgaattctgatccctcctgaagtagcgtctaacgatttaccatatatgggcaggggcagagtggggctgtctgtgtcttttataagaccacatatgtagcgtgggcaagacttctgagaatcacagcacggcttcctgtctgaagcacaagagcaggtcatgctaagtacacttggtagatatttctattaaacatgtgctgaactgtaaatgaacaatgattaattgccttctcttatataatgagtgaaaaatgtttatggagtttaagaaaatagtgatactaaagatagtatttgatttaaacgccatgtatacagttcttaattccatttcaaaatgagatttatgttcattaagagggattactgtgccttcacagtgagggaggtaaaaaagagaggtggacaaaccctgtaattattgtgtattctcatcaccatcaaaaagcatttatcaaacattgttaggcatcatt

SEQ ID NO: 52132 - DNA, 1786 bp, Bovine  19866880396992
  misc_feature (1)..(1): n is a, c, g, or t
naatcgagggaactggtgtgtttattttttgacctctccttctagctcctgtgtgtttcccattgcactgtcgccaggctgtcagctttttacatcaaatgttttcactttcaagaaaaacacataacaagtgcacctaatttataacaatgatacagagctgtttgatgacgtggctttaatgccctttgccgatatttgctggcctgggtgtcaattctgaaaccttagctgggtatagaatttcagggtcggcagctttccttttcactgttcagtgaaggcttcacttttttcctagaatttactgttgtggaagggaaattgaggccaggctgatactttaaagaagaaacctgttttttaaaaattggattgctaaaggaagctttatccatggaagccaaaattttctccaggttttgatgtgggtctcagaatctagtgtaactggcaggtggagcatctgttaagtgtccagatgtgtttgtttgttttgaggacttttcctccctaacacggctgccttggtgaagagggagggtcaagtgaaaggggccccacagcccaggtgaatgtggagtcctggtgtgtgtgtgtgtgagctcctgggcatgcccgctccctgcccccgctggcctcttgcctgtctgacactgtggaacagcctctgccctgttcctcacaggtcctgcaccctcggtaggaggcgcgtgtctcctgtgggtgtctgtcctgggactcagtgactgtgcatagacacgcctctgatggactgcccggattgcagcccagccgcccctgtgttggccatgccggccaccccgctaccctggtgggatgaaggcttctgcctctgtgtcctttctccctgggtggggatgatgccattgtggcaccgctccagctcgttcacctccgtgaccccatctcccaggtatggccctccattcccatgttttagctctagcgtggattcaggcgcttcagtgagttcttactttcgtgcaagtgaattttgggagtggacaaggaaaatgcatgtgccagttgcactgttttgaaagaagaattcagtgggacaagtgttattgggaaagatggagaaagaggtgtttggagagcagggaacggcgtgggctgggatgatggccgtgatagccgcctggcagagtgcctcgtgtcctttgggggcgggaggtcagagggccctgcagggagggaagggtcagctcctgtcctggacccagctgggttggccggcttccttatttctctcataccccttctcccacttcacatttggaagatttttgtcctctgcttaactggaggaaagtgggtcccgctaccatgggccctcacatcttccttgaaaaatatggggggtaaattatttaattattgttttcaaattgatgtgctagtcaggcttctgatttataatttaattgtgctgctgtaggtagcttccaatttttcactggatccatttgaataaactttgtgttgtatctcagtattagccaaaggaagattaaaaagtaagccggagagtttagtagctttgtaacaatggcatgaaatgtggaataatgaactgtaaatgtgtctaattacataaataatgcatttgtgtaattgtcaagtaaggggggtgtgctaatgaatcaattatttttaattgtaggatgcttgattgtttcagaaatataattgattgtaatcaagaatcaattaaatgttgatagtaattatgtttatcaagcttaaatacatgacatca

SEQ ID NO: 52133 - DNA, 2006 bp, Bovine  19866880521939
  misc_feature (1)..(1): n is a, c, g, or t
naagagctggtggtcacaggcctggtcgggccatgggcttccgcgccctgcgttctcctaatcactgctctcaggggatgttcttcttgcttttcctttcaggggagaaaatcaggcataaacgctgcccaggacagtgggaggcaggggatgaaggggacaggggtcccgtgtttgtgagaccacgtggccacccccagggaggacaaaccagcggagggtcaaggcagtgcagagagggcggaagtgatcccaggcggctttcgtctttccctaaagagcctccgggcggtgaggtccctgtgcccctgcttccgccagcttcctgagggtgcgtcttctccacgtgggcaaagggtccggtgagattcacatcccagggcaggaaggggatgaagacaggacagaggaggccgtggcgcccgtggcggacacgcctggagacgccacacaggttcacagaaaagcacgctgttccaaggccttctgatattaacccaaacgcttctaccagttaatatgggcacaattggatcccaagacaagcaagccatttgtcactgtggggacactttttcttcaggacacagaaagcaattttaaaaagtaataaagtactaaagggggagtgtcaggtcagaaattactttttttttttaatgttttatgcctctatttttctaatgccttagagtgctaagcaaatcctcatcacgaccacttgtgtgtagacacttctgctttgctctcgggggcggaggccctgatccccgcaggctcttccgacgcccgcggctcggacggcgccatcactgggggtaacagcccaccctgcacgtccagcgcttccagggcggacggggcgcctgctggcccagacccagaccttccgcagctcgctcgagggtgccccccagaccctcttcaggatgcagtgtcccctctgttaggcccacgtggccccacgtccagagaacaggcaaatagagaggcaggtgtggcccacagcacagcgtctacgccccaggagtcggcgtcagcccgtggggagctccaggctcagccctgcaaacatcccacttcgcttgcccaccccccggccgctcaccagatcccacccctaaaccccctgcacggccccttccaggcagccaaacccctgcagaatccaccagaactcaggcaggcgaaatgtgcggacgtcaactctgagtccccaggggtcagcgtcccccagaggccccacgcaggcccaggaggcccctcggatctcaggggctggggcaggcctggctgcatgggccccggtggggaggcaggcacagcagctgagagccggggtggggttagtcgtctattccacaataaaattcaattacagatttaatctttccacccaatgaatatatgtgcacgctcagtcacttcagttgtgtccgactgcgaccccatggaccgtagcccaccaggctcctctgtctgtgggattctccaggcaagaatactggagtgggttgccatgccctcccccagggtatcttccccatgcaaggattgaaccgtgtgtctcctgcatctcccacgttacaggcagattctttaccgctgagccaccagggaacctaatgaatatatgtcagttcagttcagtcactcagttatgtccactctttgcgaccccatgaatcgcagcatgccaggcttccctgtccatcaccaactcccagagttcactcagactcacgtccatcgagtcagtgatgccatccagccatctcatcctctgtcgtccccttctcctcctgcccccaattcctcccagcgtcagagtcttttccaatgagtcaactcttcgcatgaggtggccaaagtactggagtttcagctttagcatcattccttccaaagaaatcctagggctgatctccttcagaacggactggttggatctccttgcagtccaagggactctcaagagtcttctccaacaccacagttcaaaagca

SEQ ID NO: 52134 - DNA, 1950 bp, Bovine  19866880885661
  misc_feature (1)..(1): n is a, c, g, or t
nactctcagcttagaggtcactcctgggtcctggttcgcggcctctggtgggcagatcgggccagcaggagactctgatgctggagcccgacttggtgcaaaggtgtcgcttgtgtctcatgacctgaccccacccaggaagtcactccccacagtcccaggtgctccacactcagagtggacgctgcataggtctgttcacttgtgcgtggcggggatctcggggccagttcagaattctgtccacctgagacgctcatcgatttgccttagaaaaagtcttcctagttggtagcttacctcccagaactagactttcccacgtttatcagaaaaaaacacgtatttaaccagttacctctctcaagtcccaggtcagagcttcaggcttttatgtttataagcaatgcttctgtcggctctaagaggtgttgctcacacacacgtgtttttgtttctctaaatgagaatttggttccattttgtcaagagagagtcctttccttcaaaaggatgtagattgtttgctaaaactctccctgcctcctgggggttgatgtcgtgaaggcgaccccctgttggaaactggagaagagggggatgtttgggaatggtaccactttcagacaaacagaatttttgttactcttgatgctgtcaaactttaaaaaataatctagaaagtaactgaagaatatatagcggagatcaaagacgaatcaaagaaactgtaaaatcacctgcctgttgtgtaaatttgcaaatttcctttggcgtttcagctctccagagcccagagtattcaccctctgctcaggcacagagcctcttgggggagccagggaggaaggcactagaatacaagcctatttaaaagaaaaaagagttttattttgaaaacacactgttaaaaattggtcattcacattagccgcggtgtggtcagttggtttttgtaattcaggtatttttgcctatgaagaactcactccatcattttaggcaaaagaaaataagtcctcctctctggaaggcttacaggggcgcgccctccacagaaccggacggaagagcctcactgcccttcgcttctctccccaccagcaggtggtgcggctttctctccaatcgtgaacacgctctgcctgactccccgctcagacactgggttagctcccaattccttgtgcttttgcgtcgaatgaaattaaccggttggatactgacaggccacaaatcaatagtagaactagatctttgaaatattcatgtgctggttactcttgggaccagcatccacgaaaagagcccagacctcctgccagcctactcacagacaagactgcttcagcatccagattcttcttccttctcacggcagctctgcccacccattcctgctcagaagacagcgagctaggttcagagacgaggcggctgtgagcccacctgagctcagctccgatcaagtattcagagccaaacacaaactagggcaatgccagcatgaaccaatgcttcttaattagtggtaaagaaccttcctgccgacgcaagagatgcaggttcaatcctgggttgggaagatcccctggaggagggcatggcaacccactccagcactctcgcctggagaatcccatggacagaggagcctggtgggctacagtccatggggtcacagagtcggatacaactgaagcaacttagcacgcacaccctcctaaacgtcacaagaggcttacaggagcccaggtatgcgtttaagatgctggtggctcagacaagggggcaaaagagtcactgtccaccgtacctacgaggttcctgagcactgcttgtttgcacgtcctcgatgacccacacaccaacatccagcacacaggacttgatgcatttgtgtgtttccaatgtgggtttgtatgtacttttttctctttgatattttca

SEQ ID NO: 52135 - DNA, 1257 bp, Bovine  19866881189262
  misc_feature (1)..(1): n is a, c, g, or t
nctggcctgacagccctcctgcctgccgtaagggcttcagggggtaggttgaagaggtaaatgatgtggactaaaagtagtcgtagctcagctggtaatgaatctgcctgcagtgcaggagacccatgttcaatccttgggtcaggaagatcccctggagaaggaaagggcaacccactgcagtattcttgcctggagaaccccacagacagaggagcctggcgggcttcagtccgtggggtcgcaagagttagacacgacttagcgactaaaccgccaccaaagtaatcttccacggaggtcgttttaagagtttctcagcgtccacagagtgtccttagcccaggcgtcgaaacctagcgtgtgagtcactcattttggaaccacttgtctgaggaagagaagtgtgttttgtttgatcacgtgcggccggcctgtgggatcaggacccttgctcctgctatcctggccttgttaactgcacagagagcttttgtttctctcgcttgggtttatttgcagagacggccctttcctcgtgtttctctctcagtgataatgagggggtgcagtgtacatacattaggtggtgctgtctggctcctgacttgttaatacagctttatgtcgctcacacctatggagagagagtgaaaaagcagaaatatgggtgacttttatgaacaaagaaataaatgccctagtttggagcagcaagtgtggcagaaactctgggtcattttcctatgtttatagcgctggttccctggtgatgatgtgtgatgcagtagaatttccttttttattgcacttcgcatgccctgcttattcccgcctttctcgatcacagggcttgctccctgtaaacccaccgcacgtactgtcagatgcgtcacccccgggtggacagtaaacagcaactgtgctcagcggctgggcccgagtgagagggggcgtctcctctggggacagtcctgtctgtgtgcacctcaggcccgctcttttttagcaaggaccccgatcgcctggccgtgccgactgtctggagacggacacacacacacaccctgggtttgttgcttccatgggggcagaagttgtaggacaaaagggagacgcctgggaggagcacagtgggaaggtgggggccgggagccgggtgaggctggcaggaggagcgcagtggccaaggtgggggccgggagccaggtgagactggcaggaggagcacagtggaaggtgggggccgggagccgg

SEQ ID NO: 52136 - DNA, 673 bp, Bovine  19866881514759
  misc_feature (1)..(1): n is a, c, g, or t
nagtttttttttttttttaatcctcacattgttatgacttaagaaatataatcttctcttctaaaaatctttcttagtcaaatgaagtcttgtcccttctctgtagaaccaaatatcctttgttcacaactcagacaagcttaacctctctggaggctcctgcaggcagacaggatgtcacagggactcgtctgcctcagcaagcatgggggtcattccggaaaatccctgcaggagggcgtcggggccttgagaaaagcgcctcaggagtcaagcaggcagattactcgtatgtcttagatccatgctcagcttcataatatgcttcatttctctggattccatggggttcgggctcagccgagctctcatggccaagagctctcatccccaaagctgaggaccagcccttcatagtgcttgtctctggggaaagaagtttttgagaaggttcggatgccttggctctttcgtattggccgagtcacccccgcagtccttctgagcagaagcctcccgtctgggcgagctgaggccatggaggagggagggagctggtttgcctcgtgttcctgctgctcactgcctccgtggtcttcgtggcccctctgctagttgagcctcactctcctgccctgtaaaacgtgactcattttctgcctcatgtggaggg

SEQ ID NO: 52137 - DNA, 1052 bp, Bovine  19866881655170
  misc_feature (1)..(1): n is a, c, g, or t
nctagggttgaggtgggcggccgactacctgcccagccggggtgtccagtgaatgtcggcgagcagccacgctgtacgaggcaccatcctagacccagaaaaccagaggtgacacgctgccgtggggtctgggagcaggtttccaggggggtgcctgccggtaagcgtcagtgttgggggctggcaggacgccccggggaccggggctcaggtgacgcggcttccccagacatgcatgtgagcctgggacacccccagtttggacgggggggctggggcacccctccctcttggccctgacctgcctcccccacatgcagggcagtgagaggccaccggccctgaggccccgaaccgacggtggaggcgtgtccctccagggcgccgactccgagtctcactgcaagcgccccagcttctgccccagccccggccgcccacccgctggtcagccgcccggcctccagcagggcctctggaatccccggaggcccgggagcccaccgggacgctccctggagcagggcgtctcctgcatcaacattctcagcaaacagccctttggcttgagtgctctcaggaagatgattaacataatttccttgacttcctcaaaatgagatgtttacaaggctattttggcaaaagcaaaagtcatgcaggttggcgggacccgatggaaacactgctcttactttcaatatcaacattgtcgaacaacgtgggtgtgctggtctcagccacttctcgggggtgttttgaagggaaatgcgggcatgtcccagaaggaaaggagccccacaaacttcgggcctgccggggcacggggttggggggcagggtggggggccggctctgtgctcaccttggccgcagtaccgctgcccagcactggggagggaatttattcttcagaagtcagttcatgcttcacctcctccaggaagccctccttggcttctcattcttggccccttctcattctttctctgagctaccattatgcctcttcaatatttctattattttacttacaatactataccaggaca

SEQ ID NO: 52138 - DNA, 1106 bp, Bovine  19866880420250
  misc_feature (1)..(1): n is a, c, g, or t
ngggagcaacaagcaagaagacaaacaagattcattccaagagaaatgagtgctctgaagagaaaacacagggatgttatagagaagatggggtgttcagaaaaggcctggggagaggacatgtgaacacagatctgaaggacgtggaagggtccaggccaaggaatggggaagaggagggtggtctgggcagaagagtcagaggtggctgagtcctgcagaggtcagtgtggataaacagagtgaatggcaggaagggtggtaagaggtgacatcagggaaggaggcagagtattgcaggctatggcaattcaaaatgagtaacctagattctggagaaggcaatggcacttcactccagtactcttgcctggagaatcccatggacggaggagcctggtaggctgcagtccatggggtcgctaagagtcggacacgactgagaaacttcactttcacttttcactttcatgcattggagaaagaaatggcaacccactccagtattcttgcctggagaatcccagggacagaggagcctgttggactgccgtctatggggtcgcacagagtcggacatgactgaaagcgacttagcagcagcaacctagattctgatccatgtaaccaccatcagaatgggatttactctaacacgcttacattcacttatattcacgctccccatgggaaatcactgacccaagaaatatatacgaacccaggtctcctgcattgcaggcagatgctttaccctctgagccactagggaatctccactgatcatttactacatacaaaatgtggtgttccagaagaactttttaaaagggatgccatggcacctaacccacatatctaaagaatgttttgttcattgttatttttcaagataatagctaagaaaaacataacatcatttatactaataaaatccaaaataacagagaacaataatttctatttcaatattacatttatgttttctgcaacaccataggacctttcctgttaagatcttgccattcggcaaattccacaataactttcaaaagttctttttacttagttctaagcaaaatattattcctgatcttgtctagata

SEQ ID NO: 52139 - DNA, 2876 bp, Bovine  19866880514143
  misc_feature (1)..(1): n is a, c, g, or t
ncagtattattaacaatagttaccacagtatcttacatcccatgacttatttattttataactcaatgtttttaacttttgactccttcatctatttcacccataccccctccctcttcctctggcaaccagcagtctgtctctgaatctatgactctggcttttttgtttgttttgatttgatttatgtgtttgtttaaggttccatatttgtaaatgaaatcatatggtatttgtctttttctgagttgtttaacttagcataatgccttcaaggtccattcatgtaacaaatggcaagattcttttttttaattgctgagtaatattccattgtatatgtatacaacatcttctttatccattcatccattgatgggcacttaggctacttccatatcttaactattgtaataatgctgcagtgaacatgaggtgcatgtatcttttaaaattaatgtttttattttctttggataaatatccataagtggaattgctagatcatatggtagaaataactccgtgaatgtgtggtcaatcaatctatgatgaaggaggcaagcatatacaatgggaaaaggacagtctcttcaataaatggttctgggaaaacaggatgtccacatatgaaagaattaaagtagaccactatcttctactatacacaaaaatgaactcaagacggatgaaagatttgaatgtgaagaccaaaactgtaaaactcctagaagaaaacgtaggtagtaagctactcttgacattagtcttggaagtaatcatttggacctgacttcaaaagcaaaggcgacaaaagcaaaagtgagcgagtgagactacatccaactaaaaggcgtctacatagcaatggaaaccatcagcaaaatgaccaggcaaccaaaggactgaagaaaagtgtttgcgaaccatattcctgagaaagggctaatatctgaaatatattttaaaaactcatacaactcaatactttttttttaaatcagattttaaaatggacagggggcttgaatagatatatttccaaagaagacatagccaataggcacatgataagatactcaacatcaggaaatgcaaattatcaggaaaatgcaaatctaaacaataataaggtattacctcacacctgttagaaatagctatcattaaaaagacaagaaataagtattggtgaggagatggagaaaagggaacccctgtgcaccattggggagaatgtaaactggtgcagccactatggaaaagagtattgagtttgccaaaatgttaaaaaaaaaaaaaaaaaacaatgagattttgcatctgtcagaagcttccgatgctactggtctacccaaagccccctctttgaggagagagggccattaggtctttagcagtcctcatctacccagatacctgttttctattttttggtcccttcattgtgttcctaccagtcatccttcaagttctattacctgctttttggtctgcaaagcacataggctgctagctactgagctcaacatgtcttccagctttaaaagaagctttccaaaactctgagacttgcatccgcaatccctccaaaaagcaggctaatcttattaagagaaggtctgaagtgtcctgaagaacaaacactcagtgtgacccctttgttctccctgcctcgttctccagtggctctctgtgcatgtgtttgtctcagaacagtcatgcacggtgggcccattcgtctccccttatcgccctgtgactgctgcctagcactcgttcagctgtgcactgcagcttctcggctgacaagataattacattcctgggcagacagggagaaagagtgggagtgctcaaaagttccgaagccgactacctactcattgctggtgcagacttcaagagcaagcacctgatctaattagcacacccccatccctgcccgccagattgtggaaagctgacaattaaaagcctgaaggcaaaacaggtattgcgcaactcagagatagacattcacgctaccttgtgccagaaacaattacatattctttttggaatcttgggtgtcctagtaacacagtcgggcctcggggtaaacttttgcataatactgggagacctgcgtttaccgtaatgaacagaagaataaaatctcacaagaatgcaagacctcttgggaagaaatccttctgattacctccagaaggccttatttcagtcaaaccagctggcccctggctctggaagaagcacactacctgacaaaagcaagcctctatccacaaagagctgttttcctttgaccagataaatagcacaatacagtctacagggaaaaaacatgttttttgcctctatggtttcatgacttcctacatttctttcaagatgtagccttcaatttgaaagcgattatagccacaaccctttctcttcctttctttctactttgagtaggagagtattctataatctctaagccccttcatatataagtaccagccattattgtcttaactttctaatgagactgccccttgatggctgttggcatttgcacagtgagcaaggggagccaagcgagcactggctttgaagtcaagatctgtttctaccatgtattagttccgtgaccaggcaaggtactcacttctccaactaaaatgaaggcttaaaatctttaaaggttaaagaaatcaaaagagccctagcagaatgttataggttgaattatgccctacctccaacccccaaaatatgttaaagtcctaatatctagtacctcaatgtgaccttgtttggaaatagggccttgcgggtgtaattcagttcagttcagtcgctcagtcgtatccgactccttgcgaccc

SEQ ID NO: 52140 - DNA, 785 bp, Bovine  19866880557533
  misc_feature (1)..(1): n is a, c, g, or t
nttaaagactaatatcatagcttaactccatttttatggcacatgattttaaaatatgcatctagcccagactttggaatatacgtgtttcatatatgaaaaagaccagtgaaaataagtaaactgtatacttacgtatgtgtgggagtaggtgtattcacacacattttcttaatgttgagtgactaaattacacatgtgaggtcaatcatagcacaccctatttaagattgcattacattgctcaataattgttgtatcacttccattgcttatttctctttcagatgcaccctggctcttttatcaggatgcagagtacctttttcatatttctgcctcagaatggtcctcctttgagtttgtctgtggctggctgcgcagtgatattctcactattcattctgcacacgaacaagaattcatccacagcaaaataagagcggtacttaaatttaattaactatgagaaactcagagcttaactcttcttcagtccttgaggggttttgttttcaaaagaccagacattaatttgtttcattgaaagtcttagatttttaagaattgtttttcttcctgttacaaagatttagagaaaataatggaaacacaggtttactatgcttgttggttatttcacttctcatgcttttttagcaacaaggatgagtgagtagcattttattgttttgtgaggttcattccatcattcaatgcttatttattttgcatctactattctagggactgaggttttatcagtgcttccaaaagaccaaaat

SEQ ID NO: 52141 - DNA, 659 bp, Bovine  19866880663972
  misc_feature (1)..(1): n is a, c, g, or t
naatgacaaaaacatgtaacagccaataagtataaggtttaagcaactaaatttgatgtagtgcacagactgtggctacgtgcctcaaagcttagtcacaaccaggtaaatgtaagatcactttgcaggattatcaacgcacataacaaaaaaaaaatgtttttacgaagcaccatgcaagtagcatgatccatatggatcacagacatacaagaagatacatagataacaggcaatagaaaataggctccaattagcaaagaagcacaataatttttcaagttaatctcaataacctacccgtcaccatcaccactaacggatggtgcaggagcagggacagtaactgtgcccacattatccagtttgatctgaatggtggtacttaaggggctcttcagataccttctttcaatgttccgctccaaatcagccagcctggttacagctatatctagggggttgtcactcttccgttccagtgcatgtgcactgccttcttcttcgccagtaaattctccatcatgctccttgcacaatttagaaaatgacttatgttcaaaatataccaagtcctccctttctgatgcaggttctggacacatccaaccctatatatcaaaagaacaatgttatatggtttcctcttgaaatgcctg

SEQ ID NO: 52142 - DNA, 2339 bp, Bovine  19866880733218
  misc_feature (1)..(1): n is a, c, g, or t
nttttttattgaaggataatagctttatataattttgttattttctgtcaaagctcaacatgaatcagccataggtatacatatatcccctctctttaaacctacctttaagataagttaactcagcagcactgttgatgctcagtaagtcagctccttgattctgacatgaaacgtaagcttccttccaagaaagagttgcctgaatattaaattggtagcaacttccaatctcctcgttcttttcccaattatcttcacagccactttctgttgataaaaagatatgtcagtgatcataaaataagggcataatgttgtctattactaagagtacttacaaatactgccatccaatttgcatactcttaagatatgctaagattgaggctgtcattgttgtactagacaatattttgattctttggttagatgaaaaaaccaaactcacaggacaggaaatgacttagactagttaaagcttccatgctgcttctagcttctactctccttttatataaccccattggttataatgtcacattttagcccacgcctaccctctgcctaagaacaggagtatttacctgtgttcaacccctcggctcacttgaagatggtatcagactaaagaggggtttgcccatgttctgcagtgaaaccactgaacgtgtttgcatgtgtgtgtgtttagacaatgcttaagtgcctaagatttaacgcgcagtgataccttatttgcgaaactcagtctagtttctccttatattttaaaagatgatgtaatatatgactaatcttacagaactaacattatatatgcactatatgtctgtatgtacatatgtgtgcatgtgtgtgtgtgctcagtcatgtctgactctttgtgacccccatggactgtagcccaccaggctcctctacccatgtaattttccaggcaagaatactggagtaggttgccacttcctcctccaggggatcgtcccaacccggcgatcaaatccatgtctcccgtgtctcctgcattggcaggcagattccttaccactagcgccacctgggaagactatatatgtatatataaatatacatgtacattgtgaacatcgtttttcttcaacaaatatctcaagaacacgcataacttcagatgaagaaccttcaagctctttccaggacagatatgtaggtcttgatacaattagttcaaaaatatactcagggcctccatgtgctcccaacaagaaggaaaaaccaacagagcttatgttaagtgtatccctggcttcacgtgggatcttccaaagggtctctcataacctatggacccttaagcaggaagggcccttagagatccttttgtgtaatgtcttcatttcacagataggaacaaggatctagggacattagcagcagagctataaccagagtacagctgtctaactcgggtgttgttgattctctgaatggcatacactgcttcttcagccatttctgaatgtcctaaaccacaacagaggtggttgtgacatttggtaaaaacaaagtaggtggatttgcaagtgcattacctaaaggttctttttttatcactaaggcaaaacacttgtaaatctggaagatttcagcaggacggtaatgtattatttgctgtaaaatacaatccctatggtttagcagtcctcagatttaagaaactcacaatctcacttctgtagaaagggaggcacatgaatgcactgataacccccgctttcctccaaagtaggctaaaggcaccaagacacacgtcagtcaaggcagcaaggtggaatgggatggggaatgaacaaggtggaacaaggtggaacacactgggaaatgaaggtcagaatcctgggagatctaccaggctccacacaaatacagtctgacactgacaggctatttcatcaatctaggtctgctgctcctcacctgagaaatgagggtttgctctgaataacgtctaagcctctccacaatccctaaagtttctgatccagactttgtgctaggctaagtcgcttcagtcacatccaactctttgcaaccctaagaactgtataccaccaggcccctctgtccaagattctccagacaagaatactggaatgggtgccctcctctaagggatcctttctgacccagggatcgaacctgtgtctcctatggctcctgcattgcagatggattctttactgctgcaatggggagcccatgatccagactatggtaagactgagccactggggaagcccatgatccagactatagtaagactgaaataaaattggtgcctggttgaccgaacccag

SEQ ID NO: 52143 - DNA, 786 bp, Bovine  19866880839434
  misc_feature (1)..(1): n is a, c, g, or t
ncctttacttgcatttggaacttgagctattgtcattagcaataaatcagaacaagatgaagctaccacatgtataatcaaaaagaaaacaagattaaggtagtaattgaagctgaagttcatatattacacaatcaacattaaaggatttagaattaaccttaccattaaaccaagtcttggcagacaggtaaaagcattcctctccaaacattataggaaagtgatgccatgggtctcgtgaactgaaagaagatgagagatgtgacagcttgcaatgtagttacatgttccatcttgggctttactgtaagcaattttaattctaaatttaatgttaggccattattttatactacttttttcttgatgctcatttgcaaaaggatttggtttctcagtctcggtagtttaaggactaatgttcaaaactaattataaataactgctccatatagtattaaataaaaggggatttgggacagattcttttacatgataactttacaaaggcagcatcaaagatgtcacatactatataaaacgatgtgatttcagctgttcagtagttctcacccaccatttctgctcatcactagatatctgaaaaaaacaatgcaaaaacaaaacaaccaagtgaacacctacccttacatgtgctaacttttctaggagagttttgatttaaataccctggcttatcaaaatcacaaaccgctaaaatttctgaatattcattactttgtttactaaattacataaacgggtcctttcacgaaggaagta

SEQ ID NO: 52144 - DNA, 1918 bp, Bovine  19866880853553
  misc_feature (1)..(1): n is a, c, g, or t
ntaaaggtacttttactgagaatattttgacttcctttatcctaaagcagttgagcttccctcatatctcagttggtaaagaatctgcctgcaatgcaggagaccccagtttgattcctggatcgggaaaaaatgctggagaagggataggatacccactccagtattcatgggcttcccttgtggctcagctggtaaaagaatctgcctgcaatgagggagacctgggttcgatctcagggttgggaagatcccctggtgaagggacaggctacccattccagtattctaccctggagaattccatggactgtatagtccatggcatcacaaagagtcagatgtgactgagcgactttcagttgctaaagcagttacttaccctttcctaactgatgagggtatagacaaattcacaaagataagcaggcagcagttctaaagtatagtttaggtctctatccccctccccaagagccttcatctctctatttcctgccactaggaagtacaccaagtttttgcgtttttataagcaatattgatatgctacaacctatgaaatgagtaataataggaaaaatagctagggaataaaaggaatatactttaaccatttgggaaatattgatttaaagagactttctttactactggattgtttttaaaaatgtgctgaatggaaaattatcaccacagtaatcttgcttttcacttctcagatttacgaaaacctgcagactgtagtaccaacttgccctttgtctgtgaaaaacacaatgtatcttcattagaaaaatatagtccagattctgcagctaaagtgcagtgctctggggattggattacttttcagaacaaggtaaaaagggaattgctacattgtgcagatgatgattgctttcatgaaggttatatggcccatggcagaatgacatcccaagtaacttcactaagatagactctgcatatttcagtatctcacctgattctctacattttcagaaatggagttactctcaagttagtcacgcctagcgacttagcagcagcagcagcagccggcctttcagaataccatgttcctgttccattgctgctaacacttaaattgctgaagttgatctttcaatgaatagtctgttaactagtcaggactatctctttggcatgtagaaaactgactgaatttctggctgataaattttcctccttaaggaaaacatccaagcagcatttatcaatcaaattaaatcaacattgcccaaactgcttttggggaatatacacatatgctaacaaaatattaatcattgatcttgcctccagtgtagggtttatgattaaatagattgggaagtgccacattctatatttgcctccttgagatgcacaattcatgttggtgtatgtatctaaggaaatgcgactggctgctaaaaagagaaattactacagtatgctaaaacatttattctctcagataaaagaaatttgaagataagcaggctggggttggtatgaaagctctgtggtcttcaaaaccagacttccctttgtctttctgctctaccatcctttttttttttttttttcgctctaccatccttaacttgaggcttccaagctcaagttcagggtgtttgtttgcggagtcttttctagaagtcccccaatgactttatatctctctggccactcttgtctgtaaggaggctgaaaaaaaagtttttgtagaatgtttcaaggaacataatttgggccatactactacacagtaacatgacaataatatcaaacagaaaaaggaagagatgggtctggcaactgaaagcgtctgtagtaaatttaaaatattagggatatattttgactttttaaaattaaaataatcttttcccccccaaggtgactagga

SEQ ID NO: 52145 - DNA, 2455 bp, Bovine  19866880921951
  misc_feature (1)..(1): n is a, c, g, or t
natacattgacatgaatcagccatgggtgtacatgtgtcccccatcctgaaccccatccccatccctcagggttgtcccaaagcaccggctttgagtgccctgtatgcattgaacttggactggtgatctgtttcacatatggtgatacacatgtttcaatgctattctctccaatcatcccacccttgccttctcccagagtccagaagtctgctctttatttatatctgcgtctcttttgttgtctcgcatacagggtcatcgttaccgtctttctaaattccatatatatgagttaatatactgtattggtgtttttctttctgacttacttcactctatataataggctccagtttcatccacctcattagaactgattcaaaggaggttctttaccatgagaaggggatcggggccaccgtcaattaaatcagcgggtcctggagtgaaagggctgactgtagagattcccaccctctctcacaatcgggaggggtggggtgggtgatacagtttggggcgtggcactagcctgagctcaccccatatcgccagccctagaggtttgagctgtttggaaactgctgctattccaggacacatcctcggccttctacctagtcttcccctgcatgcattgtgagtgtgggtatttggctgaaatgttcacatgaaacaaaaagccaaattcttccttggaactggagattattcagagtgctggtttgcagcacttgctttattttagtgagtcctgaaaaatggcttactcttgtctctgtgtctctttactcatttcttgtaggtacaggaggaagtcttgctttagattttaggagctcctttctctgcttcctacagtttttagtaagtcgaagctcttattgaggcattattctacaaagtaccagaagggcagggaccattcctgtctcgctggcctttgtaaatcagatgccagcccagaaatagtccgtgttccatgagtgtgtgaaggccagtgaatggacggatgaatgactgaacagagctacataacaaaacctgacaaacaggtttgagggttcagaatttcagaagtaagcagctgtctttgtctctttttctttgttttaaaatgccagatatcacagaactatggaaaatggaaacacctccacttacctgccaccaaaaccacgctttcctactcccttgtttgttgctgatgttgcttagtcattcagtgtgtctgactctttgcgaccccatggactgcagcctgccgggctcctctgcccatgggatttacaggcaagaatactggagtgggttgccatttccatctccagaggatcttcccaacccagggatcaaacctgtgtctcttgcgtctcctgtgttaacatgtggattctttaccactgagacacccaggaaacccctcccactccccgacacacagcaaataacgtctgacaacagtctgcctttaacgccttgacatgcccaccacacagatgccagcctggtcttaggagacactggggtgccctgcacacatgcttcatacacagaactgacttttctacaataaaaggaatgttggcctgagaggctcttattatatttatcctgacaaggcttttaacttcaaaaatcttttccttctactttgattttctctctccctcatctttctgttctttctcctttccactgattcccaaagttatttaagtgttttctcccttaatacctttaaattcaaagttctgcttctttagcagaatttagcaaatctgttctaagactctggcaatctttttacaataagcaagtaagcaactcaaacctatttagcagaagttccttgaggtcccaggggctgtgtacctctttcatatatttcacaaatctttattatatcatttcatgtgtactttggttgacattattttttacctttgtgcagatagtcacaaatgcctccaccgctggacatataggaaacccacttatggagatacttccttgaggccacaagcgtgttgtcctgcttcacctggaccaggtactggagtgggcctgtgatcgtcttcttgttacagtgccacttcaaggaaacgtgggtggaatcacactcgtatatgctcagcggctgctctggactagacacgttcaggcccaggcagccactgccttccgatgttaaataggcggtggtttgaaacccacttccacagcatgtacttgttgggtggtttgcagttctccagggtcagtgtagatttgctggcttgaatacatttctcgaggttctcactttggataatgaagattcctttatctgaaacagcaaaatagaagatatagtagagagtcttcatatacaattaaccagtgtcagggggatcccaatgtgcatgtctgagctgtgacatgtcacaccaacagctattgcatctcaaa

SEQ ID NO: 52146 - DNA, 884 bp, Bovine  19866880937411
  misc_feature (1)..(1): n is a, c, g, or t
ntgatggacataggaattgtcctacaatgcccacccacctctctgctttaccaggctgatgctgacaaatgaggtagaaaggagaggtatagatggacaaaatatgtgcgcagaggtgttttttcccagggagtttgggagtaagagagacacaggacagctgaaacttccaaggtccagaaaagtttgagaagtgttcaaaagaatggaggagagaaatatccttattgtcttgcttggggcccaccatatacccggtatttgattaaatcctcattgagtacttaaaactgggagaagaggttttaaattgtcttgtggtttaaagaatgttgagggaagagaataaagcataaaatttcttatcatccaaataggagcataaagctgttcttttaagattaaaaaataataggggaaaatgaacagtcatcttccaagttgattcaaaccaaatttagtccatacaacaaaaggcatagcagaaaggacagcaccaatgaaaataaaccagggtgacttatatagatcaaataaatatcctttagtagcaattattaagtaaatcatgatgtttccacatgattgaacaaatgcatttattaacataactgtgccagcaggaaaatacaaagaacagaacaaaatcatatgtttacttatcaatgtaatcttgtaaaaatatgtattcatagagacaaagactataatatgaaaacaattattttaagttcaattgtgagtgtttttccctctgttcctttattataattgtaaaatataataataagtgctatttcagaatcttaaagttaattgagttattttacaagtgtgagaaggtgaaccctggttttatcctttagtaaaaaacacactgtcca

SEQ ID NO: 52147 - DNA, 1465 bp, Bovine  19866881086790
  misc_feature (1)..(1): n is a, c, g, or t
ngaattcttgtgcttgctggtgggaatgtaaaatgaagctcccatgggaaaacagtatgggtattcctcaaaaacttaaacatagaattagtatatgatgccagaagttccacttctgggtgtataacccaaagtaattgaaagcagggagttacgtgacacttggacatccatattcacagcagcgttgttgacagtagtcaaaaatagaagcatcttttttctaccagtggttggatgggcaaacaaaatgtagaatatacatactatggaatgtttttcagctttcaaaaagaaaaaaatactgacacatgctataatatggagcaacctagaagccattatggatttccctggtggctcagtggttaagaatcttcctgcaatgcagaagatgtgggttcgatccctgagttgagaagatgccccggagaaggaaatgtcaacccactcctacctttgtctgggaaatcctatggacagaggagcctggtgggctacagtccatggggttactaagtcagccacagcttagcaactaaacaacaacaggggacattaggctaagtgaaataaaccaggcacaactggacaaccactgtgtggttccagttatgaggtaactagagcagccaacttcatagagacagaaagtagaatggtggttgctaaaggctggggataggggaaatggggagttagtgtttagtgaatacaaaatttcagtttggggagatgaaaaatattctagagctggacggtggtgatgattgtgtaataaaataaatgtacttaatgccactgaaccatacacttaaaatggttaaattgataaagctttatattatgtatattttgccacacacaaaagttaactgtaaaagtgtttggaggatattgtggttgcaagaatatggcaggactgtaaaaatgcttgcaaataatgaatatttaaatttaggagaaaatgagatattgcgtcatttctcactttgggaaaaactgtcaaaatcgaatgtgttttggattattttgtacaaatattccatggctgatggattcaaggtatagatatatatgcatttagatatatatgcatttagacaattatcctggagaaggcaatggcaccccactccagtactcttgcctggaaaatcccatggacggaggagcctggtgggctgcagtccatggggtcgccaagagtcggacacgactgagcgacttccctttcacttttcactttcatgcattggagaaggaaatggcaacccactccagtgttcttgcctggagaaccccagggacgggggagcctggtgggccgccatctatggggtcacatagagtcagacacgactgaagtgacttagcagcagcacaagcagcagacaattatccaaggtaactttagaactcaagttttgcgtatgggtctctctaaagcaaagggccaggcctc

SEQ ID NO: 52148 - DNA, 1250 bp, Bovine  19866881189854
  misc_feature (1)..(1): n is a, c, g, or t
ngacttctgcctgggctcctttgtgaaggcacttaatgcccaaatctttacaggcatctgcacagcttgccctcttctcaaagtcctacagtctccagggtgcttcataccaggtgggcacagatattggtggctctggaacagttcttgggaatccaagattaccctacttagctaatgtgctttttttatccaaagcaatcggcactccccatgatcagattccagtacactctttgaagtgtcatccagttgattatcttctatactcacctttaaaatacttggactattatatgtagtctgtgtaatgttttacctttagagaaaatttagcatcctttgaagtaaggtttcagaaggacctaatcctccttttttaattccttgaatattcttaggcatgggtttttgtcattgagtttgtacaattttaagttttaaaagaatttagagctgcagttaggtaatacagtttcacaattttggttagtacgtgtggaagtggtatgtaaaggagtcaaaatggtataataaagtgggacgtcattgagtgtaaatctttttttccttcataccttcttagtccaggtccatcgtgttggctaatacaaagatctcttttttgtaagttataatttatattttgtcaaatgtgatgagagtaatctgctgcagtgtacatttactcagattgctgttaatttttttactaatgttcttatttagaatttagttttttaagcacgtgaatgagagggaaaagatggagttgaaatatgtatatccaaactcagggtgaaagatgttgtgggtattactagttgactcctaaataccagagtactaatatattctgaaaactggttttgactgaattttcttctgtagagttaatccagtagaaaacagaaattctctgaaaaactattttattttttagtttgacatttctccatgatatatataaaacttaagtgtaggattttactcctcatgagctaattaagtatatgcttggtatcatttatttaaaatttctgcaaggtaaatatatggagacttaagtttcatctgtacatgttgcatgatttttttcttgttgattgcatttgctgggtgctcttaaattgtccagtattaaatacaagaagagtatgcatttatcttttctgctcttgataaaaggggaaatgctggttagatttttaggtgagtttccattttccttcacatgcagtttactatgt

SEQ ID NO: 52149 - DNA, 1780 bp, Bovine  19866881246438
  misc_feature (1)..(1): n is a, c, g, or t
ntataaataaaaactgggatgtaaagagataaaatggttttgaaaaattaaagcataataaatacctcattttacctggaaattatatttagaaacacagatgttatatatttttaaaactgtaaagagtatattcatccaccgaatatttaatgggtgaaaaggcccatatagcaaattgtaaaggaataaaataacaaagcataaagtccagcataatatttaaaatggataactaacaaggacctactgtgtagcacagggaatgctgcttagtgttatgtggcagcctggttgggaagggagtttgggggaaaatgaacacatacatgtatatggccgagtccctttgtggttcacctgaaactgtcacaacattgctggtcagttacaccccagtataaaataaaaagtttaaaaacgaaaacagaaagcccaaagaaacagcagatcaccataatcttttcagtcatagagaccatattgtatttatattcatcctagcctctgatacactgccatattaaacagactgtaatgtctgctttggagaaggcaatggcaccccactccagtactcctgcctggaaaatcccgtggacagaggagcctcgtaggctgcagtccatggggtcgccaagaatccgacacgactaagcaccttcactttcacttttcactttcatgcattggagaaggaaatggcaacccattccagtgttcttgcctggagaatcccagagacaggggagcctggtgggctgccgtctatggggtcgcacagagtcggacatgactgaagcgacttagcagtagcagcagcagcaatgtctgcttaatacatgctctgttaatgagagatcatttgttcatgctatacttagacagcatattctaaaacctatttagtattatagccatggcttgaagcaaaggaaggaagcaagcccatttatatcagaaagtgattctaaagcttattctttgaacacctttagctttttattgcagggattgacctttctcagcaagatgtccattgtccaggttgtgttttgcctgccaaggagtgaagtcagattactgctctacttctcacaatctgagttccacatctctgtttgtatttcagtgaaaaggcttcagggcgcaccaaatcattgcggctctaagatctttgcaactcttaacaccagcccaccagggaaagccattgtgaaacaaagatggctttaggattagcgaagaaagctttgtttgcagagcgattgctgctgtgtatgctacctccagtgaagtggcatgaatggatttggatataaatctaaggctttacagactaagcacccccttcaaattgtgtttattagcagttattgctcaggtactgttttccttaggaaccagatacagcaggacatttgattgagagtagaaattttaccatagatacatagtaacatttcatgcaatgtcttcttcacctcatagccttagtacttggaatggaagaattaatagagaagttttcagtttgatttaattcctcagttacccatttcttccctcaatttttaaaacaaatctacattagattaatgtgatttccaattttcttcttctctttattctgcctaataaatcaggccaaagcagaaataggttacaaatgaggaaatattttccacctcttaacacaccaaaaaaaaaaaaaaaaaaaccccacgagtagctactattttctatatttataacacattaataaatcccttgaaaggga

SEQ ID NO: 52150 - DNA, 795 bp, Bovine  19866881442085
  misc_feature (1)..(1): n is a, c, g, or t
nagagttctagtgacagagctaactgagcaaaatgccaatcagtaattctaatttaagaatgtagagattttgcaaatgcaagaaaaatgcaaacaaatattggaaatgaaatcacagcactgttgaaatttttaagaacatttgacttgtttaacaaaggatatttttgtagagtaatatttttgttttactaagagtgcaagctttaatcaattgttgccatgtgagactgggggcctgctatttccagatctcctaaatttttaataaaacccagaaaatataaatttttgaaatattaagataaataaatattctttgttttaaagtattccacttcaaggtaaaaagagggaaaagattctaaaataatagatgatcatttctactctaattcttaaaaatataataatttagaaaaaaattttagaaaaaataactcaggaacttccaatgaagaaacacttttcaacactgatccttgaacaaaacacacacttttagagacatgccctccaggaagatgtatcccaaagtcctcagtctcttagaaaataattagaaaatctttattttcagagtaaaggttatagaacatatttcattagcattcaagtcataagttccagaataggacaaggatgcatgtaaactgcaagggaagattctgttttctagtgtgaggggtatgagccaaaaagatattggcattttgaaggaggggctggaatgctattttcaattcagattagccgctattcttccagaatcacaaacaacctttctgtaggctg

SEQ ID NO: 52151 - DNA, 583 bp, Bovine  19866881474884
  misc_feature (1)..(1): n is a, c, g, or t
naaataggccttgttcttaacccaataatttatgagagactatggtatttcatagagctacacactgtactgattaaaagaacaaacaaacttacatttggtggtattcgcagcctccgaccgaccaataatgggtgaaagttactgtatgtcagctctctgttatccatccatttctttatcttttcataagcagtccagcgcaaaccaatccataaagaagcttccatatccggaaacagggatgtaataaaatctgtcagaaagatacatattttttttttttaagaagaatttgacttactgaaattaaaggtatactaaaaatgtcaatgaatactttgagcttatctaactatcaagataatctttgattatcacctctataaaaagtaatttaataaaattctttttatgtgttaattccccacatcttgccaacaggaacttggcccctggatcagaataaaacatgtttacagaacatttctgctaccttgctctctctggctcaacactgaaggcagggttccaccataggtgtgacaaatatcacggcttcagaaaacggacagatttgggg

SEQ ID NO: 52152 - DNA, 1001 bp, Bovine  19866881489917
  misc_feature (1)..(1): n is a, c, g, or t
nttaccattagctatctatgctttacccaaatttatgagacccgatttccagaggcatttaggcatattatttatggtaataataacatcatttctatttataagagaataggcctaatgatccttaaatattgactctttaattaaatagatactcaatagctctatgactatgtagtgatcttttgaccagcaggataaacgtttgacaatttgcttatatagaaaacaattcaatcaacaaatatttgaaataagatgtcaaagtaactatgtattagattaactaactaccatttctaagacttttcttaccaaaaaaagaagtaaaatatctactaaagttttatttaaaggagttttggttaatagtcctcgtactttttagagatatgaagaatctgaaaagccagagagaaaggcaataacaacaaaattaagaatacagaatctatgcctgccatgcttccccaatcaaaagagaaggctgttatatgtccctatatgtcaaagtttaattgtccacataacctcctacacaccatcttgtgaggttaaagttcacaaagatctcaacgcaaacctaaggattagggagagttgatatgttgaaggaataaagagtgaaaaaggagggaatcacccttaagacaaagagctgtgacttaaagagcagtatcttctaattcagtggtccccaacctttttggcaccagggaccggctacgtggaagacaattttccacagacttggaggggggatgatttggggatgattcaagcttattacatttattggacactttatttctattattattaaatcagctccacctcagatcatcaggcattagataccagacgccggttctaattgaaaggaatggcatgggtctcactggaaaggttcctgcaattagtcctttatgtggtataacaactgacaccacctatacttaatcaagaagccaaacctatttttggaggaaaatcaatcaata

SEQ ID NO: 52153 - DNA, 897 bp, Bovine  19866882063368
  misc_feature (1)..(1): n is a, c, g, or t
ntgatcctcggaaggaaactaagcctcagagagtaggtggaactggtctggaattgagatcttctagctccaagctgctgcttctttccacagtgtgagactgactcttatcagtgaaatgatagaaagattttgttagttaagtgataattgccatttgtttgaaaatgtagtggctagacaaatagcacttaaactactggaatatagatgaggtcttgtactttcgtgcaatgtttattacctttgagaaaattgtaatgtgaagccttttactaggtgggtagttcattaggtaatggaggcttcgtgtttatccactgaactggcacagaataacccatgataagtctcttcaattctgtcagagagtttggtacacaatttgatcacttagagacttatttttttcaggtttctaaataactcaggtaaattagacacttggggagtatgcagttatactaaaagaattactaaacaatcatttgggaaacctgaagggctgatgtacccatgtgttcctgactgaagcccagggttggtgggaaatctcaagcaataaggaagttgcaattccaatgacacaatggcggtattcatctctacgtgtgatatttttgtattactactagaatgggattttaggatatataaatttcctttgtgtgtatattgggggaaggtagaaaaaaatctgctatttctctgcatcctgttttgatccaaggctggaccttgaaaaggtcaaaacattaacagtagtacttctgttcactgaagagttatgttacatgaagatacagtggttgttttttgtaagttgctttattgtattttgcattgacataaataaacatcataatttaaacaatgaaccttagatgaatgatgatt

SEQ ID NO: 52154 - DNA, 2003 bp, Bovine  19866880214387
  misc_feature (1)..(1): n is a, c, g, or t
naaaacagaatttaacagggcttgtactctcttaattggtgtctattttttcccaattatattttttaaatttttaaatgtaattttaatttatattgcagtatagttgattgggtaaactccgggagttggtgatggacagggaggcctggcgtgctgcgattcatggggttgcaaagagtcggacacgactgagccactgatttgatctgatctgatctgatcttatattgtaatctctaaaacattgctagataaagctttccaaaacttgcctcatgttatactttgctgctcaagaacttaatacagttttcatggctaacagtatcaaatcagaatttttattttaaaaaagaggtttgttcagggtttgttcgttattacatttaggtagttcactgatagctgtgttggatggcttttggacacaggttatgatgtattgaatattaactttatagttagtcctggtttaggaaataaaaaattgaactgataaattggaaattttggaatgagtagaaaatccaacatagttagaaaaatatcagtgaaagttaggaagcaaaagcagttcaggtatcaaaagtctcagtaacgggtaaggatttgggagattctgccgctcttttctctacattctgtcagtctattcatttaaaagatgactcgttttatttactgtgtgtaagacattgtggcattaatgtttttctatttcacatgcattttctcactgaatatttacagtggctttgtgagttgggaccagtagtaagatctccattttgtctgttagaaaggggtattcaagggagactgagcttgtctagggtcatgcgtatgatcagtagttgaatctgaagtaatatgcttgtctcccaaaatgctactctcaaaaaatttcacttccctggttctgtaaaggcaaatgttatgggtatcataggcatttgtggtgtttgtcatcctatttcttgacctataatatccagcacagtgacatagaggcctctgatcaaatcactgacttataattggccattgactgtgactttaattgacttttcagcatttaatcctagaaaaacattagtattttgtggaaatatttgtcttttattgagagagggctaattttttcgtcccttcccaaatatttatttttccctctgtacttgatcttttaaatattttaggaaatggaaacggtgggggagcaatgtccatctgagaattggattgtaaattagactggatatttgtgcaaaacgaggtcataaagttaaagcacaattttgcaggcagcttagacttaatcgtgcatattggataatggatttgggatttcttcatcaggtatgctgtgtgcagtgaactgaatctctgctgagtggcctgactatagacagattatgaagttttattccagaagaaacttgaaaatttctcagtaaaatgcctccttatctttggaggagacatttaatgctgtgacattctgttgactatttcctagtgttaatgttttgaagctaaacttggtctttggatgtatatgtgattcccactgaactttgaagcattttgtaacattttctgacactcagagtgatatttcctcgggtgttttgaagatagggaaaaattggtctttaaataatgaatctgagaaagatacaatctattctaaatgcatatgtgcatattaactgtgctgttagtaggaaatgtaggggaagggggaagaaatgaagtaaatacaacaaataaaccagaaattccagtgtacaaattggagtggacttaagatgataatccctagtcattgcttatggagagaaaaaagtgctaattcataatattttagcgaactcaaaatgtgtaattatctttaacattttatttgaattttcaacaacaacaaaaatgagaatatctaacattgattcagctcttacatgtgccaggcctcatgctgaacatttcatatagattat

SEQ ID NO: 52155 - DNA, 2723 bp, Bovine  19866880804656
  misc_feature (1)..(1): n is a, c, g, or t
ngctgatctcctttagaatggactggttggatctccttgcagtccaagggactctcaagagtcttctccaacaccacagttcaaaagcatcaattcttcggcactcagctttcttcacagcccaactctcacatccatatatgaccactggaaaaaccatagcctttgttggcaaagtaatatctctgctcttgaatatgctatctaggttggtcataactttccttccaaggagtaagtgtcttttaatttcatggctacaattaccatctgcagtgattttggagcccaaaaaaataaagtctgacactatttccactgtttccccatctatttgccatgaagtgatgggaccagaatgccatgatctttcgttgtctgaatgttgagctttaagccaactttttcactctcctctttcactgtcttaattattttcattcttttttctatattctgttctgcaacactgatttccaccattctattttcctgataatttatgtgctcttttgcatcagttactctgctgctgggtccttgcactgtactgtcatttctgtttgttttttatttcttctaggtctttggtaaacatttcttgcatcttctccattctttttccaagatcctggatcatcttcactatctattctgaattctttatctagaagattgcctatatccacttcgtttagtttttatctggggctttatcttgtccttacatctaggacataatcctatatattttcattttgattaactgtttgtgatgtgattttcgttctggcagctgtgggattgtagttcttcttgcttcttctgtctgccctctagtggatgaggctaagagggttgtgtaagcatgctaatgggagggactgacagtgtgaaaaactgggtcttgttctggtgggcagggtcatgctccgtaaaactttaatccgattgtctgctaatgggtggttgttaaacagctagttgcaattttaatgctcttgcaggaggagatgagtacatgtccttctactctgccatcttgaaccaatctcctaggtttttaatttgataaatgaaaaggtggggaggaaatcaagatatctcaacccaacattgttgttgtttttcagttgctcaatcatgtccaactctttgtgacctcatggactaaaacacagcaggctttcctgtccttcactatctcttggagtttgctcaaactcatgtccatggagtcgatgatgccatccaatcatctcatcttctgttggccccttctcctcctgccttcaatctttcccagcatcagggtctttcccaatgagtcagctcttcacatcaggtggaccaaaagtattggagcttcagcatcagtctttccaatgaacaccccagggactgatctcctttaggatggactggttggacctccttgcagtccaagggactctcaagagtcttctcccaacaccacagttcaaaagcatcaattcttctgcgctcagctttctttatagtccaactctcacatccatacatgaccactggaaaaaccatagccttaactagatggacatttgttgagaaagtaatgtctctgctttttaatatgctgtctaaatacactcatgacattgcttaaagtctctttaggtaatattctttatcatggatacagcaactatttttgtttgtttttccgatctattgggcaaaaccctagcttcattccttcttacccaagaatggttcctggttgaccttgaaacttttcctgtagatctgaagaactagtgactgtgctttgattctcacacggaaagttgatttccgtgatttattgaagaaaaagatagcatccaactgggaatgtgaactgaaaagagatccctgttaatctaggagagaaagaaagagagaatgaaggaagaatggctagatgggtagtgaaactcatactactgtataacactcttaattgttctccaggacagaaatacttgagcagccttactctggtgacttcttgagagggaccttacctgatttgtccattgctgtgtctctgtcttaggacaatgtaggtgtttgtaaatatttgataaatacttgataaataaattaattgggatgtatcatgacaagtatactagtaaagaaattactgacttgtttttatttaaatgatataaaggtaccaagagcagataaagccttgaattataagactggtacaactaccaaatggacttactgtgctgtgcttcaaacttactttcaatccctgtttcaaagtcccagtgaattagctgactttatactgtgataacaaggctaataatctcacccacatctaaaatttccagtttgggacttaccttcaggatttcctccataacttgctatccataaatcactcaagttatctaggtattatgaactttaaatgatctccagagaaaactattttaatactcttattatactttatttttagcaaactgaagcaattacaatcattcccttattgaaaaatgtatgagacaagataataagtagtagggcttgtacaataaatcactttgacgaggtatagaaataataaacatagatcaaataaaagtctgggatattgactgatgacaccatcatggccatttgtatggggaacagtcaatccatctttttgttgaacgtgtgccattgtagaaaacaatcat

SEQ ID NO: 52156 - DNA, 869 bp, Bovine  19866881091430
  misc_feature (1)..(1): n is a, c, g, or t
ntttaattgagttgactgatagccaagcttattcagttacatgggaacacaacagcttcaatgtccaactggccaattttcccacatcactcttgttcaaaataggatcctatttggggtctctaagtctccctttcacaactcaccaaactcatttggtgctatattttgtggatgcaattaactagcattagaaaaccctgattaaagcattatgattaattcaagcatattcatttccacttcatcagtcctgttcatctgaatctgctcagtgcctcgttttagacactgctcctttattgaaattaaaaaaatgaaaatatcttctctgtaccaatagcagagaggggggaaatgggtgccatggggttgtgttttgatctatttgcaggttcttccagagctgggagcctataaatttattatgctaagaacatttttagacttgagtcttagatcagatgtaaatttcaaaggaagtttaagcagcacgtttctccctcattgaagtatcaagtatcaaaatggtatttgatgtccaagaaacttttaaagttttccatttcgtttgagaaaagaagggcataattttctaccatcaaaaaaaatttaaagtcccaatttctatatttttctcagaagttctttttcctccacttagactattttctcccttagcttttcctctgtttcttaatggtttgtctatccccaggatccttagatttctttacaaagttactctgtacttgcacattgccatctatcatctgtgaggaagagaaactggttcacagcataaagcaccaaggatttagctgaaaatggatctggtgaaatgactttttgagagaaagaatccagag

SEQ ID NO: 52157 - DNA, 862 bp, Bovine  19866881328301
  misc_feature (1)..(1): n is a, c, g, or t
ntgacatatgataaacaccctctgcaatttagcacgcagcacagagagagtgtgttagcaggatgagttaattgccaagctatcaaccgagctgatgtttcttgaatattctgaaaggcagctgagaactccctaagtgtctggggtggtgggaggttttcaagcctgaagagaaaattgggtggggacagtcagtgagaagattggcaggcagtaacacaaactgtataaactaactcttgaaaatataattacctacaaacaagaagaaaatgactcggagctttagaaataatgtaataaaagtctgtcatttttcaggtagaattgaggctctggatgaggcatggacaggtttagggaaaagaaagactatagccagtgacaaagtcagcactgcaatgtccatcttttgagtttgaattcatttttgtgcaatcatgtttttattattaaattttcttctcgatttcataaaaggcaacatagtgtaggctctggtatatcttggtttgaccaattactagttctgtccgctgaggcaaattattatttttttttctgggccttagtttccttaaccctaaaaggattgataatagtatctgttccaaaagctttattacaaatgtatatgtgcatgtgtgtgtgtgtgcacgcactcagtcgtgtctgactccttgtgaccccatggactgtagcccaccaggctcttctacccatggaattttccaaacaagaatactagagtgggctgccatttcctcctccaggggatcttcctgacccaaggatccaacccatgtctctcaagtctcccacattggccagtagattctttcagttcagttcagtcgctcaa

SEQ ID NO: 52158 - DNA, 1156 bp, Bovine  19866881406221
  misc_feature (1)..(1): n is a, c, g, or t
natatgatttttaatatttggtacctctgtatgggctttcctggtggctcagctggtaaagaatctgcctgcaatgcaggagacttgggttcaatccctgggttgggaagatcccctggagaaggaaaaggctacctgctccagtattctggctatagtactccactatacctgtgtatagccaaatagcctttgagagtcaagaataaagagtagggaagggttaatgacttttcccaatattactcagatataattagatctaattagggttagatctaattatatctaaaaattagatctaattatatcttagggttagatgagttaggcccttgacaagagacctaacatcattagaagatacaagaagattttagaataacagatattatccttttactgtatattacaggttccctccatgcttcacaaacatatcctctctcccctcaaataatttccacaccaataatcttctattatactgaaattttccttttggatttttggagcttcataaacaatagagctcaaaagacaaaaatgtggtttcactatttcttctgacacctgcagggaaatcactgccctggcattgatttaatcaacccagagcattaaacccttaacatttaaaatagataagtgaatgattctttaagggtcataaaatccctttgtctttattggcaaatccattatttaaaataggacaatcactacagtgtttaaaagttgagttctgctccaggacatgggcttcttgccaggactgagcaaagtgcaataacttagaaaaggctaataactgtgaaatgatattacattatttggacacttctctgaaagagactaatagcagtgactttttgtgtgtgtgtgtgtgaactgccagtctacagaagtggatggaactgaatttgtgtccatcagtaattctatgagatagcagacctcagtcaattgccttgggataagcttcatcacaatctgcaggctcttgaaatgttcccctcctctacgcgtgcccccgcgccccccccccaaaaaaaccccccaaaactactaacagctctttcccatcccaccactttttttttttttttgcagaagcccacactcttatgtgctgaaaggattgagactgatgggg

SEQ ID NO: 52159 - DNA, 2391 bp, Bovine  19866881542182
  misc_feature (1)..(1): n is a, c, g, or t
ntaatgctttttgttctgttgaaatgggaaaatttgtgtatcatatttttaagaggcctccattgctacatagataataaaacctaaccacaacaagctattattaataatacagtatatttattttagtaaagacttaaaatatatctactgccaatattttttataatcaatttttgtatattttattttgtttccagttttattgagaaataattgatacatatcattgtaaaattttaaggtgcacagcatgatagttcaatttatatatattatgaaatgactaccacaataggttaagctaacatccatcttttcatataaatatgatacaaaaagaaaaaaagaaaaaaacaaggaaagaaaattgtggtgagaactcaagaaataaacactgattgaatgaaattcattttatgacacttaaaactcaatgtgttcctgtatcatcaataagatgattcaatctacaacaccattgtgaagatgggaactgcatgggactatacgtcttgagtccctttcctgctctaaggcttccacctctatttatagaggtctcttgctagagcagcaggctcaagcacctgagatatggaaacatttcccatggtacccgggaccacttatatgacagatgtcccatttttatgcatgagaagggaatttagtgagcagtgcctagtagcttattgttgtttagtccctaagtcctgtccgactctttcatgatgacctcatggacagtagcccaccaggctcccctatctagtagctaaggctaagtaatttacatattgacttttccatttccagtagtccagtgggatcagcatgtatctcaagctcggaaaataaggcacagagaggttaagaaattaacacaaattcacccagtgaacaggtgacagagcaggaactggactcaggtctctctcactatgccatgctaagaacagaaaacagccccctccccctatagttctctacactcataaaagaagaccttctcagtgcgggggaggggcagtacctggaggcttgcaaaatgtccttaatgaggatggagataagtgtcttgatttaaatacatcactaagattagaactaatgtaaagtcctattaactgtaacattgtcaataaacatctgcgatttgaaccttcaacagccccgctagcaataattctatttaaggaagcaccacttcccctctctcagttactgtgcttctgatgtggccggagtcaagcagagcaatcctgacacagagtttgtttcagtgacagacacacgcccatttcagaaccaatggcatgtcatgagccttcaggtgggcatactaaagactctcaaacatttccactgggtttgtacccagaagtatgtggccctgagtctaatgaatttgttgagatgctccagctgcaagaggtgatcctaagttgaaaacaaaccaacactgggagacacagagaatccatgacctgctgagagtgtctgtatcccgtatgcctgatttgctgatgctaaacagataatacacctcactctctctctctttctctttttcgtataagacagcatgagttgggttttctattacttaagacccaaaaaattgtaactgagatatgattcatcttcatgtatctgaacaacccctataatataggcagggcaggaaagatattattgatgtcacacctgtaataaggatgtttcacaactcaaagtgaaattaaagaaatttgttacagtaatacaatcttcagtatgcagaagagtgttgggtttcaatccttccggctgggaacaaaagcatctaggggctgctgggtttggtggctggctggtcaactggctacatttattttccccccttgtctgttttcctttaaaggatgtgaactgtgttagcagcaaaggtcaaaggtgaaggcttctaatatgtgtttcaacaggcttttatatgtaactcaaatggtaaagggggaaaggctttttaattgattacgttgagcttccattagtaatctatagagtttctttactctgggtggtgctagtggtaaagaacccgcctgccaatgcaggagacagagatgcaggtttgatccctgggttgggaagatcccctggagaagggcatggcaatccactccagtatgcttgcctggagaatcccatggacagaagagactggtgggctacagttcataggaatgcaaagaactggacatgactgaagcgacttgatacgcaccttgtttaaataaaacattatgttcatttcacattatgcatgtgaaattgaacaactattaactttcctttttctttttgaaatacttgtttttggaaggtgactgctgattgaggtttatt

SEQ ID NO: 52160 - DNA, 1216 bp, Bovine  19866880376099
  misc_feature (1)..(1): n is a, c, g, or t
ntccattcacatctctgtaactgatattttaaagagttatatgaagtaatatatgtaaattacttagcatagcactaagaatgggacattcaaagcattgtaattattatcactctcatggccatgttttttaagttggagttagattcccttggagtacacttacttgaacaatgtgtgtttacatatcacaaatatattatttaaggcatttaaccagcagtatgctgaataaatgtatatatttcgggtcttgttttgccttaggtttttgagtgaatcattacattttacttcctttctttcctgtctatactcatcaatatattcatttagtccttagaacagttctgtgatatagatgtcatccgcgttccctttaagtgggggaagaggtttatgagactaaataatttttcccagattacttagccaatacatactaggatttaaaccatggtgatctctctacagagatgatgttgacaacaagaccactagattcttcagaagtggcttcaactgaatacttaaattgattaaaaatagtggttttaaatatcctttcaaagcttttcctttactttttgttcattcttttcttttaaatgtaaaatactttgattgtgagtgtcagggaagaaaacattactgggttcatcttagacacggaaagagtagggagaacggctcagactctagcatacgggcctcctcctacaatctcagaccacagagactgcatcttatttggagctcagtacgtatttcttgaatacatgaatgaattaaaatcaatttacatctttcttatcttttgatcttcatagcagacgttataatatcaatttgagaaaaaagggaattgagtcttaaagaaggtcagggtcttgctcagagttgcaaactaattaataaaaggaacagggctagagtccagtcccactcacttgcaacactgcacagataccctcttctgtttatctgctcagtcctgcagcacacaaaccagaacgcagaaaacccgggcgggaagtcgttcctagaactgttattcaaaacagttcgctcttccctttagaatctgtcatccacccctcctttatgctattttcttcttttctggatgactgttcacaccctatggcaggcaagctgatgctccccaataatgtcagcagaggtctggtgcctccattatgtttggctaggcaag

SEQ ID NO: 52161 - DNA, 2339 bp, Bovine  19866880429954
  misc_feature (1)..(1): n is a, c, g, or t
ntagaaaatccaagagaatcatttgaaaaatattggaaattcatctgtatctgcatacaccaattaacatttaaaaattcaatagaattcttaaatacttagagtagttaaatagaaaatggaccacagattgatgaacaaatgaatagtcagaaatagtacataataaaagtagcagttcaagtcagcagaagaacaatgaaatattcataaaattatttggaaaatatgttttttaacttaggaaattcacatccaacaaaatagaaaaatgtgctaagtatataactaggaaattcttagaaatgatacatatgtgactaataagcatattttagaattaaatctcactaagcacattttaaaaacgtattttaaaatctctaaggtatatattaaaattatatttccctcattgggaaacacaaattacaataacattttttttttcttattcagatggggaaaattttttttaatgttgattctattctgtgtttgtgagaatggggagaacactggggcatatttttctgccaacacggaatttaaaaacctattgggggaatttggcaccatcttccaaaactgaaaatacataaaacatttatccaggtgttccatttctaagaatctcttacatagaaacactttcatataagcaaagaaatttatgtctccaaatgttaattgaataattaatggcaaaaatatgttaaaaatagcataggcattaatcacaaaggaaacttgaaattgttatgcacataatcatggctgtgtaattctttagaatgatatatgcactatcatagtaaaagcttcaagacattccaagtaaaaagagcaaatcacaaggaaacataaaatgataccatttatgtgaaatttaaaacagaactgaagcattatacatgaaatgattaacagaggttacctctagtaagagcagtgggagttagagagtgatacttatctctgcatttttatgttttacaatgagataaaataccccttatattacttcataaattatttatctagaaagtagtcctagtttcctaaatgtgttagatggtgtcatgagagttttctcttaaaatattactaactacagggtttttttttttcctttctctttatctaaaataggaatgtggcacttgaatgcagccttggctcctattgatttgatgtaatagaaggaaaatactcttctcttacctcatgctttctcagatctgtcaatctgtgtgctgtttttctacatatttctagataaaccagattagagaaggatacttttgctttataacagggtagagggaggtggtaacagacctccctgaaggggaggtcttcactggtcttgtttcttgacattaactgtgaagttttatttcttttcacaattttaaattcaactgcatatccactagcctttccctttccttttatttctatcattttagcctttaaaaatgaaacccaaataacttcataggtcagccctggctaggcatggcttgtggcaaaacataaaaaggaggagggggtaaaaatcaaatgaaacaaaataattgtgttacaaatgtttggatataggttaaaaaataaataggtatttacacattaaagagtgcactgaatgcttctctactgtaaaccctttacagaagatcaataccgtttacaccactcactcccagaagcagtatatgtctttcacctcacctgtttataaccatttaacattgttaaaaaagatgactagaaacaattgaggtgatttctagtgggtcaattagtcttggcgatattcattgcacgaaacaggacctagagaaagaatgtgggaggggaaagtcacacaatgaatgtaaatgtattaattttccaagttcatgaaagttaagttggatttcagggttcaacaaaacaagctggaagagggaaagaaaactctgctcttatactgtattgttaacttgtttgataaatttgtactatgaattgcgtaaaatattgactgtgctgtaagtatatcaagctagacaataactctgaacctccagccctggacatttgtcatgtcaaatctcctcggcagcagtggaaattggtgatcaatgccattgtaaaaggaacagatattcattattaataaacatggcaagactgaaatgaggtaattaagtagaaataaattaagttctactctattccaagggaaaaaccagccaggattgattgctatattcatttaattaatgttttagtgcaattcagaaatagtagaaagactgagtagtggcacatgttatataatgttccagaaa

SEQ ID NO: 52162 - DNA, 1992 bp, Bovine  19866880456151
  misc_feature (1)..(1): n is a, c, g, or t
ncataaagagcagcgctaagtggtcagcgctaaggtcattaggtccttcatgctactgaggtaggactgttactgagatttgccctacattctactgcctgtttgaaaacatatttgaagagtttgagtacactatccattaagataagattcaggttggctattataagtgaatacagaaagtaaatatacaaaagatgcagcctcagtaggtcactgtgctaagcctctaaattttatccagagccagggctgttagattgtaatgtagacaaaggtaggccatgaatcatctcaaaatatgaggtaggtttcatatacatcctggaaccccagatgtcaactcttcctaaagtaattcatacatagcagcaaatttaaaagtgcaaagtaacaaatgaaggccctggagctgaatgctttcttggtaagtgtgtgctactacgaaaaaccagaattcaatgactttcaccacacgtttagctttcaggctaagaaatggaaatggtgtacacagaaaattaagagatattctaatgccctgaaactttgagatcgcatacaatctcttacctgagtttctacttctctaagaaggtggaaaacaatctagtaatttgccaaagacatcttatctacaagggaaaactgcataaaatttggtatattaaatgcttatttactcacagttatgatgatgagaagcaggaggaggaggaatgttggtcttatggaaaccatagtaacaagttttatctgactgccttcaaatttagagccaacttggttcacaggtgatcagtcattctagggaaaaacaaatactgtatgatctctctcatatgtcaaaaacaaaacaccacaatttcatagataaccagaacagataggtggttgccagaaggggtgggggtagaagtttgagaagtggatgaaggggatcaaaaggtttaaaaaataaatgaaagtgttaaactttgtcgacctacatccaactccaattctaatcaattgaacagacagccttgctaagtctggacccgtgctcaccacttatatttgaaaaaccataaccaatcatgttgcaaaccacaaaaattctttataacctatggttaacatttcatcccttctttgtgtgtctggaaatgattgaccgggcttcagactattttctctgatgtactgcagcctgaaatccaattgttatcttggttcaattaaactcaaacttattggtttgtaggacacaatagtaaagcccaagcttagcaaaaccttttcagaattcagtaagaaactctctgaatgcagtctggttaccagagctatgtatgcatacctctgttgttgtgtttatatttcctgaaggcttaggaataaatacattttttaaaaatctgagatgacagttctgcatggatgtcatattaatagtgaatctttgtggcatatataatgtacaaaggtacaattcctaagatggtcatcatgcccttttctggattctctgcctgtatttcatagagataatcttatcaaggagcatttctagaatggtcacttagctcatatgtccttttaaaggtacatcacatcacaatttggctgtagcattaaaaacttaggtacagtcttagctattagaactagattaatggttataagcaacatctttttttggttgttgttatttctctcccttagggatcctatattttggggggggagctttatattagggggataaaaaggggatattttcttactcttttttagtttggatgtttccaacttacccaagagtaaagagaatgtataatgaaccctcaagcacctatcacccagcttcagttatcaacatttcaggcagtgtttattaaatggcagttcattttctgtttttttaaaggaaactcattacctaactgccattcaacatttgaggttttaataacctgagcagccttatctcaggcaaagctcaaattc

SEQ ID NO: 52163 - DNA, 2247 bp, Bovine  19866880465229
  misc_feature (1)..(1): n is a, c, g, or t
natgtatctgcgtacttgagatcccaaagctttgtcctaccgagtgaaaagaatccagtattgttgttattactgtttttgtaattttgaagccacagtacctttgggtaagttacatgtacatgtagaagtaaatgctatcctcaggaaaaaaaactaattgacacctcaaaatatttactcacctaatactgctgaatgtttactctaagtatgtgcttgtatttagttgctcagtcatgtctgactctatatgaccccatggactgtagcctgccaggctcctatgttcacggggagtcttcaggcaagcatactggagtgggttgccatgccctcctccaggggatctttcctatgcagggatcgaacccaggtctcctgtattgcaggcagattctttaacgtctgaactaccagggagccctactataatttattctttatgcttctttacatatcaactgtaataatgtaaataaagacattattagttgaggtaattttctataactatttgttacatagtaagttatagtcataatttcgtttcaaatctttaggcagcatttaaagttgtacagtattatcacttatttaaagaaaaaaaaaaaactaactacatacaaaaaacacctgactgaaaccctttttgatgcctccaatgagtgtgatatgtttataaattatacatacttctactcttaaagggaaatacccacatccattcattagttaataatgagagccttgaaaagtccctatttcagtccttcagactctgaacagtggcctaaatgagatgtacatttataggaaaagacttaggaagttctgttaaataatcaggtgaagagagaaaatgaaggcacaaacatgatgcttggctgatattaactgagaaaaggaacacaaagcaaacaggcccaagtacatgacgtgccaaagctggctagggtcaaagggaaagcaagcaccctagattctgaatcctggactctgctcattaccatactttccaccccttcctcacatttcagtttgtaaagtatcattagattcaacagaactcacactgttttctttgaagcaaatactcattatgtcgattgcagctctctgctaattgtgcataatacagtccttcacaactatgtgaacatgggtctttttcaaatggatacatattaatttactgttcccaaaatggaaagaaagcatataaatgcatgagaatttttaaaagcaagctttcataaatggcgccatgcatttgaagtgatgaaaggtgaaaacctacaatagagaatactctacctagcgaggctctcattaagacttaatgcggaaatcaaagctctgcagacaagcaaaagctaaaataattcagcaccattaaaccagctttaaaacaaatattaaaggaatttctctaggcaaaacagaaatggccacaactaggatgagaaaattagaaaaagaagaagctcactaataaaggcatacatacagtgaaagtaggaaataatccacacacagaataattaaatgtgaaatatgatatcaaaagcagtagtcataagcagaagagagtagaaatgcagagtattaaaaatgcatttgaaattaagaaatcagcaaaataattttgtacacacacacatatacagagggctatagaaaaacctcatggtaaccacaaccaatgtctgtagtagatacacacacgatcaaatgaaaaaggaatccaaacataacactaaagatagtcattaaagcacaagagaacaaaagaacaaaaatccaaaacaattaacaaaatgacagtaagaatatacatatcaaataattaccttcagtgtaccttaaatacagacttacaccatgatatattaaaagttaaagatatagaaaggattctaaaggcaacatgagaaaaacagaattaatagcaagggaacccccataaagctattgactgatttctctagagaaatattgcaatctagaagggaacagcaaggtatattcaaacccctgaaaaagaaaatgctgcaacctaggatactcagcaagattatcacttaggagagagaaagaaattctcaatcaaaacctaaaagaatacagcagtactgctgctgctgctgccaagtcgcctcagtcgtgtccgactctgtgcgaccccacagacggtagccccccaaggctgtcccacccctgggattctccaggcaagaacactgg

SEQ ID NO: 52164 - DNA, 1591 bp, Bovine  19866880548642
  misc_feature (1)..(1): n is a, c, g, or t
ntttacatctgtgtctcacattcaactacctctgtcttcagatgcattgttcagacaccatttgttacccttgataaggaagaaatggcacagtgcccagctgatgtattttctgagtcattaaaccagatttctccatttttgaatttttgggggaaaaaagttctctctgtattggtagctgagtgaggcccttagccagaatcttttctatcatttctttaatgttacctgctaaattacattatttaaagtgagctttccctgtgttatacagtagactcattgttggctcagaaccaaatcctacagacatggagatgtgcatgcttcccagtggctgtaacctgaggactttatttaaactgtcctttgaatctgcagtaaggcggtgtcagggaggaataggatctttatcaacaaagggctgccagaaccccaacagcttcttgagtagctgtaatagatgaataatgttacaaccaaccgtgcatttcagtttttgctcaaaaggcttttcactgatgctgctggtatttcatatccatgtgttcatcttggaacccagtagcctccatctgactttcattacttttcttgagaggatcgattttacaactggaatcagaaaagcagtcaaagtaattgcaagtggcaatcactgaaatatagtaatcttagcttgggaacatatgttccattataaagaatatattcttttttttaataaatccaagactcatgttttcccaaagtaaaaagggaccatgtacaggttctactgctatctcttgtatctcctgtatcatgctaatatcccaataaagtgtttgttccttcaggaataggcaactcattacgtctggaggaaatctataccctttctgattctgactatatgaaaatgctttattatactggagatgaaattcatctctctctagttacatccttcagaactgaaagatttgggtctcaacatagtaatcctcaacctctcttgattcatgggcaactcttatgcccaactcctttttttttttttttttttgccaggttttaatatatattcctttcttatacgaaatagctttgatttacatcatcattctggtcaatcttcttggaagttcagacttccctgtaacccttataaaggcactgtgctgaaggaaaattagacttttaatcagaatatctgtattatgttacaactttgccacttattcaatgttagaacttgggcaaattatttactctttttgtcatcagggatagcaaaagtaaataaaagatatgtggtctagaggcaaataacacaagcagtatgcaagtgaacaattaaatttataattacaatgttgccaagagagttctgaggtcccagggtatgaagaacaggccccctgagatggaggctcagtgttttctgatgggaaggagacagagagtgtcttgtggaatgtgggatggcaccaagctagcggagcaatgttttctaacaaagccagcatgtagaagcaggacagggtctagagacggaaagtgagtagatgagtagacaagatagtggagaagtacagagctttga

SEQ ID NO: 52165 - DNA, 1045 bp, Bovine  19866880606426
  misc_feature (1)..(1): n is a, c, g, or t
nttgcttccacgtccaagctattgtaaacagtgctgcaatgaacattggggtacaggtgtctccttcaattctggttttcttggtgtgtatgcccagcagtgggattgctgggttgtatggcagttctatttccacttttttaaggaatctccacggtgttctccatagtagctgtactagtttgcattcccaaaacaatgtaagagggttccccttttctccacaccctctccagcatttattgtttatagactttttgatggcagccattctgactgatgtgagatggtacctcactgtggttttgatttgcatttctctgataatgagtgatgttgagaacaaacggattgaatgtgtcctgtcctgtcactcacaaagtagactccagcggtgcatcagttacagcgtggtcattttttttaagcaaatgcatcaactgtatctggatggtttgtcttttctcccacttcagtaaaactcaactgcacaggggcactgagagatttaatctgaattttttttaaagtgtgtctggatgaaaaattactacagatcagaagaataccatttccagtgacccaatttgagatcagcaattaattaactatgcatagaaatgtcacttaaagaaaagtctttgtcaatatgctgaaatttctcatagatttgtgattaacttctaattatagactaattgccttctccgttatcatcgaggatcttgagtgttgacgcagaatctataaaccataccaaggagacaagtgtggatgtaatacactcctgtgttgcctaatgtgattccttcacatgtgaacaaagataaaagtaggaaaatggtccctgtgctacttcaggagtaagattggctgcttgagaatcctggtgtgaaaatacagtgacgggatttctagcaacaaggaaaactatgccggtgcattttctgattttacttcaaggagaagtttaggatgattggtaagagggagaaaaatggggtttgtttctagataggcagttttgagatgaatcactgacgca

SEQ ID NO: 52166 - DNA, 2294 bp, Bovine  19866880632751
  misc_feature (1)..(1): n is a, c, g, or t
ntatatgcattactttacaatatttgtttttctctttctaacttattttagtctgcatgagactctctaggttcatccaagtctctacaaatgacccaattctgttcctttctatgacttaagatgtggtacatatgctcagtggaatattactcagcctccctggtggctcagcagtaaagaatctgcctgcaattcaggagacagaggttcgagccctgagttgggaagatcccctggagaaggaaatggaaacccactccaatacttttgcctgggaaatctcatggacatggaaagcctggtgagctacagtccatagggtcacaaaagagctagacacaattagcaacaacaaataaatgctatgcttttctatgtagcatttatcactacttgatagaatacatatatcaaaagatattgtttatttttttttctcatctctggctcttccaactagagtgtaaatttcacaaacacagggacttgtcttaagcatctagaacagtactggtagatagtcacgcattcaacagttatttattgaaacaaacaatgaatgaatctcaattttgtgttcaacgccctgatcgggatcagcagttcctgaacctgggtatccttcagaattcttgacaggaacttaaaaatatatcagattccagggctctaccccagatctacttactcaaaaaacagagggaggaagactattgaggaatctgccctgctggtgcctctcgtgtgcagtcaggcctgggaaccaatgatataggtgccccagtttcaggaacacagggggaaatatgagggagtgtggttagcaggtgaatgttgaaatcagcctatgtttgactcctagctttgtcatttccttattgttatagattactaaaatttctgagcctttcaactttctcatacttaaaatgggtatcataccagtatcataaaatgccaaaatcttcagtttcctgtggcatggtagaatcagaaaaacagctcagctttcccatggggacatcacctggggtgcagacgcaggaataggacagcagagcattagcaccagcacttctgtaaagtccaaaagcatcagcccaggggtggggcaagatttttcctgaaaccctctgtttagcaacatgagaactatgatacagtggccatacggcttcccactaatgacagggaggggcaggcaatgtatgagactatggagctggaactgacatccacagttcagctatgtggatgacccttcttcaaccatttcaagactgcagagtaagatcctctcacacgcttgcccatggctgtgttacttaagttgaaacataatacaggaaatgaacattgcttcaagcttaactcacaattccaacatcattatctttctctctagttggaacctcaggaagcattttgctttttattcctacttgatggaaagtctctgaaacctgctcagcaaattattagaggcatgatacccctgtttagccagtaatggtaacagtgctaactgtaactaatgcatttggtattattgagtacagtaccagtgtcattccatactgatcctcatgttcttttctattaaaattccattagatttccatgtgtcgagccttagtgcaatttcacagatagacatattatatttatttatttgcatatactgagtaaaaaagtctggactgcttcctgtttttttcctcattattagtcttgtaatgttaatatcacatttatatgtgtacagtgaaatctgagctatttctggttcattgactttcctagagaattggggggagggtgagggagtcccttttttaaaatttatttatttattttaattggaggctaattactttacaatattgtagtggtttttgccatacattgacatgaatccgccacaggtgtacatgtgttccccatcctgaatcccctcccacctctctccccatcccatccctcaggatcatcccagtgcaccagccctgagcaccctgtctcagggctggcaatctatttcacatatggtaatatacatgtttcaatgctattctctcaaatcatcccacccttgctttctcccacagagtccaaaagtctgttctttacatctgtgtctcttttgctgtcttgcatatagggtcatcattatcatctttctaaattccacatacatgcattaatatactgtattggggtttttctttctgatttacttcgctctgtataataggctccagtttcatccacctcattagaactgattcaaa

SEQ ID NO: 52167 - DNA, 1431 bp, Bovine  19866880679395
  misc_feature (1)..(1): n is a, c, g, or t
natcatgttaaatttaagttatccctgtaggggcatccaggagtccccagtgtctggctgacctgccacctgaacatggacacaagcaagccaagtagagatccactgagcccagtcaaggtcagcatcacatccttgctgacttttagaacacaaggttattatttcaagtcactgacttttggagggctttgttatgcaaaaatagctaaccaatgcagtggtaatctgattgggagtttgttagtaagtttacatcctcaattgcagagtcatagcatgttcaaacttatcttaatcaacttctcccattaaaacaaaaactaacacaaaaaaacagaattcaagaaacaagaaccaaaatatgaataatcaagaccctgaattctcacaccttattccctgtgtgaggctcttcctgttgttcttctgtttctattagagagaatttattaaaggatattgtaaagcagtggattagaaatagtctaatttctaggtatacaaaaacgatgcaaaatggattcaccagaagtaatagttcaacacatttctgaatgctgagcatgtatacacaacttttgtcctattttttggtgagtgtccagacacatgacgcttgctttttattcttctatagggaccttatgaatggatttgaaatacgattgccaactaggcttagcagaccttataaaagaaaagcattgtgggacttatccatcaacttaacactcctatcctccttaaatcatggaaattctagaaccagtatttattagcttgttctttctgtacatcaattatcttagaccctatacactgcagctccatcaaaagcataaaatagttcccagtggcaaattcctggttatctttagctcatgctgttaagtaagtttccacagtctttatagctccagattttattgtatttttaaaatgacttggtttcagctgttaaaatctaagactttgacttaaagagaaactacttgccaacatgtgagtgtagaatttgactttttagcttcaccatttaaagccagtgtatttagaatattcctgctatattggggagtttccaaaagatatttgtttaggtttccgacattagtattttacatctatatttttagggcttcccaagtggcgttagtggtaaagaacccacctgccaatgtaggagacttaagagatgcgggttcgatcccttggttgggacaatcccctgcaggaggaaatgacaactcactccagtattcttgcctagaaaattccatggacagaaatgcccggtgggctatggttcacagggtcgcaaagagtcagacatgactgaagtgacttagcacttctgcagtgcaggcgggttctttaccctgagccaccagggaagcccggtggttgggatacagtgtgcttaacgcg

SEQ ID NO: 52168 - DNA, 1495 bp, Bovine  19866880781955
  misc_feature (1)..(1): n is a, c, g, or t
ngcactcaccgtattgtttgaggaattgaaaaggcactgttatttgaagttattacaactgatcccttttctcttaggtatgtagcctttctaagggtgggaatattgcatggaaataactggactttactgtcagaagacagagtgaatctttattcttccacccaccctcttgaaccccatttaaagatgtgggatctctagttgaattaggtaccttatgaacagtttggtaaacacacagagactgggtagtactcacctttatgttttttgtttttttctttgttattggtcaaaggaagtggagagagagaggtggaaggagagagattccatgttgggagaaagcagaatgataattcctccactctaaggtcctttgtaaaaaagttgagaaataataatgtcttaaggcatctcaatgattcaaagtcttccatacttagcataagtctatgaaccggttacctcatccgtactctgaactgtcagaacaagggaacagatttgacatgggtgaccccctcctttctacagatcactatttcacatgtacttggctctcaggatcaacctcctgaagctcacgttatggaacatgctctatggtgacccctgaagtaggcaacataaaacctcacttgacatcggccttgattctagccttcaggcattacttcatctcaggaaaatttatttaatatttgcttgagttatataaccatatatatctgagaaaattacaactgattttcatctaagctacaattgggaccaagtcatatggtgaataaacacctccctcctttttataattgaaaggaaaaagtcactttcctttttataaactgagttgattagctaaaggtttcatagagggtggatgagtcagaggcaactcacaaactcaagctcacttcccgagcagtcacaaagtttacaccaagtcatgaaaatcccaaggcctttgcacataatgttaatgaggctgtggatcaggtgaagctacaaatcccaacagatgacaagctacaaattgggtgagctgcctctggtctcctggtgaaagagaatagggctcctgtgggaaggtgctagctgatacaaatgtctaattctgacaatgaggtgatgaaatttagcccagaaaatcagatgatgcagccccttggcaaggctgcctctttatctttcaccatatcatctttctgagacagttaccccttatcttctaagtccctatatatgggaaccttcccactctatctgtatcttgtgccaagtttttgtcttgttgttgtcgatagggtaagatgacagccactaattatgacagctaaagtccttctcattctgttcccaatcttcttttcccatcttctttctcatcattttatttgctcctccctctctccagataaatgagcaactagactccatagtattccacccaggctttattctttcagtttcctttacccaagggtgtttt

SEQ ID NO: 52169 - DNA, 604 bp, Bovine  19866880867793
  misc_feature (1)..(1): n is a, c, g, or t
ngggaaaaagtcccttgaattttagctagtgaaatctttgatgacaatattttaaaagttctgatattgtccaggatcctataaaatgatcctttgacagttctttaatccagagttttcttgttaatccacatgccatagacttggcagagtattccatgaagccttaaaataataatcctcaaataatgctgtgaaagattatgtcatcatgagaaaatggggtctggcagaatgtaccttgctcaaaaagcacttacactttattataataaaatagcctctgcactcttggtgtgtatttgtccaattctcacagtgcagtttcccagaggcccctttcatttgtgaagcgattgctacagaatggaaacggagtccagaggcctcactcaatctcccctgtgatgatgagaactattttctcatctatctctagtctctgtacagacataatataaattactttctctgtattatttaaatttcactgcaattatcactttttagaagcaacaataaagaataaagtaacctccactttaaaaagtatacatatatgtatatgtgtgcatatgtagacatatatacaccagtatatatt

SEQ ID NO: 52170 - DNA, 1177 bp, Bovine  19866880898677
  misc_feature (1)..(1): n is a, c, g, or t
naatgctaataagaatctaatttccccaatgtatgtgggaatattagatccctttatagagtagaacatgctaagttccatataagtcactagaaagaatgaagggtacaatcgaagtgaaattccttttatcaacaacagctttaacaaaataaaatggggacttaggcttatggttagtgttagttacttagtcgtgtccaactctttacagccccatggactgtagcccgccaggctcctctgtccatggaattctccaggcaagaatactggagtgggttgccattccttctccaagagatcttcctgacccagggatcaaacctgggtctcctggattgcaggcagattctgtaccatttgagccaccagaagatatcatttaactaagattaaacttacctcaaatggatagtggaataaagtgggcaaacagtaaaaaggagagaggtggtttaagaggaatagaagaaaacaggagaaattgtcccaagatcctagcacgtctattcacaggcagcgttacgctgtcaccgcctgctcagttaagcagtctagttaagtcttggtttgttgaaatagtctttgtgcctcccaagctctagaatgtggcctgctgtcctgaaaatctgaccagtttacaaagaaaatagactcacgtgttaatgtgaaattcatagagtatgtttcagtttgcttcagccagtggggattctagccaggggctatgaatttaattacttgctgataggataagagcagaagttgggattgttaaccaagtagctttattgtgctaatcctccctggtttgtaaataatcaagggctttgctggatgatcaaataaaatgattcttttattctaaaacacttttcttaggtattgcacaggaagcaattttaatttgtacttatatttttggattttaagccattcacccttcagtttctgaaatgtgctttttatatacatcatacctttgcgtatatagttatgtacaactattatataatatgacaatgttacttaatagtatgcacaagtagagacttaacaatccatgattttcaatgaaatcagaaacctgtgatttatgtaaccagcccctagcacagaatttgatcttgaaagcaaattgatttctacttctgatgagtctgttgtggatgat

SEQ ID NO: 52171 - DNA, 1050 bp, Bovine  19866880904459
  misc_feature (1)..(1): n is a, c, g, or t
nccttaatcatcacagaatccttgaagcagtttcgcctgatatattgctggttctgctttatggatgaagaacctaaagggaaatgatgttcaaagttacatacaaggaccaaagttagaacccataagtctaaattacaagtatgttccattgactctggcttccttcctgcctttcaaccttgggttcttccacaacctctttaagttaggtcaaaaggacaagtctgtgtctgattctacctgacctgtgttctagtattgtcactcagtagtcttgtgacaaaggatatgtcataaaactcaaaacaagcctcaattttcttacctgtaaaaggggggaaattaagcctgtgtttcaagttgtgattatctgtaacaaatgatcattgttggaattaaaagtcaacataatttctccaattttcttattcttccttgtgatagagcataaacccctgaggacacagatttccacttacaaactgctttataacagtgattctcagccttaactgcactcaagaatcagttgggcaacgttttgaaattatccatttcttttttttttttttcactccagatcaattaaataggaataaataagaggtggtctcaaacattatacttttaaaaatctccccagatggattctatcatgcagacttcatataaggtgaatgatgacttacagagctgattttaacttcctctattttatatactagttttaaagtacttataaactctggcattttattattagcaatagtaaattatttttgcacctgattgataggatagtccaacatgtcaactcagttggaactgttaattcctggataggataactaattctggatggggtttgggaaagggtaggtgggaaaaaagggagttgatgcaaatttaagtacctggatgcatgggatgggattaatggagatggggaatgcagcaagaacatgattttgttatgacaaagcagtgaacaccaggcataatctgctagggactttgaactatattttagaatcaagaccctaaaat

SEQ ID NO: 52172 - DNA, 1641 bp, Bovine  19866880912398
  misc_feature (1)..(1): n is a, c, g, or t
nttgcacatcttaaggtgaactgcagaaattttgagacagtcactatctgagggtttaaaaatagatttcaatataatacacttataggaagagacaaaaagattaataagcaaggcctcacattgagaatggtcaacttcactttatgtataacagtacctgtccccaaacagatacaggttatttgtaaaattatttgacttctaatatagtgtatactctgctcttgtattcacaggcactctgttcatactgatttttggtagttcctatacaaagactttgaacatagatgtataataacagcacattaatcacttcctactgttcatgtattataggaaatgcataatttccctttgccttgtttaaaaaaaaaataactttaagaacaggtaactgaccaaataaataaataaaattcatagagatggaataattgctcaagataaaacagtaaggggatataagtgaaagtgaaagtgaaagtcactcagtcatgtctgactctgcgaccccatggactatacagtccatggaattagtccatggaattctccaggccagaatactggagtgggtagctgttcccttctccaggggatcttcccaacccaaggatcgaactcaggtctcccgcattgcaagtggattcttcaccagctgagtcacaagcgaagtccaagaatactggagtggatagcctatcccttctccagcggatcttcccaacccaggaattgaaccagggtctcctgcattgcaggtggattctttaccagctgagctaccagggaagcccaactcatcttaagatacatgaagaatcagacttctactctgaataatcctcttcccaatttaggggacataacaggaaaatggattggtttaggaggttctggcttaaacttttaaactactgatcacatctacagttctctatgaattaatgaacatgcacagtgtatgtgacaagataaaactggcatatatcctactagacaacttgaaattaaccattagtccttgaaattaaccatcagtccttgccagatatcttactagcgtaactgcctaaaaggaaagaaagaaccggctattaagaccccaacatcaaggaaaatgataaacacagggcaggtaagccatcactgtggcatcaagggaccaaatatttgataacctaacgctttctatcaaaagatgaatgattaaagaagggaaattaatgaagtaaaattcctattttatggcaaaacaagaaaattttaagtataaattttttctctgtctgcttgggactcctcccttaagtgtgtaatgtgtatctgcattaatcacacatacttaggagataacctcccttattaatcttgtaaagggtcatgatgattcactactagctctgtacatgcagatctggattgtgtaaattgtcaatacgtcatttgaagtacaatcctttgtctcaaaaaggtatatgactgtactttgacttctgaccggggaatattcctcagagctttttaaaagactatctcccaggttataatccgcaggttgattggaataaatttttccatttctttcttagatattaccctattgaataattttattgtcaacactgtatttta

SEQ ID NO: 52173 - DNA, 1577 bp, Bovine  19866880918644
  misc_feature (1)..(1): n is a, c, g, or t
ntctgaaaagccctccagattgtgaaactcaaccctctttatcctccccacaaacatgctggtggctgtatggtcctaggcaactatcatgatagcatctacccactctgccctgagagttctcctgaggtcaaccaaaaaccaaacttcctggcaagggtcaaatgaagggacattaaggttggacccatacattgatatgtgagacttggcagatacccaaaaagggaaggattgggagcctctcgcatttgatgctctttctactgaagggatatctttgccacatggctctcaggagccacctgacagaggctctaagggaatctgactccatgtatcaaacgtctattgatttcatcagtaattctttaaaggttcagttaatgatgagaaggaaacaaaactgtgttaagcagtggggggataaagaaacagattcaaaagaggtaaagctggaattttcagccttcctcaagtgtggtaaggatctgaatgcaagagggctgatcaattacatcattaagacagtttactttcatgtagtaaactttctaaatgattgacagatggatggataaagaagttgtggtacatatatgcatatggaatattactcagccataaaaaggtaatgtgtctgagtcagttctaatgagacagatgaacctagagcctattatacagagtgaagtgagctggaaagagaaaaacaaatatatattaacactcatatatagaatctagaaagatagtactaatggacctgtttgcagggtagcaatggagatgcagacatagagaacagacttttacatgggtcagggaaggagagggtgggaacaaccgagtagaatataaacatgaacactatcatatgtaaaacagacagccagtgggaaactgctgtatgactcagggagctcaacccagtactctgtgacaacctagaggggtggcagggggtgggaggcgaagggacactcaagaaggaggggacataagtatacttatggctgattcgtgttgatgtatgacagaaaccaacacaaattgtaaagcaattatccttaaattaaaaacaaataattttttaaaaaatctacaatggaaaaggatctgaaaatcatatatacgtacgtatgtaaaaccgaatcactttgctctacactctaaactaacacaagattataaatttactatacttcacttttcactttcatgcattggagaaggaaatggcaacccactccagtgttcttgcctggagaatcccagggacaggggagcctggtgggctgccatctatggggtcacacagagtcaaacatgactaaagtgacttagtagcagcatacttcaataaaaaatttagttgtggggaaaaaagacagtttactaacgggtaacaagaaaaaaaagaaacacaggacattattgataaaagcaataagacagtatataacaataatggcattttctcagtcttttgggaaaatttcctgtaccaccctccctcaaagtccatatctatcttactttttaaaaagttatagatgataaattcctgacactgg

SEQ ID NO: 52174 - DNA, 1720 bp, Bovine  19866880987099
  misc_feature (1)..(1): n is a, c, g, or t
ngagtttagctttagcatcagtccttccaagaacacccaggactgatctcctttaggatggactggttggatctccttgcagtccaagggactctcaagagtcttttccaacaccacagttcaaaagcatcaattctttttgtgctttttgaagaaagcgctcagctttcttcacagtccaactcttgcatccatacatgaccactggaaaaaccatagccttgactagacggacctttgttggcaaagcaatgtctctgcttttgaatatgctatctaggttggtcataactttccttccaaggagtaagcatcttttaatttcatggctgcagtcaccatctgcagtgattttggagcccccaaaaataaagtctgacactgtttccactgtttccccatctatttcccatgaagcaagttcagtgactatgaaataacataatgattgtgttcagctgacttatacttacacctgaagcaaagaaatatattactgaatattaggcatcagttgtcacccatcggatgggaactagactctggaggtcagcagatactcacaacccccatcttctctctcaattagttccacagctctggtagcagtggttgtagggatgtgaatgatgtagaaaacatttgttaatcacgtgccatatgccatgtattgtgttagccattatatagggtctcttaatcctctacaactctgtataatggctattactatgttcatttcaaaggaggacactgaggttcacttatccagcagcccaaaaattgctgagacagaatctaaattcagttctgactctacaatcccccatctttcccctttgcgacaccacctgtcttaggtgttgggctactacatcttacttcccctgtcacttaccctcccttctttcctgagttcttcatcctcatttctttcctcaggaaaggaagacaattattttttttttttccaaatctccttgtaccatctctccatttccctttcctcctaagaacacgtttgagaaatcatttttaacgacatcaaatcattttttattggtgttctgcaaaaatgatagtggtgtcacaccaggcactctgaaaggctggtatattatagagagaaactgctcaaatggcagcctcatgctgcgatgctgctcacaactgcttcttaatctgcaaccctggggctatgaatgacaacccataaaagttcttagaaagttaaagctcgggaaaaaaggtccaaatccatatccatttatttaaccaaaatatattaaacatgtacttgcttcagaatcagtagtaggcactggaggtaaaatgataatcaagccatcatatcagccctcatgaagcatgtaacctagtacaagggggaataaattggtaattaaaatacaagaggttgaattccatgatagactagtacagagtgccagaggggaggtaaggaaacatctcagtccttagaagtttcttccatcagggacacagtctcttaggatatgagatttgagctaaaatatgaaggatactttcacatcagccaggtatgctggatagtgtccactcgccctttgtttccggtagcaaatgatcctaaaacttagggacttaaaaacagttatttattatgatcacaaacctgcaatttggacagagtttaatgggacacacttgcctcttactccatgtggtgtaaactggg

SEQ ID NO: 52175 - DNA, 2275 bp, Bovine  19866880997398
  misc_feature (1)..(1): n is a, c, g, or t
ntcctccgtccatgggattttccacttaagagtactggagtagggtgccgttgccttctccctatttaactgctagaatagtataataaaaaataatctcaacagttgactattttcagtcgagaaaaagaatgagattcactgatttctacattttcaatgagaaacttatgaaaaacttactctataatactttcatgcatattaacataacaaacacagaaccgtgaacacagtaaaagccaaatcaagaagatgtatgatttttagtataactatgataaaccacttctacagttatatttttgatattttagtgataaacccatgaacaagccagtaagaaccaaataatagtatgaaaataaaggtaggagaactacaaacatactagatttctagtagccaaggcgaaagttctcagccacaagattcagaaagtccacaacataaaaacaagtcttggggctggtgcactgggatggcccagagggatggtatggggagggaggagggaggagggttcaggatggggaacacatgtatacctgtggcagattcattttgatatatggcaaaactaatacaatattgtaaagttaaataaaattaaaaaaaaagactcgtatggaaaaaaaaacaataagagaactaacatgttattaattttaattttaaatatcagtaaccttatacctatgtaatgtattcacttcaataaaaatctctttttaaattgaagaaaaacaaacaaacaaacaaacaaaccgtgtctcttacatctcctgcattggcaggtgggttctttaccatcggcgccacctaggaagctgttatttgtgtgggtaatcccccaatttacaaattcagagattgtactctggaaggtaatttataggttatttatttgtatcttatgggtttcccaggtggtattagtggtaaagaacccgcctgccagtgcaggagatgtaagagaggcaggttcgatccctgggttgggaagatcccctggagggggaaatgccaacccactccagtattcttgcctgaggaatcccatggacagaggagcctggtgggctacattctgtagggtcacaaagaatcagacacgactgaagtgacttagcatgcaggtacacacttgtatcttataaattgaatatgctcttttttagccaaccgtagcagggtacacatgtgtgctatggatgcagtggggaagaggaaagaatttctaaatgcttggattctctggtgttagaagcaaatggttttgtgactggaactaaaattctttcattcattccaagtctgtggataagaagggagttctctttctcccaaggcatattgttttacttattcatttgcttgtttatttaattgaatagttaatttacaatattgtgttagtttctggtgtactcaaagatattcagttatatttataatttttcatgttcttttccattatagtttattgcaagatattgaatatagttccttgtgctatacagtaggaccttgttatttatctgtcttgtacatagtagtttatatgtgctaatgccaaattcctaatttatcccttcctcctacgtttcccctttggttcctgtaagtttgttttctgagtctttttctgctttataaataagttcatttgtatcatatttgagattctacatataagtaatatcatctgatatttgtctttctctgacttgacttcacttagtatgataatctagatgaacataggttcatctgtgttgctgcaaatggcttgttccattcctttttacggctaatattccactgtgcgcatgtgtgtatgtgtataccacatcttctttatccattcatctgtcaatggacagatgtttcctttctaaagtcagagaagatgctagtgtacatgatttttcccagagaaggctgtaatatgcaccccaggaacacttggagtgcttgagaataatgaatacctttaaaagatgaccagactacttttatgagaaattacagtgatatctggagcttgaactatattccattctcattgttttagtaattgaaaattttaatcaataagttaacctcttctgattaaattcattaaaaattaagaatatacttatttttatcaaagtagtatatggttcatgagtaaaaataccaagctgaagagcttatgaagaaaaacagttgtcctatgcctgtcttttcacccatcctgctcactggaggccacattttctaattacag

SEQ ID NO: 52176 - DNA, 2318 bp, Bovine  19866881011682
  misc_feature (1)..(1): n is a, c, g, or t
ntctactagagccaggaatggcagagcctggtgggctgccgtctatggggtcacacagagtcggacacgactgaagcgacttagcagcagcagcagcagcagcagtagagcgtgaagagaagacagcctataaagccattaggaggtgctgtggggattttaggaaggcgaagacaaaggactttgatgtgaagagtcaggagctcttgaagcaacattggctattttctagaagagatgcccacaatatgcagagacatcatggtagctgcactgaaagggaaggactgagctcaggcaagacacagatgttttgatgctcctcaacatgtgggcttttcatgctccttcacttacatcctcttatatgagcaccaagggcagaagctgctcagtgtctcctgatacaataactaggtccccgaaacctgacttttggttacagccatttaaaatccatatatctgtgacagatctaccttgtacagaagggtacgtttttagctggaaaaacaaattcatgaagataatatagtagcttaaactactacttatctcaatagtgatatttctgttgagccatagattttaatggttacttaacccaatgataacagttatgacggaactgtctaaaaagccggaaagagtgctatttttgagcagaaaaggattctttacaccagggaacagcaagctacattcatccaggggattgctcaacatgctccttggggaagaaaaatatttaaatttatgtttttattatgtattatgatagcctttcaaattttcttgatagtacacaattcattggtatacaggacacatttaaaatttacaaatcaattaatttacatgtattggggttgcatatgctgtattttttgtttgttttcctgataatgatatgcatttctccattcaaaccttacccatttggtaactacattatctaaacctgaagaatattctctcattctgatccaacagcttggatggctgattctgctccatttcagtaaaagtttaaggttttgggaatctggttataaaggagagttttgtttattttgtacatagaaaaatacacacggctgactgagctaggatatctttgctgtccatgcattatcagtccagcattatcaatctctctggacattcagcaccaagttacaggtggaaaaatggtgaagttacgtttctatatgcattgcctatgactgcttggtgcatttccttttgacaacggttgttatgttttttctactcactgaaagtcatcagtttgaaatgataatctttttctcctggtaaagaatttctaccctgtctcagcctgcctaaggaatacagttaaaaccattcaaaacagaacttcaggattataaaaacactcacttaaatttttttagaaaaattccagaatcaaattataaaactacagcatggtgatgaatggaatctgatttttaaaggcagaaatgcatcctgacaaagcaagagaaaatctcacagactattcagaacagaacccattagaatgtagaaataattctcaaattcaaagtctttggccgctagtgttttatgaaatattttctataggatataccagcagctacttgactctgttttccctcaatagctttggattaattagaggcctaggataactttagaaagggaaataactcatctttttcagacactatccagttgaatcttgaaatgaggatgtgggtatcttctcaccatgcctgactctttgtgactccaaggactatatcccatcatgctcttctatccacgggattttacaggcaagaatactggagtggcttgctatttccttctctaggggtgggcatctctaccctagctccaaatccatactgtgaatttgacttataacatgatagagggaaaataaagttctttgtgctccttttagtaacagagaatgaagtaagtattgtcaggaaagaggggggaaatcagccttcaattttcttctttattgaaacacgattattttggaagatccctttgtatatgcttcttttttgttatcatcaagggaatttagcttaggttcctggctatgcccagcttcaagaaattatacatttgtataaaatttataggtgttactaacattggtatggcctggtccacaggttggagattcagatatgatcacaacacagctgttttttttttttttttttttcaaggattaaagggcaggctgactttttgcaccactcacacatttatattctttttaaaaactacttacatatacttgccca

SEQ ID NO: 52177 - DNA, 2010 bp, Bovine  19866881105713
  misc_feature (1)..(1): n is a, c, g, or t
nttccttgtgcttgccttattacagactgccttagagcctgaatcctgcaactgtttggtttccaccaagcagattcacccatgagagaactggcatgcagaaatgatatggggggcatttgctagtgggtattgggtttttcagcaacagaagaagcactctaagtatccagtccataattttatgagtattgagagtttgatggaatatccattctattgacatggcttgtggctgtgttgttgtggctctgaagccagttgttttctcagtagcttgctggtgctcagatcattgcaggagtgtggtgggagcccgcaattgaggcaatggcttccttgttcctgaacttcctgtttatccctcacctttcttattgtgtcagtggtagcagctcttttcatagatcagttctgcagtgttgctttcaaattaattcttatagtctttgcctagaatcttcctcaagcccttctagagtttttaagcaaccaattcagtggattaaatcatttctgtgttcaaacttgaattaaaatatgtcagtgtaatttttctccagttttgatactttcttttttaaggtttgaaataatagactgtcttctctggggttctataacccatcccaagggtacagaataacttatacctgagatggaaagagacagatgcaatctttctttaataagtttacttttatttctcaagtactgtcctcaaagacagtactatttataatatttgctctgttcatcataacttaaagccagagaacattgaaatttcacagaatcggggtggttgtccatctgccccttttccataatttcactccccacaatataagcaggcagctgtaataattctaaaagcaaaatcatcctcagttcttccacatctcccaattctgcattgtggaaacctcgcctacttttcatcctttcttctttctaatcatccccaaatcaggtggtttaagattaaggaatactcaaaactaaattgttataaatctggaaaagtcactaggggtaaatatttgtatactagaatgtagtacgagcagcactattgtatggggggaattattatcatttttatagttggatttttgatcaaagtgatcaaaatatatttgttttcttcttctgaagaaaatatcccagaagcacttgtgaaaatagttttgtaacaatttaaatttatcccaggcccctgtcttaagtcctaagaaaaaagaaaattaatacatttattttcattaaattataattttacttgggaaaagtttaaagaaatatttgcctctcatcttttttataaatctccttggatatcactgataaaatgatcacagcatgtgtctattcatttacaacatgttttggctattttgcctcatttttaaatagcccattattaagaaagagaggaaaagagagactaggaggacaagaaggaagagaaggaagaggagagggaaaagaacttttcattttcccaagagagtaaaataatacttacaagcatagaagtcacaagtttttgtctaaagactagtaaaatcattccacctccagttagtgcctttgagaatatacttgatgtcttctgtttagtagtctggcattttaagtggtacatggaagcttataaaatatatttagcagtttgttttggattaactttgactactttttttatatctcttggatttggggaaaaggggaagggataggctggaaagagagtgggaggaaaaggcaaatacaggcaaaacagagtattctctcagagggatgttggcctggcttcagccactggttcctatatagggagcccatctcgaagcatgtgcataggttgatttttctagtcagggaagttgtcttccctgtaatagggctcctccttgagtctcactggttggtacatcaaatgaagtcaagatttggccttggatgacagataaagacagaatcttaccaattccatctacatacatc

SEQ ID NO: 52178 - DNA, 1255 bp, Bovine  19866881118085
  misc_feature (1)..(1): n is a, c, g, or t
ntagttaaaatcaaatgcagagtttcagcaggagttctgtgtaggacactcacagtgcccgtctcctcatctacatccttatatatgagcagcactatcacaacattcttacccaacatccctgtgagagtttcaaatgagtcaattaatttgaaacgtctaaaatacacattggatactagctattcttatgattggtgtgatcaacaaaaatgaaataaacctactcatttctgaatactatagtgacaaaaagaaaccgcaaatctggaaggcctcttccctattcttacattaaaaaaaataatggagcagacaaaaatagtcattttttaactttccagtcgtgtacaacctgcgcctatattctacaaacagagccacacacagatgacacaggtctctctgcagcgttagagtaacggagtgtagcttcattagcacagcttgcctagatgtaccatacaaatgaaaagaaaaccccaataactgaacaaagcaatggagataaaaataaactcagagctttctgatttactcttcgattagcttcctgggaccaaaagtaaaggaaaaaaccaacacaaccaaccatcccttaaaaacgttttttctcctttctaggtaagaagcaccccaggggcaggctgaggagggtgctgggaataacagacccccacacacttgctctgctgctcacaggagagaggtgccatttaaatagctctaattagtctttacaaagcctgcaaagtaccttgtgaaatcgttccaagtttccagaggtgaaatcccatctagctttcaatttaagacaaattcagctataaaaatttgactgtgcactgttcctcaaaaagaaagaggtctttatttattaaaaaaaaggatcactctgcaataaaaggattaaattttgtcatgcttgtaaataattaacttgaaaactgaaagactggaaatgttgaagaaatggagctaactcagtgattgatgttctaaacaatatgagaaaaaatgaactcaaccaatatgggatgagattagacaagtttttgtgtgtgcatgtgtgtgttttaagatgaggcatattttctaaccaacttccttcagtggtgtaagcagaatttcaagagcaaaataaaacaaacccaggtgcccacaaatgagtcattagtgtctggggtatgggaggagaggagtgaggaagagagagagagactgaaccaggagagaggaaaaggaatcatattaa

SEQ ID NO: 52179 - DNA, 1159 bp, Bovine  19866881130357
  misc_feature (1)..(1): n is a, c, g, or t
ntgcctacagatttcctcttgaactgtttcatgataatcaggaaggacattgttgggtctacttgagtttcaagtcaggaatgttcttactgctgaagcaagcatttctatttcagaaatgcttcatgggctttcagatggttagctaaatatacttagcatttgagtgtgtgcatttcccaacaattgctttagacaatgctcacatatgcatacagtaaaatgcaacttatatagccataatatctttaaatatgatgccttttttgtaggattaggaaacattaaaaactgagttgttatttttcaagcacacgtggataaagaaaacaattaccaaagttagaatcttatttctccatattaacgtaactagtttacaaggccatgcacatatctattaaatggcatgacttaatgatagccagatagatcctcataaaatacaactttaaaaaagtaagcatctttttcattctgagtaataacaaatgtcatgtgatgtgatctagaaacgcagttgtcaacaagcaattttctgctctgaccccacagcaggatgtcaacatatagtcgttttctgtaaaacatatatttttaacttttttcttattgtattctcttttggtaataagtgcagtacataagaagcaaagggtactagctcttgcctgcctggactcacatgggatcttttactgttctggggcatgtgggaaccttgcgctttcaggccttagctcttacacaagacacaagtgatcaaatacaacaggctccttaccagacacactgataagatacagactggaagggggtgactgaaccatcaactaagatattctggccttcaatcatttgctttttcagccattgtagggagtggacaattgagtaatggtaataattaggaaaaataatgattatcttcattctttctaattctgaaagaggataggtaatttaatgcactaggattgtaaacttcttcaacttgacttttttttttttttttttcttttcttttctcagccctggaatgtgattggaaaacaccctcagaagagagctagtcaaaggagcagtgtcttgaaaagtactgttttgaatcaagagaagagattagggaaaagaaaaaaagatgtatttggagaacaaa

SEQ ID NO: 52180 - DNA, 1826 bp, Bovine  19866881145551
  misc_feature (1)..(1): n is a, c, g, or t
ncctgttgactcctaatttcagtctgcaagattgtacagttgctgcttgagatccaaccatacatcattcattctcccctcttttgctcagctgtcaagtggaaagttaaaagaaatgttaggtataatataagacacagcaataatcacagcagtcataattcctaccataacactatatttttctgactacattagtgacttgtcatttctaaagagcatttgtttaatggtaaagttattttctatgcatcagtagcccacattaaaaaaaataaaattaaaaatactcaagctttcacacttagccattttaaaatataaataactatacagcatgggtgcacattgggaatggaaaggataaccttttcttgcagtccaaacaaatgtcttaatacaactggaataataaaatctaccaaataccaagttattatagacactcttataatttcttcagaaaaatgaattcctggggtccttgatagtcataagctctcagttcctcctctcctcagtcccagtgaaggtctacataatttcaggacaattgtaaaaaccctgagagaaaggaatgctcgttgccgcttggccaatggccatccagatagatgctacatatgtaagtgtgatttattaaaatgattgagtcagaatcttgttttggtctgtttgtttgccactgtggctaggctgggaatctagaaagcatattctttcccctgcactctccctccacctcaggaaaaagagagcagcattatttgtaaagactctggaaagtggttaagcgctaagttccagggcctcagaagcccttagtacagagcaaatgatcatcaaaggaacatgtgaatttttacattggccccaacagtctcaggccaggactgtctccaatatcttgggacatagaagcctctgagactcttctacaacaatgtaattcagagggagagatatttgaaaataagatgcatctgaagtttgaaagggaattcactggaatttgaaaaataaagaactgtgaaatatcccactctgctatgaacaaaatccatggctttaacactagcctcaaggatggcagtgaataagtgaaaacgcgcccagtgctgttccatatactgctgtgcagttacaccaaattctgtttgtgtgaaacttccagttaaatccacacactcttccccagtagaatagatcacctggatatcatcccatcccacaatactcagggaatgtcctgccagcaccaccctcttcctgacattctggtgactaggagtaatcacctctgctgtggaacacatggaataacaaaggctaaaaggttatcaaagtgagccatgtttctgagctattgtcagtgctttgagttgggagtgggggtgtggggataggctgataagggagcctgctacattaaactgggaagggcagatgccaccatgattgttagagatcaaagtagtctcagtcaccccactcttgataaagtgggttttgttttattttgttttgaaagagaaagctcaaaaaaaagaagaaaagatattgtgtatttttagtgcaaaagagaggaatgacctgtttgccatgaatggaggcaaccttaatctcctttcgaaggcacatggagggtttctggaagttgaaggacttcctaaccttgtgaacacaagtttgtatatctttgtcagaaaagtataaataaacttaagacacaaaaagtttgagaaccactggggtagggcaggggagaaacagctatgtctccagggtccatgtccgtggcttcaaagcctgtattagtcctagaa

SEQ ID NO: 52181 - DNA, 2986 bp, Bovine  19866881165599
  misc_feature (1)..(1): n is a, c, g, or t
naaaaactgcatatttactcttttccttctcctaccatggtttccagtccgttttaggtgtcttagcattttaagatgttaaagggcaacctattaacatgttaggttaatataaaacaaaactcatattaggtgttccaagatgcccagcagaaaagaattctaactaggacatatttaaataggagacttaggatgacttcatgttgacacctaagatgaattttcaggggatagaaaggattgttgttgagaacaaagggtctcttcttggttagagcctctacttcttgcctgtcatgctctccagccatgtaacttcttttcagaattgacactgtgtctgttcatttccttgtcatctttttggacgaagggcctgaaaagaaggagcctcttttcctccctttcctcagcactgttgtgcagttccattcctgaagtctctcaaatgattccacaattctgggagatcgaacatatgaatttttagtgctcctttggcactgccatttatgtcccagagcagcagcatctcaggattgtacagttggagttggacctgagctgagatatggcatattttctgctgatggagtttctaactgggaaagcacattcaagtggagtttttgtggctttttccagattaaatgaagaacgagtgattttgctggtggtgttcttgagcatgaagacacaaagatttcaaggattctgataggttgaaattacctcatagagaaggcaagagagaggagaggtcatacaggctcaaactcttggagtgctggtcctaaattgtcttttctactagaaaattcaaagggcaaagaggaggaaaacaaagggaaaaatggaagaaagaaattagattttctcagttgcctaattaatgcaagattgagccatcttgaaagcctaaatttgaaatacttatcttctgtcccccctttctttctgtataccttcactttctgattactgcacacacatacaccttgctaaaaaaaaatctggctttaacataagattctaaaaatttcttatttccagagaatttgataagaatactgccttttttttttgttatctaactcaactctctgtctttaaacaaaatatttggcttttgtatcacaaagtaagcctcccaaaagaaccagtacatgaccagctcccatttctgataattgtaaaaaatattaaatcacttttaggtgctttttttagctgattcaataataatttaattatttccagcttatgattaattctatcagcccctcaccatctccttcctccccagggttccctctaacccccaccaagattcttttttaaaataatctcacagtaatatatattgggatgcaatttacatcccatacaattcatctattaaagtgtaaaataaaatgatgtttattttattttaataaagggctgtgaaaccatcaccataatcaattttagagcatcttcatcactttaaaaaaaaacttcatcaccgttagcaatcttccttttttccccaacatacccagtctctggcaagcacaaatctactttctgactctatggattgtcctcttctgggcatttcatataaatggaatcatacagtatatagcctttcatgtctggcttattcagattaatgcaatgtttttaatattcatctatgttataacctctatctgtacttccttgatttttattgctaaataatattccattgtttggatataccaccttttgcttgtctgcaattgatggacctttggattgtttctacttttaaatactatgaataatgctgctatggacattcatatataagttttgggataaataactaggtctcccaaaaatttgaaagcatgttggtaatggtccagtgatggtattggagagaaaagggtttccttcttggttttatctccactcaattatggatgatgtcgaatccagcatgtgtttgtctccaggaatgcccaatgctttctgcagaaggcagtaactgaatagattgcaaatattcattcagcatgctctcaattcgatgatgctggcaatctttagtaaattgcagcctgctctcctttggtccccagcttgggtaatctactcatgcatactgatgtggaatcttccttggcccggctgaggaaatcttcaggcaggtccacaggggctctctctgaattaaaatcctctgcccctgggtataatgttcctctctgtgtctctaggagaaagacagcccatgaaattaaaagacacttgctccttggaagaaaaactataacaaacctagatagtgcaataccattgcagttatatctacatgcatggatatgtttaacttttcactgttcataatttagaagacaatgacatccattttcttctgtgactgaaagaagcttcttgttgcttttataaataagtcttttagaaccacaagctttgttttctgaaattgcataaaggattaagctgagacaagtttgctctttgactaggcagtgacttcaagacatttatatttttgtagaacataaagttagcacagtcatttttaatgaggaaatcatcacagagctgatgtgtacatttcaacttagatagttaaattcaatttgctacaacaaacatagtctaacaaatgtgttctctaacaacatacagagagtaaattcaatatccaataacagatatataaagcatttttgcagtaattgtagcctcaaggttaagaattctattctataagaaatgaaataaaacatgtacttaaagagcagactgtcacaggagaagttctgatcattattggcaaacaaactgcctacacactcaatttttatattgctgaggtacatgtgatgtttatatgtacctctttcaggatattcacacagccagtactttgcattctcaaatacttgcatcatccatcttgtgttctctaaagatttct

SEQ ID NO: 52182 - DNA, 610 bp, Bovine  19866881183485
  misc_feature (1)..(1): n is a, c, g, or t
ntggtcctaaatggagctgctttgtatggagaaggcacagggttggggcatctgaatgcttcaacttcccttaactcacagcatactcggaaaggagtacattctgcagggaagttgatgaggttctttggaagaacaaactagaaggacccctaatcactttattctttagacttttaagacatggataattattttgctgaatactgttcattgattgactagtgtatatacggattagcacaggctaagaaaggaaagggggttttataatctgtagtaaattagaggctgcaatctatactgctgagaatttctgtatgtttagaggctattcatgactgttaataggctttactctttacacttgtgagtttattattgtgctgaactctatccattataatacaaaatgtgtgcatccttaatattgtaacagctgttggatgtattttactttcaagttgtagatatcaacataaaagcatggaaaatatccagtatcgaaaataaccagtatcgaaaaattctatgaatttagcaaagtgtttttgctttttaaagaatttcatcttgggaatataaacctaatgtatcattagttccaaaa

SEQ ID NO: 52183 - DNA, 697 bp, Bovine  19866881185342
  misc_feature (1)..(1): n is a, c, g, or t
nacacatttctaacaatacactgcccttggatatgttgcagttacttccttgactggccataactctgtcctgcctgtcttctgtctttggatagaaagggtggcttggccaattagccctgcacttgcgtttctgagtattttagcaatgctcctgaattttggtggcttcttgagatgggatgtccataactgccggccagtttccagctggtaacatcatgcctcacgcctgtattgcctgtgctattctctctagtgctgaattcagtttagactaaaagtgagtacttgagccatcccaataacttgaaagcacttttgcacaactttcaagctctttttgaactgccttccagatacaatattggatgtatttttattccccaccaggagttataactcattgagaattcaaaaaaaaataaccaagatgtccagaaattctagtcatcaacatgaataagtttaatattcttcataagaaatctaaagaaagtagcagggacttcttttgaatttggataagttttatttcctctgttatataaaacaagtgctgatcgtaaagtctaaattttatccaggccattcaactgtttgcttagaagacatttaagcaaatgtcttatttatggtgaataaatgtttgactcatcttctgagatgctggatttgttgctgtcatcatatggga

SEQ ID NO: 52184 - DNA, 1019 bp, Bovine  19866881189384
  misc_feature (1)..(1): n is a, c, g, or t
ntggctctctcagctcctgcttacagaatcgcttgcttcctgtactcatgagcctttgtgtacaatttcttccatctgactttttgtatacctcttctttgtccatcaagattaaattcagaaactttcttgacccagactctatcactagcatgtattacatctttctgtttctctgtgcccctcaccctatggtaaactaaagacagggacaatagcctcttccccccgcccagggcgtaccacaatactcatacttaatacactttggtgaaaacgcttattttcttctactggctaccatcaactagctatataaaaccaacaaactacttaattgactggatttaatttccacttcataaaacactctcattaatgcaacattaatgagaatctgtgtcaaaatgaactctagaaaatgcaatagaacatgaataataaaactgtgagcctatgcaaaagcctcttgcactctatatacagcaatatattctacgcatttttttataaccacataacatcaagatgtaacctctttttcttgtttacatgcatttctgtggtccagccctaagcttcagtcaacttactttatgttctcatttgcaggtacttcgggcagttgcacggtaatcatgccatccaagttcgtcttcccgatgaaggcaggcttggtgcgcagaacgtcgggcgccgtcttcgcagtcaccctgtgctgcaggcccccggcgctgttgccgcgattcgtcagcacaaaggaataggacttctcaggcttcaggttgacaatcagcttctgggtagcgcggccatccacttcttctaccattttcccatcatcataaagaatctggagacagacaaccaatcaaaaagatttggttatcggttaggcagggaatattttctaaactaatgtgcacctgcttacggaaaatacatatgggtcatttctaatttggggcaatttgtaagcctataagtgctccccaaattctagagatggcatcaatttt

SEQ ID NO: 52185 - DNA, 1289 bp, Bovine  19866881192817
  misc_feature (1)..(1): n is a, c, g, or t
ntgagaacacagatttttataaaacagtcatttttttttttgctatcaaaaatgctcaacatagtcacctaataaacaaaataattttaaaaagaaaatatttctatacattcacattgtaaatcaaccatacttcaataaaaaagaaaagaaaatattcctcagtactaatcacctgaaacttacaagttggaactattgagaatagaactctgagcttgagataaagtttaaagaaattgatgaatgaatttccaatagtcagaatttgggcaaaatttaacacttcatatatagcagttgtaaaattagttccttgacagaaaaaaattacaaggctctattatgggttcaacaacactccttagtgggttagcaattcattaattacagcagcatcactgaatatgtttcagtaataagatactttattctgtctgtaaccatctttacataggtatatggaattacatattctataatatctaagaatgtcttaggctcttctactgataaattgggaacaatggatgtgaattaattaaattagtgaaagaattctggacacattaaaatacaaatgtctatttctcatacatgcatcaaatattttaatcaaaggatctcttgttggataatgtgaaagaggacaacatagtaataagactatttgagtacattttctcttttgaactgttcttgttcttagcttcctctgtgcatcatacaatactccaaaattttaatgaacttccatgtgatttcacatctttaaaaaattcatggatatatatttcatacttttatatgcaataccaacttattctttatgcactcacttcaataactaggttgaaagttctttgtggatgaagataatatcttttacttcttttatatccttgaatttttaaaattattttaatttaaatacacagttgatttacaatgttgtgttagtttcagatgtatagcaaagttatatatatacacacatatacattctcttgtgtatgtacatatacataaaattatattcctttataggctttttacaaaatattatattaagtatagttccctgtgttatatagcaggtccatgtttttatctgttttttatatagtacagtatatatgttaatcccaaactcctaatttatccctccccttcccccttgagtaaccataagttttttttttttccctgtgtctatggatctatttctgttttgcatttaagttcatatgtatcattaaaggaaaattattttaatctataattttaga

SEQ ID NO: 52186 - DNA, 1704 bp, Bovine  19866881233864
  misc_feature (1)..(1): n is a, c, g, or t
ncatagatctttgctttttgatagatgaatctaatgttataatggaccctaagtctaaaatgacatatcctcagctgccaacatctctttgtagaggactttttgcatacttttcatgcatgtttacaaagtgaactgttttatcagctaactaagagatagaaggctgagggtgaaggaaatggggaaagccaaaggaattcagctttgttttgatttagtccgttttagcttcatttagtagcaactatcttccaataagcagattactgtgtaaacaatgatggaatggcatatgtataacaaaaatgtaagactcttaacagacatgaagagagcatttttaaattcacaatctctttatgattagagtaaaatcagaataacttgccgctgcatgaatggctggtgagggaaaggaagattctactcctcaaggcttgtttggctagcaaccaggccagatagaatcatctgaagctatatgctacatttacttgccagattgtttgaagattgctcctgggaatttttctggtctgctgtgtgtgtgtgtttgaaggacagacaggcagaggcagactgataaacaagcagagacacagagaaattgagagagagagaaagagaatacttttggagcagctttcctcttcacatcaatcagttaaacaattccagatcagtttctagataaataaataggcataactggaaatatttaagaatgatgggacttccattcatcctgcctattttaaccatgtatcttccttacgatatggtattgaaccagattctttaaaatattttcttattgttctatttctgaattgaaattattccttagctcttatgtgttatgattctttcatctcatgaagttactaagccccacatcatgctctaaaaatatatcttctttatgaaatcgtagaatattgtctctggagaatactttgaacataatagcattcccccaccgcccttcccaccttttatgctgaggagcctaaaatccagaggggtagaattctcaaggcttcagaaagttggtaaaactccataaataagaatctaaatccctgtctaattctggttttctgttttgctttgatgtactttttttctttaccactttggctctaaatcaaagaaggaaatctaaatatttaagtaaagatataaatatgccctgtatttccagaagacttccaagaactttattcattcattcttttcacatatttaataaaaaattattgagtacctacttgctagataccaaggatagaaaagactatacaacagattatattttccctatttaaagtttatttaaaaatgcatacttgtatgtgcatatatgtagtacacattatctgactcatagtaagtaagggaaagactaaggaacatttttgcatgctaaaaagttattagtgtctctggtatccacgtctgaaggtgtatggtctgttccatggttagtctcttaaataaggaaaaccaccaaccctgtccaccaagaaggggcagccaattagagtccagaaggttgataattcagcacacatgtgcttccttctcgctggtacaccttcccattatgtcctttgtgccttaataattaagtatatttccccatctaccttgcagctttgtgcttatctgacatcaacataaacagactattttcagctc

SEQ ID NO: 52187 - DNA, 1001 bp, Bovine  19866881235845
  misc_feature (1)..(1): n is a, c, g, or t
nacctactgtatagcatagggaattatattcaatattttgtaataacctataatggaaaataatctgaaaaatgtatatataaccgaagctctttcctgtacacctaaaacactgtaaatcaactatactttaattaagaaaattagctcagatattggctatgggaattaaatttgaatataaacactagcataatagatgacatatagttagtacacagtacatttagctttagatacttagattctgtacttgtttgagttttgcttatttattttgcttttttaaagtcttagacccatccatgaataatggattgaaagatagatcaaatgtttttctacttaagtcccacagatcatgtatcttttgagcacagggatgaactcttaaccccagtgacagtactctgtcccattagaggacatggcctgggacagagtagctactgaataaataagctgtacttgttgtatcctcctcacttttacttcatgcataacagatgcagccttatgggtaggtgattctcggtaagcaaccttaggtagaattcacagttctcattcccagcagataatctgcttcactggaccttggtgaaataatagatgttttctttgagattcagctgaggggcagcaaatagggatttatattacgtggcatgcattttctgtcatggggaggatgtacctcattacaaacatgctttatatctagtgagcttgcatgcacctgcgtgcttgtgtacacgcacatatgttagaaaagtgggttattatcttattattataaaagaatgtttggggtagcaaggaagaaatactattgctgggaaaggaatacagaaaaaatgtgacacatccagttctcactagattcaggcacagaagctcagagatattcagtttgatgcttttatttctttaatccacattctcagttcttttgttttcttgcatttctatttttaatcatccttgtattcctctcctat

SEQ ID NO: 52188 - DNA, 3030 bp, Bovine  19866881248756
  misc_feature (1)..(1): n is a, c, g, or t
ngaccttttgccggtgctccagagagtgacactcctccttgatccccttcccagcccaatctctggtctttttgactccatggactgaggcccacagtctcctctgtccatggaattttccagataagaatactggagtgggtagccattcctttctccaggggttcttctcaacctagggatcaaacctagggtctgctgcattgcaggcagattctttaccatctgagccactagggaagcacctatctctgggttcagtccaacccccagtaagtgttaggaagatccctgtcctcttacttccaagcacctgtctatctgctcccacctctggggcagcactgatcctccccactccctgctcgttgcagacagagctttttgcccagcttgtaataaccatgatgacatgtgttcctttatccaaggatacccttcatctacaaacatggcaaggttttcactggaaccaggagatttagatgtgagagctcatggtttttgaactgactacttaagctctgatcaaattttctcatctactataaatggaataatacctatcttcacagaggagcttaagagcctcttgaagaaggtgaaagagaatgaaaaagctggcttaaaactcaatattcatacaactaagatcatggcattcagtcccatcacttcaaggcaaataggtggggaaaaagtagaaatagtgacagattttattttcttgggcttcaaaatcactgtagatggtgactacagccatgaaattaaaatatgcttgctctttggaagaaaagctatgataaacctggacagcttattaaaaagcagagacattactttgccgacaaaggtccatatagttacagttaaagctttggttttgacagcagtcatgtacagatgtgagagttggccataaagaaggctgagcatggaataattgatgcttttgaactgtgctgttagagaaaactcttgagagtcccctggactaaacggaggtcaaaccagtcaatcctaaaggaaatcaacccagaatagtcattggaaggactgatgctgaagttgaagctccaacagtttggctacctgaggcaaagagttgactcattataaaagaccctgatgctgggcaaggttgaaggcaggaggagatggggatggcagaggatgagatgggtggatggcatcactgactcaatggacatgagtctgagcaagctctgggagatggcgaagaacagggaagtctggtgtgctgcagtccatagggtcgcagagttggacacaactaagtgactgaacaacaatagacagatattttgattgtctatattactagaaattatgaatttacatcaactccatttatatcaatatgtatgacggtactcttagaaaaaatcaaaagtaataatgtctctcttaaactcactttatttctaattaccgtttctgcagagtctgattttaaacaaaaacaggaatgttattgtcaggggattaaaggtaatataatgaatgtacctttctgattaagtagacatacaatatatctctctctggatataaaattaaaatatatttgagaagttcatatagatatattactgacctgtgcatttttgtagttttttggaaaagacaaaatattagtgagaataatcataaacttaaattttatataacctaataaaataatattttataatggttttatgttttgctgagcaagtggttctatgaattagctaatcaagagcatctcagcattaattatatcagaactaacatcattgtatttggcaggtgtccactaacatcaaatggcctttgttaattaagtctggagaacagatcaaatcattgtgccattttggaaggttttcttagcctattgatcttggcaggcacaagtcatcatgtcattatatatcttctcaatcaatgggtattaaaatcacaactattatgcaaggttcttggaaataccttaatgtaaaaaaaaaaagttaaacagaaattgataacagctattctaatgcatctgtgagccattcatctagatttttttttttttttaggtacagagtccctggatcacattaactcaattgctcttgtcataatattaccttcactgagtaatgatttatgttacattatgtcccctggtaatacagaaaatcaaaatatggtctactgaaacatcagttctatatctttcattaaattgtgactaaaagcattatcgtctgccatttcatattcttaagataaggatactcatgattcgcaaagattcttatgttttggttgaatttagtttcagaaactatttggtttcttagctaaatcctcctgtcataagaaaaaaaaatatgaaacactttgatattcatgctaaaatttgtagttagaaaattaagaagcagatttagtgatcaagtataataacctattaaaaaggtattccttcttcttttagataaatacatatttttttcctatctaaacggtttagtgtacctctgtactaggataatcgaatagctactacaagtatttcagaagtaaatcatccttaattcttggatacaatacttgaaactctgtatttcctgcctctgttcaaaaacctagtaagaaccaaaaaaaaaaaaaaaataagacatttgtaaattattaatttaaaagacaatggtgcttcagcaaaggaaacaagaaaataaaaagacaacccaccaatgggtattaggataagggataaggaactagtctcaaaaattgacaaatagctcatgatgcttaacagtatcataacaacccactcaaaatgggcagaagacctaaacacatatttcttcagagaagaatacagatggccaacaggcacatgaaaagatgttccatgttgctaattattagagaaatgcaagtcagaaccacactgagatatcacctcatagcagccagaatggctatcatgaaaaaatccacaaacaataaatgccagggaaggtg

SEQ ID NO: 52189 - DNA, 1667 bp, Bovine  19866881269990
  misc_feature (1)..(1): n is a, c, g, or t
nattcttcccaatgactcttggaaagtttcatatttcttcaatgaaatcaatagtttgagaatgaaatcatatcatcatgggccatctttgaaaactctcttgaggtcaaacccagcctgggccatccaacccctcatgactttgccatctgaaacctcaatgttgagctggccttggcagcattatgcctgagccctttattgaatatgcttcttttttgatctgcttttaatttaccttgtttttcgtgctgcctcctgctctgccggggacagatgggtgtttgttgtgccactagatgtatcactaattgcttgactatgagcttcttgaactaggtcagttgtttcttctccataaaatgtcacttgctttctccattgtgtgtatcaatgtctccaaaactttcacaactgcgtggacatgcttaaaaacaattagatacttgggaaaatcggactataggcaagaaaattaaaggtgactaggttcctcactgaaatggtttctgagggagggaagcatctgatccagtactaggaagaagagggaaggtttggcccaattcttccacacactgggattttgattcattttgatgttgatctgcaaagcatgcagaaaatcattgcctcttcttgttgtcctctcctcactgatgatatttaaccacctttgatccaaattatttctcagactcctggaagcctactgaaaatgaagtttgttttatagcccttgtgctgttcctatgtatccaatgatcatttccattataatgggtgtcaatccatttatgaatttatcacatcagattgaggaatgcattcagataaaatctcatggcttacacatttctctgataaaatattcatgacatgaaggtttcacctttataaatcatggttactccattgattatttttttcttccacatttttcaaacaagcccataaatttttttaaatgttcatcagggaaaacaatatgaatgaatagatggatatacctttcaattacatgcatttctgattttactactgcctccagcttatattataagaatggaataccacatggaaggggatctttttccaaacctaatggatatggagactgatttcttcatttaaagaaaaaaaggttctctatcatgatggcttaattataatgggaagcattaatataaattgaaaacttttcgttacttggagtctggaatgaagagtataacttatgaacctgtatgcatcttaattacctttgacctttgaacaacatggtggttaggggtgccaaccctctgtgcagttgaaaatttgagtataatttatggttgaatctctgtatctatagttcctgtgcatttacagttcctacatacactcagttccgcatctacaattcagccaacctcagatcatagatcatgtagtactgtagtatttactactgaacaaaaaccaaaaaactgcatgtaagtagacccatgaggttcatacccatgttgtttaaggatccattatattggtatgcaagtttattggcttccttctttttaatccttttgagatatggcatatgtgaataaatagggaagttaaatgtttcagttattgctgcataacaaatcacttcaaaactttggacaaaaccacaacaattt

SEQ ID NO: 52190 - DNA, 1734 bp, Bovine  19866881381815
  misc_feature (1)..(1): n is a, c, g, or t
ntgattagcatgtgattattttttacagacaggcatcaatgcttggtgattttgatgtgcttttatcttgtgagatttatttaaagaagcatatgcatggcttagagccttagggaatgataccaccccttaagaaagcataaaagaaagcaaaagaaaacctgcttcatttgtaaaaaaaaaaaaaggacttgttaccctttcagtatctccaaattctataccagcacctctttctctcaagtccttctctaactcaactcttacaaggatgtctttctgtattcatccatcagggaaagttcttgcccacactccattcgcaacttctagcttttagtagaagaagccaaaaagggcaagagaaagacaatgctgactagaaggttgagaagagggagttagaatgatttttcattgttttggaaatgttttatttctcttaaaaagatgaagttaatttttataaataaaattttaacttgtttctagatgatggaaatttttaccctcgttcttcttactttccataattcaattaaaataaagaacaactgtgaaaaaaacattaactccacacagtatcctgccctgcttttctatgttggtatttcaacgattatcactctggaacagatggatctttacagtgtccatgttgttaacataatgctgtccagtaactatttatgtttaatttttttccacattcatttggtatttatttagaaatgtccctgaacaagactgttcccattaaaaagtcacaggatgggataaggcatttagaacatattgcaaaactgcccccagcttagccgtcaactttacatatatacatttccttatgtaagtttgcatagtactttataggctattaaaagtaagacacttcactaaagtgctcaccatttaaataaaggatagtgagtaggttaaaagttcagaactaaaagaacaaaaggactagaactcagtaacaaaaccatactctaaccagagtatttaaaggcactcgctttttcaagtcagtttcagcttcaaatattttcagtatggactcttgagttcatttatatttatcagattatggatgccaattttgtttagaaacgattatttttgatatcaaaatattaagtagagcacatctactgtctgatgggtgattttgtttctatagctgttgctttctgaatgctggactaggtccaaaggtgagaagaggaaaggctctattccaagaacatctcaaaattttaacggaaatatgttacttgtggtaataactttttcttcccgtctcctattttgctaatatttgctatattacccacactatgaaggccgtcctggaagtgctagaattacgttttcaaagagaagaataattttgatgttctttcaaagttctcatatagaaatgtacaaaatatatgtcgggtaatgatactcttatttgatatgaaaatttttgatgtaaatattgagatgggtagatcctgaaataggatcaaagaaagctgtaacactggacaccactgcaacacaaagtctctgcagaaagaaaagaggaatattgcattttatgtaaaatactgccatatttttgctcattacaacagatgttctcattggacatctttctacactatgtctctaaatagatgataaacaagtcttttagtaagtcatttatttgggggatccttgcacatattttattaatgacag

SEQ ID NO: 52191 - DNA, 1264 bp, Bovine  19866881389647
  misc_feature (1)..(1): n is a, c, g, or t
ntgacttcactttcacttttcactttcttgcattggagaaggaaatggcaacccactccagtgttcttgcctggagaatcccagggatgggggagcctggtgggctgccgggctatggggtcgcacagagttggacacgactgaaggtgacttagcatagcatagcaaaggagcattgcagaggggtaggtcacaagaaagtatccatttttaacccagatggcagaaatggtgatgccctattgaaatgtggtgctaaaactcagcatctcagaacctgcatttgagtccctatttggccatttaccattagctgtatgacttcaaagaagttcctgaatgttgtgaatcgctgaaggggaaaggaaactgacagataatgtcaaatgcctccaggatacccagcactgtggtgagaaggcccttcactgccatctcatttaccttgagaataaatgtgaaagcacaaacttcctcaaacagtaaggtattattattggaaatatggggagaaaaggaagaacagctagagggagtagtttaaagcaagattctgagagcctaatcgcaaatgatcctgtggtgattctataaaaaatttcccggtattaacattgcctgtttcttgttgtcagtttcagaggtagaatctttaaatgaaatttctgtctacaaagcaactgcattcttcctttatgtctgcaaagcaaacatgtttaaagctgtcttaaaacttactagataattaacaagttaattaacattagaacaacagaaaacccaagagagattaagtgcctttctcaaggacacccaatcactggtatctggaaaaaatattttgaacttcatggtcttgcttaaagctaagagacacctcccaccatttaaaacctccaagaaatcttcatctttgaaaagagataacatgttaagttccaaggagcactttcttcctctcttccatatagacagcaagattgggctgttaacaatatattctgttcagaggagaaaaaatagcttttgcacaagtcagagcctctgttcctgttttgttttcttcccacaattcatgagttagacacaggcatatgttttattattttccctcttcagttttttttgaaaaaatgcattattacaccatgaagaggttgaaattgttaggatctggagttatcccatccctactagttttgtaggattctgtagtatctttctgccagaatacagaaccatgcatcattcagaaattaggaag

SEQ ID NO: 52192 - DNA, 802 bp, Bovine  19866881422122
  misc_feature (1)..(1): n is a, c, g, or t
natatttatacatccattagtcattcacaaacatttgtttagtgttcactatacacaatggtgggtaaacaagcaaaacacattgcccttgtctcttagagctaagaatttaatatacatttgttgctgttttagggttcttacaagctcagaccagaaatgctaagagtctactaacatttgacagatatttagcacgtttcaggggcttctctggtggcgcaggcagtaaagaatctgcctgcaatgcaggagacctgtgttcgatccctgagccaggaagatatccctggagaagagaatggctacccactccagtattcttgcttggagaattccctgaacagaggagcctgaggggctacagtctatggggctgcaaagagtctgaagtgattaacactttcatttttcttttttcactagcaagtttctattacatgccaggtagtagagcagtgttacagggtgggtactgggaatgcaaagatgaataacagtctctgctctcagaaaatcacagatcaatactttgcttcttggtctcaaggatggtggacttttgacctactcttacactttcattttcagtgaaggaggaaatatgaagtgagtgttatcttccatatttctcatttcccctcctcaacaacgaaattccttctgtaaggtttaagggacctctatgaagaaaaatgacagcaatataacagctcttgggtggccaaatcacaattcatggactctttgtagatcccaagaggactattcagcatcaacctcattcttaacagtggaacaa

SEQ ID NO: 52193 - DNA, 975 bp, Bovine  19866881431616
  misc_feature (1)..(1): n is a, c, g, or t
nacaaagagcaggacatatacttcttggttctcttccaagttctggaaaagaactggccgcctgactggataacagagcaagcactgcttgcccaccctgttcttccgtgtcctcaacaggaaaacacagatgcagatgcagacaggcccacactgacttgcctcccagtaatcctgggaggataaattaggccccacctgctaagtgtcttgagtttctaagaaaaggaggaggaggtgggcctgcggtgggggtggggtgctacctgaggcctaattaacagccaggctttgacagtcccactgagtgaaacacgctgccctaattaccgcaggcaagtgctcctctggaatagagtttgtttagacattttgttccaaggcagagcatttgcagacaagaaggataatttaagagtcaagaatatagtgatttgtttgagggtagaaagaaagacatgaaagggaaaaaaaaaaaaaacctttctaactgatcagctcttccccaggtatgtacacttagtcccttcccaggccgaagaaggcaatttaattgctcataactttattgacttgacaaggcaagctattgttgcttcttccctttccttcaccctcagtgcaatcaaacactaaatcctgaccaagtcattccccacaccgaggctaaaatgatctttccaaaacataaatatggctctgtcactccctcacttaaagcactgtaatggatttccattcttattggccataaagacatctaagtgttctcaacctggcttattgaaagccgagcaaaatgtgctttgcctcagtctccaagtctccttcgcaccaaacctcctggttgctgttggttccctgcaaagctcacacagggccagagtctctcacctctgacatttctaaagatgtcatctccttacttagaataatctaatccttgcagacacttcatatactattcttcagggt

SEQ ID NO: 52194 - DNA, 1668 bp, Bovine  19866881476679
  misc_feature (1)..(1): n is a, c, g, or t
ncagatgtcactcttggacttgagatgcttgttagatagcaaatgttatgcacaacaaatcttttctagttttttcattcaaatagtattggttcagtgcctactatgaggtaggcactgcacatagagtggaaaacaaaagtagacatgtactctgaccatacattgggctttcatctaggccagaagtctgttattaaacaaggaatgataccaataagtgtgaagctataactgtaacaagtgataggaatgaaacatacataatacagaaaatgagactttgcttggatcagattagaaaaggctttcctgaagaagtgaagattgagatgagattttaagaacaactaaaagatatcatgttctaaatgaaaacatgtttgtgtgatcaaccaccaatccttaattaaagccagtgtccaggatgtggtagaaactcaggaatttaggacaattgaagttccaagcgaagaaagtagaaacaaatggggaaaggaatggtgtgaaagaacacatagaataggaaatatgagaaagagaagatttgaaagtgaaatttcagactttcctccacttccagttcactggagggaaatattcacccttaatatagtgcaacaaaaagaactaattacaccattaaccaaaagctgaatgctgagtgtttgtgcgagtggaattataatcactaagtcttaaattttacacaccatatttattggctgctgctgctgctgctgctaagtcacttcagtcgtgtccgactctgtgcgaccccatagacggcagcccaccaggctcctctgtccctgggattctccaggcaagagcactggagtgggttgccatttccttctccactgcacgaaaatgaaaagtgaagtcgctcagtcgtgtccgactcccagcgaccccatggactgcagcccaccaggctccttcgtccatgggattctccaggcaagagcactggagtggggtgccattgccttcagtttgtcttaaatttccttccccgtcatctttattacaaaagatagcatttacattttatttgacatcctgcaaatataaaactcttcacaagaatttgcttctttagaaaatgccagagtcagcttgtttagtgattattattttattacaacaacatttcactgccatttattgtctttgcaaaatcaaatcctgatgagaaattggaaaggaagagacttgaagaggatcacctatctataaatttaagtctctagtaatgagtacaatgaatgatcttgaaaaattccaggatgagtaggaaattctgtcagtctctctatcctttttgggttcctttaagatgaaaaaagatacagaaacagtattggattgtgtgaaagcatttacattattttcaaggtttcttgccaactgccaacactgattccagataacttccctgtgtaaggggaaggtgtaattgattctgtactcactgattttcaccacaaattttcaacatcaagactgaattgattctgtgaatccattgcttctgggcagaagaagaaacagattccataacatctgaaactttctgccagttctgagtgagcctctttgtccagagtctattgcttgccctttatctactctactcttttaacactgagagactcaccacta

SEQ ID NO: 52195 - DNA, 1152 bp, Bovine  19866881479925
  misc_feature (1)..(1): n is a, c, g, or t
ntcttctcccacaggacagttcaaaagcatcaattcttggacgctcagccttcttcacagtccaactctcacatccatacatgaccactggaaaaaccatagccttgactagccggactttagttagcaaagtggcttcagagatcagcaaatcccagctcctgaatcagaaattatctcaaatcaaacttattcatgaaatttgtaaagatgtgaccctgtggtatgtttgtgagaaagcaagtggcagtttgtttggctagattgaagcatgaaatggaaccagtttacatctattcccagttgtttatatttattggaaagaatcctggacccagagtcagaaaatctggctgggcttctagccttgtgcagttaatgactaattctatggcctcggataaattatttaatttctctgatgccaatgtcctcatcagtaaaacaggacttttaataatacgtactttattaaataagctactaaacgttaaagtgttcagcatagtgcctgacatgtcataagtctcacaaaatggtaactagtgttaatctttgaatattcgccatgtaacaagttgtatggaaacccttttgtattatttaaccaccacaaaacccttaaggttgacactgtgtatctgacactttacagataaggaaactgaagttagttaaactaaagggatttgccacaaactggtaaatggctgagttgaaagtcaaacacttgcctttaggttattagagtataccatttgttcctttttttctttcatattagaaagcagtgtctcaaattattttaaatcacagagtgttgtcagtgaggggtaaggaacagaagaagcaattaaggtgaattaatcagtcttaaaatacagtaatgtgggtaaagctatttaattataattatgatcttcaaaggtagaaataaagacagtgtctttcattagtccttatcaatatctattacaaacttttgggtaactttgatttcattttagcaagatttatttacatctctagaaatctgtcttatacataccagtttcttataactaaaggatattgtagaatctgcaaaattttataccttttgctttttcttgggaattgagtgtaagaggcattggggaagcagtttcaaat

SEQ ID NO: 52196 - DNA, 1557 bp, Bovine  19866881482871
  misc_feature (1)..(1): n is a, c, g, or t
naatgtttgtattattgcttcactttctcctgatcctcgagctgatcaggacatacatccaatgtttcagcacattcctgtgttaccacttgtgaaggagtgttcttggaagactctccagttcctgacttctcaggaccttggcttctttccaaagaatgtacctttggagagagtccttatcagtcctgagttagggctttcttgtctccaccaccttgcatgtctaattccttctgactctgggctcagatgaggtttaccaccgtcatatgtctaaatgaatccaagattccttttgaatagcactttacacgtttcagaacactttctacgagaactctgatacctaattgttttaccggtttttacttaagacaaggagtgggctggataattagtgttttctaacttgaagttgtgtccttgaggccagctgtggagctatttaccctggttgtcttcagtaatagcaaagatgccgggcagacgtggttttggatacgattgtagccaacagggtaaaccagtcttttcaaagcacatatggtctgattttcatgtatatcttgaggaactactttttttttaatttaaaaagaaaaccagtctggtgtacttatacatctgcatttctgagtgatattatgagcagatacttcatttagtgtattgggatccaataaccatccccaccccacaaatatctttcttgtttattcttgtatgccagagagagttagtgtggttactcgctaaatcagtaccataaccgctaaaaaccctcctctaactctcatactgggagaaagctcttgtgttactattacttataatatttcagtaaaaaaacaagactgtgaacaaacatgaaggttttgcatctttaaggagctttgacatcataaacctacagtgttgttccattgatgttaatcaaaatcaactgcaggagttctccaagtttaaatttactgttcattcagaaatcacacggtaagcactcactgcatcacccaggcttctgggttgttctgcttgttggacatggctggatacaacagacttgtgaattagatgtgaaatcaaccaaaagtctttagggcatctcttgctgtgactgctcatgctctcaggaccattctctctgggagttcttcaactcaaaggttttgacacaagaggaaaacctaagaagatcactggcgctagaggtattctagaaggctcatacaggttaaggaagattatacagctgactagtggccaagtcaggactggagagatcaaatattttaatattatcctggtgtttccacagccacatgtaacctttacatgttcttccaggtaagaacatagcagcaattctgtgtcatttgtaactgaaaaagataaactcaagacaagtaattttctgttggtgtttatggcaaaaggcaattgttagtgtgtagctaaagagcatagcattcattcttaaaccttttctgatgctcaagtttatttagaacctttgccaaaataaagcacacattttgagagaaacctttatct

SEQ ID NO: 52197 - DNA, 864 bp, Bovine  19866881608736
  misc_feature (1)..(1): n is a, c, g, or t
ngatataatcagtgtataaaccccaagatgggttcaaccatatcacttcagcagaggagacagacatagcctgtcgagaagttcctgtgaatttgatgggatttgtagccctatatcacccatggactcagggctgtcaagcaaccagagaaaatcaataaagactccttacttgtgctcagaattgcaggacatgtttgatgtgctaccagccacctggcctgaaccactttctggcagattgtgatcatgtcattgcactgttctagatcgatcaaaatctgtctttggaggtaacgtagtttgtgtagtatttatttctgaaagcaaataagtcactgaacactaattctgaaagttactctttttaacacctactgaatgtttctatttactatattaccttcttggaaaatgacaatcagcctcaacttataatgactcagataagtcttgtaataaaccttttgatgttgtttaattcagcatttgccaagctagtgtgatcaggaaacttctagtttctttggggaaatgcttaactgacatacctgggcacactttggaaccctctggtttacttataagtggaccttacttattgtttatatgatcctggtcaagtgacttagttttcttaagctttcttataaattggggataataatatatgaggactaacttaatttaatgaaataattgatggaggaagcatctttataatggccacacatagaagaggcacacaggagctcaaccaatactgatttatgcttttctactttcctgcccttccctgttcctctgttattaggtaaactctcatgcaaagaatgtaatctgtagaaaataaaatttctaaag

SEQ ID NO: 52198 - DNA, 1278 bp, Bovine  19866881633446
  misc_feature (1)..(1): n is a, c, g, or t
nctgcctttcctattcatggcaagttcacatgggagcttgtgctcattaacacaatgttccctactgagtctctcctcccagggtaacttgctcccctgcccatgaggactgcaggtgttatcaaagactgagaatctagatcctgagcctttcctaagggagcagcaactgacctttcctacttaatatcttcttaccagaagtttcctgtttacaagccctcctatattcactatatcatttgcatactaatgtttgcatgctagttatatgcatatataatctaaactaatatgggcatgttttcaataattagttacaaatttttttgacctgtgattgtttatcctatttaccgccttcctcatttttttgagatttaaatagatttctagtatagtaatgttgatttgtaaaacagcataggaacttctggcgtattttgatgggaacaattgaacaaaatgtttggaattttgactttattttaaaatccaggaagaagtttgcaatgccttttgtacaaaatgcttggcattattttgtaatcagcagcgaggctctgcacattcccttgcccatcccaagccaattatttatggtatttttctagcagtgataaaatagagccagagcataaaatgtcacaaggaatgctgaaaaagaatgaaaagtaacccttaaatattgcatattgcctattcttagcagcattgagtgatgttgacctttgataggaaagtgtgtgtgtgtgctcattacttcaaatagactataagttcaacttgcaaagactgataacaaaattataactgtccaatagaaattatctgaaattcatgcagctagatcaaaagcctcccccagctccaaatgagcagtaactggaatgaattacattatggagccttcccaactgcagcttaaatcatttaagccttgtttggtatggcacctgctgctcacttatttttaggagagaaaatgtacattcttgaacataagggcttgaaggatttttatacccaaggaaaagcctaaatgtgccaaaattttggaagctgaatttttagaagggcagcttaatttgctgctcttgtaggaggtttaaggggctgagatcacagtgaaagagctcacagcatcatgacccctctgtgtccttactgtaggaactttagtgggaggccgttgtgaaggctgcttccagttttgatcacataagccgcagacttcattacagtgtgcagaaggatgagcttaaggaaagaaggata

SEQ ID NO: 52199 - DNA, 1149 bp, Bovine  19866881703173
  misc_feature (1)..(1): n is a, c, g, or t
naattctctgtttagaatgaatgcaaaaaaaaaaaaaaaaaatatgcaaacacttataccctgcagcaaaggatcacttaagcagggagagtctgactatctatttacttcatgagcacttatcactgtgagcccacagcttttacagcagtgcctgattagaatgagaaagattagcagagacaaaaacaaggagctgatgctgtactatcatttagtgagtcgtggggaaaggctcaaggaagaaatttagtgaggtattcattaaatgttgatacaacctaaatcttcctattcatgagtactcccctgtatacctgaagtaactgaaatgtgggaagcaaaattatcttgctgaaatataccacactttcccaacactggaattcaacactgtccaacagaatgataaattgtaggcccagagagaagtatttctgagtccaaccatgacatttcacacaggaaaggaattcacatctgttcttaaatgacaataaaccagaaagatggaagattgattcagaagcttctgcaaatgttatagctgttaaagtacgtgaggactgacgacattcctttctgtaagtgtagacaccaggctagtaattccttcagcaggaaaacaagctaacaagcagtttatgctccctgaattgtgttttctaaacataaaatgaaggggctgaggctgtggtgatagctcactttgaaagttcagcatttgcttccataaacatctctgagggctgggtgccacgacctgtgcaaggagtttgacatctcttattcaacttcttaaaactatgagcaacgctgaaaatatctgcaagtaaaatggttcttcctaacaaaatgggatatagagacacatgtcatagtcaacgttaacatgaataaaagattgcatgcagtagtggagatggagcccacattaagtaaatctatggtgaaacatgctttaatgttataattttgattcaattaaagtaaaagggaaagaaatgaattaaattccttttttctcctgcttccacatttcctttgtttctttcctgacttcctccatgcccatttttctggtctctatgaagagttatttttctctggaaagaactttgatggataaaccctcagcattcctatagt

SEQ ID NO: 52200 - DNA, 851 bp, Bovine  19866881938082
  misc_feature (1)..(1): n is a, c, g, or t
ncattatcatttctttttccaacagattgcttttgtaattatattttgcttatgtcattgccattactttgcattctctgagaactcaccaaggacaactgaggtgaggaggaaataaaatgacctagagatatactagactcatcttctggaggtcagaaacctgaatgtacaatattacttcttcaagttgataccctaaccaaaagaagacagataataagccttggtcttatgttaaatgcaaattattctggagaggcaatatattcaatcttgttagttgtttacatcttactgaaaacaagtttataacatgatttgttgatgagggtgaggctggagatgaggaacaaatgagaggtttgacaactgtagagattaagggtgatgcacttctaagggctgtaatgatataaaaagtagacactggggctactaaagcccaacttttcttacttaacagttatcaattcttggatcataaagtggcctatttttttttttaatgtacttggaagctgattgcacactgaaatgcttttgaatttattttctacacaactaaatgctactccttctgattctggatgcaaaagcaaagtgctggcattcagctagtcacattaatgcagtataaccttactcgatgctttggagagaatatgaacacatagactcttatttcttttataaatacagtaaagtttcattacactcatatctgtatgctgtgcatgtgtatagtatagctcactttctgtagtagactcaaaagatagccaacagcaatctatccttcctcatacaagcattcctttctatccatcaagaaatagagtatattttcc

SEQ ID NO: 52201 - DNA, 771 bp, Bovine  19866881989179
  misc_feature (1)..(1): n is a, c, g, or t
naactttctaaatatttatagatcattaaatatttgacatgaagattgggggtggagagaacagagccttaaaattagagtgttaaaatattcaaccaactaatggaaatgaatttttaaaaatgaaaactacctaaattgcattgtaaagtaatagaaaatataattttggcataaaataattttatatgaattgaaaatgctgttccttatgagggaggtcgatggaaaattgcttgtctgttccttgcattgtgcccatcataattcaagagtttaaacataaacaatgctttgaatgagctttgagtatgtgttctagtttactgaaatggccttgtttttcacttttataatcttttttgcttctgtcctaactgcttcaaaattagaagataatgttgtctcaaatacaattatatttgataccaagatgtgctgatttgatgattccttttattaagaagtgttacatgtattcactcacagaaacatgtaccctgaaacactcctactcaatttggtcttcaaattgtactcctctgcttttggctttgttgatcttacatagctttggggggaaaagtaatcaaatttgatctataatagaggttagaaagttttccaatgcaaaagtaaagaaaaaaacttgaattttttttgaatttttgatgcatgttgtttctgatggtttctaaatgtgtgcaagtaacagaacacagctcctttaagaaacaggtaggaaaagtagatcttctctaggaaggaaag

SEQ ID NO: 52202 - DNA, 2019 bp, Bovine  19866880294408
  misc_feature (1)..(1): n is a, c, g, or t
nagaggcaggtgggaaattgcactcctccctctgggcatccttggtaaaatataagaagagccaaactggcccccctcacctcctcttttccatgaaaacaccttttaaactgaaatcctcttagctgggaagagatatgactcacagatcttcccaaagaagagctcatccaccccaggagaagatccagttgtttagctgatctgagtacagggacctcagtgacatcccattttccagttcagactctgtcccaagctagcagcaactaccaaaatcccaggtacttagaacagggactccctttggccagctggacagatatagacccatgcaactgggttcctcgacctttggggccagcgttactgtgtaaattgggcttccctgatagctccattggtaaagagtctgcctgcaatgcaggagactccgattcctgggtcaggaagatccactggagaagggataggctacacactccagtattcttgggcttcccctgtggctcagctggtaaagaatctgcctgcaatgtagaagacctgggtttgatccctgggttggaaagatctcctggacgaggcaaaggctacccactccagtattctggcctagagaatttcatggactatgtagttcatggggtcacaaagagtcagacgggactaagcaactttcactttcactgtgtaagttttgcaaagcgaaaggacaaactgacagtttttctgattaaaaatgagggtcttgggagcagacagggaggttgagcgtggacccggggggctggcgagggtgggggtggggggggcgcggcgaggaggccttcacatctccgcggccacggcgcgagtgccactacttggatccctcttctggcttcggagctgatccagaaggccaatctggctaagcaggccaagcgctacgatgacatggccacctgcctgaaggccatgatggagcagggtgtggagctgtctaacgaggagcacaacctgctgtcagtggcctacaagaacgtggtctggggccgctggtccgcctggaggttcatctccagcatcgagcaaaaaaccgacacctggacaagaagttgcagctgatcaaggactcccgggcaaaagtaagagtccgagctgaggtccatctgcaccacggtcctggaattgttggataagtatttaatagccaatgcaactaatccagagagtaaggtcttctatctgaaaatgaagggagattacttccggtaccttgctgaagttgcttgtggtgatgatcggaagcaaacgatagataattcccaaggagcttaccaagaggctttcgatgtaagcaagaaagagatgcaacccacacaccccatccagctggggctggctcttaacttttctgtattctactatgagatcctcaataacgcagaactggcctgcacactggctaaaacggcttttgatgaggctattgcagaactcgacacactgaatgaagactcgtacaaagacagcaccctcatcatgcagctgctgagagacaacctcacattatggacatcagacagtgcaggagaagaatgtgatgcggcagaaggggcagaaaactaagtgcatacagggtgtcatctttcttccccttgaaacctttttactcatctccattccttattccatttggatttcctatagcaaagaaacccattcctgtgtatggaatcaactgtttatagtcttttcacactgaagctttgggaaaactccattccttgatttgtgtttgtcttagccttgctggtgggcagttactgctgtagaaaattattaatagcttcgtttaatacaaacataagtaacttccaaacacttatgtagaagactaaaaatgtatctggtatttaagtaatctgaaccagttctgcaagtgactgtgttttgtattactgtgaagatatgaaaatgtagctaattacaatttaaagagtggtctacataacttcttaatttctacattcc

SEQ ID NO: 52203 - DNA, 1464 bp, Bovine  19866880297693
  misc_feature (1)..(1): n is a, c, g, or t
naggctattgcagaactcgaccacactgaatgaagactcgtacaaagacagcacccctcatcatgcagctgctgagagacaaccctccacattatggacatcagacagtgcaggagaagaatgtgatgcggcagaaggggcagaaaactaagtgcatacagggtgtcatctttcttccccttgaaacctttttactcatctccattccttattccatttggatttcctatagcaaagaaacccattcctgtgtatggaatcaactgtttatagtcttttcacactgaagctttgggaaaactccattccttgatttgtgtttgtcttagccttgctggtgggcagttactgctgtagaaaattattaatagcttcgtttcatacaaacataagtaacttccaaacacttatgtagaagactaaaaatgtatctggtatttaagtaatctgaaccagttctgcaagtgactgtgttttgtattactgtgaagatatgaaaatgtagctaattacaatttaaagagtgttctacataacttcttaatttctacattccctcccttactcttagtcagagatttcctttcaggattttccatcctcttaaagtattcctttttagtaggaatccagaagtattagattgaatggaaaagcatttgacattttggggctgggggaatcacagattaaatgcctcctgtatcatatgtgatggaggtcttgtgtatctgtgacaacagggagtttccttattcactcttcatttgctgctgtttaagttgacaacttcccttcccaataaaaactcacacctccaaaaaaataaaatgagggccttttctcctaattttgaagagattgggctgcctttctgagtgtctggtgtcctccgccagcattcagaagttgttttgtggaagttgctccacattcaaataatctttttttttttttttcgatgagtctgtgaggaagaaagtggtctccccatcctattcttccaccattttgggaccgccccttctcttgatttaattagaaaatgtctctccatctctgtccagtttctgagccctgtgcacattggatggtggacttgtccaaatgatcagagaataacattcaatttatttgccttgatgtgcataaggtttgctctggaggggaaaattggcacagcatgccatgtactgacacaaaatatgagctggttttcctcaagactagctctcagccagggacttggcacatggtagggactgacacataggtgctgaatgaattagtgaaagggaaaggggtccaagataggctggcttctccaccttcaagatacactatgcctttaagggagttttagaaccaatgtgcaagatactgatttcaatctgaaaaaatctctttcatggttgaaatggctcaaaattctgcagacttaaggaaaaaagtggttgcattaca

SEQ ID NO: 52204 - DNA, 1866 bp, Bovine  19866880401906
  misc_feature (1)..(1): n is a, c, g, or t
nacttagaaataaagacaaaagcacatatgtgcaaacttctacatgtagactaacctatatgatcatttgtaaaaaagaaaatattgctagataaaatcaccgagtaggctacatttataaggaaatgggaagagacacatttgtaattttaacaggattcaatggcatatcccagttgaacatgatttttaatttgatgttttattgtgtttataaatatctacttataggtcaataattaagaattgaagacagtgattttctcaagggcagtgaggtagaccttgtatgcaccagtagaccaaatacatttgtagaccttagggtcagaagatacagattccaccatgaatgagcaccaggaaagctaatcttgagggtttgaaaggctatcatcatctttcatgaggtcaggggatccaaactccctaagaaggcagaatagtaaggaaaggaagaactggcttgtatcagttggagatggcaggtcaaaactgtttcttttcaacctattttattgtttgcacatactagaaactctagagggacagtctccccacccactttgaattgctgaagcaagcatgctgaaaagaaggaaacacttggattatttctcttatcaacagaaaatagacttcttgcttaaaaaactagagaccacaaagattaccattcataacaacactgtaggaaaaaattctgcttctatgccccaccaaaagtctataaaacaatttaggaataaaaatcatgtcaaaatcttaaatgtaagtaacagatagctaaaggttataagctaattctaatatatgttggatattcgctttcttgagggtgatggaatataatgaacaaccttgggacattctaaccaatggttgtgaaggctgagtttcccaggtaacaacacaatagatgctctagaaaactggattaaaccaacagggaagaagtaatttaaaatgaaatagtgccgaggaaagatactacttgacatggtcttcattgtatatatagcccactcctttttaaaataaaatactccaagaagaaaatttataaaacctaataataaaagaacatatgtagatcctggaagcatccactgagctaaaaggcaagaaattaaaagtgtatgcatactccctatcttaaagatgactaaataaaagctctctggagttaagtatttcttagatctcctgcactggcaagtggattctttaccactagtaccacctgggaagcctgagagagagaagtaaatttcccaaggttatgcaactgacaaatggtagaaatcatttgacctagttgtcaggtcagttcacaccaagatgcctacccctagacctggggctgaaacatgtcaggggccaagtggccgcctgtgtgaatggaaatttcctaatttgtttcactcaggcccagaagctctgctgacactgccgtgcttcggtatgtggatccagtagattaggagaagggtctgggctctagaaacagacgtggtgcttaagccatgggttttggtaccagagattattaaaaagtgaaaagaccaaagagctaacagagtcctgggaaatatgcatagttaagagtttcaaagggagaaaataacaggaaaaaacttagcttccaagcaagaagaccaagaaggaaagccctgagtgttagaaggacactccagaaaaaaactaggtttataaaagtctaatgaggagacatttcaggaaaggagtggcaactctgcaaagtatgacagaaagttcaagtattattggacaattttcataggataaaatatttataagacaaaaaaccaatctcagaaactcatttctaaacctaaaaacaaa

SEQ ID NO: 52205 - DNA, 941 bp, Bovine  19866880485325
  misc_feature (1)..(1): n is a, c, g, or t
ntaaagtagaatcttaagagtttctcaactgagaattcctaataatactacaaagatttctacatgtttttaaatttttattctcttctaaaaagtcatttatataatcaatttttaatacaacaaaagatcttgacctttaatagactttataacttattttcctctgataatagcatagtatacaacatagtcaaaagacaggactttacttaatgtaaggaatttttttaatctacttcacttatttggtttacctcaatctattaataaatatttgacccctgcatttaaaggatttctcagtggttaatttccaaagtgttatgagttctgcccttttacaaaatattttaatacatatattaaatgtaaacgtgttcagaagtatatttagtataaagattgaattcatattttttagtatttactacctaagacataaaacactaccacaaaaacagaactataaacaataaataagcaaatgaatttttttttaataggaagcataatctcatgtaggagaagaaaaccaaataagtggacactaaagtcaactgagtcccagctttcaccaccttcactaagactacaagtagtctcaatcagtacctgtatctctctctcttctaaatcatctcatatcctgcggctccagattcatcctgtccactttcataaaactattcagtgacataccactgtctacagaatcaagttcaaaatccctggtctggcactcaagacttccataagtttggtctctatctgccacattgatcattattcttataaacaacattcagttcatttcagtcgctcagtcgtgtctgactctttgtgaccccatggactgcagcatatcaggtctctctgtccattaccaactgcggagtttactcaaacccacgtccatgagtcgggatgccatccaaaca

SEQ ID NO: 52206 - DNA, 805 bp, Bovine  19866880567950
  misc_feature (1)..(1): n is a, c, g, or t
nattgccccatgggtctgtctctagttgcagagcacaggctcagtagctgtggtgcatgggcttagttgtcctgtggcatgtgggaatcttcccaaatcagggatcgaacctgtgtctcctgcattggcaggctgattctttaccacggagccaccagggaagccctcagagatttttttaatgtggaaaaatgtgtgttttagcattagagaaaaaaatgatactaactaaaagtcattaaattaacagccttcctttaaatacaggaccatacctgaagggaaattatccatgtttatagtgaagattaactcaatcattaacttaatcaaaggacagaatttcatcatgatgcaatgtcaatttcagcagcacatcaagtgttatatgggccttgaaaggaatctcggagagtagcctttttgccagaccctgattctataccttccagattcccattccctaagagacaattactcccattgttagaatctgcgtgtgtttgttttccctcagttaagaaagtacagctatgcgccacaagcttttaaagcaccaaattgtcttactggcttctaaatcctagctctgtggctgtatgatgagtcagttagtgaatggctcttcaagatacctaaaacaaccagcacaaccagcttaagacagctctggaaatggtaaaatgtaaaagcagggcataaaggcagcaaacaccttaattcacatttcccaatcccagtaagtaaggcagaactgaatcccccaaaaacgctatgctgaagccttaacccccaatgtcagggt

SEQ ID NO: 52207 - DNA, 1245 bp, Bovine  19866880581157
  misc_feature (1)..(1): n is a, c, g, or t
nttatttatttgctgagcatgacaggaggaaaaataaaatgcagtgctacagtcttcacaattagaactcagtcaatttattgtccactgtcagggtgctgaatttcgatctattctttcaacataaaacacacacacacacacaaagactgaatatgaagcatacaacaaaatctattacacagaaagcagggaagacatataaagaagtcttttcctgtctacaaggtcatccttctaattcacggaattcatttaatcctgaggtccaattcaatgtgtcctcctctacaaataaatccatacaggttcctaacaagagccctaatagtgggttcagaatgcaaatgagaaaagcagccacaatatagacacggggagattgtttgggggcactgtaagcaccacaaaagaagccatttttctaactatcttttagaggacaataaactgctttacccaaaaaattaaactctaagcaaaaaatgaaactaataacatgtgctagagattaattttcaagggcttggagctgtaatttaccaaccacttccttcattagcggcaccaactcgtcattaaagacttctccagactgtgccttccattggaactcgtgattcacgtgactggcagagtaacaattattcatcattcaatctatagtaactgctcagcaagaaggaccaaggcctgacttcatttcgttttacctgtgacagattttatgagaagttacaaatatttaaaagtcctgctgtttaacctgatgaactagggacacctcaattttccctggaaagtcagtgaaataaaaatactcccagaaaaaacaaatatcatatattaatacatatatatggatcctagaaaaacggtactgatgagcctgttttcaggagaggaatagagacacagacatagagaataaacttgtacgagtgggagaagaaggtgaggcacactgagagtagcacggacatatatacactgctgctgctgctgctgctgctaagtcgcttcagtcgtgtccgactctgtgcgaccccatagacggcagcccaccaggctcccccgtccctgggattctccaggcaagaacactggagtgggttgccgtttccttctctaatgcatgaaagtgaaaagtgaaagtgaagtcactcagtcgtgtccgactcttcgagatcccatggactgcagcctaccagactcctctgtccatggggtgtccaggcaagagga

SEQ ID NO: 52208 - DNA, 988 bp, Bovine  19866880607076
  misc_feature (1)..(1): n is a, c, g, or t
nctgagatgctcagtcgtgcttccctctttctgaccctgtggactctagcccaccaggttcttctgtccatgggattatcctggcagaaatactagagtggttgccattttctcctccacaggatcttcccaacctagggatcaagcctgtgtcttttacatctcctgcattggcaggaagattctttaccactagtaccgcataggaagcacaaactcaaaaagactaaacatataatcagtggctaaaccacgttctttcttgccgagtctacttttttatgtctatagtctaaatatatatctgactggtaacttttaaagaataatgttgatgatgcttcggaaattgaaaagaggtcaagatcaatttgcttaaggaaactttcactgaacaaattgcagtctgtggaagagtatttcatacagttggccagaagttgctactaactgatgatttccctagagacatattcactatggagtagaattggcaaatcatttatttgaccaagttgttggggaaaatgagtcaacagaaacacagtgcaagataggtatcaccttacctggatgttcctaggggcccacttaaatagtcattaatggtttctggcttaatgtgtaactaaaattttgctgcattagtggagttctttccaataaaaccaaaatggacagatgtaacttgtgttaaaataatgaaacattatatttcaaaggcacggtggccagatgacattccaatatggttgaaaaatctaagcttgcagaactgtagaactgtttcatcagaaccttctccatcagcaaaatttacagacatacttatgcttcttatgcaaaaggaagaacaacataaagttactggtattcaggttctatctccttttatcagttggtgaagcaaaggtagtaataatttgcttcctaggaaaggtagataaaagtattgtggtctctttatctctttattctcacacaattt

SEQ ID NO: 52209 - DNA, 1164 bp, Bovine  19866880614615
  misc_feature (1)..(1): n is a, c, g, or t
ntaagtgatataaaatagaaaaccttcaaaccaatttgccatgcaatctttgacatttctggtaaaacttataaaattcattttttcaggatttctcaaatttaaacacaaagagataactagaagactagtaggtacaaatgaaccacagtacccgagtcatcagaacaaatatttatgatattatgatgaaagctgcttatattaactcctcattagaactttcattatttcgaattcagcagtaaaataaggcatgatgttgatgttatgcatcagtgaaacatacagtaaagtggcaaatattcttttggagtttggaaatagttctgaataattactgattaagaattaacagtcatattcaaatagctgaatctatagtactgataatatacggttcacattagtcatagaatgcagcagctttggaattagcattttggattctgaaagtctttagtttttgcagtttcattccatgtattatgagaaaagcaatgctttatatcctttaggaaaagtatgatgcagtggctccagtgctagatgaaaatggagagtattatgattctatttctggctcagacaattatttaactcttacctttaataaatactgtctagtttcaagccttgatgtcttcttttgtcctttgattcatttaacaaaatttttatgagggcctaaaatgtgtgaggggtttccaaggtggctcagtggtaaagaatctacctgccaaagcaggagatgcaaattcaatccttaggttaggaagatcccctggagaagaaaatggcaacccataccagtattcttgcctggaaaatcccatggacagaggagcctggcaggctacagtccatggggcctcaaagagtcagacacgactgaatgattaaacaacaatgtgttaggcatggttataaagtgatgaaatcagaaacagtctttgccttattagaatttatatgatggggggagaaagaagtaaatgaaaatgtatcagattgcagaagatttttggaggaaaataactccatggacagagaagcctgaccagccacagtcttccctggtggctcagacagtaaagacttcacttgcaatgggggagacctgtgttcaatcccgggggggaagatccctggagaggggaacag

SEQ ID NO: 52210 - DNA, 1391 bp, Bovine  19866880616576
  misc_feature (1)..(1): n is a, c, g, or t
natacaatgctttttttctcaccagcaataagacaaactgtttaaatcattatttacttcttttatagctaagggtgctctgtcctgactggctaaatgaatcctggaatatctccttggaaagaatatgtggcagaagtgctcctgtttaaatgcccgcagacgctgggctctgagagctcacagctgattgcaaagtcactgtttgcaatttacttctggcaactgttgccatttgggacaatgctaatgggccccccttgggagtcagcgcttatgctttccggataactcacttttcaaatcacccaagtgagtcaagtaatttttctttgccagcatgaactatgccaccggtgaaagttatgaattcatactgttaaaccaatgcagattactctaatttctacattgttccgattaataccaaatatagaagggcaggctgttgtcaagagccagatacctacagctttggctacaaggacaacaggtagtcatggaagtggagagctgactaagtcagtgccactcacccaaaaggcccattagtgttttagaaaaaaggagtttgaaatatgcttatttcttgcctccctagccttcgtgggctcctctaggccggctctttgttttctcattgggcctggacacgcccattcacgggtatgatctttgcttcctcttttcttctcacccgatacgggaaaggctttctatttcccttagttggcctccacaagctgtgtgcatattacatgcttctctctttccaaatcacttttacacaccacacagacacacacacacacacaaattagaatgattgggatggcaaaggggctgtctacggggaaggcaaccatattatggaaaagggagaacccatcgggaaatattttttacatcgtattgctctgagaagagttcctcttctccgtgactgttctctgctcaaacagcaagctgatgggctcggggtttctaatgagacttttatttacagctgggttgcggggaggagttgcggctcaggggtagtgtccggaagtgaggcgtgtagtataacacgggcctcacctgtccttaccgtgctgctggaagctgtcccgctcttgaagcccggtgggactcagctctcagcgctcctcaggtgaaccttaggggcggggctgcaggaatctgcaggagtgacagagtcctctggagagaaacaatccccgaggaaagggaatagacatcagagcggtgggagggcaagggcacgtggtgagtaggacgtggtgcctttgctagcagatcccccaggccccgcagactcactccacacagcggctgggggtgaccggcacagagaaactcagtgaaaatggctcgttcacgaaaaccgg

SEQ ID NO: 52211 - DNA, 870 bp, Bovine  19866880719962
  misc_feature (1)..(1): n is a, c, g, or t
ntactggagtggggtgccattgccttctccgaatcacagttctagtcctgttattaactatgctgttatgtaaatctgtgacttaagtactaatttctttttcccttctttccttgagctgtggtagcaaacagtgacgatactcaacacctgacaccaggaaggatgagtcagcgccaagggaaagaggcttttccaacgccaaccaaagatttgtatcagccatctttcagtccagcaagtcctcataccccgggtacggagttgtacttttaatgttttttgttgttactgatggtgggctctgtgtgtatggattgttttgtttttttaggcaggtctgtcctttgctggtgtatcatgatttttctttttgactatttggttttatagaggtttatgtttgttttgttttggtcatccataatacacttcaaatgagtgcattttcctttggagtactttttaattctctttacattctctaaaatatttggttagttataccattcttttaattcagtgattttcaaacttttggtctcaggactcctttaatactgtcaaaaattactgaagaccccaaagaatttttatgtggattaattaacctgttgatacatactgtactgcatattaaaactgaaactttaaaaaaatgtttactttgttttttgaattgatgtatagttgatgtacttatcagctatatgcatgtggacttccctggtggcttagtgggtaaatagtctgcccgcagtatgggagagccgtgttcagtccctggcttgggaagatccctggagaagaaatggcaactccctccagtatttttgcctggagaatcccattgacagaggagcctggttg

SEQ ID NO: 52212 - DNA, 1715 bp, Bovine  19866880853550
  misc_feature (1)..(1): n is a, c, g, or t
nttcccagcatcagcgtcttttccaatgtgtcggctcttcgcataccaggtgtgaatgcaaaactacccacaggaaaaatgcagaaggaccatagctctggtattaagagttatgagcttgagactcaaaatacctaaactaagcgaaccccgtgtttgccaagtaaaaaggaatggtaactgtcatgtatttcaactttcactgatgaggaagttgatgttctagttaagagtcaactaaatggtaacctgaagcctggtctctgaatttcaagcctacaggccattccattacaccaagcaatctctggatttgtcgcctgttgaaattattcctaaagtaccaaacaatgaactacttcacaaagcaaaagtttatgaagagagaagagttatgttaaaatacacagaatcagtatttatgtatttaaaaatactttcacaggaataggtgatgagaaatattccttagcaacattttcagcgcatcttctgaaaactttgtctatttcttgatataattttagggccggaagcgtgaactaaaagagagatgtctccaatgccaattctgagaatttttttttaccatttggtaaaaaaagaacgtttagttttattgtacatctctgtttgttagaacagaatagccttttcactgagtggcccaggtatatgcctaaggaactgtcccactgtttttgataagtcaaagtgacaaatgagaaggtgatgagtattagtatataacatgggtaagtgcttgtatttatattttactaagtaatataagcatgctatgggcttccctcctggctcagtgataaagaatccacctgccaatgcaggagaggtgggtcggatctctgggtaggggaagatcccctggagaacggaatggcaacccactccagtattcttgcctgaagaatcccatgatcagaggagcctggaggtctacagtacaaggggttgcaaaaaagtttgtaccggacttaaccgctaaacaacaaacaataaacagggtataatctcaactgcagaaataaacagaatcattctaatgcatgataaccagttagaggcttccatgtttgttcagcctaccacaacacagagattgtcttcatcccttaagctcataaaaactatacgagtttttcaggaagctttgccgctgccctccgcacatcactgtggatcatttaaaaccggaatgcatcaagaatcgcttccaggcctgaatgagcactacctcagttataaactaagacgtaaacacgtacagaatgctactgatcctggagcggagcactgtttacttacagggaagatactcatgtgatgggaaaacgtgttgcactatcctcttctggctcctgctccccgaaaaaacaagatactttgacaagctactgtgagcgtgggtccattcccaaaagtttcgacctctctttttaatcgtttaaggataaacgctaaaatacggacatccaaaacaaggtgccccgaggtgctgcctatggcataacaggaaggacatcactttggccaagaaactgtgtttgtaccctacacacctccagagagccaaatgggaagaatagacacggtcgttcactctggtgaagggaaactgaagaaatcaaaaccaaacgcgcttccttctctccccacccccgcggggaagcttgagcagaactagggagctcaag

SEQ ID NO: 52213 - DNA, 1608 bp, Bovine  19866880930170
  misc_feature (1)..(1): n is a, c, g, or t
ncagtctcccaggtgtgccctcacctggcagaaggggcagggagctctctggggtctcctttataagggcattaatcctaatcctgaaagctctctccccatgatccaatcatccctcagagcctccacctccaaatacgatcacactgagggttaggtttcaacacatgaattttaagaacacagcagtcagtttacagctcatacgagccacctcagaggattgtgaaaaatgtagatctggaatcagctggtccagggcagtaactcagattctgcatttctaacaggctcccaggtcacgcctaggctgcaggtcttgctaatttgaataacacatttctcttcatcccccttactttcctggaccttaccattcctaattgctagttatcacttgttcttccagtatgcatattcctcttgctaaacgtgaggtaccctgtcccttctcacaaaatcatcaagaatatcctaatacaaacagaaggccatgattatgcaatatctaggcagctattcatgggaaaagtcagctcagatatttgaggtcatgaaatcctatttttttttttaaaaagcaccctaataatcatcatctatactcaggaaaatattaaattgcccaaggttttcctgtaagtttccaagctatagagcacttgaacatcacacatcaccctataggaaacagctcagtcctacgttaagtctgctgctgcttctaacagctgcataggttatatctaataagataatcccatgtatgagcaaatcacatgcctccctcacaatcctctaagggctctttccatgaacataaaaaatcagctcctttcaaaggatttaagggagggggagtgtcaaacaatgtttaacaccacagttagcagcttagactgccctaaaccctctaagcacacataaataaagctagatttcattatgggcttgacagcactgtgtagccctacattttttattttatttcaatcccaggaaaaagcacagaggaagaaaagaggtgcttgtggactaaaagaatgcatcataaaatatcattctaggaagtaaagaaacaaagaaaagggaatgccagtgagtcgagaaatgccctcaacatatttagcactttctcaaaaatatatgaaaatctgatctaacagattgctctcactacattttaactgaagcccctcatttggaccatagtttcagcactggaagtctgactacaaaaaaaaaaaaaatgtacattttccaatagtgatttttaaaccaatgtgttcgctttgcccacaactcctctccaagaaattatgaatccctagtcacactctttcatgtctcaggacattagagactccttcaggtaaacacagcttatcatggtttgtctcttaccagagcacctctaatctactcagaatccagcagagtctctaactcctggactttgttttctgaaacaaccaattccacagacatcagtttgcttccagaagaatccgatcaaatcacacttctgcagaaaaacagatatgaatgttatgaacttcaagaatatgagttcatatttatcactccactgataagtgaaaaaaatta

SEQ ID NO: 52214 - DNA, 1092 bp, Bovine  19866880932613
  misc_feature (1)..(1): n is a, c, g, or t
ntggtgcatatataatctcttattatacatgaactcctgttctcccttattcttatacatcatgtccatcttcttcgttaaatcatagccctcttgggagggaagtcacatctacgcttatttcctttgggcctttccccccagccttgcaaaaactctctgcccattgtagctacttaataaacattagctcattgcctgacggaggcgactgacaacccagtcataaagaattcacagtggtgcatacatttatcaatgtaatttttttatgttcctccgagaggtgattaacaaaatattgtctaatcttaactgagatcaactctggcaaccagacaggaaaaggaacaaagtgtcacttacactcatggctcgctaattttgtgacagcaggcttttcagtgtgtaaaagttaaacttacataaacgaaagcataaaagaatgtgctcattggtgtggattttttgaatttgcttctttccttactgtccagatttgtaatatatgatatcaacttgggggccatacgaacaatcatacttcctaagagaaggaaaacatttcctcaaataatacaaaactgcaaaatattaatagcatgttgcttatttgtcagagggagggtgggctttgagtctggatactcctggatttgatcttggttctgccactttctcattatgtgaccttgcatgagtcacttaatctatcagagtcttggttaattcaactctaaaaaacatttttaaaaaaatctaccacacagcattcttataaggattaaacaagttagaacctgtaaaatgtcaagtactgttagtatgaaccaacccctagctaatatttttattaaattttcttccacaacagcttctattttgttacagatattggttgctagagggggagctggtgaggggaagaaattatgtaatcttttcacagatcagataatagctgtaacagggagcaatatccccacaccaatttctccccggccactgctccacctcctcactacaagcaaggttcatcagcaacagcagtcaaaatatcagtctgcagcatgccctgcacaacatttattt

SEQ ID NO: 52215 - DNA, 1147 bp, Bovine  19866880958715
  misc_feature (1)..(1): n is a, c, g, or t
ncttctggctgccagtatcattcttgccatatatctagagaaaacgggcatggcttctgagttgggagattcagggggtaacttacaacagagagtatttctgtgtagaaggaaaagggtagcaatgggcagtggtagccagcttcagaaaacgcaggactggtttgtgattaaaacctcatgatgtccagaaaaatgattatgtatgaatggtacattctgactgaatttgtcatcagccatagtgtttgattcatacttacctcttttgtaggaaaaataaaataaaattaggtacacatggctgttaacatcaaagaagcaatccagatctaaagaaagagctggacgctttcctcgcattatctccaaagctgtcagtgatgtaaaatgtgatcgtgagcttctgctattgtggcagtgttataagtaggaggggtcccagatgaaatgtgtgtgactggcacttacatccttgattttgatttataaaaacaagaacagaatcatgaagggagtgtaagatttaccctacctaatctgtcatgttgttgggttacatccaattttataacttctttcagtacagtttttccccccttccatcttactagaaaaataaatgcaatgctaccatttttagaaagaaaattccagtgtttattgtatttagagggaatcatgaatgatttatttatattaagtatgagagtttccagaacagtgattaaaaatgcttacaaattctagattagaagtgtgggaatttccttttgggataataaccctttagaaagttaatattataatataactcacaggaaccaattaaaatcaggtcatttgcatttattctcttcagagcagtgtatacctgttgcgatttttaattctaaaaaatttttaacttgccatcaaaattttgaacatttattgatatttggaaatcatagttctccctgatttaatgtgatcgaaaccattcctgagacacacatctcgtatcctctgattaaactcagttttacttctactaagttggaaatagggaatgtttaaactgcatacagtaattcttctccagtattctttgttggaaacatctggaacatgactaatgttttgggaaataggacctatgagtaaa

SEQ ID NO: 52216 - DNA, 808 bp, Bovine  19866880989400
  misc_feature (1)..(1): n is a, c, g, or t
nttgataagtataatgagggagaagcacatgaaaaaagtgagacctggtgatcaaactgagtgagcactttcctgaaggatatgatcacagagctgaaatctgaaggaagggatggtttccctcagcagtttcaaggtggggtacatctagaggtagagggtggagtgtgtttgaagtcccagaggtgggaggaagtgaggactgttggagaggttggaaagaggagtgtatggtagacggcagagaggggagatggaagtgagggagtccctggagaggaaaagacttacacgataaaaaggtaccacccaggtagaggcacagggttgttttttcaccccaatagttgttagaagccattgacagaattatgaatggaactgggggtagagggtccattaaatgatagaatttatctttggcttattcttttcagttcagatactgcttgttagaaaattatagtatttcttgttgttacatacagtgaaacacactgaagtacccaaataggagctaccgcagatataaaaatagggtcaatttcactctgcacaggagcaagagtattctgttttcagaaacaacaggattctgaatcaaagaatgaagctatgatttgtacatactgaaaacttcccccaaacagagatacatcaggttgttataaaagtattaattgcttacaggagggacctttgaggtctttgcaatatcaacttgggtgtaaaatcattcagctcaaagggagattgagtgttgtgtctatgaaaacacttgaagatggtaatattacattcccagtgg

SEQ ID NO: 52217 - DNA, 1603 bp, Bovine  19866881055877
  misc_feature (1)..(1): n is a, c, g, or t
nttcatcataatgaattatgtaattacatattcacaggttaatgacacctcaatcttgttgaaaagctctgcctactctttccacccacattgcctattcaaagttaggtgcatgatgtgacttttaatacatctctggaaatagttaaaaatttatgctcaggtgttagggttgactcctgagttttaattcagctcagagggcactctaagcgccaaataaatttttaaaaaacgaacccatctctttctgatgactacccgactacatattacaagttttaaatatattttttattccaattttaggagagtgtataataatgtaaagatgggaaacataggccacacaatccgttaaggtcctaaaattgtggcagctataatgcaaagatggtacaggaattatactttatttttttcaccaaaactttactctctttccctcagcccccatgatattattcaaaatatactttcttctataatactttcttaataaaagtgtaatttcactgcagaatgctgaaatgacttttatttctttgtatcttttaacatataaaagattacatattactactatagattattccagttaactttgttcagcttgtatgtacatatctacaaactttctgagaggttacaagtaattcagtttgtttaaaccagagtactttaattcttcgattcaataagttatcagttttaccagaactgaggcccattctctttcaaaaaaatatctatcaagaatctatattactccacctctttcctgaaatgaatgagaagagagcaagacgcctcaccctataaactaacagtgtttcaaaactgtcctttctgctgtccgctggaatgaaggtgccatattccagcattatcaggtagcagccatctacccacccctcccaacaaggacagatcctactgacctagatgacttccaccagattctctaggtaggtagtgtctctcctacccatctagaacactggaacccagaggtgacaaaatggagaaaaaaagcacctaccctatattccagtaacatctgtccggtgcattcctgtcaggatcatccctttgttctaggtcttgttgatactcctctctacttgttttcagtcagctcctttgggaactttacttttgtctagtgttcttacatgcacagctaaatgaggctcccagtcccattccccctgtcatttcctttaaccacaagcctcggtaacccccgcttagaaatgagctggagttgacacagccccatttaagactttgtctttgaatgtcagctcctttccagagatggctgaagactgcacccctagcgggccttcattgttgattacttcccactgttttttgctatcagccaatagtcttggacctgacatcatttgcattctaactctgccctcctttcttatattgttacaaaaatagtaccctatataaacacaaggatctaatctaagaacagggaaaattctgggagataatgacttttattcacaaatgaaggcaaggaaaagaaaggcactgtcacgggttaaaagagatgcatcagacacaccaaccaaatgcaacg

SEQ ID NO: 52218 - DNA, 1501 bp, Bovine  19866881075169
  misc_feature (1)..(1): n is a, c, g, or t
nagcagggctggcaaacctggcttgcaggtcagtttcagctcactgcttgtttttgtgctaagaatcgccaatttaatggtttgaaagaaatcaaaagaagttttcacatcatgtaaaatttatgtgaaaatcattcagtgtccataaataaagtttgattagaacacatccacgcccatttgtttctatattgtctgtggctgttttatgcaacagtggcagggtcgggtggttgtgacagaggcttacgacctagaaagcctaaaatatttattatttagtcttttacaaaaaaaaaaaaagaaaatcaccaattcctaggcgagatgcatacctgatgttacctctaacccgtggttctgtgaatgtctatatttcatttctctccagatcctgcccagggaggggggctgggtaaccacacttatctccatgataaaatgggagcttagagcaactgcacaagtcacttaaaagctacaatccaggtcttctggctttcagtgcagtgttcaggacgtaataaaagagttgacgcttattacattcttaatttgtgccaggaactgctctacataccttacccatattaacttatctgagtttcatgatgacgctgtgaaatatgttctattattattactcccattttactgatgagaaaacggaggcacagagtgatctagtcacttgctgaagaccacagagtgtacgggaggaggtggagccagggtctaggctagaacagctggttttagagccagagggctgaaccacgactcttcatccttctgggccatccgacactgtcccattttattactctgaaccaacaagcaaacctgcatgctggtgaaaatgcagtcaagtgatacactgtctatagaggtatatagaagtacactgtttaactaagagacaaaaggtttacagtattctgagtgggagttcctcggagcaaagggatttgtactagagccttaaactgtttgttccttttttgcctattgtcttatattgcaggttacaaatacaggaagtggatttacaggttgtattatctgatttgaactaagtaatcctctcaaaataagaggattgcctgaaagaatccatacaaagaaactgtgtagtgagccatttatactaatagaaacatgggcatattttgcaggtccattacgtgtaaagtgagagggaatcctttgtgagccaaagtgaaataaagcagttgaaaatccgagcagatctaacacaggtagtcttattgctctctttagaaacataattaatagtatccaagatgttttacagtcaaaacaggtggtggccactaacccacacacacaaggtcaagttgaacccttggacagtgaccctggatcacggagttcagtaagcattggatactaggaacattcagttagggtgtttgggcctgttcatatgatacataacaatttctatcatactctttgttttgcaagtgtaacagaacgt

SEQ ID NO: 52219 - DNA, 1275 bp, Bovine  19866881083657
  misc_feature (1)..(1): n is a, c, g, or t
nggtatgtgtcccaagggtattagacacagctttgaaaaatcaataaaacttgtcataggttgaactgtgtcttcccaaaagataggctgacgtcttaaacccagggatctgtgaatgtgaccttttttggaaatagattcttacagttgtagccaaactaaaataaggtcatcagggtgggctcataatctaatatgactggagtccatataagaagaggaagacactgtgtgaaggcacagagacagagagatgcgcaggaaagagggctgtgtgacaagagagggagagactggagtgaagccgccgcagacctgggggcaccaaggattgtgggccccaccaggagacagtgagagcgcccctgccaggagacagtgagaggcaaggagcgattctgcctcttcggaccccttagcaggctccttctgacaccttgatttcagaacttttggcctctagaactgtaagagaataattttctgttgttttaagtaaagaaaaaaaaaaaaaaaaagaagaagccactagtagattcagaatactgaacagaaggtccaaatccttgagagtaaagaggggtgtgaagatgcaaccgtcactgtgggtacacaatctgccgtatgatgtcatgagatcatcttgaaccaatggatttttgagtggtcgtccctcttcattgtcttggagggcagtttatgtggttgttgcagaaaacagcattgttgctcttttgagaagcctttccctttaacgatggagcagagctagttatgaaatacccaactgtgactaattttggaggagtaacgtctcacataaattgtctcctggagatgctgttggagccagtgaacagcagaatgatgatgagtttatctgtgctaattgtgcctttgaggaatttttttctggacagagcacaaagtagatcaatgatgcacttctcacctctttggcatgaagattctgattgttgataactgtggtaggcagaataatgaccctgaacatctccatgcccagtctctggaacctgtgaatatgctgtttcatggtaaaaaaaaagagctttgcagaggtaattcaggttatagatattacgatgaggagatgattgtagtggggccagtctaatcacatgatcccttaaaagcagagaactttctccagctggaggaagatgtagcagaaggaaaagccagaaaattccaagtgtgagaaggagtctatgcactgttggtcattctaagatgtcaggggtcacatgtgag

SEQ ID NO: 52220 - DNA, 1260 bp, Bovine  19866881109571
  misc_feature (1)..(1): n is a, c, g, or t
naactcaagaaaaagaaactcttaccattacaatcttttggaaataccacaatctatacaatgttactagctgtattttcactcaactcaattgatggaaaataatacagagactaaatactccaccaactttcctttgataccaaacttttgcatcaactggcctaattctaagaattacaaatgatacatagataagcataacttcaggccagggcagcaggtttatttcagaatctggacaatcctcatttcaaatataaggatctcacatgtaacgtaataatgaaagacatctcttcagcaaccaggtgattgactcaatttcagagttgtgttctccgttcaagtaagatttcccaccagctctcttaccatacatggagtcaacactctaaaccagtcacctcttgccaaactcatttcttaagtacagtgagtcatagtaaaacaaaatgtatccctaagcacaatgcatatatctctttattttttttaattttgccttcccatttgcttaccaacccagaatatgatttttcatagttgtaaaactgactttttgacctccttctctaaaagatattaaatgtaaagacttgatgggttcaaggtttacattttggaatacttgtagatgatgtagtatatttttatatagtatctttcatgatatttgatgacaattattgacacttaaactgataactgaattaacgatatggcaggcttatccttactttatgaacttgtgactaagaagcaatttgtatgacattactttgatactacagagatgtctatttcctcttcaaacatgaagcttatcctttaacactcatttaaaaccctcatgtgagccaataatttcaataactgtaaaataattctaatttaattatttctgccttattctgacattcctcagtaaacttcattacttggaacactttggttatcctgaaatatggttcctataggaaaggaaaaataaataataattctttgctttcagttactattttcaaagtaaggatattttggggactaatgagcaaaactgaattggggttttagataagatgaaaatgtattgatctggaaaggtggagatttttaattttaaaaaagtggctaagttacaaaactgtacattaagtatgataaaaccacttcaatgaaaaatacatatttatataatatgtctatgcatgtatagggataaataaagatacacaataaactgttaacagtggtaaa

SEQ ID NO: 52221 - DNA, 1825 bp, Bovine  19866881134990
  misc_feature (1)..(1): n is a, c, g, or t
nagcactcaaaagaagacacccccgggaccatgaaatctcctttcatcctttgagctgcttgaattgatttcaagctactaacctggatccttgagggaggatctttcggggataagctttttatttttttattttttaatagtatgagaccctgcttctgcttggcaattgcttttgaaaatttccgaaatagactgctaaactgcattttctttctaagactactttaggatcaatggcatttctctgctttaacagatgagagctccagggagaagatcctgaaagagctcccagatgcctgccgaaacctcgggtgctgacttactgacaagagaaaagcctttctaagagtgagctaccagcctgcgtttgcctgtgctctttcaaatagccacattgttaattactacatcggccactgaaccacttactctccaaaggtcttaaagtttgaatgaagtttcctcctatcaaggctggaggaaataatagtctccaccacacagcaaaatgtcacctagatttcttttttttaaggcatatatacttaaataagcaatgcagctctgagaaatgtaactaagttgcctagatgaacagcaggaagtggcctttagaaatatcatttgggagggagggaaatgtaagggaacaaaaagtaaaaagatgatgaaaagaaagggcatgtaagaatagttgggaaggcagttgctgtgaatggcaagacaaccttcattgggagactgtcagtttcagagaaacagctgggatgtttcattagggagtagatctctttgggaaaaacaataaaaagctaaattttcaaatcagaggactgttaaaaatagattactacctgaatttgaaagtagctgtgaggttacataagagaatatccctgttcttaggagatttcagctgacgtgacactgaaacagctataaaaataataataagtgcttatgtaagaataaaaatgtttcttattcttatataagaatatgaatatcttatctttatataagaataagaatatgatcatttaggaggatgggattaacatatacatactactatatataaaatagatgaccagcaaggacctactgtatagcacagggaattatactcaatattttataataccctacaagggaagagtctgaaaagaaatatatatatgcatatatacatatatctgagtcaccatgccatacatctgaaattagcacaatattttaaatcaactacaacaatacttcaattttaaaaaagtttaagacttatgttttatatacggagaaagaatacaaatgtgatgaacattaatgaaaggtgtatgtaggtgaatctaagtaatttgtaatagacgtataacttctctgcagatttgcaactttttcaaagcaaaaagtgtaattataaaagaagagatgaatgaaatttctgcaaagtaagcgactcaaaggaacaatacaaaaaagagtttacaatgaggatgctgaaaatagattcttagtctcttctaaacaccattaggagattggcaacgtgttccccctcataggactattactgtcattagagatgaggcaaacacattttagcacatcatatcttgcaagtaatcagaacgctagtctgtaccatggtgacctttgaatattctgcaaattgatttccaagccattcctgttccttcttgtttatagcccttggttaccctagaagacaatgagcaagactgaccagctgtgaggcctgcatttcctggctcatcagcactcaatcacatttctctctctcccagaggcctcatga

SEQ ID NO: 52222 - DNA, 2084 bp, Bovine  19866881146475
  misc_feature (1)..(1): n is a, c, g, or t
ntaatgcagccggtcctgctaatagtcatttgaaacttcccccattcgaatctggacattaattggaaacaaaaggagatgctttcactatgaagaaaattaagtgtggcatgtgaacggaatccggcgtctggcagtggtccttgctgcccatccttctggtaggagaagatgactaactgatgagaaagatgaaggaaagaaaaagtctttctttaaacatacatcttacaaagtcaaactcaataccttgaaaaagaaatagaactaatggttgaattcaagaatgcacatggaaaaatacagtccctacctataaataccttgttaactggcaacacgagttaaatacataaaacaaaaccagatgaaaagtcttacttgagagctaaattaaatataaaccaagaggcaaatatatactatagacaacaaggactctgatgagaaaggagccaatggtttaaatcaaagaggagttcctaagatctaagattcaaggaatttttcttacggatcaagatggaaaggagctggtagcgggcagagaaggaagcagtattgactgttcttttcctcaaatattaaaatgctatatggttggccataatcatcactcttcccttaggtcaacatacagaaagcactgttgataggccaagtgggacttagggtccttggtctgccactaattgtctacttgacacagggaaatgtagcctctttttttcctaatctgaaaactggaggaattgtagcttagatagtcttcccactcacaggattatatagagataacatatgtgaaagggctttggaaaaataacaagtagtcagagccttaaattatacattccagcacctagaagagctgctttatgttaaaaaagagaaagagagaatggttttcctgtgatttaacaaaggctataatttcagtggagtgatcatcagtagtattatctcctgaagcattctttaaaaagtatctgtcaaatgctgaatagcaaaaataccagtaattactgagatgtccttctcaaatctctcctaaactgagcacagtcatgataaacagctaacacagaagtagctgaccaatggaaaactgcagtggtgaacacactctggattagaatccaaaataaataccaaattgtttaaaaatagctgcatgatttcgaaaacactaaaatacaaacacacaaaattcttcaagttatttgggtaaattctgataaacatgacaaaaatatcctgaattttcaaatcagatatgaattttcccaagccatctcttcaatctttatagcaaagtttctttctagagaatctgtagaacctaagtggaactgtgcaggctttgtttctgggacacagttatgtagccttgtatatatttctatattttgaaaaattccatttaagcatttgtaaaataggataataacctctcctctgcccactgcatggtgctttaaaaaaactgagtgtgaaaatgtcttgaaaacaatgaggtgtttacagggagacattatttcttccagttttcattacgattcattatgatctaagattctggaatcttgtctggaaaaagtcagaggtggtgagcaggggaaaacctaaaaaatccttcatttaaggctataatgaataataaagggacagaatcctcattagtgggctttgttagaaataacacaaaaaagaactaaaattaatgagtattaacctgttagcaaccagctcctggttaccagaaatctctgtctagtcaaaaattaataagtgttatgttgcaggggaagagagggaaaaattaggagattgggattaacagatacacactactatatataaaacagataaacaacaaggacttactctatagcacaggaaactatattcaaaatcttgtgataacctttaatggaaaataatctgaagactatatacacgtaactgaatcatttgcagtacacctgaaattaacacaacattgtaaattaactatacttcaatttctaaaatcctatgtatttttttaaaagccactataaaaaagcatcatattgcataca

SEQ ID NO: 52223 - DNA, 1659 bp, Bovine  19866881158368
  misc_feature (1)..(1): n is a, c, g, or t
nccgagaagatcattggagctggaaaggtgaggtgctgtctagagtcagtaagcccgctctctgctccctctctcccccaggtcccttcaaggcccactcaggcactctgccttataaataaatgccttgaactaaactttttcttaatcaaatttccatctgaatcattaattttttgaagtgatccccttgtttgacagatcacatccatgtttaacagaaacttgtttttatgggggggcacttatgaaggtgttaacgaataaaacaagacttttaacacacctggactgcacaggtttttcagtgtggtgaaagggaaaaaacaagaaaggaagcatcagggcacctgatgctaatgcagtttggaagagttgctcgagcacatctcctctctaagctgctgtgttctcaaccacggaggaggtggtctttacagggagcccactgtgcctgcagccagccttcggacagctcttagggaaatggcccttctgtggcacagctcccactccgtgtcttctgtggatgaaatttgaactcagcgcctctgcaggcagccgagcatgtggagagtctggtcttagcctggctggggctcacccacagcagtcaggagcccatgtggggttgatcttccagcacctaaacttactcattcttctcttccagccctggcacaaaaactgtttccgatgtgctaagtgcgggaagagtcttgagtcaacaactctgactgagaaagaaggtgaaatctattgtaaaggtataatttaacttcagttactgctgtccatatgaatatcctgtactggctattagtgaaggaaatgtcaccagcaggggggaaatactttaaaagtggggaaaaggtgggcatagtgccactgggaatttgaaaagatctagggatgcttacagagaacagaaaaccacagaacattcttgaggacacggccattaaaaacgcctctacataaacagcagtcttctttcaacttaaatgttttaagcaaaacatatgaatatatgaaggtaatagacaaatatataactagtctggtcccaacttgcaactcagttgcgactatgagctgaatcctagcgaactagaacactcagacttaaatttgcagctttaagatagttactgtaaggcagagccagcaggtttttataatttacagaggtttgttgatacatgggtcttaagcagtgctagcaaagcagagacaacagcccaccaggctcccttgtccctcggattctccactccagtgttcttgcctgagtcgcacagttggacacgactgaagcgacttagcagcagcagcaaagcttaatggacttgcactaattcttcccttttctttttgtaggatgctacgcgaagaactttgggcccaagggatttggctacggccaaggagcaggggcccttgttcatgctcagtagaggtgcaaacccagaaccaagaaagatcacacactgagaatctctacacaatctaggcacagataatctaatactaaactactgtgaaattctgcagtactgaagtactgtatgttgccctgtacttggataggctggctgactagtaggaagacagcactgtatctttttgcttttattcatcagtatttcaagaacattt

SEQ ID NO: 52224 - DNA, 1780 bp, Bovine  19866881171235
  misc_feature (1)..(1): n is a, c, g, or t
nggcatgtgggatcttatttcctgaccgggattggacccgtgctgctgcagtagaagcacagaatcttaaccactggactgccagggaagtcccttggcattttcagcgatattctataacttcttgccagttatcctctaccttggttctgctgaagctttgtcacaagaaggggaacactgcttcatgtgtctcccacttgaacttgaaactcatttactttgataacttttcagcagtaacagaagtgagaagacacgacagtgaccacttctgccacagcggcagaaacagaaacccccgtgtagcatgaagacgtagcaaattctaatgagcatggaaaggtcaggcgttagttttacatgcttcttgaaaagtgatatgaggcctgttagcagttcttaaataatgttgcagtattggttttcatcccgaggttcatggcacactacctaaatagaacagataaaagaaaacagctgtgttgtggtttatgatactcatgtttgccattgacagagtcgcagttgaggttttcttttaattaatcacactaaagaaaggttccaaaagtaagtctctctttttccaatttaacataatctctatgccataaattaaaattttaaaagtcaaatgcaaagcagttatgaagatcatactttcttttctaagcttacagtttgaccattcccacatgcataagataagagagtagggaaacaagtagctttgctaaacattttggtatgtggaaaaaccatttcggcactgatgctatgggactgcaaaaaagttcaaacacaaatgaaacctgcctattgtaataaattactgggcacgttagagccttgatttgacccaaaatgcttcataacgggtgttttactgtgtctaaacctctactttctttgagtttaaaaaaaaaaactgcatcttttcctatctgtggttcatgttctatagctactgctgctgctaagtcacgtcagtcgtgtccgactctgtgcgaccccatagacggcagcccaccaggatccgctgtccctgagattctccaggcaagaacactggagtggggcgccactgccttctagggaattccctaacaattgtatttaaaagttaaagaaatgcaaatcaaaacaatcacaaggcaaacttagtaaactgcaaaattaaagacaagataaaatccagtggtggcaaggcagcagggaaacaaagtcagacttatttaaagtgggtggcattataaaccgataaaaactcttctggaaggacatttgacaatattcactctggaactgtgaccccaaaacataattgaaaaaaggggtaaattaattatatgaaataagctatttatagcagtatcattcacaagtgactaaaaaattctggaaaataagatgaacacttaataaggataaatggtttagtagttcatgagaaaatacaccggcctcttctctcattaatcctacaaacattcatcggtctacctactctgggccccaccctattttaggtgctaaagatggaacaaataacaaaacagatgaaaactccagtccttgagaagcttacatttggatgctggtggtagataaaaaagaaaataagtaagtaaagaacatagcctctgagaaggtagagagtgttttggagaaaagtaaaatggtgaaaaggaaaagagactgtcggcggggcgagagaaaagggtgtgatgtaacagcagtggtgaggaaaggcccaccaggaaggcgacagttggca

SEQ ID NO: 52225 - DNA, 831 bp, Bovine  19866881193001
  misc_feature (1)..(1): n is a, c, g, or t
ngtgcattaacaacaacacagtgttgttaacaagcaaagataagtatgaaccactaatcttttgcatgaagatcccacagctgtatgtataggaatggtggcaagagtatggaagataaaattgagaaaggcagtggaggttagaccatgtgggtttctgaatgctgtgttaagcaacacagagaatttcctcgtggtccagtggttaggactctgagcttccactgcagggagttcagggttagatccctggtcagggaattaagatcccacaagccatatggtacagccaaaaaaaaaaaaaatacagactcaattcagatcttatcccctctatttccctcagtggatgctgagttttttcaatcaggaaatgttaaaatatactcaacataaaacacaaagccgaactctgaccttgaaacaataattataagattttcaaatcaataactgtgattcataaaaacttgcttaagttattccattgattaaatgccacagagaatgctgtgaactatttaggtgttagatatctacagtgcttgtcttctaaaaatactcaatttgattaatgtagttaatctagttttttaaaaacactttctgtatgcaagatactttgttagcctctgggaaatacagtatttaaagctttctgttctcaaacagttttgcaggttacaagagccaaggcagtcacaaaacctcccactaaagagcataatgtgagacacgttacatacagcaacacaggggccccgatgggggagcagctacttctccagccttctggcccgccaagcaagggcacacagcagcgttccccag

SEQ ID NO: 52226 - DNA, 3340 bp, Bovine  19866881219607
  misc_feature (1)..(1): n is a, c, g, or t
nggaaggagggacaaggggaagaatacctggaagaataatcccaaactgataataagcagattcttcaggacataaagtggggtctagtggcaacagaaactaactggatgagcttctatagctgttgaattttacagacagcatatgttgatatgtttttggtttaaaaaacattagacaaaaatatgtcaccaagaaaatgcatctccaaatggcttaagtctgtcttcagcccccgcccgctccctcatgtgtatgcacacatgcacgcgcacgagacttgaaagacaggactttgtaactggggttgaccttgaaattatcttaatttggcttcacattaaatgtggtcttccttaagaatagtataacattaacatgttagaataattctaacaagccagggtcattaaagaaattaaaagtctaaattataaaagaattacacttaaagaattttcctttatacctggaactaacacaacactaaatcaactgtacttcaatttatttaattttttaattttaatttttctttagatacctaatagtagtagaagatgaattaatacatttgtaatgaataagagtatttgtaacttaaaaattactttcatataaatacacactaaaatggttttaatcatgttaaaaaaaccatcttggtaggttaaacatccaccccgcaacttccctcccgtaagtttactattacactatggcattccttgcaaaatggtaaagacttgagctcagccctctatgtaaattatgaatttcaaaattaataggtcaaaacactgagatttcattaatatcatatagttctcaatagaaccatatgccggttagttgcccatcaaggttatctacttttcccatattttggaattttaaatatctcgccaaagaataaagagtaagtaaattgtattttcttcagtccttcctccctttccctctgaacccactgagacctggtgcctgcctctgtaatcccactacagttactcacacgaggatcctgcatcgccaagtgtaacgctccctttgccatgcccctccaaaggtgctcctgaccgtctagtccctccaactgaccctcttctaattctttccctagctctcttcactctgctacaggtcttgtaaactaaagaatctcagggtttcattctattagaacctcttctcttgttttcaaataccctcttcatgcagctactccatattcacatcaccaacttagagctttatcctataccaaaatcatgtatagtgacctgcggcagaggttcaaaaactttaggaagcatcagaatcaccggcaaggcttgttcaaaatcagatttctaagctccactcccaaagcttctgattcaacaggttttagtaagaacccgagaacctgcacttctgataagctctcaggtgacacaccttgagacccattggcctacaggattctcccttggataagccatagggaccttaacttcaacacaacctaacgagtctcccagcatctaccctggtcgcttcaaaccatcttacacagcacccagagtgattatgctaaacttgatcatttcacgatccctttgtttaaagtattctaatggaccgtgagacataaatcaaagtccttaacaagacctctcaagtcttgtatgatctggcccttgcctactgagccacattactgtcactcattattattattatttttttttacacacagtggactcttagttctagcaaaagtcaagttccttgctgttccaggatatttaaacaagatgttctgccagaaatattcttcttttccctctcagcttaagtcaccttccttgggtctccttccttggctcccctccccaactaggtcagcaaaatcttctatcaccctcttatttcctcctcttagcactgtccacagtggtgactacacagtgaattgcacaattagtagtttacaatctgtttcccatcctttccccccccacacaacacagaggtcacatgtctatctgcttctgctgctaagtcgcttcagtcgtgtccgactctgtgcgaccccatagacggcagcacaccaaagctcccccgtccctgggattctccaggcaagaacactggagtgggttgccatttccttctccaatgcaggaaagtgaaaagtgaaagtgaagtcgctcagtcgtgtccgactcttagagaccccatggactgtagcccaccaggctcctccatccaagggattttccagggaagagtactggagtggggtgccattgccttctccacacatgtctatccagttcccactaaattttccgtcccttgcataatgaaagtcaaagtgttagtcactcagctatgtctaactctctgcgaccccatggactgtagcccgctaggctcctctgtccatgggattctccaggcaagaatactggaatggactgccattctttcattccccatgcagggagtgaacacgggtctccagcattgcaagcagattctttaccgcctgagccaccacggaatgacttacactcaagtatctgttgaattaaaggtcttgtaacattcaattattctgaaccctcaaaaggaaaagtattacgaaaaagggactagaggcattttttagtatcccttaataatcacaaatgaggaagcttcattaaactctatcctttgggattttaaattttaaaaaataatgcttgaaaagataaaatgaaatcttcctgtcacaagttcttctgcaacaagatatataggtatagtattgcttatatctgtaccaagagagtacagcactgatatccaaaagccattcagtaatatacgttcataatgtcccccagtataatttttgcagaaaagttattttatgtgtagacctacatcaaagagtatactcaggcttagcagcagaaccgcttttagttcatactaggaaatgggacaaggtagctgactggaattaaacctagatacagataaccacaaattatataataaatatgaatataactgagaattatattattatgcaaacaaatgttatatagattctgatctcctttcaaatggaaagactaccacctgcctgccatgtataattcattcaccaactctgaaacacaggctacatcagcacagcactggcctaagtcacaaacagagaacaagtataaccattttaaggtgtaactttaactaatttagaagaatttacatccaaataaaggttatctccattagagtagtcatttttagactatttcaacttgccatcatacaaaacaactctagaactcctct

SEQ ID NO: 52227 - DNA, 3184 bp, Bovine  19866881238171
  misc_feature (1)..(1): n is a, c, g, or t
ngaggtttttaatttttaagtcagcttccctagtgattttgattttagctctgagctacttagttagccttcagatgttctctgaatctctcatcactaaccattctccttttcttgcctgtttaagtagtccagtaaaaataccaattatgaatcatgatagtactcagttctatcacgaaacaaatatcattgcttaacattgggattcactaaatgaaaggtggagataaacataatttaagtgatgagacaaacaaaatatgttacaccattaatgcagagcaattacattcttagcatctttgactatattatcactaaatgattatcacttttaaaataattaatatattaatacatacttccatttattcatctgtttttttgctggaaatgttttcttgaatcttttaaaattatttcttgagactctattatatgccaagttctattcaaggtagtgggcatacagggcctgggatctaggaggtaggatctctactctgatggagtttatgttcagtggatagagacagacaagaaataggaaacaaaatgtagaaaaataaagtttcaggaattgctaactactataaaatagacttccctggtggctcagatggtaaagcatctgcctacaatgcgggagacctgggctcaatcccgggaagctcccctggagaaggatatggcaaataaaataaataattaaaatatggcaatgtgaacaggcagggagaggacaactgtagttagggtgattcagaaaagtcatctctaaggaaataaaggctctcacgataaggatctcatcaatgagaaggagctgtgggaagatctggaggaacagtggtctacacaggagagacgagtacaagggccctgacacgggaaaaaacatgcatatttcttgtaaaaggaaggactggcatgacattttatgtagtgaatctgtgcctgggcaagagataatgatggcttgaattagagttttaacactgaagatattaagtggttgaatttggtacatattctggagttccagagtccaaccaacaagacttatgtgggaggtatgagaacaaaagaggctcctggggttttgacctagctgtgtaagtagtgatgccatttcttgaaatggagaatatcaaggagagttctctttgcaatttatttattttataggaatttgagaactatataatacattcaagaagaactttcaagggagggaagttgaatacatgaatatgaaactcaagagccaggagtagagttttcatcaaacatttctctgttaccagctactttgttcatcaacttaaagttcatgagagctgtggccacctgcatcagtatgatataactggaaggtctaaaaaccaagaccaccctgtgtcaacatgacagatatttgctccaggaagctttgctcagagaagataaaaccataagtcaataaacaactccactgtttgctgcaggaaatcactgcaaatcagtttatctgagacaacagtctccctcatcaaaccatcgtttatttaggaagactcatctcacctcactgtgcccaccaatcctaaagttttatttcatgaactttcccagtctcaatctgccgcccactttgaaacatcagccataatacccttgagcccagagtgccgtgcgtgcttatgctcagtcgtgtctatttgcagctcctctgtccacgggactttccaggcaaaaatactggagtgggttgccattttcccctccaaaggattttcccgatgcccagatcaaacccgctcctcagtgtttgcggtatggtaggcgggttctttccccctgagccacctgggcagccatccagaccttccagatcctgtataatctttctctgatgcctctctctggattctgctaaggcactgttctcccaactgcagcaacttcaaatgaactgagttctgctttggtaactgagttacaaactgagttcagtttgtatcttagagttcaagattctttcctatttttactctcttgcttttagagtgttagtcctgtaaataagtgtttacccacatgctctgagacctaccattagcaaaatgagatttttgaagtcaggaggacccttagacttactccaatcaatttattttacaaacaaagctctgaagccagagcaattggaacttgtctagtgtcacagagtgtagcttctagatcttgagactgataactcccagtctggtagtctttatggaggaacacacaagctcatgttgagcaaggtgaaatatataatatatataataatatagcttattgtctataaaatttctgagaggggagagagtagtttgactgttttgtttttgtttaattgcaatacttgtgcaacacttgcccggctggcttggacaccaaatgcatggactcataaagataatagtaaatcttaatttacatttaccaaaaattcagatttttaaagttcattaattagcaaaaatatatagaaacatcagcttccaaatcatacaattactgatgtagcttcagtttttgtctaatctaaatacagaagaaaggaataaagacaaaaaataaacaaaaaacccaacttattgactcaattgtatatctttctctaagagcaggatttgacctgcaaaacattcaagaaattagaatactcaagataaggggtatctttgaagaagctgaaatatacaaaactgttatgggtacatcttcccaattttgaatgaaagctgataaacactggaaaacttcaaacattttccaccataatatcgtaccattgcatggatacctgtgacatttccttctcctcattcctttatttcagaaattgcttctgcccacttcatccgtattatgtcagtaggagctgccccatgatgactccatgcctttatggcttcaaggctccatgtctacgcaataattgattagactgagggtggacatctggcctgtgttgggctaatgggccaatgaactggagaccccaaagagttaagtccatctctcattgcctcgattgtgaatgtataaaactcaggtgctgctgttagctgtgttctgtcatttgccccgaggagcaagggaagccaagtttctacttgaatattctctagaccaagtattacgggtg

SEQ ID NO: 52228 - DNA, 1475 bp, Bovine  19866881250625
  misc_feature (1)..(1): n is a, c, g, or t
ntgaggaaaagagctctggtgaggtcacatagcttataaatgacatggttaggattagaatagagatctgtctgattttagagttggagctcaactcctttacactacactactttggtgagtcaaatttatattaataaactttgtaacattgattgaagtgattttggggattttttgggacctaatagtcatactaacttaaaacagtttctaaattatcactagtaacctaatgggatttctatgcatgaaataaaagtacttagttcttgtcaaatattagcattaaagaaataaaacattaacagaatacttctgattttcttttcagatgtcagtgctattcaaagcaaagcctaagctcttacttgacattttgggctactttttatgaatttgacagttgtgcatttggaatctgttcaaattctatttgtggctaaatcatgtgagtgccaaggagatcagtacaactgcttgttagcatctctagagtaatctttatttgtagactgtcttatataaatttaaagatgttaacatgctcaatcagatctatttgccacaggttatataatgttaggcttttcacagtagtttaacagaggtttggagcaaataataggtagtgtgagttgcttttgatttgaatacttttactcagaaaaattatagacatgataaagaggaaacaattattatattttgttaagggtagaaaataagtaatagttgtagagtacattcccattagcctcacctataggtagataaaagaagcttacatgttttaaaggtttttttttttttttttttaaagcagggggcacagttatagttgagaatatgtttaataaatgagacattttgggacttccctggtggtccagtggctaaaactccatactcccaatgtaggggaccaggtttgatccctggctgggtaagtagatcccacatgctaattagatcccacatgctaagagtagatcccacaactaaagattttacatgctgcaacaaagacctcatgtgctccagctaagaccaagtacagccaaataaataaacaaaaaagaaatgagatattttaaaaatagattatcacacttaaaaccataattctttaatatcatgtatcatcaagtcatgacagaggatgagatggttggatggcatcaccaactcgatagacatgagtttgagcaagctccaggagttgctgatggacagggaagcctggtgtgtggcagtccatggggtcacaaagagtcagatacgactgagtgactgaactgaactgaagtgaacatgaagtcagtattaaaatttccctgttgtttttgtttagtcgctaagtcatgtccaactctttgtgaccccatggactgtagcccgccaggctcctctgtccgtggaacttcccacgcaagaatactggagtgggttgccatctcctcctccaggggaat

SEQ ID NO: 52229 - DNA, 1263 bp, Bovine  19866881337230
  misc_feature (1)..(1): n is a, c, g, or t
ntggaggttggaaaacttgatgggatttctgactgcattttatacaagaaattaggggcttccttgatagctcagttgataaagaaactgcctgcagtgcaggagaccagggttcaattcctgggtccggaagatcctctggagaagggataggctacccactccagtattcttggccttctcttgtggctcagctggttaagaatctgcccacaatgtgggagacctgggttcaatccctgggttggcaagatcccctggagaagggaaaggctacccactccagtattctggtttggagaattctgtggactgtatagtccatggggttgcaaagaatcagacactactgagtgactttcactttatataagaaagctaggtaaaccactgggccttagctttctcatttataaaaagaggagaataatccttattcacatggttgttggggaaatgagattacaaaatgtatgtcagagtgcctatttcatttcccccctccagacttgaaacttttgtattgggatttaactgacgaacaatgttgtggtattttcaggtgaacagcaaacggactcagctatgcatatacatgtatccattctccctgaacgcccccccaccccccggaagtgcctattcagtactaacagataggagaaatcaaatgttaaattacttaaaacatttatttgtcattagagctttaaaaaatattttgatgtatttatcacagactctgatatctacttatctttgcattgacccattgtgttacctttaaatttaccagtatctaaattctagatacttaattttctttcagtcaagcataatgttttctgatagaaatgaggcttaactgtattacttcttaatgttacaaaccacagggaatgttagataccttaaatttgtaaagctttaagggatatgtgttactgaaaaatctgagcctttaggctttctttacagaatttgtttttgaagaaattgtgcttgcctgtcatgcaatctgtctattcactgttgtgaaaaagaaaaaaaagtacattctcctgctattacagaaaaaaaaaattactgaaaatatcatctgtatgtttttagtgatctgagtgactgtaaaccatgaggagtctctatctgctgtgttttagtttaaaattcaatattttgtgagcagtcttatagacttctgcatcattccttatctaagctttttgctctattagctgggtattctttcatgaatctcaa

SEQ ID NO: 52230 - DNA, 1394 bp, Bovine  19866881353937
  misc_feature (1)..(1): n is a, c, g, or t
natttggagagaaaggcagttttaactcaccattccatagcttatcacatacaattcacagcttcccatttatatgctttctcagctcatttttgttaaactcaagagattctaccttcaaatcatgcttttatcttttaaaaaaacatttttctcccctatggctgcttctatctggatgcaaaataaagaggagtcaaactctgtttatctggcaacttttggttatcttctctaagttcaggacccattagcctctgccaggatatagtttatgatgtaggacatttatgctcttgtgtttctacttttaaacactctgtaggctgctccaccttgcccatgaatgtttaactatatgtataatgatcctgccagaattgatttttcattatagaagtcattttccgaagaggcttgtcactattttaaaaatcacattttagcgtgttgatataaaaaacagttctaaccgcaattttgtgtagcagtttttttcacagatagaagaaagggattttttttttaggcatttaacattattcatatgatattgataagttgaaaatattgaaaagtctaaagtatccatttagactttatttttgtttagaaaattaatttctaaacaattgaaaatgcagacaaacgtaagttaggcatgttcaagggtgctatgtgatgtttacaaatcaataatttttcaccaacataatatattgtatctagctaacagtcccaagtattcctaccatcctatatcaagaaaaatgagctgtaaatgaaaattaatgttttggtttttaaatgggtgcttcttttatcttttgtattagagatcttgcccttctagattttaattgtcctttcatctcccaccacttgttcattttcagtttaactctcatttctgagtgaataacgttttcatattacgttgtcccattgtctcgatcacctgaaatcaggtacaagtggtctagccagttctcagtggggaagttcagggagggttggagctaaagagagctgactagagaggatgatcctagactgccctctgtgataatttaatattaaaaaatgaaagctctttccttcacacacaaaaaatattcacaagggcttccagaaagagatgaaggatagtggttatgtttccttgggccctaaatcttttctgcagatcttcatgatagaatgaaggagggaaagaacatgtcattatttcttgcctccatgttcttgagagccatatatcctaagatatcatagaacttagcaaaatagcttggatgctgattgaaagccagactcagagtctagaaatgcaaaataacagcccatatgccaaaccacatgcatcgtaagccttgatacttctgaaggaagat

SEQ ID NO: 52231 - DNA, 1173 bp, Bovine  19866881373658
  misc_feature (1)..(1): n is a, c, g, or t
nctatttccctaggctcaaaaatgtacctgataaacagcctcaaatcaatctgtctcctggatgaattgtcctcatagcttgaaaagcttcacatacattgtatattcagttcagtagtatggttaacccaaacccttgcaaatttttttcccagtcagagaaatgagaaaagagctgcattttaattttattctagtgataagaaaattagttattttgtattaaaaaccttaatatggtctgaaaatcttaacaatttttttttatcatctgaaatgactttaatggattttctctagtatgcaattaatataaatccattttcgttttattgaggtcaaactatattcccttgtcttgctccccaggagaaggaaataaggtaaaaattagctcactgtggttatattcattttatttgctgcataaagcagaggactagcaaaagggcaagctgatacctcacaaatatcaagcgctttatgttaaggcacagttcctgtgatgtaaggggaaaatcagaaagtaagaaagacaatccataaataaatgaatcaaagcaccattgaatgtagtggttattgacttttgaaagcttttttaaaaaaattagcatgtgttttacatataaattcattaggtattaagccacctaaaaaattaactttgagtgcttcatttctccatatcctcttcaactacaattagagctaactacaaatatatatttccttcctataggtgtgattttcttaagagctttcagcctaccttatcatttcagttacaagttaattgattactatacacaaatacataaggcacaattatgcttcacatggtataaatatatatatatatgacacaaatacatacacatacatatatatttgtgtcatatatgtatgacacaaaatatgtacatatacacatatatgtatatatatgacacacataaataaacactgcacatatatgctggatattgaaggttgctgtttttagtcactaagttgtgtctgattcttttgagatcccctaaactgtagcccaccaggctcctcgtccatgggatttcccaggcaagaacactggagtgggttgccacttccttctccaggggatcttcctgacccagggcccaaacccatgtctcctgctggcagacagat

SEQ ID NO: 52232 - DNA, 960 bp, Bovine  19866881533896
  misc_feature (1)..(1): n is a, c, g, or t
ntatgtctctttaaatcctttttggaaccaatgggaataacatcaaattgagagggattaaaaagcacttgtttcagaatcttacaagctgtgtttttattctatctctgctactgtctctctggctaatcttagacaagacactttaatttcttggttcttacttcttcatctgcaatttgaagtataactgacatgtcgtaaacaacatatatttaaagtataattcggtaagttttgacctatgtgtacagccatgacagcatcatcttgatcacgatagagggcatatctgttgctccccaaagtgttttcacgcctctttccttcctccttccttccgcccctcccatccttctcctgtcctcaaggactgatgtgttttccgtcactgtagtctaatgactgcattgtttccgaggaaaacagaaatgttaggctcaatcgtttaagtgactgaagggaaatgtgtaaacacttaaattcttttaaacttgagacttcctgtttgaacccttagagagaagtgtgatacaggggctagggcccttaacttcagagcaagcagacatgagcttgagtctcagctctgtcattcactagctgttatgaccttgggcaaattactcaatatcctgacgttcacagtttccccacatttagaggaaggcataataataccatctgtcctcaaaaagatgttgtgaaattgcatgcacagcagttagctcagtaccgggcctgttcatacaatatactcaaccaactaaagacagtcacctacctttagacatttcagagtcctaactcacattttaggaaaaggaaatgagaactctgaccatgcagacagggcaatcttaaggcaacaattttagaagttttatgtgaagattacgataattcactgtgctacacatggtgtccgtatgactctgactcaagtccttttgatgagca

SEQ ID NO: 52233 - DNA, 1553 bp, Bovine  19866881659214
  misc_feature (1)..(1): n is a, c, g, or t
nggaaaagcaaaagaagaaaaagaaaagtcctacagagagagaagattgaatcccgagaaaaattttactttcttcagaatcctattcaggctggccatgcactctctttttagaccttgtaattttcttgaatgactttgttttgacctgcttcaagttttccacatctgtctttagcatcaataatttgcagagagctagggtggggcagggagggatagaatgagagtttgggattgacatgtacacaccgctatatttaaaacagataaccaagaaggacttacagtatagtgcagggagtgctgctcaatcttccataataacctaaatggggaagaatttgaaaaagaatagacacgtgtggatatataacatgtggaggaatcactttcctgtacacctgaaactaacacagcacggttaatcaactatgctccaaaataaaataaaaagtgtttaaaagggaaacgtatcaatacacaaaaatacagacaagaaaatccctgatggtccaatagttaagactttgtcttccaacgcaaagggtgagggttcagtctctggtcagggagctatatgccaggtagcaaaaaaaaaaaaacataaaacagaagcaatattgtaagcaattcaataaaaacatttaaaaatagtctccaatgaaaaacaaatcttaaaaaaaatgcagacaaccaaatataataagaacccattacaaggactgaagaaatacagaggaaaataaatctaaattaaggccaattgaagagcaagaccactgtaatcaggagccaattaaaaatgcagagtggtttctccttgggatgagctattcgtattacttttatttcagcaacaggagacattcttttcctttcaaatctctctttcttcaaaggaaagatgtcacctgttcttttgctttaattgatcaaaaaaaaaaaaaattagcctgacaaaaatattcttaatataaatgagccatcttccgttgtgaactatcacaatttttatttctgtcagcacctatagtatagtgtgttcacccagaagtgtgcaccctctgctttattagaaagcttaatatgtgcttatgttcattaacaaaggtaatcctggattaattagcatccaaattcataggtcctcttttgtagagataagccctcgaaaattaataaaaatgtctaatttatgcaaatcaccttaatcagatctgtcattaatttcatgcgcatgaagttcctatttagaaaacgaagagagcttggttaaggccagaacacacgcaaatccaagctagagaaaagaaattttcgttcctaataaaaatgtggacaatagaggggctgcacacatggatgagaccttttattaatttgataacataagagattaacaaggccatcttcaagttatttcttctctggttaaattgaatctgtaagacagagtcagatacccgggggttgtaaaaacactgaaggctgggacaaatagcaaagccagctttagtagcagcatgttcatttttttttagactgagaaa

SEQ ID NO: 52234 - DNA, 1037 bp, Bovine  19866881916680
  misc_feature (1)..(1): n is a, c, g, or t
nctttgcaatgatttctgttcagactctagttataaggcactttgttcatccatgtagcatgtgagtgggggtgtgtgtttcaacagaagctttgtgcttttcacctccatcctcatctttgtgtggctaggtagtcatgagccccaaggggaagagaggaagtgactgcatttattcttagtgttcctaatggtcagggacagtggtctcatgctgtgggatatagcaaggttgatggcatttaatgaatgaataagccaatctttcagagcacgggtccccaaacctccagaatctaatgcctgatgatctgaggtggagctgatgtaaaaataatagaaataacgtgcacgataaatgtaataggcttgaatcatccccaaatcatccttcccctgtctgtggaaaaattttcttccacaaaacaggtccctgatatgaaagaggttggggacagctagaatagaggaggccgtgcttctcacatgaatccgtgacagaatcaattgttataagaaccaagatagattacatgagaggaggaagcaagggagtagaacttcccagctgctcaaagagctacaagtaaaggcctctgcgtctgtgcgtgtgtgcgtgtgcgtgcgagcccgtctgtctctttctctctctcacacacacatatacacacttcttttcctgtgaattactagaatgtagttatgccgttcaattttaccatctttaaatgaaaaattacaaatcaataacaactgactttttaacaaatagagcagaatttttacattatgtaaacaggttttgtccttgtaaagaaaagaagctatatgtttatttcaaggattctgttggccagtttttgggtttttttgcaactcttattttagaatggtctttggaacccgtgacgttcttttgaatattgtccatagtaacaaaacttctctcttccgagtgtatctaattggtgaaaataaaaagcattcagagccaagtccaatggttacaagcagatgtcctccctgggtgatataat

SEQ ID NO: 52235 - DNA, 1796 bp, Bovine  19866880391869
  misc_feature (1)..(1): n is a, c, g, or t
nctctttcctcggtcttggcagcctttgctccagtgtggagctgtaatgtgaggcaaatggggttggagaattcattcatctcaggctggagtatacatcagggtgctcatgagaacacaggcagccactcaggaacttgtgctgtcttcagtctactctctctgccccaccttgggttctagtctgcatgcatgcattaacagtgtccaggcttcctacagtagtcctgttagtcccaccatccctccaaccagccaagggggctctacttccctgtgttgtacaatatgcgattggaattgctcacttcccagggagctactctgtccatgtaatctcccttttcttctgaatcccctctcaggggcacaggtcttgacctggtcacttctctttcctttctactcacttttatgtgaatctttcttacagccttggttgtataagagactttctgtcagtctccagttagtttccagtaagaattttccacatgtagatgtatctttgatgtgttcatggcagggaggtgagttccatgtcctcttgctcgaccatcttggtcacactcatctattgatttaaatgttaatatccaaaaaattccctcacagatacacccaaataatgtttgaccaaatatctgggtgcctggtagcccaatcaagttgatacataatgttaactatcacaaagaggtttaaattataaacaaaagaattgtcaaacacttctctctaatacacaaatgtcaaatatatatatatatatatatatatatatatacatacacacacacattcaaagctgattcataatcttcatgttagttaccacatctaattaagacaaattcctatctcatgacatatagtattaatttctctttcagagtataccactgacacatgataaaataatattgtaaaatatttattatgctttctttccaagtatgatattgtcactaattctgaatatggtttcataaacttttcagctagaatgtatctttatgtgtttttagcataaggacaaaaattttaaatctacttttagcttttcttcattttggtgacactacactaatatttgtatttttccccatagatatgctcaattcatttgtcagagatttcactatatgattttggagattacataaaaccttccatgactccctcctactatttggaaaagtctcataaaagacaacacactagaaactaggatcaaatggcccattaatgtaaataagtctgatttccaaatattcatgaaaatgtttcctagtcaagcttttgctctggctattcttataaaatcatcatgcttacagtttcacttgtcccagaagcaaaagattcacattcatgaaactggagtattcttcattcttaatgattatagaactattttaaattatatcattgatactattattttattattaactgaatgcttcagtatagttaaatcattgatccactgtgtgaattcagaatatatacaactcatgatcacaacaacaaaatatggttagcaataaataaaaataatacataaatgatgtgagcagaagttatataaacagattgatgtagagtcataccatgtagacaatccttgaaatatagttattattcagaacatgaagcattttctgtattatgtatttgtattgtgcattatgctatattatgcataattattgggggtatttcaaatttatgaaatgtatgtgtgcaaacatttcatttttattttcctaaatcactcaaactcttatgaactt

SEQ ID NO: 52236 - DNA, 2479 bp, Bovine  19866880500300
  misc_feature (1)..(1): n is a, c, g, or t
nattatagaaataaaagataccaagagttggcaaagacgtagagaaattggaacctttgtacactcttcctggaaatgtatgataaaatagtacaacagttgtggaaatagtatggacattcctcaaaaaaataaaattagaattaccatgtgatctggaattccacttttggtatatctaaagaattgaaataaggatattgaatagatgtcttcatgtccatgtttattgcagcattatttacaaacaactaagatatggaaatgacccagttgtctattcacataggaataggcaaagaaaatagtatatatatacaaatgaaagaatattgttcaacctttaaaaagaagaaatttctgctgtttgtgacaggatgaatggacctggaggacattaagctaagtgaaaaaacctgcttagagaataataattcattacttcacatatatgaggtttctaaagtagtcaaattcatagtagtagagaataaaatagcaattgccaagactgcaggtggaagaaatgagttgttcaatgggcataaacttttagttatactaagtgaaaaaattctagtgatctgctttgcagcataacaccaagagctaacaatacagtattgtgcacttaaaaaaaaaaaaatatgttgagagtaaaactcaaattaagtatttttaccatccaaaacaaaaataaacacaggggtccaagaaaactttgggaaatgttggatatatctattatcttgattgtggtgatgcatgggtgtttgcatatgtccaaactcaaaaaattgaatacattgaatatgaacaattctctgtatcttaatcatatttcaataaaaaatgttaaaaaaagaaattctatctaaaataatgaaatgtttaacagtggaaatgtatacaaaagtagttgtgatatttctttaaatttaatgctgaccacaatactttgtaattttccttacaaaaactggattttcccagcatgacacccagtactggcatcagtaacagacacttgaaaacgctcatgccaaggagttaacaggaaatatcttggcaaattcagagtcaaaaggaaagcacagaattgtcagaacacatatcgtgtttctcagaattatctgtgtcatgttggaagtttttatacggaagtgtgtgttgacactaatgattaaggccaggattcctacaattgacaggaaaatgacctataaataatgacccgtgatggacttgtcatacagtcattaagtgaaatattctagtaccagtttcctccctttggtatcccagtttccggcttctgtgaagtacttttcctttgtaaagatcactcattttatctgagaccatcaagttttctttgggctttatcaaatgataatttcattctctcttttagtagataacaatatcaaatggagtttcttgagcctttctggaacacattttgcttgcacagaaattttctctggagagcttcttgtttctctgtttataaaaagcaaaataaattcttgaaatgttgaaagtttatttttttaagtttaagataaaagctaattgttatgcattattaagcaatgagtttgccaattatttcatgtaacacaaatatttttctaataaattaattttagtgtaacttcttagaaaatggtattcagaaatgattcactattaaaattccattattttaccatgtatgttgcatgtgtgtgtttgtgtgttaatgaaatataaatttctggaaaaatcattttattaagtaaacactaggtcagagtttctccaactgaggactgcaactgtcaagggtcatagggcagtaacattagggaaatgaaggaagatgtcattctctttgagtccttaggaagtgcaacaggcttctcctctcctttgtaattgctccttttcatcccaaaaggcacttttgtggaccagtggtatactcttttttcttccttccttccttcctccttcatccttttcttccttccctgtcttcatgtttatgtttgggggattaagtgaaaaactaagtgataagcattatcttctaagtccacaagcaagatgctatgtatttaggcatgggggaaaaaatggggaattgtaaatcatctcactatgatcacattatgctaattcagagtatgatgtgataagaagtggcatgtaattaagcctgaggaatgcttacagaaatcactctaataccagagaattaatagcctataaattctacattcaataatttatttgctgttcattctaaatgataatattgagataattcctttttaaagaacacaaaatgaccagttttaagactcctttgtgaaaaggaaaagtgaaagtcgttcattcatgtctgactctttatgaccccatggaattctccaggccagaatgcggagagagtagtctttcccttcttcaggggatcttcccaacccagcga

SEQ ID NO: 52237 - DNA, 822 bp, Bovine  19866880554245
  misc_feature (1)..(1): n is a, c, g, or t
ntgccctgagccctgtctcccggtgctgggcagagagagcagcagggcagcacatagttcttacttctctgaaaggcagtattagggcctttctcaactgtgtcctgatttaaaataatccaaactaatatttctcaaaataaagccgtaatacaattgcctgtagatgatgaatcatttttcaaaaacatacatcacaaaactctagtcaccctatttatggatcagttggtgaaagttcttgtgagatacataaaacagtaactatgagctaaaactgatttattaatacttcaaattcaaaactgtgtgcattagctctatttttgatttggaccaaatcagcttgaagaaatcagatcattcttctcagactgaagaaattagaagaccaaaagagaaaagatgtttttacctactctctaagactctgatatttagttctggtattgtaaggaagtactttctgtattagccaaaacaattcttcatattctagactttagctttctgagggcataagtataacccatttaagtgaggaagaagcaacagaaaacagatgttcaggaatacttcaaacagcatgaatgactgtagtattttgctctgccccgttttccataatcgttttctggaaacaaaaaattcaatttcctattgaaattaaaatcctattgtggattttgaaaataagcagacttgccttttctaattgattaaatggagtggaaagggaaaaagaagaactggctctttgaaggtacaaatctatgaaaacacttggcatctcccgaagtctttttattgttaataataaca

SEQ ID NO: 52238 - DNA, 1612 bp, Bovine  19866880605282
  misc_feature (1)..(1): n is a, c, g, or t
ntgattttggagcccagaaaaatgaagtcagccctgtttccactttttccccatctatttgccatgaagtgataggaccagatgctatgatcttagttttctgaatgttgaactttaagccaactttttcactttcctctttcactttcatcaagaggctctttcgttcttcttcactttctgccgtaagggtggtgtcatatgcatatctgaggtatttctcctggcaatcttgattccaacttgtgcttcctccagcccactctaggagcctgattttttccccaagacaagtaggctttcaaatatttgtttaataaagaatttgttattttgccttcctttcattaatgctcattaaagaaagtagtgagttttgtttacataaaaaaaaagtattctttggattgacttcatatgtgctttaatttgtggggactagttctacaacacagaattgaagggctgatagaaaaaatattggataaaggtagtttatacttctccctggcctccagcaatagatttggaaacatcctgtcttaattctcccagaaagaggaaactagctctcctcctgcctagaaatactacacaaaatgcaggaggaaaaagaataaacatgtttatttatttttcactgtgagtatatttcacacaggtcatcagctgacatcagcagatggacccacagcaatgaggcaggtaagataaattgcacccttgactgttaaaataaccaaatcatttcgatttgacactcaaataataatgtttaaacaattaggtttcttgaacagacaataaaatatccttttaatttaaatcaaatatcctttttaaaggcaacaatcaaacttaagatgtttcatttttgcatatcaggataactggaattcaaagtattaataccagtcaatgaagtacacagcaattaaacctggatatttgcatacattctctgtaggtgtcagcattgctttataacagttacacatacagaactgtgttttcatcatgtcacaggatataatttttatgttcaattcagacctaaaaactcagaagagtcaatccaaggctttagaacatctcccaaactattctttattttttaacataatgaattgtgactgaatgattaaattccaggtagttttttttttttttttaaagtatgtttatgtttctgctttaggcaagaatgagtattttcaaagttttgaatggcattctctgaatttaaaaaaatgctttgaaaatatattctgtaatattcttagaacctaattgtatttggaatacttagaaataatttactgtgaaatatataatttatttataagtaatttattatcatgatactttataaataatttataagtaatttattagcacaataatttattgtgaaatattttattagaaataactattccattatttattgtggagagaacagttaatgtagcattcttcagagtgattcaaatggcagatatgactgcatcattatgtacatttcgttttccttaagtttccagaaaaaaaaaagatcttagaatatgatgcagaagatgctataacaagcaaagccctttccattagtagt

SEQ ID NO: 52239 - DNA, 1653 bp, Bovine  19866880764938
  misc_feature (1)..(1): n is a, c, g, or t
ncctagggcttttttatttgattttagattttatttaataggactgctatgtaaacaaagcaatgtaataatcccatgttggtaatttattttaatatttgcttaagcactaaaaaattaatgtaaagtgaaaaatatgcattaattcactgtcattagcttgaataaattatacatattacacagagctattatacaatgtacataaaacataaacacattatatatgatatatatgttatacatatattgtatatatataaatgttatactattatatacaaaatagtacatatatatacagagtttataatatatacatatatggattatgtatactgtatattattatttatgctatattatgttatataactatatgtaggcatattcttatactatctcatttgatagtcacagtaataccatcctgtattaacctgattttctagagaaagatacataaaggtgctactctgtgtttgtaatatatctgaaaaacctgaaatctcctttaaacactatattatttcactgtttttctttactttcttcagctatattaaaaaataaacattctctacacctgcttgaaattttacagttgacttatacaatatcaagatgtactccatacaaggtacaagataatggaggtcataaaatattcttgaaatcttaccagatcagtcattgaaaccactaatctagagtattttccacagcactgagccctcagatcttcctcttcctttcatatatctctttagtctttctcaaatcaataaaagttatagttacatatctcttgtaatagataattgcaattactttgcatttagaatgatgtgatggaaactgtaaggttgtatataaaaaacaaaacacgtacatctcgttttactctgtctatgtctttgttgttactattctttatatccttgtactactgactagctgtctgactgtcaatcagcacccagaattgtgaacatttagtaaaaatttgtgctgtatgatctgtttgtaagctggaaaaccagacattctttagaaaaaggtttctttcactcttttgacatggaagttaggcattcttagaaaaatgtatttttcattttcatttacagtatgtgaattatgtacttagggtacattgaaaagtgtttatcttaatcaagttttcacatcaactcatccaaagctcatatctttcctaattcattgcaaaacacttttattattgaacatgtgcccagagacatatgcattgtatgccttttcttaaactaaaaataaacaaatagtgaattttgttacttgaacagatgccataattccatgttctatatctatcaccagactgtgaaattctcatttctctctaagaactgttagaagtttagctctggttttagatgatgttttttactagcaggctagcaaatgccatatgaatattctgtagacatttagtgctatggcctgtgtttccactgacaaaaataaactatttaaagacataccaatttctgatgctgtcagtatccagattggttctctttatacatagttgaaaatgttacactgttctatttgacatgtctctttaagattgttttggatttcagtttagattgacttccatagcag

SEQ ID NO: 52240 - DNA, 1657 bp, Bovine  19866880866920
  misc_feature (1)..(1): n is a, c, g, or t
ntcagagaggactttttaactaaagaacaacaaactactacaaggctaagaagctaaatgttcaagacaaggttttcctcaacctgtcatcgaattagttcaaatctttatgtttccttatttttaagcatttctacagatgtattggatttactaaggctgctatcacttttaatacaaatatgttaattcagcaggttttagatgttaagaagaaaagatctgtaggcactcaaaaacaactgagcaaagctacttctaaaaatagaagagaaagttacaatttcaaaaaaaaaaaaatcaatagagtagatactcacatgctcacagcagctctcacctttagctgaaacagagggcaacagaaagtgcctcatgtaagttaatgtgtggtctgtggttaaaggttggtaggatactttgatgtgcaccaaatttgagctacaatttatgacacaaactacatacacaccttctaagccacaaaaacctgagaggcaaaactgtgatgtctacagtaagaaccaacatttttggtgcagaaagccagcagttgaatgtgtacctaacacctcatgctctactgccttagcacagaaagaaaaacaaaacatatacacatatacacacaaacacacaatttatctggtttacccattaaaactctgattttaaaattaaaaatatagaatatgtgatgagtatccactataagctattctaaatcatcatgttcagatccaagcaccatctcatagttgaagctggtttaaattaatctgttgtctatctgtaagtatttttgctatgattgaaaaaagtataataaaaattaaaatattggtctcatgtaccttaaaccctaagatgactcttgaaagaactgtctctggataagacagactatatatatagacacataaaaagcaaaataagaaaaaaaaaatctcttaccaagggagaggtgacttcctccagtacccatctcttacttcaatataatcataccagcacaaactacttttgtataggtccattgtagtaaaatttaaaacaatctgcaaaatggaaaaaaagaatacacaaattaaaaaggattataatttcatatggctaggaacccagatctactgtgcaaacagactaatagcaaattcttttttttcttcctatattagtatccaatattttttatttaataaaacctaaaaaaaaatccattttcccaacttaatgtctaacaatttagaagcccaatgccaataaatgaactatacatttcagcaattaaaccaaacttctataaagttaactgaacaattgtgagatgagaaatctttatttaaacattttattctgaattttcttagataaacatgacaactatgattttgttatgactgtgttttaataatttatttcagacatctataattatgttaaaataaccaccatgagccatattccaggaatataataccattgtgtacttgaaatgttttaaatacagctttagaattaaaatttctccatataactataatcaaagacagatgtcactatgcttctctaaattcaagaacatatattcaaagaccttttaagttagaagatcttgtacatgaccttttattttgtactttgctttgaaatgcta

SEQ ID NO: 52241 - DNA, 1839 bp, Bovine  19866880895236
  misc_feature (1)..(1): n is a, c, g, or t
nctcttacatacttggagtcctaaaactgaaccaaacatattctacccagacatcttgataaacacatgcaaagagttacacttttttcctttgttatagtctaatagcatgttctttcttcaaatgttacttgaaatgtatttattttcttgtggtgtgatccatatagggattttcatgtgcttgtagcaatagaaaaatcagaaaacagctgaaaatagctgtttgttcatattctttaatgcctgtaatagtggtgatgttatcccctgataattttttggccctattttatgccaagaaagaaaatagcttgagcaataaaaagtcttaagtatgtcatgattgccataataatatagtgcatagtgcagccgaatctcagaaacccattctggcttgggaaaaaggagaaatattccacttctggttttctgtgctgtggcaaactgaagaaaggaagcgctgctccctaaggctggatggtgggagctcgcaacatatgcatttcattatggagcctggcagttgtgcagagtagcaggaattgctagttaccctgcacaggttagagacactctactctcagattgctgggaggtagactgtgagtctcagggaggtaaggggttaggacactgtagtcatgaccagggaaatagacaccgttaaatcataatgaaaagtacctcaagatgggtgaccttgcccatattatgagaagaaacatagattccaagaaaaggatctaaggagaaattaaggttttattttgggcaatctcatgtcacatctccctgtatgcattcagatatttgcctcctggagccacttagatagccagggggttggaacaggaaaactaatttcaacattggcaaccaaagggatttattttttgctgttgaatcttggctgtaatttggggggcatttgagggtcctctataatgaatcaaaatataagacttttagagaactgtttgcaaaatagtttttagaaagattgaggtgttcttttccaagagaatattttctctaaatttcaataatgtacattcacttcactggcataccatgagttaaattactaccagtttttattaaaaactaattttcagacttttatcaatccagcatctggggaacattgtttattttaacttgcatttttctgtaggtaggtaacccaattatgataattacattatggaaaatgtattaccttctcctttgctactcataatttattttacctggttttgtagcttagggtaaattgttgagagtcaaagagcagtaagaaagcattttgcaatctcattgctatgtgagatatattaaatctgatacttttttgaatgcaaagatggcaaaccaaattctataaaggtgttattaaaatgaaaaaaaacccataatattgatacttaaaatggaaaactcaggaaagaggcttttttgttatctatttctctgttgtcctttattgttatggtcaacttaagttcctttctctaatttgacttaaaagtgagttattagtatgttgagaaagtaaaaaattgaggcattaactgtgtttggatatagcatattttaagaaggaaagtgaaaatttactactctctaagtttaaaaaaatttgtcatggttgcagaactatggaatgttaaatgtcctcagatgaattcacagtattcaggaacagtgaatttattaatctgtctcatctttaagataattattttgttctgtattttgaattgcttcattacatgaaattaaactaatttggggggatcagtcacagttagttgtatgcttagaggaaaccaa

SEQ ID NO: 52242 - DNA, 1528 bp, Bovine  19866880899521
  misc_feature (1)..(1): n is a, c, g, or t
naactaaattcatcccgtcaccactttgggggcctgaagtctggaatgagtcttaccggaggctaagatcaaggtgtctggaatgctgttacttctgaacgcttccaagaataactttctcaccttttccaacttccagagttgctgtcattccttggcatatggtcacatcacttcaacctctgcttgtggtgtagcacctgatctgacttctcctgattcctttcttgttaggatccttatgattacactgggcttgcctgggtaatcaaggttcttaattttataagcaaagtgcctttggccatatgagttaacatattcacagactcagggcatcagggcatggacatctttgtgggccactattctatctacctcagtgagctccgaggtgaagtttctccaggcctccctgtgcttgagagagcatcttgccttgagggaggaaaaatgcaaagaaactatgcaaagaatactgacttgacccaggtcacttgagtcccctcaagacaatgcttgatatataccatgcccagaactctctgactgagggatctgcaggctaatttccaattatttttgcaattctctataattatgaatttcctgagaaaggtcatttgatattgaatgtacagtaaacctgaattcttacaaaacaaaaaataaaggaactctcgggttgatcccagtcaatcttaagggaaaatcaaccctgaatactcattggaaagactggatgctgaagttgaagctccagtgttttggtcacctaatgcaaacaggttattcattggaaaagtccctgatgctgggaaagattgagggcagaaggagaagagggcatcagaggatgagatggctggatggcatccctgatgcaatggacatgaacttgggcaaacttcaggagatggtaaggaacagagaggcctgacgtgctacagtctaaggtgccacaaagagtcagacacgactgggctactgaacaacagggttgattagctgtacatttcatcaaatccttttgcttaaataaaatgtaaatcaatgagttctcctacatacaaatggcaggacagtgtctatagttacatatagttaggcttggatgctcatgaacttcactgttaatagcagtgctttgtaccattgagaaagaactgtgatgtcaatactgaattatgtattgacagcttactttaattttgaaaatcagaattaatgtgttccaaataaaagaaaaccttcaaatgaactcatttaagctaactaataacaagaacaaaacaagttctgccctttttggtcttatcagaatttagattaaactccccagaggaagtggtagaaacaggtaggataaatgttcccaacaaaataatgactcatctggaagttcataattaaaatctgggccaggcatatcaaacacttttaccagtcagtttgacagcagaggtgtgtgtagcttggggacgtgaggacaatgggaaatcttgaagacttttcagcagagaaataa

SEQ ID NO: 52243 - DNA, 1019 bp, Bovine  19866881193321
  misc_feature (1)..(1): n is a, c, g, or t
ntagttggtaaaagttccaaggatagaagtttatgtttagaaggaagataggtagatggttttaaaataaatggtgcattgtggttgaagacatttttctcatggtagcagtctttattcatggaaggaggctttacagactctaacatatcctggaaatctcaaatttatgatgaggttactgtgtggaatgttgttaaaaaattctgtgcattttcatagtttaaattattggctatttaaaataaaggcatgagcaaaatcttgacttatagaatactgggttatgttatcacttcattgtttcattcattatattcatatccacaaggaaaaccaataggaaacagctttaacctcagtaacattattctacttttgtgtcagagccctctctaaataaaagttgcagtggtagcaaaatagatagaaaatttatttcacttttcctagcaacattttgcttattcattacctaattaatatcacaaaaaaaccagtaatttaggttgacatattacaaggcacacataatgtggagagttcaaatcatacgcattgttaaacaaatactcgtcacccatctcagctttcctgaagtctgtatatttggacctattaatccagtttgacccacaggagtgaaaagggaaaaacataatacatttttaaaaaacagctgtcaattatctgatgctttcagatttggtgattacagtaacctgtttatttctaggtatgcaagtatgattatgtggagatttggagtggtctctcttctgagtctaaattgcatggcaaatattgtggtgctgaagtgcctgaagtgatcacatcccatttcaacaatatgagaatagaattcaaatctgacaatactgtatccaagaagggcttcaaagcacatttcttctcaggtatcagtattctcatgttgcatgtgtattacagactttcaaggtggattggcttaaattgtatgctatccattcttcatagttttctataaatgagctttg

SEQ ID NO: 52244 - DNA, 1455 bp, Bovine  19866881234672
  misc_feature (1)..(1): n is a, c, g, or t
ncccaaagggagagcaacgatgtgagagttgatgtgctgatgtgccagaatggtgaaaggattgttagagttgccatgataggaagtgctgcttggagaatatgatgaaatgcaaattgaaatgaaaattatggttgtatttcagtgcttccatttgcaaagataagagcagaatcctgaaagtaaatatctgagatagggggcaaaaaaaaaaaaaatctttgagagggagttaaggaattcagtcaccatattgacaggtgatttacatagatattggaatgttaaagagtaacagtgagtcaggtgctgaaatattttaaggaatgaggaaatgtgaaaataagagcagtggatgatttggaaagctatttagagggtaaaagataagacttgattattggctactggcaatggagtttaaataggtgtcaagagtcaatcccaggtttctcacttgtgtaagtgaatgaataatctatccatttacattagagaaacattttagaataaatgtctttaggagataaattatgagtttagttttagatatatacagttcaaattttttctctctcatatatccaaatgggcattatgaggtgattgcttgaaatctaaggttctcagagaaaaaaacagacatgaaatgcatatttgagactcataagaaaataagcagtatttaaaaccatttattgttaatatcatctggagaactattaggaaacagaactgagccttgagacatatagaaaaaaaattaagcacaaagagagcaattttatttgttcaacctatcatatattaattcaggaataagtaccctcacattgattaatatttcctgatccaatattccatccccttggtctaaaactgaaataatatactctcacatatatccctttggtttacgccaatataacttcgaatatattgtaatcttttggagtgtagcctatttcttcctaggttgaatttttacttatctctgttgggatatatttagaactttctagttataggtctagacacaataaaggtgatagggataaatcttgaagacaatcagtacctcattgaaagaaggcttaaagtagattcaaaaatttcatctttattcatgtcttcccaaatatcctcactcctcctaatcaatgccttagtttccacttaaggatatttgaatagtctatgaaaagaccttacatttttattctataatatttaaatatataaatatttataaatatataagtattaaaataatttaaatgtcagccatttctaccctcccccaaacagataaaaataaatatgaatatacaaaagtaagatttttggggggggatgacaagaatttgagttgaaattattaaattcctgatcatgttattttccttttgtatggtctccaggacacacttaaatagcccttctaccaaaaccaaa

SEQ ID NO: 52245 - DNA, 2064 bp, Bovine  19866881248874
  misc_feature (1)..(1): n is a, c, g, or t
ntacttagttcttatgggaaatcctatccaggtcatcatatcacaattgaaaacaactgataatgaaaagaatgctaattggtttcctctctcttatcactgattcatacacaaactattatttccacattcttcctcttgtttgtactcaacttctatatctagactttaaagttttttggagtaattaggaactagcatagcattggtaaactatattgagtcttaggatgatgaatgtgaactaggaataatgtatttaaagctactgatcaaatatttatttaacaaccattgaacaaagtgctaatgacaaaaagacaagtttcagtttttgcccttttgaaactcagagtttagtagagatttgtaaacaaattcaacacagaatgatatgttcaataacagattgtagccaaagtaataaacatttagacaaataataagcatgctggccagcagaaaggggaacattacatcactcaaagtcctgtgttctgttctgaaccttctgaggccaaagcaacattgcctcaagttgggtggtgagccaagaattataggtcagtctttcaactctaccttcttcaaagagaatgtcaggactaaattcatgaattctcaggcttctactttctgtttaatttcaccaatatctaaagtctcagtgctctctttaaaaaatagcatcagttcagttcagtcgctcagttatgtccaattctttgcaaccccatgaattacagcacaggcctccttgactatcaccaattcccagagttaactcaaactcctgtccattgagtcattgatgccatccaactatctcatcttctgtcatccccttctccccctgccttcagtctttcccagcatcagggtcttttccagtcagttcttctcatcaggtggccaaagtgttggagtttcagcttcaacatcaatccttccaatgaacattcaggactgatttcctttaggagggactggttggatcccctttcagtccaagggactctcaagagtcttctccaacaccacagttcagaagcatcaattctttgccactcagctttctttatagtccaactctcacatccatacatgactactggggaaaaaaaatagcataatttattgcaaaaaatctgctttctactgcattatgctgtttaccttcctgagacgacgcccagcacctcttccttcaccttttttcccacttatgccacagtgttccctaaaagatctattccataacataagaaatcctctgtaccatcaacttctattcaggacgttttgcctgcctctgcctcaattggatcctaactttcttgagagcttagtttttacctctggccttagtatgtggcttttattttctgtcacctccatactttaataatgagcagtaagatgagcagatttcacaaatttctttcccactatccactgagcactcccactgttgggaagcttgcttctcagtccagtcactcactcccatcccttatgagtggcagataccaaccattcactgaacatcttgacacttgagtcacagataggccttcgcttcagccaagattcctgctgctgctgctgctaagtcacttcagtagtgtcgcactctgtgcaaccccatggatggcagcccaccaggctcccccatccctggtattctccaggcaagaacactggagtgggttgccatttccatcatcctataaaatatccaagttcatgattttccagtcctattcaagactctaaccacttgtttccaatgttttcctctgtttcattctgatacatattcttaaagccataatatggactggccataatctgaagtgaataagtttgaaatcatttttcagatttttcagttactcttacattgactaccctgcaactttttctttgtcccttccacactctctacctttactctaaccttaatattgacctaaccataaccataatcaagactataaacataaagacaatcataatccttctttcctgccttcctgttcaatatagattccatagctcatt

SEQ ID NO: 52246 - DNA, 1281 bp, Bovine  19866881297885
  misc_feature (1)..(1): n is a, c, g, or t
nctccaccaagctacaaatacctatttaagtaaaaggaatggaaaaagaaataaggaaaaggaaaaaggaaagcaatgaggaaagagacaaagtataaacactccctagattcatgtttctcaaccttgacactgttgaaactttggacttgttattcctttgttgagggctgtcctatgcatggtacaatagttagcagcaactctgccttctattccttagatgcctatagcaacccacctctcaaactgtgacaaccaaaaatatttccagatattgtcaaattcccctgggaacaaaattgctctttgactgagaatgattgccccagttgaacaatctcagaggaggtaatcttctacattactttaagcaaagtgccaataaattagcatgtattggcttcaaaccaatacttttatattaaacatagaagccagaatctaaaatgcttaatcctcttacattttattagttcattttattaaaaacgatgatgttgtcacttagtctaagactaccaatgcaatagctacagcaaaggaaaaaaaaaaagctagctagtttccagttttaaagggaattaaacacagctaacacatgctagagataatcttcatcattttaattttagttttactttaaacttgcttaaaggtccttgctcggttaagaaacacatattcactatttctataaaacacagtctaaggaataaaaggagtgtaaaaatttgtgaaagagtaagcaaatatccttcatttgattttaatatctacttaccaaaaaaccatggctttcttcatagtagcaaaagtttacaattgagatttttgaatacttgtttttttatttttttaacttttaaaggtgtgtgtgcttagttgcttagtcatgtctgattctttgtgactctatggactgtagacccccaagctcctctgtccatggggttctccatgcaaaaatacaggagtgggtacccattccctcttccaagggatcttgccaacccagagatagaacccaggtcgcctggattgcaggcagattctttatcatctgagccaccattctaaaagagtaatataacatcaaatttacatttcaaaactgtaatgtcaaacatgaatagtcaatggtcagagctatgatttttattttgataaagaatctggaattgatttaaaaaaaaatagcatgaacctagtattctccattcatctaatgcaataaagccttatacgatttaataagagttcaaaactgtagcgctcaat

SEQ ID NO: 52247 - DNA, 1234 bp, Bovine  19866881522746
  misc_feature (1)..(1): n is a, c, g, or t
nactagacggacctttggtggcaaagtaatgtctctgcttttcaaatatgctatctaggttggtcataactttccttccaaggagtaagcgtcttttaatttcatggctgcagtcaccatccgcagtgattttggagccccccaaaataaagtctgacactgtttacactgtttctccatctatttcccatgaagtgatgagagagtgcacattaaaacatttgtgtgggcaattactattatatatttcctgctgagatgttcccaggtgctgaaaaagttgtttgctgtgagaaagcataatgttcattttaatgtttagtgtcttttgtcttaataactcaatgtctcacagcatagtataaacatacacaaaagcacggccaataacataatacccatatgtttgtggatacaataaaacgttacagattttattgaaggtctggtttcacttctcactcccacagagggagtgactctcatgaagttggttcttcttatggatgattttatattttcactatgtatatatttctataaataatattatgaagtaatgaatgatttaaagttttatatgcattaattgagtacaccaatatgaattttttcatattgtttaaaatatctgtaagtaactggttttatatagtttaatgttatttttctttttagttttttttttctttttttcatataggtaggtatatatttcaatgtatttattttcaattttttcccaagtttttcactactacaagagtttgtaaaatgagtatttttgtacacatctccttgtgttcatatgtgcagatccttctaagtttcatacctagaaatgatattccttgatacagtcaactttactgtatcaaaaagatctttcaatatgttactttgttactttctaaaagccttacagttcccttggcattctgacttttaatcgatctaaaattaattttcagtgttgtgtgaggcaaggaccattatttgttcaactcggaaaataatttgtccttgaaaaatgcattaactagtttatctttcccccactgattttttccctggttttgtagtacaaggggtttccacattcctggattctctactctgtcccattggtggtccacttctgtgccagcaccatgtggtgttgcctgttccacttgtgtatgaatcttgataactgataggcagctcattcttcttcaaaatcatcttagctatt

SEQ ID NO: 52248 - DNA, 1134 bp, Bovine  19866880491377
  misc_feature (1)..(1): n is a, c, g, or t
ntggggcagcgtgggggtggggcggggtctggggaggcctggaggagccccccttcagtcaggggctgggcggtgggggctgagccaggagccttagcctagcccctgaactgcgggggccccctccacagcagtgagcttgcaatgcccccaccctgcatgacggcgcttgggctcccaggtggtgcctgtccgctttggatgtgggcacgtgggatgggcggagggatcacaggaagtggacgaaagggaagactctgaccgcccggaaggcccctccggaaccctagttgagtgctccccaaccctgctcccttgagtcctcgggatgagggagaagatgcccacacaggagccacctggggccttcttccgggggccgtcccgactattcatccattcgtcccgttctagcctggaggtgtagagtcattttttgaaaaaagaggaactttcctggtggtctggtggttgactctgcgcttgcactgcgagggtcgtcatcttggtgtctggtccttgagccaagattccacagggcagcgtggccaaaaataaaagagcaaaaaccagcgcctcccctgcctcccccgcctccccgtagtttatatcttagtgagtgaggcaggaaaggaaccagatagaagcatgtgtggctttttcagctggggatacactcagaagacagagcgggaggaggaacagaggatgtcagaggccgcccagtgcctggggcggccccctggggagcggccctgcaggagggagggacccaggtggtagggtagccggggcaggagtcccaaggcggctgagcctggttcgaccccctcaccccgcaggagaagctggaatacttcttcctcatcgtcttctccatcgaggccgccatgaagatcatcgcctacggcttcctgttccaccaggatgcctacctgcgcagcggctggaacgtgctggatttcatcatcgtcttcctggggtgagtgaggctggggtgcggggctgagccgggcggggaccccagggcccagaggcgggtgcagcggtgagtggggtggggcaacgggggcgccagcaagtcacaccctccccagccaggcaccaccagcctgcctgctctctgcacacacg

SEQ ID NO: 52249 - DNA, 3166 bp, Bovine  19866880606273
  misc_feature (1)..(1): n is a, c, g, or t
ntgtttttcctctacattccttactcttagtcacataaaatgttttttctttaagcccagaactgggctccccaggtggcactactggtaaagaagccgcctgccagtgcaggagacaccagagacctgggttcagtccctgggttgggaagacccctggaggaggaaacagcaacccactccagtattcttgcctggagaatcctatggacagaggctacagtccaagaggctacaaagagtcggaggagactgaacacacaggatgatacagaactgatgattacacaacaaacaactcagtttaaactctatactgaggattatataacaacaatgtatcctgctgaggacagtttctccttcctgaaaaccttctggctaatcctgttatcttaaaatgtaaactatgggagcgggtctagtaagatgtttacaaccttgagacactcttttaatttactgtaataaccagttaaaaaagtatatagctcccttgctaacactggaaaggggcgctctccgccccccttctgagtctgtgtgagaagcttcctctgtccctttttcactttaataaaactctgcttcacaaaagctcttgagtgatcaagcctggtccctggtcctgaagctcaatcttcttcggagatcatgaatccgacatcattcaccgtaagctaccgcacagtccataagccaagaactggggcagacacgctgcctacgtgcctattattaacccgactctaggaatgaggacgctaatagagcacagaggccgacagtcacggcgctaagcaccggctgagctcagtctgcagacactgctctaagaaccgcgcacaagctaatgcttccagcagccccatctccaccctccctgggagacagaaagacagacaccatgtggccacaggcctcgcctcgccagcaacagcgtttgtgcctgttcccctaatgtcgtcgttaaagtcctggggagggtaacacacagtcacctgggctgaataacgtctcaaaggtcaaagagcagctggcagggctgaggctttgacccaagcccagctctgccccggacatgtaacggtgctgcctgggcagctcccaggggctggtctctgcacaaaggcaggcgatttgtgaaacaccagaagagagagtgtgagagccagagagtcctccccctcgctctctgctgatctcacagaggagagaaccaggctcagcaaaactgaatcccgtgctcaaagcgcaacagcttcttgcgtttcagcagcggccaacttacatggtgcaacacagtcggctccgaaatcagttttccgtttacgtatgtctttgcttccccggccgggacgatactcactgtcccactggaattggtgatggtgctgtgaagacagggagcccgtggttacggtgatggacagactgacgaggaaggaaaagcaggacacgtaatgctccctggggtgctccttcagtgagaaggttcctgtcaatttatgacaatagtaacgtacaagaatccccttattttccttccattagattttacctttgctgaaaaaagcctggcttctctaacaattctatccagcagtgataggaaaatttttcattgtatgtattatgattaaaactacttaaaaaaacactaatccctctcctcccaaaatgaaaaaagaatacacaaacattaagggaaaatacattaaaatacttacaagcactgacccatgtactctaaccaagggccaggcgagtcggggacttcctggcccccttctggactcttcactctttgggggcatgttctgtatctttgccacaagtgtaaataattctggacttatgtggtacagaaaacagttaagagaagaccaagaggaactaaagatcaaggagccaaaccacaccaggtacaaagacatcgtggagctcagatgaccaagaccacgcgatattagtgagaacacgcactctgtatctttagaaacttttttaatgtgaacaccacattaaaaaaaaaaatccacatcttatttaagatatggtactggtagaattggttattcacaaggaaaataaatgaatttagatctctacttcacagcaaacaaaaaattccagactacttaaggatttaaatgtgaaagcaaaatttcaaaacatttaaaagaaaatttgggagactgtctctataacctcaatacagaaagggttttttttaacaagacacagaaactgacaaccataaaggaaaagattcgcttgtgtgatatactaggaactttgatccattgaaaggtaccataagagagagagatgagccacacgctggaaaagctatttacaacgcatgaaactcacaaaaacctgccaaccaagacacagaaaggtctgctacaaattatgaaggaaaaaacaatacaatacaattgaaaaatggacaaaagacatgaccaagttacaaacaagttacaaaagagcaagcaaaattggccaaaatatgtgaggattactagtcaaagaaatgcaaacaaatgcccaccgagtcgccagtttgcatccacccagcagtgctaagtgttggcaaggatctgagggtaacaggaagtctgagtgccaactgtggcagaactgacgatcattctggaaagcaatctgaaatcacctcataaaagtgaatacgcacatatcctgcaggctgctctctcccctcctagacacacgcttagggctgcttcccaaacttgggaattatcgtgacacggtaactgcaaagtcgccacgctcatacagcacgcggggcaaacagaagggcccaggcgccaggctgccccaagggccgtctcgcatgttgacactccagggacgcgctacccgtttgtaccaggagacgtgtccacgcgctcacagcagtgctgtgggggtggaatgtgagaaaccaccgaacgtctaccgacaaaatagaccggtaactgcacaccaacgtgacactctgcagccgggaaaacgcaggtgtgtcaacagagacaagtcatgaaaacacactatggagctaacacagttcacacgaaccgtcaccccagcaacacacgcagcatcgctccactcacaggagcagaagtttaaattcatcatccaaccaaaactccag

SEQ ID NO: 52250 - DNA, 737 bp, Bovine  19866880761532
  misc_feature (1)..(1): n is a, c, g, or t
nattgcaggggagacgctggtctccgcacagctccaaggtgaacgcggtgacggccttttttatctttaaagtgaattatattaaatttaaacagtaaaccatgatttttggtgactgtttgattttgatggttaggaagtgtttctgtacagaacgcgaagttaaaggggaaatgcaaacaaaaaccacgttgggagcataacatgctgagcttgaagtgtcttagttctgctgaacggcaaacgctcgttatcagctaatgaaaggcgtgtgcctaaataatatttggcctctcagaagtccagtgaacttcttcccatgcccttgagtttcctgggcaaactcccctgagagccccagcggcctcctgtccagcgggcgaccggctggggcgggcgggccggcccggagcctcctcaaggcccgtttgctctccggcggccctgcgctcagggtccgtcctgcccagcacttgccagtcaaacctctctctgctgagatttatgacttggctggaacactttattcatcactcaacttttctccaaaggattgttattatggtgcttttttttgcttgtttttttaacaagttccgaaaacacacgcacccaggaaaacaaatcaaacatgttatgcgcagcccgactctcccttcacgagctgtgttcttgcttttcattttaagatgttttggaaaaggatgctgttaggaaagtgtgtgtttcaataaggc

SEQ ID NO: 52251 - DNA, 1186 bp, Bovine  19866880846002
  misc_feature (1)..(1): n is a, c, g, or t
nctcacgtgagttccccccgccaggctgtcggggctggggtgggagccagggcccggcccgcccggcgggcgcacccccgactctgcctctctccctcgcatgcagatcctcgggccaggtggtctcgggggacgcctgcgcggccgcgtccacccgcacagtgaccagcgggcagggggagcaccagatcaaccagatcgccctcagccccgcgggcagcatgctctacgccgcctcggggaacgccgtccgcgtctgggagctcagcaggtggggggcccggggagggcggggggcaggcaggtgacccctgggcggcaggacctcactgttccccccagcccccaggaccctggccagcatgttcacccggggccgacccctgtcccaccccagggtccccccgggttcatccccccaagctgggcatctccgccctgcaggttccagcctattgccaagctgactggccacattggccctgtgatgtgcctgacggccgcccagactgccggccagcgtgacctggtggtgaccggctccaaggaccactacgttaaggtaccgagacggccttgaccttggagccgggttcgggggatgggccctctcctgcgctccccaccctggcctccccctccactgccttgggactcaacgaaaaataatgtgactcctggggctttatactgaacagtccctcccagggagcaaggtctgtgcaggagggagatggcagcgtgattttgtagatggtgggaaaacccgcagggctgggagcagggtgactgtcggcctgaggaacacacgagcacaggaggcactgacgatctttgctccttggttcaaagtcagagactgagaagcagaagatagacagggtggagggcttgtgatgaatatttcaagtgcaagtagaactacatttatttattaaaaagtaaaaaaccttaataggagactcaccccccagacccatgttgagtcagtctccctgcccccagtccccatcccccaggagcccctcttcaccctgagtgccagcctgggggacctcgagctggcccgcagaagtggctgcgggtgtgggggggtggcccgggactccctccagcccttcttctgcagatgttcgagctgggcgagggcgtgacgggcaccatcgggcccacccacaacttcgag

SEQ ID NO: 52252 - DNA, 694 bp, Bovine  19866881077562
  misc_feature (1)..(1): n is a, c, g, or t
ngactctagactgacaccaaaatcacagcccatctggtcagcaggactttccccccaaagccaaagcatgaaagctccttaaatagaaatttcattaagaggaaaccattttggaagtgattttttttttttcagaccttcagtgaagacattggttcaacataatacagttgagtcccagttactaacgacccaggtattcagttccagttccagttttttaacaagcttgaggctgacgctggataaacccctcgcctgtttgagctcacacaggtgagctctaactcacctgagacagagctcgcaggatgactggaagcaggaaggcggccgtttttccggagccggtgtccgcgctggccagcacgtctctgcccagaaggcccaccggaatcatctgcatctggatgggggtgggcacctcgtaaccggaggccttgaggttgcggtttagggcctcggggaagccgcagtgctcaaagtcaacgatgggcctggggacgcctcggcctcggaccgtgatccccagctgccgcctgaggttctcaatctggtcctcccgaaggtgcgagacgaaggcatgctcggtgtagacgtagggggcagggcccggcgctgccggctcggagcccgctttctgggggcggctcggctcggacgctgcctccacgcccctcacctgcagcaggtg

SEQ ID NO: 52253 - DNA, 1128 bp, Bovine  19866881193399
  misc_feature (1)..(1): n is a, c, g, or t
ncccatcccagcagccacgcatctgttcctaactctcagggcatcaggctgcatctttgcttagacgtttagactttggaaaccaacaagctcctgctcactgtacaagattttgcttagttgtcccttctgtttgaagtcctcccagtgaccgccctcatcatggggaattactgctgctcctcggccactgcattagggtgactcatacggcacagtgtgagtgcccaccagtgcccaccactgtgtacctaatagatggcacatgcgtggtttcaccctccaatcacacgacacttcagtaaacctccctctgggtcacacgttctctggattcacctcggcctccccaggcctggcacagcagcaacatgtgacatctgttgaacccattgaaccaacgtgaagagaactagattgtttgtattttaactttccaaccagctcacaggctctaagccatcacaatcctgatcttaaagctcctcacaagattccctctaagattttgctccatacagttggtatacaatgagcatttgagaagttacatctgcatatttactggcatatctctttgcaaatcttcagtttagagagctgaaatgatacctgtaactcctttgttacttgaagttttcttttttcagcttgttcaagtttttctttccacattcttttcaaagaaaaacaaaagtttaaaagggttaaaaaaatatctagatatataaatgattaagaatcaagagataatcaacaaaacttagaaaaccactcaggagtattcaaacatcatggtctggggatgagctgctccactcgtatgggagggaggggtgcctccccgccgggccccccgcccacccccaccagcccagggagcccgggcagcacagggtctgactgcctggggcccagagcccacctctgcatgtttgccatgtctctctcctgctgatgcagcttcattctcaaggatgctatttcttgccggcagagcctgtaccgttcagggtcaatgttctgactgtttctttgggcagctcttaacttttcaatttccgctttcagttctaaacatttgtaaaaaagggccgattaataacatttgatatacagtccactaga

SEQ ID NO: 52254 - DNA, 755 bp, Bovine  19866880541244
  misc_feature (1)..(1): n is a, c, g, or t
nttgtgtgtctgtgtggttactgaacacaatacactcagtgcatgatcttcaaaactcactaaatctgatatctccagtttaccagcatttggggaataaatacccttgacagctgtgtttgagctgggttttgatgatgaactaggccagaatgagcctgcctttgaggtaggacatgtggtcccatctgtttaaggctgatgttgaaaaactgataatgagtgaccagacttgagtaatgcactgataacaagactgtttggaacagcaaataccactttaaaaaaacatattgagataaatgatatctccttgaatgcctggtctagtacttaggggcttgtttacatttttccaattagagtgattcattctcggttatggcttccctggtatctcagcagtaaagaatctgcctgcaatctaagagacatgggttcaatccttgggttgggaagatcatctggagaaggaaatggcaacccatgccaatattcttccctgggaaatcccatggacagagaagcctggtgggctacactccatggggtctcaaagagacttagcaaatgaacaacaatatttcttggttatattagtggcaagaaaaaaagggacaacactttagaaagaagagctaatcttccagggtaaagatatttttaagtataaacaatgatttggggggcaagagtaaatacataatcactttctcttctaacttcaatgttgaaatactggatgatcatgaaat

SEQ ID NO: 52255 - DNA, 2057 bp, Bovine  19866880800683
  misc_feature (1)..(1): n is a, c, g, or t
ntactgtcatattgcatatgtgctcagttgctcagtcatgttggactctgcgacccaacagactgtaccctgccaggttcctctgtccatggaattttccaggcagaaatactggagtgggttgccatttcctactccaggggatcttcccaacccagctcgaatccacatctcttgtgtctcctacattggaaggcagattctgtaccactgagccacctgggaagcccattgtcatgttacttataataaatcctgtactggtatggaaagaagttctaccttatgaagcaagctttgtgtgtgtttctgtgtttgtatgcttgcatgtgtgtgtgttttaaagactcctacaatttgtgcaattagccagttcagttgctcagtcatggctgacttgttgcaaccccatggactgctacgcaatttgagcatacaaaaatctaactctacagaatccaaaattagccgcatgatcagtgagtgaactaacaaagtgatgataatcatattcagagcaataaaggagaagatactctataaagaagcattaatgagaaatgatgaacttaagctgtggtcaaaacagatggaaccaagcctgttgggtagtttcccatatgacagggaagctagactttgaatccctaaggtccagctctggcttctgtttatcatgtcacagagctttaggagaactttagaaaaattggattacaacacaagcacagacgtttctggaaagggtgtgggaaagccaagcctctttattttaatatgaaattaagtcttcatctctggttttgagttgaacttgctcttgttcaggttttcccgctaacacttgccttggctgcaaaactaagcttcaaggcatcaattaacatctcacactttgcctcatccgtctcctgcttgtcacctaacattttgcttgaatcactttcaaattctctctctgaacaaacctgtacttatcccatgattgggctctgacttaatcaagtcatgcttgttcatttattctttctgtttagaactgtgtctgggaaaatgaataccttttacttttaaattgtggattaaaaaatacaaatgtgtacaggttaaaaatagatatatattttgctttctgacactactttataaaaatatgggtaaaacaaggaaaataaatatttgaatgtgtcattccaggtgttatacattttcctcatagacaattttgaaattacttttaaagttagcattataatttttttatgttttgctgtcatagacacagatgtcatattctacaacaggtttgcgtttgaatataagaagcttttggtaacctgctacattacaaaaattttaaataaatttattatttaaagtaactttccttttactccttgaagtgttctaaatatataaccacatcatctacaagtgcagacagtttcacctttttctttccaatccttatgcctgtaattgctctattttcatctaattgtatgagtaattcttctaacacaatgttaaatataaggagaattttcccccatatttaataagaaagcccttagagtttctccattaagtaagatgaaggctttggaactcacacacacacccacacacagaatggatataagaatctttaaggatgtattcatcgattcctacttcatttagtctttctcacatgagtgggtgaatttttccaaatgtattttctgtgtccatagagacaatcatattatttttctcccaaactcaattaaaatgatggattataccaatgcattgcctaatattgatctatcctcgtatttctgaaataaaaagtatttggtcatagtttcttaattttaattactattagatgtatttgctaataatttatttaaaatttttacatcaatactaataggtgaaattgcctgtaattttctttgtattgcaatcattgtcaagcatagggaacaatgttaaacccactgcacagaaagaatctggaaatttcctaactgaaactatcttattcttaacagttgagttgatagacc

SEQ ID NO: 52256 - DNA, 1250 bp, Bovine  19866880937302
  misc_feature (1)..(1): n is a, c, g, or t
nctaattcatctgcagcattacaaacttcttttgtctctctggaaaagtgccaaccaaatacatgcgcatggatatgcaaagtagaggatggagacaaatatttgggaaatctgaaaaagttaggatcatggattaccctgaaatatactcattgtcatcatttaaatacctgtattgactgttacattgggtagctaatgaatatcagtgttctagaaaatttagaaaatataattgcattatcttatttctgaaaattctttttccttggtctatctatgacacaaagaaaataagtttgctcaagagatatgataataataaatgcaagacaaaagaactttcattcattaatttagacaacaaataaaaatctgaaggtaattaaagtaaaatcataaatgctctccactctacaatataagaaagagtctctaaatccccatttaattttttctatcatgtagaatatccagctgcaataaaagaagaaattttctagtctctgcttttgggtacaaaatttatcttttcttttttctaaaccctgaatatcatcaattaaacactgtcctcagagaaaatgcatatttgccctaaattcaacagagcttaaggtttaaaataaccagtggtatatgtaacaattaaaaataaaactgtaatttatcatactttattaatgaagatgactaggaaatgacttcttaaggagagaaattttccattcacagcaaaagtcattttctaagatagcctcccaggcctgtgtctactgaagaaaatttccactgtaaatggttaggcattgttatagtttaatcttgttatgagaaatgatactttggattcttgaggatttggagtgacagaaatacactgaaataaagttttccttgcatgcccctatagtaagaggcgtgggtttgatccctgggtcaggaagataccctaaaggaggatatggcaatccactccagtgttcttgcctggagaatcccatggacagaggagcctggtgggtatagtctgtgaagtcacaaagagtgagacacgactgaacaattgagtgtgcaagcgtgggaagaggatgaaccttagagcaaaaatacccatttgtttttgatgctatttaaagtaagaatgcctggccatcccatggatggaggatcctggtaggctgcagtccatggggtcgctaagagttggatacgactgagcgacttcactttcacttttcactttcatg

SEQ ID NO: 52257 - DNA, 1473 bp, Bovine  19866881032174
  misc_feature (1)..(1): n is a, c, g, or t
nttgctacctaccaacctgaaattgtctgcctgtgaccaagaagacgagagtcaacttcaggtttcttaagcaaaagaccattaataccctcaaaattattatccaaccagtcaattctaaagaaaatcagtcctgaatattcattggaaggactgctgctgaagctgaaactccaatgctttagccatctgatgcgaggaactgactcattggaaaaggccctgatgctgggaaagagtaaaggcaggagaagaaggggacgacagaacatgagatgattggacggcatcactgactcaatggacatgagtctgagcaagctccaggagttggtgatggacagggaagcttggcatgctacggttcatggggttgcaaagagtaggacatgactgagtgactgaactgaactgaacctcaaaacatagcacatgaaacagtcccttggtgccctgagaccttccctaagcactttttaattttctctagttccacagaataagaaggcaccctgtctctctagggttccagttccttggctgtgtaaaacagtctatgattcagggacggtgaatagaattcaacactctgtattgcctagagtccttaaaaactataagttcatttcatttttgcatgtttcttaattgaaagacaattcaaaggggaaaaaaaaaatgttggaaagggcttggcttgccaatgggtgagctgtacctttgctttcatggcatagcaagagaatgctgggggccttacctggttctgccattttgctatcaaaaaataaatcccattctgttcagtttgcaaaataatcaaacaaagtcattcatttcttaatttttttcagtttcatgggaatagaaataagttatccagattttctttcactaaagttcaggattttcttttcttccccaatgttttccatggactgcctcccccaccccacgctggtcccttctttgggagttaggcacaaagcaatagagacatactggacatattgatcaccaagtaaaacggtttccctggcaaccacaactcaatgaagcccatagaattgccttccttttgcatatgaatttttttctaataatttccaacaccacagatggcagaaactgatacaaaagtacctgttcaaactgtattgttgcaaaaataaagctgatttggcaagagatacttttctgtgttctgtggttagctaatgtatttctgattttagtataattcctccataattatgaaatgaattcattcctttgtgtgttgcagtatgtgaatggattagttttattactgccacaataaatcaccacaaacttagtgcttagaataacaagcacttattatcttagagttgtacaggttagaagtctgacacatgtttaagtgggctaaaataaggtgccagcaggaccccatacctcccgggggctcaaaggaggctcaaagggagagag

SEQ ID NO: 52258 - DNA, 842 bp, Bovine  19866881110360
  misc_feature (1)..(1): n is a, c, g, or t
ntttttttttggccctgcagcatgtaggatcttagttccctgagtgtgtgtgtgtgaaagtcactcagtcatgtctgactatttgcaacccgatggactgtacccaggctcctctgtccacggaattctccaggcaaaaatgctgggagtaggttgtcattccattctccaggccatcttcccaacccagggatcgaactcaagtctcccatactgcagacagattctttaccatctgggccaccagtgaagccttaattccctgacctgggatcaaactcatgcccccagcattggaaacatggagtcttaaccactggacctccagggaaatcactgtgacatcgactgtactgaagatgaccttgaagagaatactgactttcattcactcagcatcacatatcaagcctttccatgaattcagaatagcaggacctactgagtttgacagggcagtccctggtcttaaagaacttcccccagcagttgaaagagcttattgcagtttaacatccacacagaaaaagaagtttttgcagagtgcagtagcagcttgggacatctgagcacacagtcctgagtattcaggaaaggtttcaccaagctggtatcatgtttggtgtatggaggatatggaagaattccccaggcagggaacagagaaaagagaggaaaggagtaatcttggtgcaaagataaatatgtataagagagcccatgtacctaaatacactgatgccttgtagtttaaaagcgtggtgcaaattttagaatggatgaccaggaaaggggtaggaactgcaatgggaagtgggactaagccagaggtaaaggtccca

SEQ ID NO: 52259 - DNA, 2396 bp, Bovine  19866881196386
  misc_feature (1)..(1): n is a, c, g, or t
nggtggctgtgaagatgacagggtacagaatggaaggctctcagcctgcgacccagcccacagaaggcagacaatgaattttcacagtaacatgactgaaagcattgaaagtgcctggtgtcacttgaaaaatcatttccctggtcaattcatcgttttcaagtcacacagaaattccagatgttcttgtaaaaaaaagaaatgcatcaaaacaggacctgtatctacaaaaaatctttatgggattttgccaggcgttacaaatgggggaggaactgacatctttactagactaagtctccagttgatcaacacgggatgtctctccagtgatgtggatcttctctgattgctttcatctgagttctagtgttcagcatatgactcctatatgggttttgttaggtgtgcatgtgtgtgtgctcagtcgtgtctgagtctttgggatcccatgaactacagcccaccaggctcctctgtccatgggattctccaggcaggaatactggatggagtatgttgccatttccttctctaggggatctttccaacccaaggattgaacccgtccgtctcctgcattggcaagcagattctttatcactgagccacctggaaagcccaactttgttgggtgtacacttaagtatttcatttttttgagccattgtgaagagttttgtgttttaaattttggccagttcaggatgcatccttatcattttccacctctctggacacaagttactaaggtataggctctaatggcttttctgagagtcaaagagtgtcagcaaaattaatcaaaagatctaatcagaaaaatgacttgtgcagtgtcatatggaattccagtctctatttaaggtagcctgttagatctgtttggcttggaggatgaaatttttctggtagacaaagcaatccaagaatggatccattacaagtccactatgctgtgatttctggagaaggaaatgggaacctactccagtattcttgcctgggaaatcccatagatcaaaaagcctggtgggctacagtccctggagtcacagagtcagacgcaacttagcgagtaagcaacaacaattattagacctgtggccaagaatatgttactggggaacccagtctttttttttttttttttcaagggctgaatgcttccattaccaatttctccaggttaatacttttattaattaaccagggaccactcccaccacccctccccaaaataaaataaaaaactgaaatagataaaaaagagctaagataaagtagattaatagagatgtaaaagaggatataaaattgaaaaacattttcctatatggataccaaatcctcctcatttgtaaggaatcagaataacacatttcccatggaaacaagaataaaactgaatccctgtcacaaacactattaattaactcagaaatctgcttttattctgtcttccaacggacatctgtataggaggaaactgtttctcagaatctataatcaggacagaaacaaagccaagtctggcacaaccaacaaattctttctcaattaatcttgataaagcaggagttatgttaataatccaataatttataattgctaactgtataaaatcttcactgtgtcatgtggatgtgttacagaatctagctttttctgcaaaatggtttctaaacatggaagcatcttatggggactattattagcttagaaactgactggctctaatttgaataatgtgaaatatacataagaaaagtgaacaaaatcccaaaggttacttttggttcaaaacagtactgtggcttcttttgtttatctcctttcgttccccagaccttgttaaaggagaagacaatagtaaaaagctagaaagagcacgagagacaaagcggatagacgagtagtaactaacctaatgggcctgggaagttaaatgctaagtgctaagtcacttcagtcgtgtctgactctgtgcgaccccatagacagcagcccaccaggcttccccgtccctgggattctccaggcaaaaacactggagtgggttgccatttccttctccaatgcatgaaagtgaaaagtgaaagtgaagtccctcagtcgagtccgactcttagtgaccccatggactgcagcctaccaggctcctccgtctatgggattttccaggcaagagttctggagtggggtgccattgccttctcctaaatgctaagtgtctagtgggaaatcccagggaaaagtgactgtattttcctggcatcctgacaccccaccccgcacaaagtgccaggacccccggagcaggacaggcccagagctgggggttagaaaccaagctgagaacatggagcttataagctccaagctcagtacggcgg

SEQ ID NO: 52260 - DNA, 1487 bp, Bovine  19866881208128
  misc_feature (1)..(1): n is a, c, g, or t
nggacagcatagaaaatgtataaattctcttttaaataaatcctgtttcatttccctggcattttcagagagtgttccacatgaagccaagactttaaagaatatgtctgaaagaaaaaaaaaaaagaatatgtctgactctttcatgtctgagcatattgagaaaaaaaaaaagttcgtgcactttcttgatgattccaacattaaaaatactggttattgtactctgttccaccaaactagcaaacaggaaacaaatgcacttcactaaacatgtttatgcttttgagagctcctagggccactgcaacacagaggatggtttgccttgtcttaagtggccccagctgctgggccgccgtcatttattatcaagactttggaccctgatgttccacaccttctcccgtactttacatgcaattttactgcaaaaggcacatatcttatgacaaagcaccagggattttgccagtcagaggcatgtttccttacttttgcattgcagcctatgttccaaatcgttaagaatgtcaggttcttgctgctaagtcacttcagtcgtgtccgactctgtgcgaccccatagacagcagcccaccaggctcccctgtccctgggattctccaggcaagaacactggagtgggttgccatttccttctccaatgcatgaaagtgaaaaatgaaagtgaagtcactcagtcgtgtccgactctgcaaccccacggattgcagcccaccaggctcctccgcccatgggattttccaggcaagagtactggagtggggtgccattgccttctccagtcaggttcttagggctctgttaaataccttcatgtcattcacaaatcctgtgtacatacaatacatttaacaatcacagatatttatttcaaatggtggttactatacctccagatacattaaaaactactatactattttataaaccatatatctattatcaaaaaataatgaaattgtatgcctgactgctgctaaaccatcccagtcagctgaattatcatattccttcattctgaatgcatctgaataaacattttaatgtttctgaagaaaagctgtgactaacctagacagtgcattagaatgcagagacatcaacttgccaacaaaggtccgtctagtcaaagctatggttttttcagtagtcatgtacagatgtgagagttggaccataaagaaggctgagcgccaaagaattgatgcttttgaactgtggtgttggagaagactcttgagggtcccttgatagcaaggagatcaaaccagtcaatcctaaaggaaatcagtcctgaatattcattggaaggactgatgctgaagctgaagctccaatattttggccatctgatgcaaagagctgatggtgggggaaagaccctgatgctgggaaagaccgagagcagaaggaagcagcagaggatgaggtgatagatggcatcattgacacaacagaca

SEQ ID NO: 52261 - DNA, 698 bp, Bovine  19866881212581
  misc_feature (1)..(1): n is a, c, g, or t
nactgaattgctccttttatcacttacaattgaccattaaaatgaaatttatctcagagagacactggaaaaaagaaaccacagaagaaacctattgtctatctcaaaaaatatctcagcagcccatttccagtcattgcaggaagaaccactcaatattcaacttctcatttctcaatgccagcttttttcaaatgttatgataaacactctaaagtgacctatttcccctgatacctgagaaaagtgacgtgtcattccaaaatctatttctcctacgtgcacgggaagcgatgatacttctacagtcaccctgctctgacaggtgggaaaatctcttctaagtaaaaatctcaagaaaagagttactctgaaaaagatcacatcttctcttcaagttcggcaatctggaacagtgttcgtcttcgcctctttaacctgaaccagaatgttagactgggagcacccaggacagaccctcgaggggaactaggcagtgaagtgatggaaggattatagggattgtcaaagaacaggattatctcagagggacgtggcctgagacccccagaggggcaggaacacagggtgcagatcaggttttagactctaggggggtcggcgtttgaatcctgcttctgtgtcctcaagctctgtggccctgggcaagtcaattcccacttggtgcttccattttc

SEQ ID NO: 52262 - DNA, 1431 bp, Bovine  19866881222811
  misc_feature (1)..(1): n is a, c, g, or t
ntgataaagaatcttcctgcaatgcgggacacttgggttagatccctaggtcaggaagatcccctggagaagggaatggcaacccactccagaattcttgcccagagaattccatggacagaagagcctagcaggttacaggccatggggtcacaaagagttggaccagactgagtgactaacacagacacacatgtgtgcacacacacacacacacacacacacacacatagaggaaagagaaactaagcttgtgctacaaaaatatcttctattcatgaggctcttctaaaatattacactatcacaaatcagtcagactcctcgcagttcacaattttaacagagagagacgttaataacacattcctctcaggaaacaagaatgtgtttctacccttggaagtaagttctaatttctaagtaacacattaggcaacacaattattttctgttttagtaacataaaggaattatgaagcatttagaaatataggcaagtcaaatgaaaataaaaggttttttccatcctaaagtctattcttctatgtgatttcatcactgtgattcatttttctctcttacggaagatgtgagttacctaggaaaacaacaatatacttaatagcaaggtatatccatataaactctgagactagattgtttgagagatttaatagcattattgaagaaattatgtgcataacagatgaaaacctaactaactaggccaataaaagatgtaaatttttttgttataaacagttacaaacaaagacaaatgctcagattcaaatatccagctttccaatgattttctggggaagcgatatcgattggctaagtcaactgatactcaagccccactctccttggcctgtcttcattagagtttgtggaaattaaatactttccagcctcccttacaactcatggcagccaagtgctacaaaataagatgaaagccaatgtctttgctgggatgaaggaagggacttctggaaaagtgcttggattcttgatagaaggtatccatgtgactgttccatccattttctttcttcctctcttcaagatgcatgtaattcttggaactctgcagtctcattgccattaaaaacaatgtgtaaaaatatgaatgactaacacattaagggatagtctaacagaaagattaaaaaaaaaaaaagaatttgagtccctatgatattggtgagaaatctaacactaaaatctaactctagcaaacatttgcctctagacttccttttatatgagaaaaataacttcttatcaatcagttcaaggggacagttagatattctgcttttttcaagttaaatcatttccaactaattttttgatcccaatcactcactgtgattgtctatgagacaatcattgtctatgagtcaatcattgtctatgagt

SEQ ID NO: 52263 - DNA, 1710 bp, Bovine  19866881242500
  misc_feature (1)..(1): n is a, c, g, or t
ntattaagttaatagagagggaaaagacatacccatcttgtcaagctatgcagagaaatagatctgatttcctactgggaaattataaacatctctttctttcctgttgggataaaatcagaacccgtagttcatttcctattggcctgatactggctgcctctgtgtcattgttaatgcagaagggatgagatggtttgcgtgtcagaatcacaatggtgaaaagtatctgtgcacagaaagcgtgcaaagggcagcctggagacgaggaatatgagataatcagatgcatgtgttggttttttaactattttcaaagtaaaatcgtgaattgcataattaacatatgcttttcttcagatgcctgggtctttttctcacctgaatatgtcattttttgttttagctcaataagtatttattaaaagtcttttattttattgaaactatcagtggactctttttttgttacatgcaattacatgcttatcagaagcaggagatgaaaactatttaggatggctggtccatagggcaaaggaagaccacagaggcttcttataaagggaagtctacctccgtgaattattaatagaatgtgatggggatgagaagttccgaggggcttttcactcccctagtggatgtttgagagaaattacattcttgaaaaaggaacagactgtcggcaagtgtcaccaccactagacctgggataaggcgtggaatcacatccatgtatcctgagtgaccccattctcccctctgccttatgcagtgcaggtcagttcaccaaatctccaactgtccttcctgcctccttcctaacataagccctggtcaagtcctctggtatctacaaacacaatcagggaaaggatctcagcctcaccccaagggcctcaatggagaacccaaagtaaaagtaacatgtacagatttaacgggcctttagtagaacatcattaagtcactgatagaactacaagttcagtgtttcacagagcggaaacgtttcttccctggtccacctttaagtgtgcagaagtttgttcctttccttataatgactacaaggacgtgaaattagatatggcttgctttgcagccacgcaatgtctgtcacaactactcagctcatcacttcagtgcaaaagcagccacagacaatatctcaattaaaggggaggatggatgtgttccaactcaacactatttataaaacctgtttgtgggctatttggactgaagggcttagctcactgacccattgtctagggcattgagagcatatccaagagatctatcatagtgatgaaccatgggctcgaagctggaaatggatgaagtggatacacaaaggatgtgatcgattgcaaatggcttggagggcccatgggatcagtgaacaaccagaatatgggtgccggtgaacataactggagagagagaattgagggccagtgtgttcgctacttgacatctagttgttagacgggatgccctttggggtaagagccctatgaggacaggaacctggagccttggagctttgtgggcatcctttaaacgtcccagggctgagtctaggtgagaggaaggaggattgcaccgagagcaagaaaaatgctctcaaatcgggacccctggagtttttctaagtctcctttatagattgtcatgagcagcaaggtgggctgactttatagg

SEQ ID NO: 52264 - DNA, 683 bp, Bovine  19866880510464
  misc_feature (1)..(1): n is a, c, g, or t
ngtctcctgcattgcagatggataattcccatcagagccccagggaagcccataaatccttaagcttacctttattacatagtaggcctgcgttttctcctcttctccttcaggaggcagcataacaacagtaagaatttcatatctattcttcagcttatcaattttacttagccgctcatgaaactcagcactaacatgaaaagaaaaattaaacactgaaaaacaaacaatatacttttttaaaggactatactgttcttagagaagacatctgtatttgtgttactactgaaacagtttaaataggttctcactttgaagttttacatttcagtttgaaaacaggaaatcagtcctgaatattcattggaaggactgatgctaaagctgaaactccaatactttggccacctgatgtgaagaaccaactcattggagaagaccctgatgctgggaaagattgaaggtgagagaaggggacgacagaggatgagatggctggctggcatcactgactccttgtatatgagtttgagtaggccccgggagttggtgatggacagggaagcctgtcgtgctgcagtcaatgcggtggcaaagaattggacgtgattgagcaactgaactgaactgaactgtgaaaggtctcagatttcaccctatttaaaagctagcaagtt

SEQ ID NO: 52265 - DNA, 1676 bp, Bovine  19866880595011
  misc_feature (1)..(1): n is a, c, g, or t
naaatcccccaactcagtggtttagtaacttgaggaaaagatgttatcctaaactgtttataattactaaatcacatcaggattccaaaatcttgggattgtttttaaaagttcaataaatttatagctttctaatgagacttgtaaaaactcatgaaatagttacttatctatattaattataaattggtattagaaacatgacttgttcagttttaagaattacatatttcttcatagaaacatagatgtacttaaaaaaaaaaaagtttgaatgagaagctagtaaagtctccaatgctgatttacagaacttttggattttctgggcatcatcagggaaagagagtcttcacatgaatagactgtccataaaacagatgcttacttaattaattactctaagttttaatttttattgtttgtcctaatatttctaaaatgcattgtactgtccctagtcacctgagcttcctgaacataaattaacttttctattatctcaggattgttattgtaaaattcagtccttaaactatgctaaaatattgtggtgtccttaggactactgaagtgtgttgacagtttgcctcctctcaaaatcactccaggaagttgtgctgaagaattttaaagtagacagaaactctattataatgttttattaatctgtttctacttaggccatcacttctctgcactgctgtcactgcacccttctcatataatcagctgcctaatattatatcagagtgtctgaatgatgatatctcctgatgaattaattgttccttgaatttggtggcagtagagttcctaaaaatctttttttctacctactttcaggtttaagcttatgttcataatcatttagttatgtgaaactttcttattatatctctaaaatcaaatcacagatgtaaatgcaatgtgaaatgttccatgactacacatgatacactcaatgtgaatttcaatcagtattgtacctgggtaaacaagaactcttgcttaacatttttgaagtgagaagtcatagcattaattcgatcttcatagtcacggagctgatcttgcatgcttgacctttcatcttgcagctttgataactgtaaataataaatgctatgatcaaccaaagtcctactaagtttttaccatattaaaaatataaaatcaaaagaaaataaaattttcatttactttgcttctttcaatatccatttgaatttctaaaatctactgatcttttaaatgttataaaatactgttgtgatttagagatagctgtgggaaaattagcaccataatatgtgaaccgtgaacttccagatgttccagctggttttataaaaaggcagaggaaacagatcaaattgccaacatccactggatcattgaaaaagcaagagagttccagaaaaacatctatttctgctttattgactatgccaaagcctttgactgtgtggatcacaataaacggtggaaaattctgaaagagatgggaataccagaccacctgacctgcctcttgagaaacctatatgcaggtcaggaagcaacagttagaactggacatggaacaacagactggttccaaataggaaaaggaatatgtcaaggctatattgtcaccttgcttatttacttctatgcagagtacatcatagaaa

SEQ ID NO: 52266 - DNA, 948 bp, Bovine  19866880617308
  misc_feature (1)..(1): n is a, c, g, or t
ngttaaacaggctaaaagaaaatgatttcctgctctccgttgcttttctaatctatagctttagatttgttactggataattttagagatgtgatctttctgtagaggaataaacatgaagccagcctataaacagcagcagcctataaacctatgagaagctatgtgctttgtgtaggcaagcaatttcaaaacaatatgtaggtacattattaagaggaaaggttaaaaaaagcacagtatacagctaaaaatagatgattttctgtatcattttcgagatgtgatgattaagtacttgcattctttactttgtcttatcagcaaatacacagctgcagtaaaaaaaaaaaaaaaaaaaactccatttaccctataaatgtgatctgagagaactaaattctgtgtctacctggtttgggcttttcttcgtttaacaggttgatttaaggggagtatacatccaggttcagccttaatagttacttgccactcacatggtttaatttagtgtgtactgcaagttcatatagtgtccctggctaatttatatgggacacagaatttcctttcttcaagatttgattttaaaatgttacctagtttttaggtcacttgaacttgtttggttctcagtttctaaaataattcaggcctttctggctttaagtttctgtgacagtgtgctttatgtttgaaagtaaagatgtttccttttcagagaaaaatatcccaatgtgtaattttattattattagccccaatttgactcattaattcatctttctatgccaatagtttggaaagaagtgacactaactaaaaaagaaatggctcctttttttttttatcaagaattggtgtcctaaagagaatgcttatgtgtgcacactgcttgtagatatagaaagctaatataaatgtttaataccacaacaaatcaaatat

SEQ ID NO: 52267 - DNA, 789 bp, Bovine  19866880620791
  misc_feature (1)..(1): n is a, c, g, or t
nccttctttttacccctgaagaagtgaaaatgtaagtttgtgagagcattgtgactcttacttagagctactatggataacaaagaagactcccatcatggctgcactaaaaggtagtttctagaagtgacagactagaaaagaatccaaaaaatcttaaataggccccagctcatatagatgccaacaggcctcagttcccttcaccaaagactttctaaaattgtatgcattgcaaaaagtctgaagccttgtcttgatactcaattgagcattcaataccaagcaataaattattcaaatggaaagactgattgtctttaaactaccacatattcatgtggtttatgttttttttccctttatattgaaagtgaaagtattactcagtcgtgtctgactctttgtgatcctctgtccatggaattctccaggcaagaatactggattgggttacaatttccttctccaggggaccttcctgacccagacatcgaagccaggtctcccacactgcaggcagattctttaccatccgagccacctgggaagcccaaataaacaagagtaagaaccactcaggttctgacacaaagagataactctgaattagcctgaaattggataactgaggataatttaatagactacaaaagtatgggaagggttacaggaaatcaattaagcacagtgctttaatccagggtcggatggtggagcgtggtgagctgccgtctatggggtcgcacagagttggacacgactgaagcaacttagcagcagcagcag

SEQ ID NO: 52268 - DNA, 1578 bp, Bovine  19866880633537
  misc_feature (1)..(1): n is a, c, g, or t
naaacacatatagtgatgttaacatacaatgaaataataaatgtaaaaacacttgaatttttagagaaaaggttgctatgaacatataagaaggtaatgctgttaatgcacataatttataattctgggggaaaatgattgccaaaaaagaacagtatttcctttctagagcatattgtaaatatcagcagatgattattttcttacagcttattttctaggacatacattaaactaccttttacagccaagtaaaaactgaaattaagcactttgaatacaaaattatgttatatcaacaattttgcaataagctacctgcaaatatcaacattattccccaaagagttcaatttcagagctaaaaacatgatttaaatgaataagcaatttagaattcaaacctactaaactaagcagttatgttggtatagcgtctataattatatttacaattttgtggtgtgttttagagctactgagaattgtaaagagataaaataatatttgccctattaaggccacttctatcaaaggtgattttcttttatgttaaggctagataacttttcactcttcctgacttcaaaggaaaacacattattccaaatatgttttaaacttttaacataaaatccttacacattaaaccattaatatacggttggtcagtaaaatgtctcattccactcacaataatgtctcagtttaattagaccctgagaagtaatggatttaaattcaaatcctggccaacattaattatagaattcttaatattgtagcatgccctttactaagttcctcggatatgtcctgtgctaaataaaaaaggaaatgagcttctggggacaaaggactgattattgcaaaataatgtatgtattgatacgtggtacatcattctaaagtcttctcttaagactaaaaaaaaagaaaaacagaactttgaagtcctagaactttgaattttgaagtactggaactttgttccagttatctttttctatatgcatgggaaaccaaagaccagctgtttctaacagctgactcttcaacatttttttaacctatttaatggggagatcactcttccatgtacgtgtgtgcatgttcagttagtcatgtccgactctttgcgaccccatgggctgtagttcaccaggctcctctgtccatgggatttttccaggtgatagtactggattgggtttgccatttctttctctgtgggatcttcctaatccagggatcaaaccctcgtcccctgcatctcctgcactggcaggcagattctttaccactgaaccacctggaaagccagagttaggcacgactgagtgactgcagcgcacacacacctgggaagccatggtccttccttaatcctagttccatggagagttggtccacacacagcagctatggacactgccagggaagaagtattcctgggccatttcatggacagtaggaataggacatagcaatggtcgaaaataaaatgcacaggcacatctcagattctctccagacttattctgagatccttgccagcctcctctcacttcaattaga

SEQ ID NO: 52269 - DNA, 619 bp, Bovine  19866880731708
  misc_feature (1)..(1): n is a, c, g, or t
ntggagggtcctggggctgggcaagatggaggaagggcaggcaagctctggttctgagtgcatcagaaaaccctttgaactttcagtctaaagtctgtgactataacttgcttcctctctcccttccttttccttccttccttctttctttttcccttttctccccacacatctccttccttcctctctccctccctcccttcttagttctccttttcttctttatttatttatgagaacctccttacatccttgtttcaaggtgttccaagcgcattttgtatctctctacccagttctactggtggtcattttgatattaaattctttaaatgcacagagagcagaatacaaagcagccagagttcacaatatagatgctaattagtaatcagcgctgcgttgttgcttagtcactcagtcatgtccgactctgcaatccatggactgtagcctgccaggctcctctgtccctggggttttccaagcaagaatactggagtgggtagccattcccttctccaggggatcggacctgtgtctcctgcattggcaggagaattctttgtcactgacccacaagggaagctcaataatcagcataggatccatataataa

SEQ ID NO: 52270 - DNA, 892 bp, Bovine  19866880735000
  misc_feature (1)..(1): n is a, c, g, or t
nactgattagatctacatattttgaactctatttggagcatagattacagttctgtgactctgtcattaaaataagcagccccaaagtaaaatgtaatcacaatgaaccaaggaattagcatgaaatactaacttagtaattcattcaaaggacaagttagcttcccaagtgttagcttcaaagattgcagataataaactaaaaacataagcaaattgaaataaagtgagtgaacataactcttgaggctgatttaggtcattgtactccttcatatctttcccagtagataaaatggaggctgaactgctgatatcttaaccaggcatattaagaatattttatgaccaatacagtactagcactgacctagtagcatagacccagcttgccagagtgaggaagtagtgtctttgagggccttttggggcaggcatcaaccattcacttgctgatttgggggaagtctggtggattccggtgggggagactctacagccaagccagcagggtgagagtaggcccactcaagagcttgggtataggatctttactcatcagtaagaaaagagccatacagtgcataccaactgaacattatctttaagactgtcataagctttggataattgaaaaaaggaattgggaaagaatgaacattttgaggcaggagatagatgggttccaagctactcatttaaaatactcctctgtccatactttgagatagaaatgacaggaaaaccttcttcaatgaacaatccaaagaaatataggaaataacagaaggggaaagactagaaatctcttcaagaaaactagggaaatcaaaggaacataccatgcaaagatgggcataataaaggagagaaatggtaaagacctaataga

SEQ ID NO: 52271 - DNA, 616 bp, Bovine  19866880784028
  misc_feature (1)..(1): n is a, c, g, or t
naatgaaaaatattagaagtttaaattatgtattattttaaatttgctttctacacagcacgttaaaaatttaaagcaaaattcttttaaattctaggtgctgagtatgaggtaaaaattcaactagaagaacaaaaaagagctgttgatgaaaaatatagatacaaacaaagacaaatcagagaactacaggaagatatccaggtaaattctataggctttaataataagcccttagtaaaagttaactagcactattataattactctactcttgttaatatacaattttttatagagaagcagttagagatatctcacttaaatgagaaaaaagtgctcaaagtattaactagttaaaatcccagtgctaagccctgacaattacttggtaatcagtggataaattacagctaactacctatgatatcccctaatctttatttcagttaaatcctttaaaatcaccttaaaagactattccttaaaacaaaaatttgaaagatgagaaaacaatgtgcatggtaataagcaggctctatataaacattttggagaaggcaatgggcaccccactccagtactcttgtctggaaaatcctatggacggaggagc

SEQ ID NO: 52272 - DNA, 914 bp, Bovine  19866881016834
  misc_feature (1)..(1): n is a, c, g, or t
nctgcactgctaattttcaattatacacacaaatggctctcagattggaagaaaatggagtgcatggggagaacagtagtagatttctatgtttgtttggtagtgagtgtggaggcgggagaatgacatcttgaaaagaaagccatagtgaggagtcggtgtttgaacttcagaggatgcgccatccgggatcttagggagacctgtggtttccccgtttcgctctgggctctaaaaggcgtgaaattacgagttactttccttcttgggtttgctttttgtttgtttgtttgttttgagccgttacccactttatactgaaccttcgctgctgacctcgctactctgccttgggaagcccgttaggaatgacagtctcggttccccgggtacccctgccgccgtcataccaaatcccacagacgcttccgtctcctgtctcactgccttcgtttcccaccaaccgaactgtacttcaccccttactctttacttcgctcccgtcagctgcaattcctcagagccagagttcaatgctttgtattctctgaggaggtactccttcacccacagtaaaaaaaaaaaaaaaaaatctttttgaggagagaaaaattttaggaatctcagggtttttgtttcttttttctgaacaagattttgctttcagggatcctaaattttggtcagggatacaaaaatttctctcaagtgaaaacaggtgtcatgaggtagtccttattcggtttttgcggtgtaaattaacacacattgtcattcttttttctatctccgtgtcctgtcagcctgtttttcagctgatttgggaagttagagtctagggaggaacatgctgctggtccgaactcttactctttcaggaaggattcacgggtaacccatgcccagctccgccc

SEQ ID NO: 52273 - DNA, 2517 bp, Bovine  19866881205406
  misc_feature (1)..(1): n is a, c, g, or t
nagaagtggggttcaattcctgggttgggaagatcccctggaggagagcatggcaactcacctcagtattcttgcctggagaaccctatggacagaggagcctggtgggatatagtacaaagggtcgcacagagtcggacatgactgaagtgacttagcacgaatacatatataaaatatgtaaacaacaaggacagactgtataacacagggaactacagtcaatattttataataacctatgatggaaaagaatctgaaaaagaatacatttttgtaaaaaaaagaatacattttgtaagtatgtatataccatatatatatatatatatctgaatcactttgctgctcacctgaaactaacacagcattgtagattagctatacttcaattttttaaaatggttttaaaaagatacatattattaatatttgtataacaaattctaacaatttagaaattaaaagcagaaggtgttttacctctttcccttctgttttttaaaatatttattcatttggctgcgccaggccttagttgtggcatgtgggatctttagttgtggcatctgaactcttagttgtagcatatgggatctagttccctacccagggatcaaatcccaggccccctgcactgagagcaaggagtcttagtcactggatcacagggaagttcctccattctttttctaattccaatttctagaaactatcttgctttctaaatatcattacagtatatttttcattttattatgaactttggtacaaatacctaatatagcattatatccctggtgtctcagtgataaagaatctgcctacaatataggagacataggtttgatgtatgcaggagacatgggtttgatccctgtgttgggaagatcccctagaggaggaaatgggaacccactctagtattcatgcctggaaaattccgtggacagaggaggctgggggctacagtccatgggatcacaaagagttgggcatgactgagcatgcatgcatatattggcatgaatatacacaaatttatttacacactctcagagggtttgattgtttctaatatttccataagttttgtagttaacatctttgtacagactttgtttttttgaatttaatttttttccccaaagcagaatcactgagtcaaaagttattgatatttttaaggtcttactatctaatgtaaaattgcttttgaaaaacattaagaacaatagaatttcaaatactggaattttgaataccatgactgataacagattctcaattcttattttgaggctctttctatgttattgtaaagccactttacacagttgcctttttagctgcattactttaactgcattgcctgtccaattatatcctccctgatgagactgattccaaataaaagttatttcaatctctaaaaagatgtatctattttaccccagaggaacaacacctgccaattttacatccttgggacatcttattggacactctctcagtggcgatcaagctttaaagtacataataatcccaaggatggggttggtggcagaagtatgtgtcagtatgcagattgtgggcctgaacgctagcgagtctgaatcagtagacttggcgtaagggccctggaatctgtatgtttaacaagggattctggccatgacctctcacggtacaaagagaaaatctactttgtggattaagtcactgattcctaatgtctgttttgtggtgaatagtggttgattgtgaaaagctagccagccagtgggtaaaaataaatgtgggcaatgcagggataaacatattaaatgggtttaaatatatattttcagaatttttagtatgctgaaaatgttttgtggatttccaaggatggcttctttgtagaatattccaaatttatatgattcactgaattcatttcattgtttatttagtttgttttgggtgggccacctattaacatctgatgttcctaggaacaaagtttgataatcctggattaaatgatttttctattacagcatttcccattatcctcttagtatcttgaaaaatttaataaacgtcccacaggcacatagctttttctaaaagtttaggcaaaataacatctttttattttgtaaagctaaattatcagggctgaactaagtgaattactagcaaaaaatgtattaactttttttctttattcaaatgccttttctgttcattctcttaataaaaaaatataccaaagaaaccttttttgaggctctccatttcctattagtgtctgttaactaagcaagatgcaatctagaagaacttcatgtaatagaaataaggcccacgtgaccaaaaatttaacactcatccaacaacaattgcattagaagtggcagaatcttcattgtttagaatttctgatgttggggttttattcaaagggttataaaaaaggtcctctgaaacactcccatagcaaattatttggctaattataactccttaaaa

SEQ ID NO: 52274 - DNA, 1380 bp, Bovine  19866881386936
  misc_feature (1)..(1): n is a, c, g, or t
ntaaatttcccggcccgtctttgctgtcgctgctccggagcgaacagcaggacaacccgcacttccggagcctcctggggtcggtggccgaccctgcccggggcccgccgggccagcagcagttaccgggcaggtaatgggacggcggcgccgctgcgagacgggagaggggactcagctccgggcttcatgaccgcagtccggctgctgagccgaggctgtgtgcacacgaggactacggcgccggtttcgagggcgggagggaggagggtaccttctccctgatgtgggcaatgcgggatgtgggttgaacttttaaatctagtactgccaccagaggcgcggattctttagctaaaatcctttggtcttctgtatatatgaaacagcgcggctgtgtttttaagtttccgcgccctccatctacagactggagtatgaggggatccctggttaaaactttttttcggaggatgtatggccaagagcttaggatggtcatgattgggcgatgaaagcagagagcagaaggttgtacgtactaaaaggttttgcagaaaaaccagttttcataaattttgttttctttttaagaaaagagaggagagttgacaacattgaaatacaaaaattcatttccaaaaaagcggatctgctttttgcactttcctggaaatcagatgcacctacaactgctgaagttagtgaagacaatgatggtgtgtttagtcttaaaattgttgcgttttggtttaacagcactttgatgaagcagaacacagagctgttgttagtaattttgttacttattttttcagattattatgcagtcatgccaccgttagagcaattcatggatatacctactatggaccggagagagctgttttttcgagatattgagcgtggtgatatagtgattggaagaattagttccattcgggaatttgggtttttcatggtgttgatttgtttaggcagtggcattatgagagatatatcccacttagaaatcacagtaagttactcaccttttaggtatttgattgtttttgataaaaatgtcatctcagtgcaaaaattatatcttttcatccagctgtaattaagtgtactctgcagacctagttttgagaattaaataagtattaatagaaaatttaagtacttttttactttttaaaaaaattattagtaataaaattagtttctgccactgtttctagtttgggggggtttggtcctttggctggcagaagtgggtcctgttttaaatgctcagatattagtggacctggtgagattagttagtagcctgggttatcttctagctgagaagtctttaattatttagtattcagcattagatacttgcatatg

SEQ ID NO: 52275 - DNA, 1109 bp, Bovine  19866881403930
  misc_feature (1)..(1): n is a, c, g, or t
ntagaattctaatttctcttatttcaaaatatgctaattttatttttataacccataaatcggttcaaacttggtaaaaggaaccaaatcataattgccacactttcatgtacaaaaatggtctgagtatttaaatcccatgtaataatgttatttccataatgaaaatgggacacgctatttaattgtgttaatcatcttaatcatctttatattttgtgtgtgtgttttttttctttaaggaaaagcgttgaactaaatagcaattctttggaatcctatgagaatatcatgcagagttctttgggatttgttaatccaggagtagttgaattccttttaggaaaactaggaatagatgaatctaatccgccatctttaatgagaggccttcaaaggtatagtaaatcagtatttgttctgttaagtggtgaggtctgtggtgctgatgtgagaagctgcataactgaagaacatagttgattatcctacgcttggtggcagcaatatgccaaagtttgaatgaactaggttatcccttcttcttctggagtggagtcttatcagtgattgatgtgtgccgtgtgaccaggtagatgcagaaaaaatgtataagatgcagaaaatttataagaatttcgtgtatatgctaaaggaaaatactttttaataatagtagtcattcctgagagttcaaaaattttgcagtataaatgggaatacaaatttcttgcttgagattgagtttttatctgtcatgtaaagtgagatatagttacagtttgacttttattttctttaatagcaaaaatttctctgaggaggattttgcttctgcgttaagaaagaagcagtctgcatcatgggctttaaaatggtatgaagattttgtcattcaacaattgcattatttaacctaataggttaagttaaggcaagcatgcttatgtcatctttaagacaaaatttgtttataaatgaatttaaatgatacctttttgagattagcttttttatagataaaaatgctactatgttgtaaactttaaagatttacattttagccaatattttttaaatttgttaaaaaggaattagtatattatatc

SEQ ID NO: 52276 - DNA, 1710 bp, Bovine  19866882014736
  misc_feature (1)..(1): n is a, c, g, or t
nttcctcaaggttcttgtgttttgaaatattaagtggaaaattccagaaataaacaattaatgagtttttaaattgcaagttgttctgagtagcatgatgaaatcttacaccatcctacttgctcatgccaggggtccccattcactgacattgtctgctcctaacattcaaccatcatcaagctcagtagtccaggatcacccaaagcagataatccttcttttgacatatagtcagaagatcaaatgaagcctaatgctaagtcgcagtgcctggcattcacctcatgctatctcctcatataggcatcttatcatctcacaccatcacaaggagaaggtgggtatagtataataagatagggaaatcacactcacataacttttatttcagtatatagttttaattattctattttattcatagctattgttgttactttcttactgtgcctgatttataaattaaactttatcatacatatattattattgtttcaggcaccacgctgtgcccaacccttcgcaaccccacagagagcagcataccatcataggtatgtatgtataggaaaaaaatagtatatatatatatatgtgtgtgtatatgcataggatatgccatatgtgtgtgtgtgtgtatatatatatatatatatatatatatatatatatatatatataggatttggtagtatctgagatttcaggtatccactggaggacttggaacaaattctccctcacataaggaggaactgttgtatccttgttatctctttctcctctcacttgaagacttaatagatgaaagggtaggattttttttaagaaaaaaataatttaagtgtttgcattgaacgtctttatccctagtctgttggttttacgtctagtccatataacccagaattgaagctgaagacagtctttgtcacagcattctttgaattctgccccccacagccaggcatcatagcaatagtattaggactatctcaaaaacaagttatttatgctacaatttaaggcttatgccctcttgtaccctgagatacacagagaagttatttgtgttcacagttttgactaagccaataattggaaataatgacatccaaaagggctttaggatcttgaatggtacttgggagctaacaaatacttctcctctaggaagcaggtagttgggaaaaacacaacatgaagttttaggatgggtttgcccagcagccatattgtatcttccagggttagttgcagaagaggactggcagggagcactttggttccttctccaggggatcttcctgacccagggattgaaaccgtgtctcttgtgattgaacctgcatctcttgtatctcttgtgtctcctgtattggcaggtgggtcctttaccactagcaccacctgagaagcccctttggtcctacagaagagagcaaatagggattcgggctctctgccatgttttttggctttggggcaaatcatcaggccttaaaaaaatacatcgttctaatttactgccttttccaggttcactctttataaagatctgtctttctcaaatagccttcaatcccggaggaatgggttactggcagagatgagtaaggtgttttggacaaacaatgattcccccctctcaactagttgctgcctatcaagaggatagttgctctttctctcttcataattcattca

SEQ ID NO: 52277 - DNA, 1096 bp, Bovine  19866880385369
  misc_feature (1)..(1): n is a, c, g, or t
ntttgatgacagtgtgcaaataaacctaagcatcttctaggccatcctgtaacgaacactgggcttgtattccttctcgtattggggtcaaatgattcctagtctggactaaggaggaagcccagaagctggctgaatggggcagcccccacatgcggtggaatgggtgtgctcagtccaaagaacctgccattagcagtcagcagcacaatgcacgttcccaacagtgactcagttttggcaaaagcacataaattcgtcacattaaagtaaggctattaattggatttttttggttttgtagttttatttgcatttaatttgaaaatttgctctggtttgatagttgcttaaaagaacaataagtatatagggtttagttttacatttatacatatttaaatagcattataattttttaatgtaacgcaatattaggtcttgagctttttttccttccagttctttgaaaacaagtcgtataattccattttgagaaatacttcaatgggtcatacttatgacgctgatttgtggggaagagtttgtcagtgacctaagagccccctgttgtatggcgtactgcatgccacaggtgcccaacaaactctcagtgcacctgaggagcaccctggggtcttcctctcattctgtcccctgctcattgggcagatgtaagcaagttgcagacttggtttccttacctaaccaacttggtgctttttcaggacttctttagctccttccgtctccaaaatgacagcctccagagcctgccagtgtctgccatttgtttacttttctaccacatcacccaccctgacccataaaattggattgtttttttcaatttcttggatatcactgacaacgctgccatgtttgagttcatccaatcaattttgttgaaacatgaactcacctttcttattggaagttgtaaagtcttttttttccccccttgaaagaaaagaaatataagaggaaaatgcttaacccagacctttgggcttatagaaatagtatatcccctttgaaaggactttaatatctcgcacaaaggctgctggcagaacgctgaggagcgttgaccgtc

SEQ ID NO: 52278 - DNA, 951 bp, Bovine  19866880417042
  misc_feature (1)..(1): n is a, c, g, or t
ngggccttgccagcaacacaatcagtcaggtaatttgcatgaatagttctttaataaacatccaagcccccttatcactgttccctgcaggatcctcattagtcagtaacctaattcaagcttgaaagatttccattatggtgccctttgtttcttgcccattgcctaattttctgttcagcaggacattttttctgcagtccatgacttgtttcttgactgacatatatgatttttttttcctcaaaataaatgagtgcatacatgcacacagtccatttcccatcaatggtgaattcatttaggcaatacgataaaatgtcagaggggtgttatccaaacagcccctaaagttagctttaaaaccaaaatagagtgacttgggaaaaatagcagtcagtaacttgactgtgggtatatgtgaaggtaaatagacaatccaaatagcaatatcaatttaatcattgaattaatagttgtcatttcaccagtttaagaactcgattatctctcccttttttgcctaacaaatttgggatgaaatagttatctaaattggaatagatcacttactagaaaagtttggaatatttcaaaactctagaatcttacacagagtgctaagccagtaattttcacccctgactgcattttaccatcacctaggaaggttcgacggagaaggcaatggcaccccactccagtactcttgcctggaaaatcccatggattgaggagcctggtaggcttcagtccatggggtcgctaagaggcggacacgactgagcgacttcactttcactttttcactttcatgcattggagaaggaaatggcaacccactccagtgttcttgcctggagaatcccagggacgggggaccctcgtgggctgacatctatagggtcacacagagtggacacgactgaagtacttagcagcaaagctcag

SEQ ID NO: 52279 - DNA, 3320 bp, Bovine  19866880608007
  misc_feature (1)..(1): n is a, c, g, or t
ntacttgaatctccttctagaaaactctgatgacaagggctgtgttctcttcctagtacagctttggtggcagtcactgttccaagcacttgccttggattgattatataatcaatacatggaagtcttaaaaacaaccctatatggtagttgttgctattattaccattttaaacatgatgaagcaaaaaggttaagtaacttgaatatttcagttcatatagctagcaagaagagttactgggatttgaacccaggtaatctggctctgggttctgagttcttaatgaatagctgaataaacaagtatacttgaactagtacagagttacagatgccaagaggcaccatgagtggctttcacttaggtgtgctctaagtgagtatgctgaattattgagatagtaataatcacatttcaccaaagagaaattgtgtgtatgtgtgtgtgtttctgtgtgtgtgagaaagagagtggggaggtgagatggagagaaagataacatattatcataaatttaaatacacaagatgcaagattatgacaagtcagtcaatgggatgactcaggagcggtcagaaatgtaaatatgcaatactgtgtcacaagcttttgaatcagcttgtctttgtcttttgtataataagagaggacaagaagtagtgtcagaatctacctgtggcttaactggaccatttgaaaatccctaggtgacctagcatggggaaaaggatttgagagttcacaagactcagagctgtttatattgtcagtggggtaaataaaaaagtaggcataattttctatttcaaactttatttcagagttttatggattgaaactctttattagttttccattgctgttgtaatgaataattataaacttagtggcttaaacaacacaaatttattatcttgtctacctgacggtcagaagtctgaaataagtgggttttactgagctacagtcaagtgtacagaagcctgcatcccttctacaggctctcaaagagagcctgtcccctccttctagagactgccagtgttccttggctcctggccccttcctcaatcttcagtgccctcagcagagcatcatcaaatctccattctcactctgactctatttccttcctataaggatgcatgtgattacattagcccatctggataattggtcttccttcagtggtaaagaatccgcctgctaattcaagagatgtaggagactcgggtttgatccctgggttgggaagatctccaagaggaggaaatggcaatgcactccagtattcttgcctgaaaatttctatggacagaggggcctggcaggctacagtccatgggtcacaaacagtctgacactattgagtaactgagcacatacctggataatctgcaataatccccccatctcaagactcttaatcacatctgtactgacccttttgctatgtaagggaacacagattccaggaacatcattcagggtggggaccattattctgtctatgatgactactaatgatctctaagaaaagcatgagtagccaaaggacatccgggttgagggcattgtagaaaataaatccaaagactcagatttttttattcaaacttacgatgtaaaaagaaactacttttaaaaagaattgagttgcagaaagggtgggaggaagtcttcccagttagaagcttgggactatcctatctcagttcagtacatatcaaagttactggccttctatacatgagactagactaggaccccacatcctctgacctgcagttaaaaaagaggaccatctctagatgtataagagagataagactatctggtgcttaacagaggaggtagaggtaaattttgtagtcatcaatgagcaaacttcaaaaaggttatttgagaaagagtcaactccagatctttcaaaaggatcacaaggtttttccaataaagcattaagggtctctcctttgctagagactttaaatttttttttttttctctaactgtactggcttgtatccctgacataatggaatggctgatctcatcaggatatacacataggcttgctcatatttctatatatgagaagtgacttttggtctaagctaaaacaacttctttataacttccagttcacatacaagtttgcaatattctccagttggtcccatgggatgaggccctcgatgagtgaaagtggaaggctagttaaatgggatgctttcctctgcactcaggaatatctatggagcaatttaacgggtttctctttgccctttatgttttttgaaatttttctctgttgaggcatgaataaatcctaatggacaagaagtgagtctacagcaggtctgtttcattctttgtatgtctcagatttccatgacatatgctccccgatatttcctttttcactctcacattagactttgagaggcagcctccgtagcagattaaaaatgggagaagattatgggattgaagtcaatgcatagttctctatggtctctgttttggtcttagttttgcaaccctcttcccctgaaaaaattccttttctgacgccctaaggccctaggtgaatgtgtttggagatagggcctttaaagaggtatgcgggcatgctaaatcacttcaatcgtgtccgactctttgtaaccctatggactgtagcccgccaggcttctctgtccgtgggattctcccggcaagaatactggagaatcagagagcttttcttgtatctgcttcatctcagctgctttcagcttaataattaaaatgtcaaagtggcatatttgggggtaatattcccttcctcaggggatctttctgaccagggattgaaaccacaactcttatgtctcctgcattggtagtcatgttctttactactagcaccacctgggaatccctttaacgacatcagttcagttcagttcagttgcttagtcgtgtccaactctttgtgatcccatgaattgcagcacaccaggcctccttgtctaccagcaactcccagagttcacccaaactcatgtccattgagttggtgatgccatccagccatctcatcctctgtcgtccccttctcctcctgcccccaatcccttccagcatcagagtcttttccaatgagtcaactctttgcatgaggtggccaaagtactggagtttcagctttagcatcattccttccaaagaacacacagggctgatctcctttagaatggactggttgggtctcctttaacgacataattgaggttaaatgaggtcattaggatggaggccctaatccaat

SEQ ID NO: 52280 - DNA, 2588 bp, Bovine  19866880672364
  misc_feature (1)..(1): n is a, c, g, or t
nattctctagattgattatcagagcctaaaaagagagaaatgtgtgtttctcattttcctagctctgtggcttatatccttaacatctttgtttgttttcctgttgtcattgcattatttttcatacaacaaggtgtggcctgtcccatgtcactccctttggctctctgaatgtgtctttcccaatgtggggtgagggttccttgcaatgattcctattttctgcaggtcactcatataccacatgtccatgccaacagatgaacagagagggattcctttgctgatgtggccttaactaccctttaagggagagagctttgtatggtccagtccatacactggacctcaaagaagatttaagagtacattcacgagttcatgtgataattgcacactcacagaggaaggcaggagagttattaatttcccaatctagctgcctcctccccctgcatctcataataaaggcagatcttgggggaggtgggagtcagaagtaagaacttcagaagatgactctaaggctgtcctctcctctcctggaacatcttcctgcctccttttactacagccctctcacttgatctcaatatcccccattcttcctaagaaatctgcatttttatccaacaccataatagagtctaagggaaatactccaaggagaccgctcactttgagaagccatggctgacacaatggagccagtgacttagtgtggtgttggtgtgcttcccggcctttcctggcctccaactgccccttctcagcttccttttctgctcttctcctgtattctttcacctgccctcaacaccatgttattattatttggcggaaactgaaccgttaactttatccagacacgtggagttacatcaaaattcagagctgttgcactggccacggtggcatgttcccactttcacttcccacagagttgtgctgccctcagagagccagtgaggagcatcttattgggtgaggcccccacgtgccctccctgttccccataatccctcagccttcttccttctcaagttctaatgcctcatctctccatctgctgggtcacttctccctttgcttatcagtcttattgtcctcgtcacgtggcttaaaacccagctcatttcctccctgaagttcgtcctgctctcatgagatgtgcttctatttccttaaccatctattacacgtcttcttaacttgtcttatgttacctgtaacattctatcctaaaattaataataatacatacatatacagcactcgctctgtgtcaggccctatgctaagcccttgatgtaaattagttcacgtaagcctcacatcaacctttgcaagcaggtgctactattaccccttgtttcacagatgagtaagtgcaacacagagaggctcagtgacttatggactcacaccactgctaagtggctaagcaatggttcacacctaatcagtctggctcagagaccattctccaaaccattatactatggagcctgtctctatatcttgtgttttgtagctatttgtgtacttgccttacgattttattttgttccatctttgtattcttgtgtctcctagcacatggtactctccaaacacttgaaaaatggaattctatggggatgacctttttttttttttttaggagatccttgataactctaaattttgagaacccttaggaaaagctttcaatatatctgggaatgatatttctggtggcgataaagggcaaagcataaatttcttttggcagttagcattttctcatgattttcattttcctgcatacctttccaagcagttttcattttgttttacattttcttaagatatgttcacacttatattttaaacgatggaaagaaaaagatcacttgcaaatgccaactgggaagagtgtttattttaaacaatgctgttccggtgtaccagctgctgttgctaggactgcatactggttgctaggggtggtgaagagaattaagcttgtgatgtcaagataaaaagttgcttcaactccgcattctattggctaggattttctgtaaatgaggaatcctcagtcttaaaaaagtagaaatgtacttggtttcaacttgcacaaataaactacagagaaaattaattaatctagttattttctaagggtagaagaaaatttggcagttaatacagactcagaatttggacaaaagtttttaaagtttgcttcttccttgtattgtcaggattcttccgcagaacattcaggtttgcatctctcccaaagatgatatcagttcagttcagttcagtcgctcaagaggcaggtcaggtgatctggtattcccatccctttcagaattttccacagtttattgtgatccacacagtcaaaggttttggcatagacaataaagcagacatagatgtgtttctggaactctcttgctttttatatgatccagcggatgttggcaatttggtctctggttcctctgccttttctaaaaccagcttgaacatctggaagttcacagttcacgtattgctgaagcctggcttggagaattttgaacattacttta

SEQ ID NO: 52281 - DNA, 1080 bp, Bovine  19866880673099
  misc_feature (1)..(1): n is a, c, g, or t
nacaccaactcatttactacttccaccattatagatcccaaagcttggaagacattgacttagtttaatctccttagtttttaaagtggaaaatctagatttcacaaagatgaattattgggcaagtcagccctggaacctatctcttgatccccattttccccaaacactttctccctgcaattaaaacaacacaaaagagggatgctttttagtggtaacctgtcaacttagggcatggtctatctgaactctcctatacttaggtaccgataatgcttttggtggagaaggcaatggcaccccactccagtactcttgcctggaaaatcccatggagggtggagcctggtagactgcagtccatggggttgctaagagtcggatacaactgagcaacttcattttcacttttcactttcatgcattggagaaggaaatggtggcccactccagtgttcttgcctggagaatctcagggacaggggagcttggtgggctgccttctctggggtcacacagagtcggacacgactgaagtgacttagcagcagtagcagtagcaatacttttggtaatggagtactgttgctttcctgccttctttgggtagattcactattccctttacatatctgcttgcttatttgtatatatttattcgtatttgaacacaacacagtgtatgaattttggaggttctcaaaattaaaagactgaattcaactcaacatcagcaaatcagcaataacagtaagtgcaattcctgctccactctcacccctgctccactgcctgtgatgaacagctggagttttactactacccagggaatggttcattttgaccttgtcagagttctacctgcttgctattcctagtatggtacctcttctcatcagagaacttgaagcaattattatattatgctctttaaaacctggctatttcccagatggctcagatggtaaagtgtctgtctgcttgcaatgtgggagacctgggtttgatccctgggtccgaaagatcccctggagaaggaaatggcaacccactccagtactcttacctggaaaattt

SEQ ID NO: 52282 - DNA, 1124 bp, Bovine  19866880699146
  misc_feature (1)..(1): n is a, c, g, or t
nccagattgttaggctgcaggaaaagggagttacttttgtagtgaagggtaaagtcctgttccttgctgtaattcctataacagtggaatttataaatatgggatgggggctcagaagaactgaacaaaagaaaagaagtctcctctgcctgctgttgtaagatgcccctgatgccacatttgatcttctcatggcccatgccaagctcactgattccaactggccacatgcctacactgtgccttattgctatgcatagactatgccttgttattccccctggagtgctttgatcacttttgccagcttattaccccatcccacctagcatcctgtgtgaaacttgctttggcccttttaaatgctggcttttcaggtcctttcctacaacacttggctttgttttgagaagtaaattcagacctgggtcctatgtgataagtctcgtgaccattgccccgatttgacccatctccggtggggttttctgatctgtaaaatgagtaagtcggctcaattcccgttagtctcaaagggacgctgatggtgcttaacaagatggtgcttcgagatatttggaacacagggtggcattatcacattattattttcacaagctgttcacctgaagggagaaaataaagagtggaaatttaatgccagagagggtttttggcactttgtcaattcgacattagctttgagggattttggaattttgcctgaaattttcagtaccaagcagctaaaagctgtgtttttctgggcttatgatattcctgtccccagggatggcattcagcatttgtgagggatgagctgtgccagacccattttccgatgtgccaccaacagacacaaaaaaaagcagtgcacactctgtgaattgctgcttgtacccacatttcacacttggaacagcacctctgactggtttcagcaggaaacggatgagagaggagtgatccacgtaggctgtgtgtaggaagctccctgtctgacacgtgggtggtttgtggctgggcagcttctgtttgagtggtcagatggaccctactgaaggtcacagaaccttttttagacctttcaaatttacccacatcacagttctctttaaagagag

SEQ ID NO: 52283 - DNA, 1174 bp, Bovine  19866880996314
  misc_feature (1)..(1): n is a, c, g, or t
ntttgtttattcatcatacattaccggtttccttccacagtatgtaaaatccatgaccgcagggcacttgcatgtcttgtcccagagcagagccaatgcctttggtcacatagactataccatctaacatcatggaacgcccttcaccttgaagtctgtgtgaatggcccccctagggctgtgctgtctcctctatccagagccaagtgctgactctggcgcagaacagttctttcaacaataatttattattctcacttgaaaaagtgatgagaaattgaaaggttttgtgtcccataagtcgaagcatgtacatttacatgtgcaaactgattgcactttgacagatgactttttctaagttatttcttatagactggtttagttcaggtaagcttgtgaaagtcaaaccaataacacagtccaggtcttctgacttcccatgtcacgctccgtgtgcttgaggttcctggtcaaagtcaattccttcggaatcctcgtgcttgtcagggtctgagtctatgactggagtgacggtgcctgtgctttttgtttgtttttggcagcattcagcgagcatggcgtgaatacctgcagcggcaggagcccccggagaagcggagcccctccccgccctccgtgtcctcggacaagctgagcagctctgtcagcatgaacaccttctccgatagcagcacacccgtgagtgcacatgtccttctcatgactcggttggccagtcatctggtctccagggctttggctccaagagaggaatctggggatgtgagcaggtggtttgtgatctacaagttgcttgtttgctatggtgagggttttgtcatctcaaagatgtgggtcatgaaggcaaagagaactttatgaaggcttagggaattgactgcatttgaaatcagtctaaactatgcatttgtgtgttggcattcctctgttactttttacttttcttgatgatagtgtgttccttttaatctgtgctgttggcagccttttgtggcacaaataggatagattagcttggttactaggattttaaagagaactttcaggagaagaactgaaaggggtcttggattcagagattgcatcttaaaggctttcagggctgggtaagtaacccatgtgactgatggggagagttgtgactggctca

SEQ ID NO: 52284 - DNA, 1664 bp, Bovine  19866881017309
  misc_feature (1)..(1): n is a, c, g, or t
ngaaaatgttactgtagtactagctcatagcagagaaataagacatacataaatatccagaatactgaaaagttaaactacaatatgtttcttcaaatgaatgttgtgcagtcaataaaaaagataagttcatttagcaagatggaaaaataaagcaggatacatttgacctgatcacacaacacaggaaccatgttacagataagttaaaagtatagacttaagatttggatccatcagaactcaattccagaaccttgccatacaacgtaggacgagttgtttaactttccgagtctcacctgtgcaatggggacagtgctcttaaggtcattgtggggattaaatgagcaaatgtggacagtgcctgggcaccctgccctactacctatgcagatgagcaaggactggcagggaatatggacaaggaaaaataatctatgcctttggtgggggaattgtggattatttttacttaaaaatttttattacattgcaaacataagtaacaactaattaaaaagtcacttttaaaatatcctacaaattaggattatgtctaatttagacaaccttccttcccaacaaatgacattactcagtgagtgcaccctgactcttcttagggacctcatgaggagagccgatgcttctgtgtttcctactgcttatgaactgttgagattcaccatcgtacactagtttatccaattcccactacatatatgtgaaacagattcatttgcaagctaccaggatacacacagagtcatgctcatctgatactgatgaagatgtgggctggtcctttggattcctcatgtggaaagtatcttgtaaccttccaggttatcagatcacacactcctgtttctcttcttcctctttgttcatcttcctcttgtcagactgaaattggtaaggcaaattaaaggtgcctacattatcccttgacctgcacacaatgtttccatactgaagccttacttctcatgaattttatttaggtgactaccttgctggatccacagtggaatatttggatcacagttttactcaaagtaagatttttgagcatgatttacctgaagtcattatgataaagttctatgtagtaagaaccaataataattatattggtataaattcttttcattctttagggccccaagactcagaaacttgtagagaaaataggcttctgagtctttaactcaagcagaaataaaatccagagttcagggtatactcaaggctgtcaacacctgctcaaatgtgagagcagtgctttgggcatgcccgagtctgcttagattccttttattagtgggggcatttaattaaatcaagacagtctttctgcctgaccagggcaactactgatgagaataaaattgatgggagatgaacagttaacagcaggagatacacgggaacaagaaataaaagagccatagtcaaaatgaagaatattgctgtagtatattatatttgacatttactgctgtgtctaataatgcgtccctcacttctctccagcagccacgtgatttcattatttcaaattttggaagcttttgtttttgaaaaatgacgaaaatctcagttctccattcctcattagagtgcatatttaattgggttcctctcttcattatatttga

SEQ ID NO: 52285 - DNA, 1670 bp, Bovine  19866881020815
  misc_feature (1)..(1): n is a, c, g, or t
naatctcctctgtggtattccattacatggcaaataccatcaattatttaaactttttctctggatatatatttagttgtttataggtttttaatatcacaaacaatgctgaaaacaatgactctaccacatgcctttgctcaatgatatgagaccatctataggaaaattcttagaagtaacactgagaggtcacaagagagctgcatttaaaatgttgatgatattacagattggcatctcaaggtggctgtactaatctattatttccctcacaatcagtatgcgaccttcaccagcagtgagtgtggactgtataagaaatcagtaggctgattaggtgcatgatatctgtgattcagtggacactggtttaaaatacatattcgtaggtcttagataccaagaaacttaagtttacttggtaaggaatggccaggctcctcgctctgagaagaaacaaggttgaaatgaactgaagctcataaagagggggcttaacactcatggagtgcttcctacatgcgaggcactgctctaagtgtttatttagatcaagtcatgcatccctcctcccaattctaagaggaaggtgcttttattattcccattttagagaccagaaaacaaaggcacagagaaatcaagtacttatcccatgtcactcagctgctaaatgacagagctcagatttgcacttaggaagtttgagtcctgctgctgctgctgctaagttgcttcagtcgtgtccgactctgtgtgaccccatagacagcagcccaccaggctcccctgtccctgggattctccaggcaagaacactggagtgggttgccatttccttctccaatgcatgaaagtgaaaaaataaagtgaagccgctcagtcatgtccaactcctagcgacctcacggactgcagcccaccaggcccctccatccatgggattttccaggcaagagtactggagtgggttgccattgccttctccaagtcaggtacttataaccgcttatgtgtctactcctgttgatgagctaaacacatgttaaatatctattctatgccagaaatgatcctgcaccactttgtcctcacagcaatataaactatccccattcctcaaagatattaacgtgacttgctcccatgacagagggacaatttgtactcaggcatgtctggttctgaagcttgtgttgattttactataccatgtcttcagaatgaaatgtgtcaatataaggaggctaacccagagtcattgatgtcaataaatagagtgtatctggggctgtatcacacctaacctttccttcgtctgacttctgcatagttagaatgttcatgtacttttaatcccttgcatgtgatcacatagtggcaattggccctctcccattaagagtgagctcaaattttccagtgtggaccaaaattgaaggcagaattaaggtcccccaattccaagtatcaacaaagcccatttaagaaaagtgacatagttgggtgaggatatgcagatggacgctcacactacagcaacatatatcacaagactatggcagcaacatatttttatctcagtgagcaattcactatcagtccatcagaaaatgaagtttggcactggttcctgagtttacaactgtacttctttaatgtataca

SEQ ID NO: 52286 - DNA, 1431 bp, Bovine  19866881044709
  misc_feature (1)..(1): n is a, c, g, or t
ntaagtcttaaatttattttaattatagtgagcaatctcctgaaataatattcccagttgtggaatttgatctggggatttgatctgttttgtatcatcttacatgatgatataggaaaataactctcaacatctctgatgaaccagcacagaaccaaagaatatatttggagcttcttacaaatccttaagatattgcatgcatagtgaatagagatcagtttcatttgaatgctttatcattcagcatgaaaacgaaacatcaaacaggccttctgcctctttctttggctgcgctctgcctaataggaaccttaagctctttctatgtcacctctgagataattaacatcactcagaaagtatctgaacaggagctgtagcagagagagcaagcactgttacttgggaaaagttgcaattaggatctgcaggcaaatgcagaattcttttaaattttacttcaaaccgagataaaactccattatcatgaaagaagtggtaatgagtaatctgatgtaaaatgtatgtttattatatgtagtataattataattacagttataaaactgataaacacagtcatagaaaatttggaaatgaaaggaaaaaaaatcccatcatcctgacatgacatttattgttttggtttattgccttctggtattttcttcctatgtgtactttttcatggttgcaataatagcatttatacattttcatgaggatttaaatcataacacttttccatgttgccagctttcacagctctcatttttaatgactatggggatgtcattatggggatgtgccgtcacttattaaaccaatcacctactcttggacatttttagctgaataatatttgacaattataaaaatcagttctgtgaacatcaagcttatagctattttccatatctagtctattttctcagaataaattccccaaagtgaattaccagaccaataggcataaaggtgtttatgattcttaatatatattgctacaatgttttccaaaaatgttgcaatttgcagtgacaaccagtggaagtgttgcagttcagtcagccagcacagaacatcagagtctaatcttgaaagcaggatctttcagtggttggttcctggaccagcagcatcagcataaccgggcaactcgttagaaatgcaagttctctggccagagacctactgaatcagaaactttgggagtggggcttaacaaaccatgctaacgagccctccaagtgattataatacaccctaagactgagaaccactggtctaaaatcagtgaccctcaactttcgctgcacataataatcacttgtagaacttctaaaaacctgttatgccctgagacacagttccaggggttctgatttgtctggaggaaacaaaggcatttgtattttttacaaggtc

SEQ ID NO: 52287 - DNA, 1061 bp, Bovine  19866881124825
  misc_feature (1)..(1): n is a, c, g, or t
ngaaaaaaaaaatgtccatgacactggagtgagaagttgggacgcattcaagccacacagcctcacagtaaaagggccaacaatatgccatcacataaaatatattttttccaagtaaagctgttttcatatatagttctataaaaaaagaagtgaagacaaagatagttaattcatttattttttaattatgttacttcaagaccaacatgtcaacagaactaacctaggtttcactttttcatcactaagtcaatacaaataaagtaaataaacatgtaaataaaaattcaacattcttactaagcagaacccaaagaagaaaaaaaatgccctgtggtttcatattctttccttactcaggaaaattcattttataaagatttaagtgcaaatgtatagatttgcttgactattagcttggcttcttacagaaataaaggcattgtttcaaggtctcagagaaaagataattgtttgattcaaggccaagtaacaaataggtcataggtcttgttttcaggatctcagtgttggaagaaaataactgcttcttatataagaatcaatcactcttttatgaataaacctccaaattacttcttatgaaagaccgcaataaataaatacatatagaaaatcaagtatggactatcaggccaagagcatcagtctgaaacagagacgggaacaatctcatctgaaagcagtagaacatatccaccagggaaattcaggtgcaggtgttaaagattataaagggaacatgaacacacccacttgatccaacaaggcacaccttaacacaagcccatgctaatgaccaacttctccttactcaagtactggttaagccacaggccagtaccagagcctagttatataagatttgctgtttaactcaataaaggtaggtggacttccctgatggctcaaactgtgaagaatcttcatgcaatgcaggagacctgggttcaactcctgggttaggaagatcccctggagaagagaatggcaacccactccagtattcttgcctggagaagtccataacagaggag

SEQ ID NO: 52288 - DNA, 1183 bp, Bovine  19866881262596
  misc_feature (1)..(1): n is a, c, g, or t
nactcatactcatgaaggcttgttttccctgtatgcttggcaggtttgattaaactgatctggtggaaattctgagggcctaaatgttagttgttttttgcagagaagattggagtttgcacctgctgagagccaggaggtttgccaatcttggaatgtttcaggctcttttaagagtccttgcttgaagcaggagcattgggttcaatttcttcacctggccaagggcggccttccagacatcttatcagctctggcttctggaaaattttctgactttgctccttcatttgtgtttgctgactggcacaatgcatgattcagctcatcatttttcttttttccctctcttggttcttgaggatttctcctaagctcaaaatgccttataaaatatgtttgtctaaaataatctatgagtttgtcttatttatccaagcatctagttttgggtccatcattttgctgaaaggggatgctacttttctccaaagaaaataatttctcctgtatatagtacttgaaatatgtaaaactcagagggcaaagataagatcttttccattaataaaaatcatagtgttaggtattcaaaaaactccatcaaaaatggttcacaacattcttttatttttgtcttgcattcttccatgaaattaatttaaattagtttttgttgtagcttatctattaagaattttttttttttttgctataactctagtcatggttctataaatacatctattttctaaattctttttgaaaatacatttttaaatttgtgaaatcaataaaacattacagaaaatgtgggaaaaactgtaactgtgcctccttgaccttgaactgagatacatagagcctaggtaaagaagaggtacaaggattcacctactcatggttcagtcttctgggataaacacatgggagaattcaggaagcctggcaaaagaaatattcagaaggaatcagagaaaaaaaatttttttttccttgacacccagagactaagaatgtctgtttaagaatgtctattcctgaacactgtcctagacccaccagtcaggatctgtagttttgataaattctctttgtgatgagttgctcacaaggaaattttaaaaccactggctttaggaatctcttaggaaagtaaagaaactagagtattaacatcaga

SEQ ID NO: 52289 - DNA, 1122 bp, Bovine  19866881325185
  misc_feature (1)..(1): n is a, c, g, or t
ntggcttagatggtaaagaatctgtctgcaatgtgggagacctgggtttgattcctggattaggaagatcccttggagaaggaaacggcaacccactccagtattcttgcctggaaaattccgtggatggaggagctcatggggtcgccaagagtcagacacaactgaagtgacttagcatgcacatgcttattacaatgtagcataaatatacaatgaatagtacaaactcagttaatcaaagacagagccaaattcggggcagcaccagcagcaaggctgactcagtgttgagcccctgagtcaatagtcacagctttgaaatttctctcaattagaaaaaatacacataacaactgggataaaatctctaagggtcaattatgcggctatagctacacaggtcgaaaggatgcaggcaacaaagttcattagagatttgacaatagtgaatagaattgtggaatttattagaggtcaatacatcctaaatttttgtttcttttcttgcattgaagtatcttcatgctagagataatgaaaagataaattataacttgggttcagcttttacccctttaaaccagttttcttctcaaatagatccaagtaatggaacctactctctctcctgggtcttttttcccacccttgtatttttaatccatttctcaatctccccattttcttactccttctcaagagagtggtttcttggtggctcagtgagacatgggtgatcagtttttagaatcaaacgttagcttaaatgtgtacctaatgtctgttgagcaaagaaattattcttgttttctctttttaatgagaaaactgcactgtctcctctccatgttcaagttgaaagagaccttagagatcatctagtccagtcactacacacccaaacccacacgcctttccacaatatagagtccccttccatagcattcattctatgcagcccatccattctgtgcatgtatatttctggtgacaagcttactgttttaagggaaagtcgatgtcattgaatgacagtttcaaagtttaaaaagttgttcttattttaagtaaagaaaaaaattatcaatgaaactttcactaatgctcagcactagggtt

SEQ ID NO: 52290 - DNA, 772 bp, Bovine  19866881557837
  misc_feature (1)..(1): n is a, c, g, or t
nctggaagtggcctatctaatctacctgctttccccatcacttgggtattcctttctcgagaggagaaaatacattcgttattttaatgatgtctcttacacaaatttttttcttatccttttctcttctttactgtaactataatcctggtctttattatctggccaatttgaatacccagctaaatgattgccttcattctccttgctcactcccaccacaagccattctaaaacatcccatttatctcattttcctgcttcaagttctttgtttccctgtagcaacatttttcaaactgtagatcacaatccactgatgatttgttaaactgatttgttgggtcaccactgaccttttaaaaaatctgaaatataatttaaaaatatcagagtacattatatgtagttggagaattcataattcctgaaacttttgtttcagttttaaacacacggacacatacacatacacccattaccacatgattagatgtcaaatattttatggtaaccacagtcagtagaagtttagtaaagtctgatattaaaatcttccaaacggtgctttgtagtggcaagagttgagttttaatgtgatttctgttgagttgcacataacctctctgagcttcagatttctcacctctatgctatggaaaataatgcgtgactaatagaggccattgggagaactaaatgaggtaatacatgcaaaatgtcacaacagtgttttgtacacattgggtggctaatgactattagttttctg

SEQ ID NO: 52291 - DNA, 784 bp, Bovine  19866881840936
  misc_feature (1)..(1): n is a, c, g, or t
ntaaagcatttatctacagctttgtcatgactctacacagttgaatgacataactatttgggttttgaaggaaagttctaaaacatgaagaaaatcatagaatattaattataaaattaactgtttaggtatatggcatgaaagcaaaaggagtaacaaaataggaaatataaatagaccatgtgtataaatgtccttcttctactattgcatgtggaacagtgactgacgggctcaggggctctgcacagtaattccagagcttagtagagttctattatgatgttgaccactgactagtatcttgggatcttagatgaaagcaagttagagaaaccaaattactagggttcaagaactaaaagtagagttggcaagctctgatgtctcaagaaatcggcaagtgcaaaaaccatatgggacttttgacaaagtgcataacctttgtgaatttaaattacttaaactagctgaactagaaattttattcagtagatattagttttcctcatccctgtactttataagactaatgaaaagtcaataataaggttccactggggttctttggttgccagcagcagagactgcaaggctaacttagaggaaaaggaagaatttatcaacaggatatggctagctcatagaatgagcagaaaagctgaagaactaggtcttggggaaatggcatgaaccaaggcagagttagaggatgcaggtagtgaatctaagggtccacctgttccatcattcacaggggatgaatgatgctatccactttgaa

SEQ ID NO: 52292 - DNA, 3627 bp, Bovine  19866880413083
  misc_feature (1)..(1): n is a, c, g, or t
ntgcagtgattttggagtttaggtgtttacaaaagatgggaagagcccaaaagagtaggcacaattgctaagagcagccaaactttctttggacaaagggttggaggagggaaaatatagggaggaaaagaactaaattagcctctaaatcaatgattctgacttatttggtgatagagttattgctgctagtttgcttccacctttagccaaggagaaaagacatattttagccctgcagagatgtcaatatataatcttgctaggtgagcactatcaataaaagcctaagaaattcggaggacagggttgatctgtcatacacagagctcctctctgggactggctagaaagagatgaggcttatgggaaaacttgttagggaaaaaagaggcatgtttcgaacaagcaaagtaaaagtgttcagccatttcattaacaactcatggaaggaaaaagtaggaaaacaagggttaaagatcagacaggatctccaaattggtgctttttcccactcttatgggtagaaacagaaatcacactaaagtgcagtgagaatatgtaggtggaatctctatatggtaagagttggtgtgttgctctacagtataagctccaagagggaaacatctagtagatgctaatccacaaagctgtccagtcttggccttgatcctaaaaagaagcagcaacattttaattcctccaaccaaaaaccagctttttattataccactaatcactcccactaagttggatagtctaatcctcacccacttaaaaatggcacaatcttaatccagaaggaaaggggtggtggtctggaggtgggcatgttttaacgtatcaccagcaccaagcttttcctcaccttttgatgaacttgaactttggatgaatcaatgtttgcaacactcgagggcatcataataatttgtttgaggtctgtttgtgatttgttggctgtgtttattaaagctgatataaaaggacttaatccctagggctttagcaaataaccactatcatttagtgggaagtgggtggcatgtcagttgtcaactctaatttcccctgaaacatgcttttcttattatatcgcttacatccaccagactgttgcacacaccatgaggagggttctaggggaacaggagacctagagctacctgatgagagaggatattttcctgggatatacaacatgtattgctttgatgtgaaagaaacagtaataggatgttgaggttattttttccctcgaatttttaaagacttcaagacaatttctgtgaaaaattggtatagatttttgttgcctatttccttcacataaaaggtgagtgaaaggacatgtgcaggattactgctatattccactaaatttaagctaaatcattattttatgttccactaaagagaagaaatgccattaattaaagtgacacacttttttcttatcactcagcatttatatattgttgaaaactactttgagactcattttaagtaaagattttattatatattatacttttctgtttctctgtcttctatgtgtatgataaaacttccatgccaattcatggtgtaatctttttgaagacgtttgaaaaaacaattaaattcacccccccttttttttttagcatcacctgtgtgtataattccaggaaatgacagtcatatgaatagctgtgacaaagtatgacaatgcataggctaagcaattatgtcacaatcgtgacctgattgcaagatgcatcagttaaaaaggtgaaaactttgcatcttaggatcaatgaaatacagcattgggggatgaacaaagcttcccactgtagagagtgtgggtgtgtttccataactctcctccatttttcccctaaggatatgctgccctttgaataagatattgtgtcagaccttcatgtttaagatgatgctatcatccatcatgaacttggagttgcttttctagttgggggagtgcaatagtgattcatggacactctttactcagcccccttgcctagaaatggccttgattcagtaagtgtattttatttcacacaattccaaatgcagaatttggatgtgtccttgaaacttgagaaatcttaacccaactctacacctaagtgtcagtctgaagatgaagacttgatttaagactttgttctttgacttaagatttctgatcttaaggagacaccacaggggacacagccttgacccctggtcagggaactaagatcccacatgccatgttgtacagccaaaagacagaaaataaaagacttctgatctgatcttgcaagcagttcttaaaagcttccacagtttcaatatttaaaaggcgctaaggttggaggtggagtttaaatgctaatgagtgtcaaactggtgtcaatcaaaaataggagaaatttggttatttcttctattgtcctcagtgctcactttgtcctccagcaaaaagcagtatcctttggagcttgaatcaaagaagaggaaggtagagaggagatggaggtattctgtgaggttatatagtcagtgggaaagtcccagtggtggaatggctgaaaggatttgcagaagaagaataccagttctttaatatttaaattggtctattttgctaagacaagaaccactccatttgtccaaattctttgtacaacctgctgtgcacacaaagatcttataaacaggatgtgtgtgatatggaaaagaaaacacaagagggtctggtttccataattgaggaaacttagtaccttttgaaaagtgggagtgttagctgctcagtcctgtcagactctttgggaccccatggattgcaaccctccagactcctctgaccatgaaattctccaggcaagaatactggagtgggtagccattcccttctccagggaatcttcctgacccagggatcaaacctgggtctcctgaattgcaggcagattctttaccatttgagccaccaggggacacaagagtaccttatggagtgaaggaaaacctcaacctaaatttattctgggaagccaagagttcagagtcacaagtgagcatgacaacaaaagtctattagatattctcagcaatcctggagaaaacctgaccaatttcctctaagtcacagaatgaaggtgtggagtattcttttctatagttcatgtgtcaccttgtccccaagtagcatctagtttccacacagttcaactcttatgctgggccagggaagtggactatgaacgggtgaggaagacagctggccagagtccaaacaagaagtgggctaccaagggcttacatggctctgaggttgagcaagatgttgctcctccttgggagccaattatgaacaaggaagaatgaaaagcagaggacccagatggtaaaaataaaaagaatttgtgttagaaatagataatcaggtcctagacagctcccatcttagtactctatttgtaggctccagcctcttggtccccagccgctgggttaccctactctcacttctttcttccagctttactcaatccaccaaagtatactgcttttttgctggaggacaaagtgagcaccaaggaaaacaaacagacaaaagcaatt

SEQ ID NO: 52293 - DNA, 980 bp, Bovine  19866880493186
  misc_feature (1)..(1): n is a, c, g, or t
ntaggtttttaaaaataagtgcttaagattctgtggttgggttcatccgatgccaaccaaaccggaggaaaagaaaacaacattgtcagtcaagcagttgcttgttccacaagacctcaaatacgccacttgacagatttgttttcttaatgaactgactggttactttggcatcacttaagagctgccgggcaaacagtgaaactcaatcagaactttatcccttttaaatgaagataaaagagaaaacacttaataattatgtcacgggacaatgataatgagcccacaaaaccctttaaaatatgtgaacataaatcagtttaccagagtagttgtgacccagccaaagagaagacttcatcgtcttgataaagaataagaaagatcaacccaatgggacaagccaggctcccaaagagggacagatacaaaagggtagatggacaacacagacacatcatcctcccaatccataaattctgttcttggtggagtaacttctcccggtgagccgttcctggaacagcaatcacctctccaggttcagtcacacaagttcgcaaagaatttggcacaatgcctggccaacagtaagtgctcaacaaaagttagaaaatgttctttctctttcttttcctgcttccagtcatccctagaaacaccttagcctaaataaacattactcagcatgttacgtttgagatcagattgctgttgctttatgaaaatcttaccttataacaggatttacctacactaggggtcacaaagagttggacacgactgagcgactgaactgaactgagaactagtgaaaggatctaggccagtgaatatataagaccaatgagaacaatgaaaaaagccttccataccaccttctatttcccttctatattgaaaaccttcacagttcaaacacatgtgagcttagtcagtcgtgtctgactctttgaagccccatggactatagcctg

SEQ ID NO: 52294 - DNA, 3054 bp, Bovine  19866880805973
  misc_feature (1)..(1): n is a, c, g, or t
nttctccaacaccacagttcaaaagcatcaattcttcggcactcagccttcttcacagtccaactctcacatccatacatgaccacaggaaaaaccatagccttgactagacgaacctttgttggcaaagtaatgtctctgcttttgaatatgctatctaggttggtcataactttccttccaaggagtaagcatcttttaatttcatggctgcagtcaccatctgtagtgattttggagcccagaaaaataaagtctgacatattagatgctaattaaaaaggcagatggggcaaaataatgaggtgagtgtgtgtgtgtgtgtgtgagtgagagagagagagagagagattgtgtgtgtgtgcattataagatagacctgagcagctttatacactaaggcaagagccagcagaaagggagaaagtaaagatacatgaaatagtaaccgtgactgatgaagtcagatccttgaccagatggaaggagacaggacaactgatgtataggttccctgtgaacaagaggaggaattttattcttctgagaccacaacaagcaagaggatgtgaactgggaagttgaaagagggtccacttgtctgaatgaagtaggttccaagtgcagaggacacatgggcttaattgcccagtatccatgcccccttctttgggtaagggaatcttgacttcccttggagaccacccctttccattctccaccgtctgatgcttaagtggagcacgtgatcatggcctcagtaaatctgagcaccacattctgccatctatagacaggtctaggcatgtgttacaactggagctaactggatgattggatgggatatttgctatggcaaaaaaaataaaatgattaagaggcagataaatgtttcccatagggtttcaagcaaagaccataggagttattttgttcctgtggtgggaaaaatatagagataaaccagaaggaatggaggtgagagagaaggtgagaaaaacaagtctctgtttcagagattgaggtttatctctgagctttatttgaacctccatcttttcctggacttttcagtgagtttaatcagtaaattccaatttgctgaagtcaacttgagctatgttttccctcatttgctgaaagagccctaaaccatagaatgaggttgtctgctgaaagtgaaggggatggggcatattttttaaaaaaaatataaagcagactgatagcataaacagcaaaaaaatggagctgaaccaataatcacccagttaggccataaaatacagttcagtttggctgaactcaaccatgctaaagtcaagcccgagtcaataatttggtgttttaacgttctctgtggcaactaaaagaactgattttttttttcatcacttaacaattgcctttgtgaagtatggaccgcctttggctgggctcatatgacacctaacatctggataaaaattgaaaaatgtgatgtcaaccatgtgtttggtcaaacacaattacaaacccctgggtagttagaaaatatctaataattgtttcatatttcatctgagtcatatgcacacagaatttgtgactccaaactttcacagttaaggaacataatctctgcacccaccattcctctgttttacaagtcagcccccagcccaaatgtgatgtcagcttttcccccactaaatatttcccctgtgtagtgtttccaccaaacaaatgcatcaaaatttcagctccatgagcaactgtttgtgttggagtcatatttcttatattttaattctgtgttgtatacattgcagtagaatgtagggtattccagttggaaggtgaatgtcaacttgaaagggcaaattcaaacctttaattttgccaagagcgaaactaacattcaggtcaagacagttaagtgacttgtaccaagttctattcttagctagtggctaagctgagatttgaacccatggtacggctgctgcctcttcctgtcataacccagaaatgttgctaactgtgcaatgttgcaggaaaggtcactttgtgactatgaacatccttagagctgctcaaaatagtgtcagtaatcactcaaatgcatccttctagccagtcaaaaaagtgcaagcttcagaaatttaaaatatttcttgacattattaaatatcttagcactatagccattgtcctgtctatatacagttcctgagatttattgttcaaatatttaataataacctcatgtggctacatttaaagggacttttatgtgaattagctcatctatgcgattctttttttatgttttgtttctggaacaattttctacatttgctattaccttgtggaatggaatgtaatataacaatcaaacacattcatgcaatatgatctcatttgcaattggcaggacagggttatctttattttatataaatgtataaggaggggagcttagacccttgtcttttgaagtaagtctcttacttctgagagtgacctgagattcaaagtcattgttcaagctgtagggagattatgatcctatgacttcttgcttattaattcattccattagaattataatagcaccaaatattccataacaaaatttccattacttcactaggtttaatcattagcatcaaatggaatattatagattcacataaacatgattctgagctaaaaaattgtacaaacaagctacataatttattgtgaattaacttcagaataaaaggttttgtcattttccccatgttttagagacaaagtcaagtttatgagttaaaataagacataaaaaaggggagtttggttcaaaaacctaaagaaatgaacccaaaatttggtaatttaagcaatcagtatctattttgcttttatttttgtcagaaaagataaaagtggggtcaagaatttagaagaacatcgtgttttaaaaacggtagtgttcagggctctcacagctttttaactgcaaggagtaatattcgtggttattatcaagcaaccaaccaattaaccaacaaatattcactgtgc

SEQ ID NO: 52295 - DNA, 1801 bp, Bovine  19866880819976
  misc_feature (1)..(1): n is a, c, g, or t
ngtgttttcttcttggctttaggttaatttactaactgcatgcttttactctgggtatcatgctggaggtgactagatgttccactactgccaatttggccaacgatatgtctaccagcacgcccttctttttatccatcgtctttcttttcttttttgttttccttctctttttctcctgctccctgccagataaccctcttttccaggacctccttttactgatttccttatattcacagaaagtatgtaatgcccacatgagtgactatgggctccaaagttcagttgagggccctcaggggttaggggtatctcctaactccatcctccttaatctcccctgaggcgtgccaacgttcttcccacttcactttggtgtcacagaacagaactcatttcttctgtgcagtagcccatatggtacacattggtggctcctacattcatctcttactcagtcttgcctttggctaaatgcagtatcggtttgtgttgcctattttacagaggtctcaaagggattaagttttattgtgctaccaagtagcacaggcaagatagagagccaagcttttactctttctaccacaaaaatgctaccaggcacaagatagacagcttccttgctgtgtttttggtaactttcaattcataattggatcaatctattatgtttccccacattaattcccatgtttacaaaggaaatttacaaattagagaacattaaccttttaattatgaaattaaatacaaggaaattacagtttgaagattttaacagatactaaaatctggtttcatttaaaatacttcaagcatactttagaaaaatgtaaagatcaaagattttgtatatttacttctggttacaaatgccaggttattgtattatctctgttctggcttatagagggactttactatagtaacaacaaagagattttttaagaagccataaacacacaatgccaagataatagtgaagataaatgcaacaaaattattgcagaaagaaaatgaatgagagcaatagatttagcagagccaataaagctaaatgctaatagcagtaggtaaagctaaatagaagccatatttatgccacagaacctctaagaggttcaggaattggcaaaatctaagatttttggacaaaggggtgaagaaggtagagctaataaaagcattattgactgacagtcttcatgagatttccaaatacctacttctatatcaacaaaggtccatctagtcaaggctatggtttttccagtagtcatgtatggatgtgagagttggactataaagaaagctgagcaccaaagaattgatgcttttgaaatgtggtgtggggagaagactcttgagagtcccttggactgcaaggagatccaactagtccgtcctaaaggagatcagccctgggtaatcattggaaggactgatgttgaagctgaaactccaatcttttggccacctgatgtgaagagctgattcatttgaaaagaccctgatgctgggaaatattgagggcaggagaatgggacaacagagggatgagatggttggatggcatcaccaactcaatggacatgagtttgggtaaactccaggagttagtaatggacagggaggcctggcgtgctgtgattcatggagtcacagagtcagacactactgagtgactgaactgaattctatgtcccaaatctcagctggccgaatagtcttcagggtatactctgaggcaccatatactattttcatatttctatagtgaatgtaggcttccctg

SEQ ID NO: 52296 - DNA, 1349 bp, Bovine  19866880831816
  misc_feature (1)..(1): n is a, c, g, or t
ntattagtcttctgatggtacatgtacttcatgcacaattttttatgtatggcatatttcacaatacagttttaaaactgcattatatactttagtaattataaaattattatctgatcctatggtggtgcagaatagacctcaaacagtaaaatagtaagcacttaagtttcacagaaagatatatgaaagtatagcccaagagatatattccaatgacttcaacaaattgggagagaaatttcgagatgatagaaatttcagaaaaagagattgatatacatatgtgtgcatatatatataagaaaatctatattttaatttgtggctgtctataaaacttctaccattcctgagtatacgcagagcatcagaaaagagccgaaagacagtcaagggtctggggagggttgcgagcagcatggtgaaggagagaggtcctccgttatgtttctgccctgtaggtatcaaccttgtgtgagagaattagaaacagcagttatattcacaatataaacatagctagtgatgacactttagaagtatgaattctgagtgaatataacagtgacagtgagaattgccacaatttgggtattcatctcattacaaggacatgacttgtcaaatgggatgcatagcatcgtggggacactgaagaccagaaatgatgcagaacaagatgatgaaagaagaaggtggtttgaacaaaactagtcatggactatctgttcccttaacacacctggctaagagttatgctgatggcctcttgtgttcatgtactcagttgctcagttgtatccaacttctttgtgacccccctggactgtagccctccaggctcctatgtccatgggatttcccaggcaaaaatactggagtgggttgccatttccttctccagggagtcttcctgaaccagtgatcaaacacacatctctttctttggaaggtactgagccaccagggaagcccaggattatcctagggatgtggaattgaaaacaatatcagagacaccactgtgtatcaaaattgttttaagtatattatctctaaagtaaatgttttactgttttataggttgcagagcttgctcagtggtaaaggctcaattattttcaaacaccttcatcatattcacaaatttccaagtaaagaaacccctccagtgacttctgtgaagggactcacacagggtggatccaactgagagctaaaggattctagatgatggcaaaggataagtaagcatcaagcttcctcgtggaacagtgcctgatacaaactgcttcttacctggacagagttacatactgttccttaaccattttttaaaatagtct

SEQ ID NO: 52297 - DNA, 1491 bp, Bovine  19866881013737
  misc_feature (1)..(1): n is a, c, g, or t
ncagagatgtgtccttaaatatttcctcggaaaaattaatgaagtgaattaaaacagaccttctttcaagtcgttccaaatgaactcatttcatagcctttatcatggcttccctgccattggggaaatttatttaagttattaaaaaaaaaattccctaaaattctcagctgaaaaattggcttctgttttttctacaaagctaactcacctgatttgtcagaacagcttgaaaatgaagtgctaactggtgggttttattgaaaggaaaccgagtggaacaacatatgtattttcttaggaaactcaaaaagctcacagtcatgtggtgttcctgcgggtgaattctttgttatgaattacaacctgcttactgatgagttgttaataaaaagtaggcctgccgggccattatatttttccacacagtacacacagtttagttttctttttctttttttttaagttttcattaatgcactgagtgtgaataaatctgtttctaatttgtgattgttttcccttcatctggacaataatttattgccaaatctcacacttgtctatgactaccatcccccccaacaggaatgttttaatttttctttctccccccttcctttcttgccccctcctccactgccttgttctaaactgagggaacgtgagacacaaaaagttgcaggatggcagggttcttgtctgtggaggtcacgtccaaatatctggactcacgggaagccggaggtaacccaggcgctggtggacccgtccacgttcatcgtaagacccgccagctggagttgtttggagctgagaaaataagctcagggaaaactgttgaggcaaactagaaacagatggtaacctgaggtggcgggacaactttatttagcgtggcagttcgactttatttatttattttacacgcgcatctggtcgcgctggggcgccgctatgcatactcattattaggctgttaatagtggatctgatttgccaaggaatattagcaattaagttcactatgtattcaagtcgattcatattttagtgggcctttgtgaggcatgttagtggttagggttttatgtggaaagggcgtaggagctgccgtttgaagttctagtggtgtggaaaatgtgtatctaccaatttaggatcttaaagtggtcccaccaccggagaacacggtcaggttgtccataaacggccagcgggatgctaatgcattgctgtggatgcaaccttgatttagaaatattcggggttgctcctttgtggataggtggagggtaggtcctcccttattttcactggaggtttgagaacccatctagggatgggtttgggccacttaattcattggtccatgtctcctttctccatcaatagccccatcaatacttaaaatttaaaaaatcattttgtgacgggagaggcaatatgagaggaaactagatttgcacaaacaaaataataaactcagac

SEQ ID NO: 52298 - DNA, 1117 bp, Bovine  19866881284880
  misc_feature (1)..(1): n is a, c, g, or t
nctattattttaatatatattttaaaaaggctactcattattgttaattcagaaaacattctagtgtcattcatgttttatctcactttctctttctaaaaggtcaaagagcaataattaagaactaccaagtaccaagtagggcagctaaagactaaggaatccattctgcagaactggaaaaactcgtatttgatttacataaggatcctttcttttttcttcattttggttaaatataccagttgcagaaagcattccccataatattggttttgcttctccaaaagaaaagtagaagaattatgtactcttattgttataataatcagtgataataataaatattattaaaatagtaaatattaatgacaaatattatttaaataataacaaatattattattaagtatagtaataatatgaaggtttggttcttagtaaacaagatttgattatcaagactcttttccaaaaaccttgattgtgatgagtgaataaggaagatggctgaacatcctgtctttctgtctttcatgtagactgctctactgtggctgtgggtttcccaggtgtctcagtggaagagaatctgcctgccaatgcaggagacacaggttcaatccctgaaggaggaaatggcaacccactccagtatgcttgccagaaaaatcccaggaacagagaagcattgtgggctacagttcagagggttgcagagtcggacatgcctgagagactaagtgcacacacacgcaactgtagctgtacaatgaagaaaagacacgcccttcttgctttgttttcctgaaaagaattcaattgtgctatacatcttaaaaaatagtagaatctctcagtatgtatttcttctgtgtttgcttgcatgtgtgaaaaatgtctctataaacatttaagagattaactttgactcccccatttggttttaagctctctgaaattaaaaatgagccatttattttgatggaataggacataaaattgttaagccttctccttttatcactcagaactgtctcttaattctctcttaaatttatgaggtctttatatctgctctgttttctttccattttccttataattcgtcttccaa

SEQ ID NO: 52299 - DNA, 1374 bp, Bovine  19866881473765
  misc_feature (1)..(1): n is a, c, g, or t
ncccttgtgtttctgactctattttttgacagagaactgtttttcttagattacttttccactaatatctattataaagaaagctgagtgctgaagaattgatgcttttgaactgtggtgttggagaagactcttgagagtcccttggacagcaaggagattcaactagtccattctaaaggaaatcagccctgaatattcattggaaagactgatgctgaagctgaaactccaatactttggccacctgatgtgaagaactgactcctttgaaaagaccctgatgctgggaatgattgaaggcaggaggagaaggggacgacagaggacaagatggttggatggcgtcactaactcaatggacatgagtttgagtaagctccgggagttggtaatggacagggaagcctggggtgctgcagtccatggggttgcaaaaagtcagacatgactgagcaactgaactgaagtgaatatctgcttgtttctaaaacacaagatctaattttaaacttgatattattctctgtaattttctatcagaagagagaaaaatatactcctgaggttccagtattggaacaactattgaaaatcctagagtctctgaactagaattttcaactcttaatgggaaaaaaaaggatttatgtggtgactggaaagactgttaaactgggcttcactaaatggatcagaggaaagttgaaaagtttctttatgtatgtggaatatctttacatacatggactatttttagggctgatcaagaaacatgcatttaattatctaatttttaagccagaggatgcagttgagctgaccaagggaccgctaagataggtctacctcttgttagagtttggaggccatccataattttggggcacttttccagttcaaagagctcaaaggcaactccagaaagcacagatgaccctttgtttactgttaaagtgaaaattaatgtttacagtgttgatcagcctgctgcatgctcagtcgtgtccaactctttgtgacccctatggactatagtcggccagactcctctgtccatgggattttccaggcaagaatactggagtgagttgccattcccttctccagaggatcttcctgaccccgggattgaatccatgtctccagcattggcaggtggattctttacccctgagccacctgggaagcccctctattgttgacacaagacaacaaaagatcctgaagcaacttctaaaccaaagaatccataaataatgtcctatattcttgaatatgttttaacactttttttttaattacacatttagtgtaacttcttaaccacaaaatcctgttcccagaccatctcatatgaagaaaaaggagcca

SEQ ID NO: 52300 - DNA, 971 bp, Bovine  19866882132913
  misc_feature (1)..(1): n is a, c, g, or t
nccacacttctgtccagaaaagttctatcgttgggattttcgtacctttatgaaaaattattgattttatctaatgtttagattaaagaaatgaggggaaatacaaactctttctctctcttttgcatttttaatctacaaaaaaactttctactgtagtatcaacaataactggatgtgttccactgtcttttacttactttaatggtgttcaatttaagaaaagctctgaaatgatttgattgaaatagggaaaatgctggagggtctaaaagaccttgttacttttgtttcagaaatgttcaactataactggctgaaactttgaaggttttaaagtacaattagtcctcgactttcaaatactatgagagttattcacttcctaactcctcctccagagaaggcaatggcaccccactccagtactcttgcctggagaatcccatggatggaggaccctggtaggctgcagtctatggggttgctaagagttggacacgactgagcgacttcactttcacttttcactttcatgcattggagaaggaaatggcaacccactccagcattcttgcctggagaatcctagggacagaggagcctgttgggctgctgtctatggggtcgcacagagttggccacgactgacgtgacttagcagcagcagcagcagctcctcctccctaccctaccttttgggagaacttggaacttttagagaaactgtgggatcatacaacaaagaaactgggaaactcaggaaaagttctgtgctgtgtatctccaatgaatgtttcctttgaggatccaggacatcagagctgcaaactggtcctttgaggagggtctgctggcatggccagaagtagcccgctataaacaggaaatgtaactgaagtctagcattttattcaagtgagtctgcattcaatcactaatacttctgtatttgtcttaatatttacata

SEQ ID NO: 52301 - DNA, 1793 bp, Bovine  19866880553656
  misc_feature (1)..(1): n is a, c, g, or t
ntttaggagaatggtgataatgagggacagcaaccccagctatggcaaatgaagtggtagtgactgtgtttgaactttcaatatcctggtatctgtgcttctgatcttcctatctgtgctcctgcaagttcttaaaaccctgtggacaaagaagggtcatttggctttttttttggtttagtattaaatgttttatttgcaaacaaatttacaacttgtagttgacaaatcaaaattaaaagacggatagtgattaatttagagttcaacaacaaaatagttgctccgtaaatactcactaactggtgagagtgaaaagagactgaaactgatgtctcctgattctttgccctgtgacattttaactccctctttgcattttcctggtggctcagctggtagagaatccacctgcaatgtgggagacctgggtttgattcctgggtcgggaagatctcctggagaagggaaaggctacccataccagtattctggcctggagaattccatggactgtttcatccatgggtttgcaaagttggacacgactgggtgactcactttcacttttttgcgtttcctaaggctaaaaattcactattttaagtatgcatcatttatgccaaattttaaagtagtctttggtagctctaaattgagaaatggtctttgttgttttgttgactatttctaattgttcagttaactgtacagtgcatagtgaaaggacatttgcaaccacagtatgctaaagactttaatgctattgagcactattcttgacttacgtcatttttatctccacagagattggcccagtaacagttaccacagatcccaagaaatttcaatatgagctcagagaactctatgttcaggtgagtgctttcttttaattttatttcttttaggggaaaggaaaatcatgaacttttggctgatcatcttcagttttaagtctgaaagtaataattcttagtttttagattccaataccactttttctgacttgaatgatacacatggaattgggacagattgggttcaaaacaccaccttcatttatgcattgtctgtagctgcttccacgcaacagaggcagagttctgtagttgtgacagactggcccacaaagcctaagtgtttactgtgtgatgcttcagagaaaagtttattgacttctgctctagatgacttccagagaaggcaatggcgacccactccagtactcttgcctggaaaatcccatggacagagaagcctggtaggctgcagtccatggggtcgctgagttggacaggactgagcgacttcactttcacttttcactttcaagcactggagaaggaaatggcaacccactccagtgttcttgcctggagaatcccagggacgaggaagcctggtgggctgccatctatggggtcgtgcagagtcggacactactgaagcgacttagcagcagcagcagcagctagatgacttcagtggtaaatccgcttaccaatgtaggagacacaggagatgtgggttcaatccccaggtcaggaagacaccctggagtagaaagtggcaacccactccagatccttgcttagaaaattccatggacagaagaagcctggtgtgctacagtccatgggggctacaaaaagtcagatacaactgagcactagatgactcctttcgctgactcctttcactgtgtcataaggaacagttaatttttttcctgtaatcgttgtgctataattaggataacttaaaaattcttactctaagtcatctatata

SEQ ID NO: 52302 - DNA, 1585 bp, Bovine  19866880747935
  misc_feature (1)..(1): n is a, c, g, or t
ncctggcaaggctttatctctcctgagtatttttttttttttttggtctgagtatttcttataactgataaaaggtttatctcaagtgtccagtgtgatttgcaaaaatgtatataaataagcttcaggaaatatttcctgtctttgttgaaaacaggtgggtatttgaatctctcgataattaaatgaaggctaatcagttctcctattttaatagcatcccctaatctctactattgaagacagacatgtgtcagggctatttaaaaaattgttattataaggaatgttcttgcatgtctgtactatttattttcatataattgatttttctagtattcttttattcctttctggttcttgagttttcaattctagaattattttagtattatgccatgtagaagcacagaagcgtggcttgatggtgctgctgacaatttatatgtcagggtgtaactgcctggtatattctttgctgttttgcattcctttgcaaaatatgcctttgtttagtcttgagggagtagtcttctccgattttccatatactcaggacatgacgtttacatagctaatgactgttcttctctgtatggaattcagatgtttgcattttcacacagtttctccaatcacctcttcattccttttgcatgctgcaagatgtctaatctgtggtgaagaatggagacatatttttgtgtaatttctaagaaaaattacatgggctatgacaagcatatcatgcttcctatccagtttacctcatttatttctaaaattctgcaatctgtttttgtatcacatttagcatattatagaaggcctggctcattaattattatcctttgaagtcataagtcctattctaacagtatgtgtttgaagctaatgtctcataaaaactaaatgttaagtatctttataattttgtattattatcttcattacataaaatagaaaagctttgatctaccctaggaatttaaggtgctatgtctgtacacatgatacttggatgaattttaaactattacttaaatatatggatgtttccgggcttccctggtggctcagactgtaaagcatctgcctgcaatgcaggagacctgggtttgattcctgggtccctgggcaagaaagatcccctggagaagggaatggctacccactccagtcttcttgcctgcagaattcctcctggacagaggagccttgtgggctatagtctgtggggtcgcatagtcggacacaactgaatgactaacatatgggtgtttccaggcttccctagtggctcagctggtaaagaatctgcctgcaatgcgggagacctgggtttgatccctgggtcgggaagatcccctggagaacagcatagcaacccactccagtattcttgcctggagaatcctcatggacagaggagactggtgggctgcagtccataggtcacaaagatttggacatgactgagtgactaaatacacacccatggatgttttctgggggaagtaattgatacctgtaaaggccagtttcagcttgtctattttaaaggttaatttttttttttttaaga

SEQ ID NO: 52303 - DNA, 1456 bp, Bovine  19866881028015
  misc_feature (1)..(1): n is a, c, g, or t
ncatgtgcagccagcagtagtttaaccctgagcaagatggtctgcctccctaggcctcttcccctcatctgtgaaatagaggtgatgttcacggtgtcttttttttttaacttatttttttattgaaggataattgctttacagaattctgctgttttctatcaaacctcaacctgagtcagccatagatatacatatatcccctcccttttgaacctccctcccatctcctgccccatcccacccctctaggttgatacagaggctctgtttcatggtgtctttcttataggcagtagtaaggattaagtgaaatgaaacgaagtaaaataaaattcatctcttgcttagaggccatagcaagcacccaatcattctgatctggtgtcattttcttaatcacacagcatattttcttacgcttggaccacagaaaggagttacaggagtctttcatgtctgatagaaaatcaagaggaatatgtctatgccaaacagagcagcacagggcaccactccagaagaaagccctgggtattaaaaagcaatgttggaattaaaacatccctacactgacaatctgaaagttataacagtcattaaaatatactctcatgggacttctaaatatcatcattgacctcgttaaaaaatgtaaatttcttgacaattatttctttatttaataaaatttctttctgctataacatagtcagctagccagcattacttaggaggggggaataaaagcaatctacaagtgtgggatgtagagggagaggttttggggcggggactggaaacggagacatctgaagctatcagctggaagccgtagacagaaaggattgggaaacagaacaagtgaatcacccactggatgatggatcttttgtgttaggttcttggacacaagaatataacatctgtgggtaactttgagatttcaaacttgaacttaaacctaggaagcattaattggatcactgacaatcacccagtttataaagaaacgaaaaacttagactgttcaggtccttttccgtcttcaaaggtgaattaagtgcatctctgagatgtgtcttaacttgtattgccaaagagtaataccacacaatgacttatatatccctgatgctcagccaaatacttgcttttctttggtttctcttttatgttaaataaagatgaaagatacctagatcttctccaaaaaaaatgaacaggaagaaagaaaaaaaaaattcaagtaatctcgagagagttgacacaaaatataacctgctcgtttaggaaactgatgaactgggttaggaggataaagcacaataatcaacagattcctttggaaacaaaagatgaaaaaaatcactctattaaaatgaaaggactcagtatgtgtatgacttcaccacagttcttatacctatcaaatgtgcagacatcattatagcat

SEQ ID NO: 52304 - DNA, 2237 bp, Bovine  19866881031869
  misc_feature (1)..(1): n is a, c, g, or t
nttgttgttttttgagcatttggttcacctgttttatccccataaaggtgagggcccttagcaggtttctgaatctagtgctctgttttcaagaagaaatatacctatgtcaagaatatagtactttgcattcatctcctggcatataagttaatagattttgtgtatgtctttgttgacagtaacataaatttagagctggaaaggacctcagaggtcatctagtccaaccaagtatcttttaaagccaatgaagaagtagtaggtttatttcatcatttcatacttatgcactgtatattaaaaaaaaaaaaaagtctttgagatgacctacaataaaaggcacagacactgtaaaacaagggcaaaatgacagaataatgaagggaaacaggtaaaaattatattaggagacataggaaggaaactacatttccgtctaaaacttagccataagactctttatcagaggaaaagtgaaattcaaatactaggtcttactatttagtgacagttgtatctacatgtgttagcaggcattttttaaggttatctgtaaactttcaagcagaatgtataagtctttaagcaagagacaatgagcaatacaacaaaagccgacaaaagtccatctagtcaaagctctggtttttccaatagtcatgtatggatgtgagagttggaccataaagaaagctgaacattgaagaactgatgcttttgaactgtggtgctgggagaagactcttgagagtcccttggactgcagggagatcaaaccaggcaatcctaaaagatatcaggcctgaatattcattggaaggactgatactgaagctccaatactttggccacctgatgcgaagaactgaatcatttgaaaagaccctgatgctgggaaagattgaaggcaggagaagaaggggatgacagaggataagatggttggatgccatcactgacttgaagcacatgagtttgaacaaactctgggagtttgtgatggacagggaagactggcatgctgcactccatggggtcacaaagaatcggacatgactgagtgattgaactgaactgaatatcaactgggtgttggagaagactcttgagagtcccttggactacaaggagatccaaccagtccatcctaaaggaaatcagtcctgagtattcattggaagcactaatgttaagctgaaactctaatactttggccacctgatgtgaagaactgactcattggaaaagatcctgatgctgggaaagacagaaggtgggaggagaaggggatgacacaggatgagatgattggatggcatcaccaactcgatggacatgagtttgaataagctctgggagttggtgatggacagggaaacctggcatgctgcagtctatgatgttgcaaagagtctaacatgactgactgaactgaactgaactttaaattcatgaccccagatctgaggtcagtcttagtgctatttgggattcctactacatttccttagtcaatgtctactctcattcttctaaatacattctaattttctctctcttcaatcttccaacatgccatacactgtcttcactctcgctctgtcttcagacatgaaacagaaggcaacagaaaacaacctccactccctcccagcagtctacttttctaacctaatctgagttcatatactctgcctcgtcaacagcttactttagatgtactgttccttctcttaagtcaacacgtctcatgccctagatcagccctatttaaagtgcaaaccacgggctgctactggttatgaactgttacctgtttgtgatgacacaagtatagaaatagagaataactgtgtatagtttccgtagaaacttttagaacaacctacagagttgattttacattttttgaatctcagacttaaaaaaaaatgggtcatatataatgtgactgtgttttctaactttgtgagtttgacaatgctttgtatgtattttgtaaaaacattggactttgacagttgaaggggaaaacatggtttttcctcaccagataggttgagaaacactgaacttgatcttgttctctttgtctctcatgcgattgtcccctctcttggaacataaaacttttccttaaatctgtatcatttccatcattatacaaataagctgtcctagctcccatgtggagaaggcaatggcaacccactccagtactcttgcctggaaat

SEQ ID NO: 52305 - DNA, 1508 bp, Bovine  19866881578057
  misc_feature (1)..(1): n is a, c, g, or t
natagtgcacaacaggttgcaggggttactggggttctagcaatgtgtttcttgatttggatcctaattaaacaagagagctcattttgtacattaaaaagagaaaaaaaagacatgaaatgcacagggcttctcagatggcactggtggtaaagaacccacctaccaatgcaagagacacaggagatgggttcaaatccctgtgccaggtatatcctgtggaggagggcaccacaacccactccagtagtcctgcctgggaaatcccatggaccacggacagaggatcatgtcaggctacagtccatgaggttgcaaagagttggacacaactattatttggttacgctggctacactttatgcatgtattttcaacctaaacaaaacatttacgctgaaaacttcttgtgctctttttcctaatgtgtatacaacagacaaatttgcattgaacaaggtataaagaaaagatcaacataggcatttcttcacatgggctaaatggttttgtcatcactaaatgactaatttaggctgctagttcaacataaaaactccctgcaaactttaatttgcatgcaaaaaatacagttactaaatcaaatcaaagttcttccaacaaagacttcttgagtttttaacaaatcattaatcactcttttttcctcctaattttacaagtaatggataaaacatttcaaggctccctacagaggcttcttgacttgaaaaattactcacattttagtgagaaggagagaacaaaatacacacaaaaatgaggcaagtattttgtgaaggaagtaacagacccaccatttgtgcctatttcttctgagcaggtctgggaatgtatgacagcagtttaataagaatactcacttcacaagaaggactggtttctcactaacatggaaaaaaggcaagtacagatacatttacattctataaaaatgttttaaaatgttgatgaacaagattccagttctctttctattcaacagatgaaatattaaaaagaagtgctaatgcacctacatccaggacagtgaagccgggcatgctgcagtccacggggtcacaaagagtcggacttgacttagccagtgaacaacaacagatacatctccacatagttgacttagccagtgaacaacaacagatacatctccacatagtgcatcattaggaagtcatttctcctcactttactaacatttcttacttgaaacatgacatgccctatgacattaatttcattttattgagagtgcaatataatttgtttcagattcacataaaaagtatggtacttttcatgtgtacttacaccatttcaggtggaaaatatataaaatctgaccttgtaattctttgcaaactaaagtggtcaaacatagaatcgttttctaacttcactgggacaaggtacaagaaaacaatcactgacaagagatgaggaaaacacctgatcagggggtttctctttttaccattatgccatct

SEQ ID NO: 52306 - DNA, 2074 bp, Bovine  19866880120006
  misc_feature (1)..(1): n is a, c, g, or t
natgtgagagttggactgtgaagaaagctaagcaccgaagaattgatgcttttgaactgtggtgttggagaagactcttgagagtcccttggactgcaaggagatccaaccagtccattctaaaggagatcagccctgggtgttctttggaaggactgatgctaaagctgaaactccagtactttgccacctcatgtgaagagttgactcattggaaaagactctgatcctgggagggattgggggcaggaggaaaagaggacgacagaggatgagatggctggatggaatcactgactcgatggacatgagttttgtgaactccagaaggtggtgatggacagcatgcaggcctggtgtgctgtgattcatggggttgcagagtcggacatgactgagtgactgaactgaactgactgacccagggcacaaacacacaaaaatagtagaaagcaaaataaccagtgggtcaagtttagactatccagtaccccaaagtcaatttctcccttataactgactccaattttattttcatattccccatttagaacttctcaacaaaataaaggttgataataagaagtgtttaggacattaccttaaatagaggaaaatggaattagatatattttggttagaggagcaataaaagacaaatgtgttgaagtaggtagagaaatcacacaagacggtcaggaccctgagttataaggcatggaaaggcatgagggaaatgtaaggtttagtctagtcttgtgcttccttcaatgttcttagcacatcagtgccaacaatttggggtatgttctgcagcttataaataccaatttataagcctgttactggccatcctggtagtaatggagacaggtgaagagttgtgggctaacattttctgttttaatgttgactataattctggtctttagtaattattacccttttaccgcttaaaaggtaatttttaaggggcttgtttttagcagcactatgcataatttattgctcatggcatgtcagttggaagaaagttaaaactttaaatactaacaaaataaaaggcattttattacatagagaaaattaacaaaaataagcaaatacgttttacaaggtgagtctttcctttagtgttgtatgtttgtaaaccactctcaatagcttaggaaagttttacaagaccattcctcctgcacaatttctatttctgacctttataatagtaagtaatctacaagctttagttttctaccctcctaacacctttcaaatatgtaagcctatgaagtcacagctcagcatgcagattgcttttcctacttttgatctatcaaaggcaattatgtagttaaagattatttgctcaatccaaaccttagctaaataatcagcatttccatggcccatttcagtcagaacatgtaagaagaaaatatcccaaggacaaattttctcttgtatctagtattatggatactaacacaaaaatagtttaaatatcatttttttggatgatagccttcaaaatacagagtatgctggcctctctacttggattctctaaggaaggtcactggggaagtccaattagtaatcagaatgtattctctgagcattcctttcacattcttactctaactagaatctggctcttccctgggggtcactgaagctctctcaaatggggacaacgcttttctcatacagctcttgtgctactgggttgtacatgggtaaatgatctctatgctcttctttgcagctctcagaccatcctcccttcccttttctcataaagaaaaaaaaaaaaaaaaaaagctttgaatctcagcagactgtgtcactctactgttcattattgctgtcattctatggcaatccttgtccccactcacagcctggtcatttcttctcattttaattactggctcacactcatactggtacttagactgactttctttttggtaagtatgtaagtgatcccgtaacaatttggtctctcaatgatttagggtttttcctccatcagtcttgtattttcccctaacttactactttctcttaacgg

SEQ ID NO: 52307 - DNA, 1978 bp, Bovine  19866880172799
  misc_feature (1)..(1): n is a, c, g, or t
ncatgtccatcgagttggtgatgccatccagccatctcatcctctgtcgtccccttctcctcctgcccttaatccctcccagcatcagggtcttttccaatgagtcaactcttcacaggaggtggccaaagtattggagtttcagcttcagcatcattccctccaaagaaatcccagggctgatctccttcagaatggactggttggatctccttgcagtccaggggactctcaagagtcttctcccaacaccatggttcaaaagcatccgttcttcggcattcagccttcttcacagtccaactctcacatccatacatgaccacaggaaaaaccatagccttgactagatggacctttgttggcaaactaatgtctctgcttttgaatatgctatctaggttggtcataactttccttccaaggagtaagcatctactgcaaatattttcaagagatacaaacttgtttactatttttcaaaaataagtgtgacttttgtagtgtgatttggtggaggcaggtatgatgagaggaaaaaggctcacaggttaaagcattacttctcactcacattttcccttcatcatttttctttccttaatgaatccccagagcccctgctgcattcaagaaaactttaaaaaataacatatgtttctgataaccctgctggattccttagtacttttagcatattttccttgtaactattgctgcaacatttgaaattcactgatatgctacttagctgatgcttccagtgtctattcacagtcacaacatcacagttcatcctcagtgaggaaccttatgaaaaaaacccctgattatgtaattgtcttatgaggaccaaggaaggagctaactgtggagtagaatttttctcctaatacatacatttaccatcagaatggacaagaaaagacaaaaaggttatacaaacactagctaaataagaatgtggtttgaaagttccccatcttccaaaggctgtcttaaaatgattttctgctatttctgtaggtaggtcacacattaactcattttactttcagatgtgtaaaagaattatgcatgaactagtcttctaggttatggataatataacataactattgaaagatagtgtatttttaactgataatgaaagtctttcttttcaaacaaactcttcaaccatccagttttacattgctgaaagagggcagctcagagtagagaatatccaagtgcacagtgataagccttttcttggcctccaatattctttcagtgaacagtcatcccatcaagaagtgttttttaaaacatcgagttaacacccagcactgtgctaagtgacagaaagtatatctagggcacgtaaaatctaactaagaagactactgaataattcaaaatggtatataaccaagtaattgatgagtgacataaaaatcatggattttctagaatttagaaattttctgttctcctccatttccttgaattatggaagaagaaactaaacttccatgagctggtaggaccttcccgcattcacaccttattggaggtaaattctgaattagaattcattactttttaatccattgtacagtgcttacctctaaaattcaaagacaggaaatataggtgttgctaaagttagctgtaaatatatatatatgagctaaaagctaaaaccaaatacttgtattgaatactccaaactggaaatggcattttatttatgaatgctctccaagttttgatgactacatgatgcaaggtatggtatttgacaattaatgcatttacatacatgctgcattcacctgggtttataagaaaatgagtgaggaaacagctctgttgctctagagtgctttcatttatcatcttacagatttatctctttgtttctttctacttttagaaaaataatcttccgtaccacatcatctatgttctaagaacatttgctcttctttga

SEQ ID NO: 52308 - DNA, 1330 bp, Bovine  19866880341495
  misc_feature (1)..(1): n is a, c, g, or t
ncagaattttctgtatttctgcaatttgaaagagagggcaactatctcctgtgctttgagtgagcgctgcctgctggaagaatgtgaaaaacagagtgccctctgcttttgttgagctctccagtttttctcataacaggtgtatccagtattagtaatgctgataaaatgaccttccatgaagagggggtagttgaggggtttatgaaataaaagagacttaatacattctgtgtatatacttgcatgcatgctaaggcgcttcaggcatgtccagctctttgcaaccccatggactgctgtccaccaggatcctctgtccatgggattctccaggcaagaataatggagtgggttgccatgccctcctccaggggatcttcccaatccaaggattgaccccctgttcttacgtctcctgtattggcaggcagactctttaccactagcgccacctaggaagtccagtgtatatacttattcctccttcaaaagcaacgtttgaaagaaagagtaaaatatatagaaacacaaatttaaaaattaatgtaataaggaagcagatcactaaagctgcaggaaaagacttctgtgaatgaggaatgagatgctgcaatgtagatgctgcaatatagttttcctctagacagccgtctgagaattttttttttttttttttttcctctaagtctaagccttcatggaactgactgtacaggtgctggaagcattatgccttgagatattttgccaaggcagtggtgtttcattttatactaaagaaagccacattcttcctcatactcacacacaaaaaaatcacacctctattcagagcccaagttgtcatcggaatggaaaaggttggagttcatttatcatgtgcatttctatggctacagagataattgggttgattccatctagccttctgcttctctcgcattttaattgaaaagcctcccgagtgttagaagcacagagctggcctgagacatgaggatatttcacttaggcagcaatggaccaaaatgacaaccagaagacagcctaagcagtgtgtgggaccaggagcctgttatgtggctgctggaaactgaccagcaagggggcaggggtggcacattctgtacctggttttttttttttttttgcttgagaatactcacagatttcatttctggctacttttaatttaacatttttatcacagcttttccatcaggtgtgagtacccgaagacaggactgctctcagcctgaacaatttaaactgagtctggttgattaaaagaaaaggctcaagcccaaatggcactggaggcagcaga

SEQ ID NO: 52309 - DNA, 1800 bp, Bovine  19866880364149
  misc_feature (1)..(1): n is a, c, g, or t
natagatatccccttcctttcgagcctccctcccaaccacccacaccattctacccctctaagtcatcacagaacagtcaagctgggctccctgtgttatacagcaagttcccactagccatctattttacacatgatactttataaatacacgacaatgctatcatctcaattcatcccaccctcttttcccctcactgtgtccaaaaatcctttctctatgtctgcatctgtatttctgccctgcaaataggctcatcagtaccattttttctaaaataccagatctagctcagatcctgtgctaggtgcaaatgtactcatgtgagtactgtccaccgtgagctcataatctagctggggaatcatttataaaaatacaactctaatagaatgtaaaagccgctgtggttataaaggaataggatgaagtgatgaagaaaagacaacagtcagaacattcatggggagggattggtgctaaagagcagcctggcagagaaaaccagaagagccaagatagacacaacctaatcttaatttttctcagggtgtagtatggtatatcaaattttttgatatttaagtgtttgcaccaaaagggtggttaattttcatagttctcaaaggatgctcccaaagaagacagctcttaggtaaaaatgaaagaatctctctattataaatttgatttttcttatatttttttcttcaactttttggtaactgcttttgtcagctacttagaaatatctagcatatattaaagaaatcattaaaagcggatgtttgtgcctggtttgagtcataaatttgaatagtaaaactatccctgctgctgctgctaagtcacgtcagtcatgtccgactctgtgcgaccccatagatggcagcccacaggctcctccgtccatgggattttccaggcaagaatactggagtggggtgccattgccttctcccaaaactacccctagattttttctattaaagaattaatataaatcaatttccatgttattaccaaatatcatatttttcaagggctctgctgggtgaacaagtgtactttgcctgttaagaatgatcaaattcacccattctgatcagatttatattttatgtttcaaaactttgctatgtgccttagaccagcatacatgacacaacaaaggtgaacttattgcacatatcagtaatgctagcaagttcaagtcctctgactttttatggcatacatgacagcataaataatgcacacacacaaaatcatttaagaaactttattcttgaaagtatacaggagaaatgattaagaaaccccatgtggtttgcaggcatagcatatggcttatggttttgacactgtgaccaagacatttaccaccagctggtaccagtgtaactagttgcaagaaaacatccaggagtagcagaaccacttccactgctgaaagttctacaatacttatttggctaagatatagcaaatgtcgggcttcccaggtggcactagtagcaaagaacctgtctgccaaagcaggagatataagagacgtgggttccatccctgggttgggaatatcccctggaggaaggcatggcaacccactccagtattcttgcctagagaatcccaaagacagaggatcctggtgggctacagtccatggggtcacaaagagtcagacaagactgaagcaacttagcacgcatgcatgacaaatgttatttggatagaaatgttatacctatttggggaggaaggagagcaatataatgaaaagaataagcaaaaaa

SEQ ID NO: 52310 - DNA, 2367 bp, Bovine  19866880411510
  misc_feature (1)..(1): n is a, c, g, or t
ncatcaattcttctgtgctcagctttatttacagttcaactctcacatccaatacatgactactggaaaaaccatagctttgactagatggacctttgttggcaaagtaatgtttctgcgttttaatatgctgtctaggttggtcatagcttttcttccaaggagcaagtgtcttttaatttcacggctgctgtcaccatctgcagtgattctggagccccccaaaataaagtctctcactgtttccattgtttccccatctatttgccatgaagtgatgggatcagatgccatgatcttagcttcttgaatgttgagttttaagccagctttttcactattctctttcactttcatcaagaggctcttaagttctttgccttctgccattagggtggtgtcatctgtgtatctgaggttattggtatttctcctctcaaacttgattccagcttatgcttcatccagcttggcccttcacatgatacactctgcatgtaagttaaataagcagggtgacaatatacagccttgatgtactcctttccctatttggaaccagtttgttgttccatgtctggttctaactgttgcttcttgacctgcatacagatttctcaagaggcaggtcaggtggtctggtgttcccatctctttaagaattttctatagtttgctgtgatccatagtcaaaggctttggcgtagtcaataaaatagaagtagatgtttttctggaactcttttgctttttctatgatccaatggatgctggcaatttgatctctggttcttaggcattactgatgcatgcatgcatgctaagttgcctcagtcatgtctgactctttgtgaacctatggactgtagcctgccaagctcctctgtccatgggactttccaggcaagagtactggaatgggttgctgtgcagtcctctagagaatcttcctgacccagggatcgaacgcttgtcccttacatcttcttcactggcaccactaacaccacctggaaagccccaggcattaatgatatgaaataaataaaataagattcctgtgtatgtgtttctcatcatcttgtggagctatgtatgcaatgtattcccaaaacagtggtgtacagagaaaagtcattgctatagcatcctttgttttttcacttcagttctcatggggcaaaaactgagcccaacaccaaggcccacttactcagtcagacaatcagtttggatggagtggctgtagaatcttctagttttattgtcaagataatgaatattcaaatactgtatgtgagttgagagcatagacctgtcctgttagtgagtagacagcaattggagcaaatctgcttttctaaaacatccccaaacttattttgggccagtttgggtgagttcatgctgctgctgctgctaagtcacttcagtcgtgtccaactctgtgcgaccccatggactgcatcctaccaggcttctccatccatgggattctccaggcaagaacactggagtgggttgccatttccttctccaagggtgagttcatgagattagataaatcacagaatggatgactcagcgagagattgttgggacaggtaacaaaagaagacatctactagggacaaacacaacgaacatacaaagtgaaatgaaaggaaaccaatccttagacgtaaaaagtgagcctcaccactgacacttgacatatctgacaggactgtatcaacaagctgtgatgtattttctgttggctgttcctggtctatttttctctctagacatctttctttaaaaagaaaatccagatttctagggttgggcagagtgttgggaagaaatgacaggaggcaggccctgtcaaggaaagacattctctctggaaggaagtgaggggccagaagggaaaggctggctgctgcaggcaggcttcctcgtcgccctccatgtgtcttttccctcccacttctgtgggcactttctctcttggctcagggaggatttaggaaagtcacgacaaaaatcctgtcatgtgcgagaaaaggagaaaaagttttagatctctgccttttcacaaatggagagtttcttggaaaccgatgtgcagtttgagataggagctttgccttgttaaagtcactctaacgttctctccaagttcccacacgccctgcttcaactaccttaacaaaccactccctccccggccctcccctcccctgccactgccgcggccacccacacgaaatctaagttagttggcagtcagcaccatctgtcccagggctactacctctaaggactgttgatttatcatgaactgatctgagacatttcccctttgatcttctactggcaatg

SEQ ID NO: 52311 - DNA, 712 bp, Bovine  19866880433643
  misc_feature (1)..(1): n is a, c, g, or t
nattagtagcatcttaaataatgcaattttatcttgtcagtgaaatagctataattaaaacaaattatctctttccattcatagcttaattccaatagcacatctgatagattcttaaaaaatgttaacttgtcttatttcaaaattaattcaagttagagtacagcatttagaaagttctcgtgtagggcaagtccatgagtgtttagctgccagggtgtctccagagtccagtttaatgctagcagagaggatgttgaatgcagtgaactatcccactcaggagaccacccataatttcaataccaagagctaattgttgctcagttgctaagttgtatcccacactttgagaccccatggactgcagcacaccagctttccctgtccttcactatctcctggagtttgcccagactcatgcccattgtgccaataatgccatccaaccatcttatcccttctcctcctgccctcaatctttcccagcatttagagttttttctgtctactttttgatacctatttttccaatcacatatgtgcaagcatacataaacaagtgtatacatgtataaaactatatgtttacacagttagttttacaaagcacaaagttgggtggctgttatagggcatctatgagaaatgccatgtgacaatgtgatgaaagaattgggcctatttgctcttaatggtcccaatagctgac

SEQ ID NO: 52312 - DNA, 1722 bp, Bovine  19866880502320
  misc_feature (1)..(1): n is a, c, g, or t
nctacttctttgggttgttgtgaagatgaaaggataagcacttgataatgttagttattatctcaggaaattgcttgctgagttttggaagaagctatgtacatcagtatggccacagtatacatataggaagagaagacttaaagcctgctgtgaagctaaagctaaatggaatagaagatgtgaaggttccagcaatgttagtgctctattagctcagggcaaatcagctcttatgggttctctctggagaggcaaagccagaacaaaaaatgagtcaagtgtatcgtatgatgcccacaggaaaaacaacaggcagagggcagttatgctttccccaatgcaataatgtcaattcttctctatgtgaaaggctaatagacaaaatcagggtcactatccaaagagcttagcgttgaaagaggtagttgcaaataacagctacagatgagaaataaggtcaacacagagtaaaattgccaattagctcgatataaaccagatgaaatgtacccttgaggatataaactggatgctacattaagaaatataagtatgatcaagaaagtaatgactgatagaaattgaagtgtgttaacaaattcccctggtgggagaaagagtaatgtatcctcctttctcctggaaaaagtttttagataatttcctaaactgacactttggtgttaagatttttatttttatttagtttcttttatgcctaagccacagaacttgactaacagtaacacagcattcaattacaagtgttcctattccaaacatatactcacctctccccatccatcaaaccttgattgaatgccagggcactgcatcatgtcctgaaacatttgaaatttgtcaaacaggagggaaaatgaatccctgagatatgggcttcccttaaaaaatgacttgttcaaatttagagaccatctggagaaggactagcctctttatctacgcccccactcgctcattcatcagcagctcttcctgtgctgtgaaggattaaaataagtaaataaatgaaaggagttctagcctctgtccttaaagaacttttggtctttagttaacatcctgccagtacaaggtagaaaggaaccgttcgactgatggttaatagttagtatactccaaaatatgccaacagctcagataaaaacagctgaatctattatgttagtcatgaaataacagcctcaaaaccaaaactgtttcttcattttgaacaatggtcaacttattactggtaataacatatatatgtatgtttgctgctgttgctgctaagtcgcttcagtcgtgtctgactctgtgcgaccccatggactgcagcccaccaggctcccccatccctgggattctccaggcaagaacactggagtggggtgccatttccttctccaatgcaggaaagtgaaaagtgaaagtgaagtcattcagtcgtgtccgactctttgcgaccccatggactgcagcctaccaggctcctccacccatggaattttccaggcaagagtactggagtggggtgccattgccttctctgatatgtatgtctatatatatgtaaatataggaggaagggcaaggttacagctttatcagctcaatccacatatgctgctgctaagtcacttcagtcatgtccgactctgtgtgaccccacagatggcagcccaccaggctcccccgcccctgagattctccaga

SEQ ID NO: 52313 - DNA, 1498 bp, Bovine  19866880549459
  misc_feature (1)..(1): n is a, c, g, or t
nataaacttgagtatctattgtttaagatacccagtctctggtattttgttaaagcaacctggtccaactacaacaatagattatatgtggaagagtgttgggagatgaggccagaaaatgttacaactatctttttctactagcgacaaagtatataaatgtaaatattgtcactaattttaactgattgttagttcttctacgttaagaaaaaaaataccctgttattttgtgggtattataataacttaggagtatgagatgatttggaaattttgggtgattatactgcaaatgaaagttaaatattttactacactattccatccatttggagatatagaccatgtggagaaagtagttgttttgtctttaatcatgtgccatttataagactgcataacgtgcctaacaatgtaaattgaaatgtgtgtaaggaagtggaaaggtaagtacatatgtgtgtgtgtgtgtgtatatatgtatatatatgtacaaatggaaactaagtcttaactcacacatacagagcaatgcaaatggtatttttctggaagaaaatatcctacttaacattatcctcttgagtgctgctattgttgtcataggaaattattgaacatatagtagtatactctatgcttgggagaataaacattaaatgttccccaaaggtattctccaattatcaatcaatatatttaaaacaaggacataatcttttacattcacacataaggttttgttcagaggttaaggaaaaatgaagtatataacaaccaaaagacaggttgccttcaaaaagtgattcatgactttggagaatgtataattgatgtgtggttgtctggatggtaaaataacaatgccatccattaaagacgggagctctaacaactcaggcagggaggcaggatgtattttataggtcacctgggttccatttggatctacaggttgctattccttctccatacttgaaagcatttaatggattattataaaaggaaaaagatggtatgcaataatggtttaaattgaagctctgtgtgtatatcaccactatgtgactcctaaacgagagcttcatttttaaaatcctcatatggcatgcttgagagtttgcctgagcatggaggaatcaaaacaataaattcagcagtgagaaagaaggacatagagtgctggggagaagcggggttttttcctttccttctatctttctccattttggcatccacgactataaatagtgaaaatcttatcagaaaaaaaaattgcaattttttatgaactccaaatgagcagtaattgggtcatgttttttaaaaaacacattgatttggaaaatggggtataagatgaaatgtaaaaatatcgtaaaagaagctggggggaaaatcttgatagtaattgtgagtgaaaatcaaatcaaacagcaactcatctggaaaatacctcctcctttcgaaattaagatagctgcagggggagact

SEQ ID NO: 52314 - DNA, 2898 bp, Bovine  19866880562709
  misc_feature (1)..(1): n is a, c, g, or t
ncggcttggtagattgatctgctactgtaggaacagcatgtgaatgaaattatgtcttgccacttgtcatgcttgagggaatttaaagagaattccacagctggtttagtgtatgatgcttggtatgcagttccatggggactgtgccacaaagatagctcttattatttaatcatccgttagtttgtgcgttttcagaaacatacaccctgcactaaacaggggtatgcccatatcatcttaccgcttgttcaaggtcctgttaaaactgccctttcttctctgcaacctccattcccaactagcctgagaaaaaccaattatttatcttttgtattaccataggcttctatacatacctttagtatagcacttaccatattgaagtgtgtatttgagtctccctaaatatattttgaatcccctgggggtagggatcatggcttattcatctttgtgtctgcaactcctagcacaaaacttgacacatagcagatgcttgataaatatttgttgaaacaaaataaaatatttactatagttcttcattgaaactcataaaatttgcacttccttcctccccagatatttaaccatctatgtgaagggaaaacttgattcagaataatgaatagacaacattgtactatacagggctggcctgaaataaaaggttttctagcttccacttttctcactcctctcaatggctctagtccaaatcacctatgacctacattctaaatatagtaacaaggattttccagccctggtcttacctttctgctctgccatactgacacagttaagtggtttgttcttgtactctgcctttgggaattctctcatggatttccatgatattgctctgttgcttttttccctaactctgtgattgttccttaatctcttagcaactatcttcttctttctttggcactcttattttctcattctacatgtggtttttggggggaaatcattcctgctcaggttttaattattatctatatatcgatcacccctaaatctctttactgaactcagaattatataatgccatcctcctacatgttcaaagagaacctcaatataacctcctccccaagaaacagaatagcttcctatggtacttgttatatcacaattttagttctggcaatcgccccagctagaaatctgggaggtgatgatgaatccttgtgtctcccagatatgatcattattacttgttgaaaaaccctctcctttctacactcacattcatcacctttatgcaccataatagcttctatttgaccctcctccctcccatgttccacagtcttgccagccaagtccctccaagatgttagttgatgatgtcattctcattcttgaaatctgttaacagattggtactcttcataatgataaggaaatctaaattccttagcacaatgtaaaggctcttcataatccagaccgtttcctgttcagccttacgtcttggcctcctcaaatttcagctctaagttccttccaagcttccttccaccttccaaaacactggtggctccttaacatcctgcctcttcagatgttgcttgtccacctggagcatccttatcccatttacgtttcatatggctaaagtgcccttcaaaaggtggtaatcaatcattcacattgaatcaacacatatttattatgtgtttgagatgctgtctgggctctggacataattgctgaacagagttagccctttttctcctgaaggttacattttaacagaggagagagtaattaagcagataattatactaataaatctatgattataagcttaggcaaaggtcctaaggaaaaataaagagtatactgaaaagtgttgatttgtcaagctccctaactaggctgtgagctaccttaagggcatgaacttcttcattattcctctttatatttttagtgctcaaaagggatttgatttccagaaggtgatgagtggatatttctggatgagtacaagttttatttcattagttcaagaaatggtatatgtgaatagcctgttgcttataattcaatggaataaattatcattttttaatttttttaacttttagaaaaaaattaaattttgtttatttttgactgtactgggtcttcatagccatgtgcaggcttctcattgcggaggcatctcttgttgcaaagcttgggctctaaagcagagactcaatagttttggcgcacaggtttagttgcttaatggcatgtgagatcttcctggaccagggactgaatctgtgtcccttgcatcagcaggtggattcttaaccactggaccaccagggaagtccaattctcatcttttagaagtaaatcaattaatctctaagattttttccaactctaaatactgataggttaatgactcatgggattaatgactcatagaaggaacttgccttgtgtgttatgctgatatgatgtttaggacaatgcttcctttgaatgagcatttactgtgtaagataagagaatagagatgcctaattttttttaagatcctcattgttaacttcagaataatccagaatataaggagacagtctaaaaatggactcatcgatgatgtagtttagcaagctaaataatagcttaaggactcaactttttaacattttatttttttgctttgttatttgtaatatttacttaattcatgaatctcaaccacatattaggtgatactttacatggtataaaacattagagcaaaaaaagaggaaaatgtcacttttctgtgcagatacttaagcgcaaaagtagacaacatttcataagccagcccttttctgcttccctcactatggaatcagaggcctcctgtctgaaattgacaagaactga

SEQ ID NO: 52315 - DNA, 1927 bp, Bovine  19866880566434
  misc_feature (1)..(1): n is a, c, g, or t
ncattgaaagtcaatgcaatttagagcaatttctctggcagtggaaattaacctgcaggaatctgctggcaacaggtgtattttagggcatccataccagcgtcctgcactgcggagacaggaccttgactaccaggtgtggtgtgggaggctggataattggaggaggcaggaaatcagtgcagggagggtggccaaattgctggtccatatgggttggtataattattggttaaccctctcctggctgttaactaaaagctacttgtatactcaaggagccaggaaatcttcactgaagggaaaaaaaatcactcactgctcaagcaggcttaattttttgataactgaggttttctgcaaagtatcttcactttaatgtctgatacttagaatagatgattgccaggagcccacagatcttcaggaaggcacaaggggaagtaaattttaagtgctgaaagcttacttcttcagaaacataatttttcctggtgtgtttgtcctggtccacttcttttgaaagacctatagggaggaatattcagattcaggaaacagcaattgtgttctatactttcatttcttctcgatttgtatttctacctgtgttttatcttcatatggtctattttgcctccttgatataattctctttccttggtttgttaatgtctattgtttcttctaagcaacttaattggcttaaattaagcaaatccaaggtcctgatctattcaaaattccagtcatggaataaactttcaccccaaatcttaatagtcatataatatccatgacatacactgatgaaagttatgtgccaaaggcttttagttttcttaatataacatgtatgacactcttaagaatcaagtaaaatatattaatttttgccaaagcaatgtgctgctatgagtaattattattgtgaaagtaactgattttattaaaaaataattatttggtgttttcaaataatcagagaaattgatggttcttatgaatactaatgggcttctcaggtggcactagtggtaaagagccctcctgtcaatgcaggagaagcaagcgacttgggttccttcccttggtcaggaagatcccctggaggagggcatggcaacccactccagtattcttgcctagagaatcccatgggcagaggagcctagtgggctatggtccaaagggttgcaaagagttggacacaactgaaatgacttagaatgcacgcatgcacatgagtactaataaagtattggatagataactttggaacatatcctttttttgagataactcatgtttacaaaatataaataataaaagagaataattaagatttgaataaaccataattttaatccttataaagttgtttgacatagtagtattgaaagcattagacaaaattgtacttaagtaccgtatttagtatttagctatataattctatttatgccaggatttctttcaaaaaaaattcctattttgaatttttcatgattttgagtatgtcaatttttctacctcaaaatgttcatgaggaggaaaatttcccatcatttcaatagtacatagcataagtatttgatacaaacaaaataaaaaaatgacatgaaggaaataagaaagtattccacacattttatttttactaaccaagcttcagaccaaccaacattgccagacaaatttaagaaaattacttgtaattttggagtctatggaggttaaatatgagatttgaattttgtcaaatagacgtgttctggtctagtggttctcaaagtgtggtccctgaaccagcaggtcaggatcagctgtgggtccagggcccacagagggtattattaggagccctctaatgatccaagagtgttccagagtataagaaccactgctctagactgctaaccatttt

SEQ ID NO: 52316 - DNA, 2073 bp, Bovine  19866880673894
  misc_feature (1)..(1): n is a, c, g, or t
nctaattatcatctcacttattagctaagtgagcttggtgaaacttctgtaaacctcacttttttcatctacaaagcagaggaaaaatagtaaataatttacaaggttactctggtaatacaaatattaatacaatgcctggcatctggcaaacactcaataaatattgactgtaattagtatccccaagtcatggatgaaaaaataaattcttagggaagttacaaaactttccccccctatccacagctaatatccaacatactcagtatgtgaatcacagtatatctgattataaaaatcatgaatgaatgaatatatagtaacatgggaatcagactcaatggtatctaatttcagaactcatatgctttttagtcccctacactgtttatcaaaagcaggtgggaaaatatcatggaaggtagatagaagcagaatgaaagaagaaataattggctcaagtgaagcttgcagtcctggtggaagtgatgggaggtgggaggcatatgactgaggtccaatataaacaactgactatgtgcacacagtttccgagtagaatttggcaaagagtgacagggaacccaagggctccataatgtcccttgatgttgttgacatctaatcatttaatcttcactagaaaacattgcttcaatctcaaataacaacagccaactattttctcaaaagaattaattttcaaaccatcatgtgacatttacattttgcaccttccatcttaaatcttcctacttgtcagatgttttgttgttcttttatgaaatggtcagtcaggcgtggccacaagaggagacagaggagatgctcgggaagatgatctgttctgtgcacacgtgcacacaggagccacgccacacagggtcacatggaaatacacaggctggtcaagaggcagaagacatgagaaagggcaaagtttcgaccacagcctttgctgggtttctgtgggaaaggcaagacagggcagggtaaacagtttaagactggttagcttgaatcattccagtgaactctaaattcaggaggtgacccctagttgtccggatcctggccctgggatgcttaaggcagaggagtattgccccctgcagtggacaaaatggattgcagagggacagctctggatggagcagtttgtataccaaaggcatgttcctcacggagcactttgccatcgctaagaattggctagccccaggagaggcagacgccccagccagaaagatttgtttttttcacaatgttaaaacattaacatacagaaattatatatttataaaaatgttatgcctatacaatagttaactttttagctgcatattcagacatcaaactattttttcaaatatgatctgaaagatatcttaaagtcatctataaatgagactgatttacccaactacccatacaacaggtctgaaattatgtactaaatcagctaatttctgaaattccctggtgatccaatggttaagggtctgcctgtcaatgcgggggacctgggttggatccctgatccgggaagatcccacatgctgcagggcaactaactccatgtgccacaactgttgatcccaagctccagagcctgtgctccaaaacaagggaagctaccacagtgagaagcctgggcactgcaactagagaaagcccactcacagccgtgcagccaaaaatcaggaaataacttaaaagtaaaaataaaccagctaatttccaaaaccaaaaagctggataattcaagtttttttccttttgacaaaaaagttatgaaaacttttctaattgggactccgtttatgtgtgccttgttttataaacattgctatatcctttattcttggtattatttctctattaatattatgctgagttgtcaggacttgctttcaaagggctcagggaaatgagagcatcatttcttcctgtggaaagggggtgatcaggaccccaaacctcaggatcgagcagatgatcaaatctcactgactgctcaaactcttccttattgagacaggttctgtcaaagctgctgctctttcaggg

SEQ ID NO: 52317 - DNA, 1357 bp, Bovine  19866880754761
  misc_feature (1)..(1): n is a, c, g, or t
nctctgcagcggttcttctctgaagtatctagataatagtatctgatgcacatttcctgagttgtcttacagatgctaaccccatcaacaaatgaaagaaattaacttcttgatgaccatgtgcagtagcccccagacctatctgctcctaaggatcgataatgttaacccctgtgacaccaccctgttacttcatcatcaactaaccagagaactgtgcatgacttgatcacataccctcagacgtccctcccttgccttgtcttttttttttatttttttaagtctttattgaatttgttacagtattacttctgttttatgttttgtgtttttggctgtgaggtatatggaatcttagctccctgaccagagatccaacctgtacctcttgcattgaaaggcagtgccttaaccactggaccaccagggaagcccctcaacttgcctttagaaaatgctttgctaggacttccctggtgatatagtggatcagagtctgcctgccagtgcagggaacacaggtcagatacctagtcttggaaggtcccaaatgctgtggagcaactaagtcttcatgccacaactactgaagacagagcacctggagcccgtgctccacaagagaagacatcacaatgaggaggccgtgcaccgcagcaaagagtagcccctgcttgccgcaactagagaaagccctcacaaagcaatgaagactcaacacaaccaaaaaacagatagttcttttaaaaatctatatatttccacatgaaaggttacaacttaaaaattgcccagtgttcaccaatttcagaaatctgacctttgctgatgctgcaataaaatgttgcaattgaaaaaaaaaatctatattaaaaaaagaaatatttaaaaaaatactttcctaaaactcgtcattgagtccagactttttgagtgccagctgtcccagattccttgtctgacaccttacagtaagtgctgcactctcagtcaccacagcctgatgtcagtagattcgctttactgtgtgagggctagcagacccaactttggttcagtaacagggctgtttatttcagcatttgctttacctacatgagaaacataaacccctcttgtttatatctacacaatcaggtttctgtcacatgcagccaaatgcaaatctaaataatatgtgggttctaagaatctctgtgtaaagaaatctatctttcttaaacttatttgtacccaagcatttttaaactatttattttttacttcatttgatataaaattccacaaaacaatgttccattggatatctgtttgggtaatgaagttttatttcctgttataaaaaacttgtgta

SEQ ID NO: 52318 - DNA, 736 bp, Bovine  19866880775612
  misc_feature (1)..(1): n is a, c, g, or t
nactgcaggggtggcacttagccttccatgatgttatgattggcattttaggcaaactttaaccctcttaccatgttaataaatagcagtagattcccatatgtagtcacacaatgaaacaaagtaagaaagctgttcattacccttaactcttctgctcctttgcccttgttttccctctgcacgtggtcagaaattgaattgatattgaatttgcttcacttgtgtaatactattcatacatggttttataattcattcacttcattcacatttcaccttttgtcatttcgatcactttaatctgctatggtctctttcacatttcatctgctaagttcctgagcatgagtagatttattaattttactttctgggcttctagttgcagtataaatgatcccatcaggacatgggtttagatactgctaggcctgaagtaaggcctaaagagtagatagataccagcattcacagcaagtattcatcaggaagcaggcctgcaggtcatagagacagtattacgaagtcgctaaatgtgcaggcagagttcacatcctggagtgctgttgtttgctctgggaacttttgcaggttccttagcctctgcatgcctcaatttccacatctgcacaatgcatctaacaatattattgaccatatagaattattaggatgaaatgagaaaatctccaccaagcactcagctcacaacacatacgcaatgaatatgaat

SEQ ID NO: 52319 - DNA, 1436 bp, Bovine  19866880801968
  misc_feature (1)..(1): n is a, c, g, or t
nctttactaagttctatttctttgtagacatagtgccaagtactttatatacatttgttatatcattcagttgtcacaagcctcagggaagatttcttatctccattttataggcaaggaaacagtggcacagacttcaaagtcacataaatagcaagttccagagctgggacttgaactcagttacctccagtcagtacctttaacctcaacttttccttcagcacttgtcacctctaagagagtgtcaagacaaaatgggggtgggtggatgttgctaagaagttcaggccataaatggagggagctgaaagtgtcattgacactagaactaatagcaagatttataataataaaggaaagagagccaaatataaaatgcatgtggtggagaaaacacactaattcagcaaagcttgagggaggaactagctctcttttatgcaaagacttgtatgcccacggtgggctttaagaacttgccacactgatttccattatgaagcaatattcagttactcaaaattgttgatgaaagtgttgcttccagaaagactcaaatcataaaacagtatctctaagttccttggaaactgatttgcaaaaaattttccctagatacctatatgaaggagaatctaatttgttcccatttgtgttatgtaaatgtgcagattgtaagagtattagtacttctttttttatttcaagctctttgacttaaacacttaagaaaaaataaatgtataccagttccttctgtaccaggtattttgttcttgccattaatgctagcaactatctatttagaggaaatcttgtaatattacatgccattaaaggataaagttgcggatttttctgttgttgagatgcttaaatgtatggaagtctaacaactttttaatgtattatttattttagctttacttattatggcttttggatatatttttcatccttctatttcattagcttttgaaatgaattgccatatttcttatttcaatcatccatccaagtcaagtacttttctgaggtagattcaacaagaccataactactaacacctggaattttcaaacattaaaaaaaatctgtatcagaagccataggtatttcaagatgaattctatcttttcttctctgccaaccttttggcctaaggccctggggctacgcattgttatgaagaagttcaggggacaggcagctacaagtaccatgtgcaaaatgtgattcattcagggcataaggtaatatttactccagatattaatggttgcaatccacaaaagcaaaagattgcttcactttatctctcctcagatataacacacaaaagtgactggcgaaactagccactttctaataacagcttccagaggtcacagagaggtgaaatcgtcactgtgacggggatactgtgggcgagg

SEQ ID NO: 52320 - DNA, 757 bp, Bovine  19866880851586
  misc_feature (1)..(1): n is a, c, g, or t
ngagcagagatttctctttaaatactttcttgagagtaggtctttaagcagatcgatatgaaaactgaaataaaaaccaaatgcagtatgtcactaactttgagcaactgttgctgtatgtgtgtgcatagtatttatagtctgttgtgcttaagaatgaattgctaaatggcagctctaggaatatgagctctgtaaacgtgaacagtcacacaaaaactatgatgtatatgtgttgtgcatattagctcacctgtgaatttaacctctggagagaattgtaactcaccagcactttgtgggaatgcaaaaaaaaaaaaaaaaaaatcagaaataacaaaattgctaagaggtaggtggcaaaatgttattattatcattttatagaggagcaaaaaatgtgcagctgaaaggtcaagtatcttgttcaaagtgacacagaatagtagagttgagccctggaattattaacttctgttttctaatctagtggacctgaggttatagaatccaactaggaaggtcaaaaatatcagttttatgatatgaggcagttatgctacgcggtcgctcctgttcttttgtcccctcacctgggagccacttgatgactttagtctcagcaacttcccccatcctggggaactgaacctgaaacaagagaccatattaacagccagtacctcccactgactatgaatttcagatccctgctccctaggccattcaatagctgtagctaatcagaatctctttt

SEQ ID NO: 52321 - DNA, 1408 bp, Bovine  19866880883126
  misc_feature (1)..(1): n is a, c, g, or t
nctgccagagacatttgcatcacaggatagcagcctcactgtgggaacttgctacagtactttcatttttatcatggcagtgatttctgcagcccctctttcctggaagtgtgcacaatctcagcattgtgcttagttaaaaataattgtggaatgagcttcaagtaacgaaagtgaaaggtgtgatctgcatgcacagaaattcctcttagaagcatcagaacttgtggaggaagagtgcactccttctggcaagtgtttctcttcatgcacgtgtgcgtggtaagtagtttcagttgtgtctgcctctttgtgaccctatggaccatggcctgccaggatcctctgtccacgggattctccaggcaacaatactggagtgggttgccatactatcctccagggaatcttcctgacccagggatcgaacccacggttcctaagcattggcaggcaggttctctaccactagcaccacctgggaagtccatttctcttcataccagttcactaaactagaaattgtagtaatctttcaaaactaagagtagcgagaataagaaggatatattttttaaagaatgaaagaaagccctggctttatctctttctttggctatatttgtcggttttctgaccaacctcagtggcagacaattagcacaaagcacttcccgttcagatgagatattgctgtagtggaatttacaagcaaaggtgaaaagtgttagacagtgctgggcttgtaggctgaattgctgcagatggaacagcccaggtagcttgttattaggagatgtccctggttgcaacagaacagtcaaactaagggtattccttttctttcttaattagcaacttgaataaataattttcctcataagctcaaatcaggatttgatttgagcttcccaaaactgctacatgaggcatcacagacagcctttaaggggaaaaaaaaaaaaagctccttctgatttattaacttaagataaatggctctgctatcataacctgtcagtaccacgcaatgaaaaggaaaccagtggcgggaaccatgtgtgaagccgctcagtgtaaccagcctcagacacaggagtcgaactttcaataactccaccaccttcccctacaggaaacagcccaccagcacattcctcgttcattaactttccaaagacatctgtctttgcagaatcacagaggcagccaaacatgatgtgtgaaataaagaatcctgcccacctcatgctccaagcatgaggaaaaagtagtgcttggtggaaaccatcatactacgtatggctgctgtaggagactcaattgcaaaagctgcccctcaagattcgagtaaaggagtttctatccctgtttctcagttcttggcatttggcttatttcctttgaa

SEQ ID NO: 52322 - DNA, 1174 bp, Bovine  19866880907657
  misc_feature (1)..(1): n is a, c, g, or t
ntgctgaacaggcctgtggctcagcagaggctagggtcagcatgaggcttctgtggagtgggcagaatgatgggcttgatcaagtgatatgatatatttttgcatcatcctgttgcatttggtttcctagactgcaagctttttgaaggtaagattttacttatttttttggtaaatgtattgtgtataggacaacatctcacactacaatattcaactagtaaatactaattttaatctgtcttcataggcagttcagatctccattatctggtaatatgagcatcccaaatgatctcaaatataaaaagcattggaagatctcttatagttgaactcaatccaatggttttgctaaagtttgtctccaggttttcctgtttattccgaccttgggaacacaaagtacaattccttcttcccacagagaaacagtataatgttcttatatgtttctccttttaacctcaacaaagcatttcaacctagattccatatcagtgaaacctctattatataatattatgtcaagaccttttcaagttagaaaaaaaggtcagtgtttttttccactgagtaaacatgtggctctttcatctcacaacatacttttcaacttagtattgtcattctatgaacccaaatgatgtctctgattggattcacattgactatgagacagatggaattttcaaatgagctgaattagagaatcaagggggatgacttctactgtacttggtgatttgattagtttttcatgttatgttacactctcttatattgggctcatttcagattttaatacatatgagcagctcaagttacttttaaactgtacaaagaatgtatgcatgatacatagtgggactattcttagttctccttttctctccttccattcttttccaaaacggtcatatctcaaagtaggactaagtcacaagctttctgttttacatgaatgacagtagttcttaacgctagacagctttgcaaaaatacacttctggtcccaaagtgggacagagatatagggtatgcacagaacacaggaaaatgaattgcagtactctaaggcttaatgggtcagtgtaaacatctctctaaaaaattataaattattatagtttaagcaatttgctactactaaaatttgttttcatgaacatta

SEQ ID NO: 52323 - DNA, 509 bp, Bovine  19866881022310
  misc_feature (1)..(1): n is a, c, g, or t
nattgtgacaggcagtacgtaagtttcattttataccagcatattcgatatgaaagacaatcattgtgtggttggtattaaattagcaaatccaaagagattgcaccatatcacaagttgggaatgctgtgtgtttaaggaacttaattatcatcttgtctctttttaaaagaaaaaaacaagtgtttcttttccttaatcggcaatataccctgtaaataatgctgttcccttcacactgaaaaccatttaattccccattatctcacttcattagccaaatgtcctgtttaggcacactctgaatatgaagcacattataatgtgctgggcaaataatatttagaaacatctttgaactggaaagaaaaacccaggaaaacagaagtcaacacagatgatatgtattcatcgtattctgggctatttcagggatctagttcctattatgactgaccttgaaaatcaactaggagcaattttcacacactgtagtaaggaaacaatta

SEQ ID NO: 52324 - DNA, 1031 bp, Bovine  19866881079691
  misc_feature (1)..(1): n is a, c, g, or t
natctcgttttctatgatcttgtttgtttttgaaatacaattgatctataacgctatgctagttcctgttatacaacgtagtgtttcatatttctatacatttcaaaatgatcaccatgataaatctagttaccattctcttacttaccatttttacaaagtcttagaatattttttttctttaataatagatacattcttataaaataagttaggaaacatttaacctaatactgttgttttacaaacaataaaaatgagactcaaaaaagctaagtgaattatataaagtcctcttcttgcaatgtaagccaatttctttttgtactatagtgaatcaaatcagaaaagctgctaactttcacagatccatgtcctgtactttaaacccatgaatgttctggtcattctgtcctctctagcaggttagaggggaaaaaaaaaatggccatttttcaaacttatgaacctcaagctatatagttagagagaatttccaaagaaggtttatatacctttaatatataaaatagtatcctgaagctagattttttccattaaaaaaattctttcaatttcttccatttgattgtttcgttctttagtataagttacccagcaaaaggcctgaagaataaacacatggcaagcaattgtgatcactcttccttgccctggacaaaagcttattagattatattgatttaccagctctttccttgcagaaatagcctaattaaatgtttagtaccacctttgaaggtgaggtcaactcaatagttactttggattctaattttagaagctctcccttctctgattatatttttggtaatgagaactaaatgttgatgccttaaattggcaccctttccattcttttacatattatttcttggaacaaaaatgttgttgggagtctgagtttgaattgggcccaatcacagagaatttttacctttagtggaaagattattctcttctttactgggagggatggtgatatggcaaccctagtgttctttcttttt

SEQ ID NO: 52325 - DNA, 1070 bp, Bovine  19866881136272
  misc_feature (1)..(1): n is a, c, g, or t
ncacagttagtgagctgctgcatattttatctgtctgcaaatctgtctgccctaccgactactacttcctgtccacttacactaaaagctcagcatacagagaacattcagtaagtaaattatactcccatggctggggaaggactttcccacttcagcttatttgtcatgactccctctataacttgaggcccttgcttatttcttatactctgattcatttgcttcctggttaaatggaccaatatccgtggagctctccatgacaaagtcagccaggcctcagccccttggcctttctccctgcagggctagtccagaagctacagagggtgcttttttatcttaagcccactgttgctcttggattgactctggtttaagaatattcctataatccctttggatcagcttttctcccactattccttattactaatcactgttagatggaaaatgagaaatctcatcattttggttaactgggtcactatgaaccaaagtattcctatgttcctaccctgaaagcataattaaagccttgactaattactgttaaagtaaccttaattaactaacctaacttaccactaatcaagggaatgggtcttctgagggactgtgaatcattttctagtcagtatataacataaggtaatatacatctatatccctagggatgtactcattaaaaataaataaaaactcttcattattaggagataaaattggagattgcttgtttacttgtttatttatttacacaaaggattggactcaggaccttgtcttgcatttttactacagagcttttgccatgtttatgagacaagtagggacttggcatctcccttacttactctgggttattagtcaacccatgataattatttcagcagtatgcagaggctgctatatctgatcgccacattatgtggtatgtttgtgggcatgcacgctcagtcatgtctgattcttcatgacgccatggatggtagcccacgaggctcctctgtccatggcattttccaggcaagaatactaaggggtttccatttcctccttcaggg

SEQ ID NO: 52326 - DNA, 1720 bp, Bovine  19866881206293
  misc_feature (1)..(1): n is a, c, g, or t
nacctatatttgtaaatacttattttgatctgcacagcccttttatcccttttaaaaaatcattcagccacgtcgcatgatttctttctcttgcctgcctggacttcagtgactctgctttcagttcagtatctgaacactagttcttagttttgccctttcatagattcagctttagctctccactgatctcttcactgtggtcttgcctagaggatgaagcaaagtcttcagcaactgtgctaaaggcttgttctgcctcattcttctcagtgtgcaccatccttaccatctgagacttatgattagttactcattaggtaggctattataattcataaactaatatggaatcatgaagaaaatggtttagcctttactgaccatttctaacttctcatgttaaaataatttctgacctcgtcaacacagaagggagctaaacagaagcattacctcaagatcgtttcattgttcaaacagagaaaccataaccaattacaattcctacagcttgccttacacttcccattctcaggtaacatgtattaaaccacaattgttttagttatgatggaaagggtcagtaacacaatcttcttaaattctactcttaatcaggccaaaataaagggcacaggcttctgtctgacgccaatttaattacatgaatctgaacatgccaacttttaatagttagcaaagtaaatcttccatgtcctttaagactgtaaatgatactgtgaagttatattgaagggtataacacacagcacaaatatttacagcaggctaaactatttgttacaatactcatttctaaatgaattatcttgtgggtagtagtaaagctgaaaactaagaaataagggtcagattcctcctgtgagatctcacttgtataattatcccaaatgtaataatacgacattattgacttaagcacactttccaatgacatgccatagctgacctgtaatttttatcctacacgatgccagccctaataaaatgacacttgtgaatgtaaattaagctcacaaaggggacagattgcatgattctggtttctttcagatgcctgtaggctatcacaggttccatatgtgaagtaattatgttcactgaaggaaagaataaatgctgtcaaattgtgtactgagagagaaagcagttattatatttcagtagtcgctagagcattgcccccagacagtagcaagatgtataagaaaataaaaactgtgccagccatatattacacatctgcctttatatttgtagctccctttaaatgtatattatacaaagtcaataacttaccaatgaacgtttggctgtctccttcagtatattttctgtggagccattttggaatatgtggcatgatggttatagaaggggtaatgaatatagatgtttcttagttctgctttcccttatgttgagctgcaaaacaacaatcctgttggatccctgatgtttggactttgcttttttcctttaacaacatctcaaattcaacttcagacctgcccactgctgttttctttatagctgatgggaatggctatgaaacattctaccttctaaagcatccttacctattgagagcattttaaaaaataaatttagatagaataacagatagcaatgacttggtactcattaggcattgagtaatttattagagaatcctcatactttatcttactcagca

SEQ ID NO: 52327 - DNA, 1334 bp, Bovine  19866881206740
  misc_feature (1)..(1): n is a, c, g, or t
ntgttatttcttgcatgccagctagagcccagaatgactacatgccatcattttcaataatgcctgtgtgtttttgaggaattacacacacatatgcacacatagagcctcgctttaaataaattctacaatgagccacctgtccattaaatatgattacacaaatgtgatttaagatgtcttctgagctttcctttcaattcccttcttatagacaaattggaagccacctatggattccagaccatgctttgacacccttccttgcttctttccaaactcaaaatcagtaacataattgccaatctgggtttaagcctttgccacctcctgaataaattaccaaccagtgaaagggtacacaaaaacacctgcaaatcatataacttggtcaatcacttcacaacctctctctggctatcacaggctgggcttcacaatgcctgatacagcatattatgcaatgatgttccatgttgccagtaaaccatggctttatgccaccgttccatacagcagctctatttagctttatttattggatttttaaatcctcttgtacagtaggcattgatctctcctgaggttgtgattatagctttaactattgacacttctatcagagccaacctcaattctttgccttctgctgacaagaaatggtaatcattccaacaccgcaatctctgaatcttgaacccccgtcccacatactttgccctgcataaagagtacacagatgttggttagctggtttcctcagcaaaatgtagtcttcaaagagtaaaggtaaatctgtaagggtaagtctgactggaagcactgaaaatgctctgagacacatatgcatttaaaaagctgccttcttcccactcaaaaatttcatgtttgtcattatccacctggagcactgtctgtcaagttattgaagtaattgacagtgagaactttcttagaagagattctacctttctgtttgctgatgaatctcagaaataaagtaaattccatcattacaggtagtaattagcaagaagctacattggaaatcaaaacatagaatataaaatatcagttcagccattaattagttgtgtgactaagtagctcaacctctcctagcctcatctagaaaatgagaatacctcagccttcctcctagtgtaagtgagagacttgtgaaaaagtgtgcatgaatatctggcatatggtggattgccagtaagttttcatttaacatcccattttgccctttcctctaccggcttctcaagaattgttgcttgtgaaagactagtcaatcattctgttatagttcttcaccctagtatagg

SEQ ID NO: 52328 - DNA, 900 bp, Bovine  19866881274788
  misc_feature (1)..(1): n is a, c, g, or t
ncactgtgattaaactcctaggaggcactcaacatccacatttgttgtgaaaagggccctgattagcatttgtactatgcattttggtaatcagaaatcattatagagaatgcaacattaaatgaaggaatatggcaatctcccatgcattaaataggctaattttttttaaagaaatgactttatatctaaaggaaataacatcatttcttttcctgcaaagcaataacacttggtcagatgctctctactaccatctataagtattgccacagtgaacatttgattagcaaatagccactctgcatgatatggaggctgctttcatttaaatgttgatatgtaagagctatttttgctatgtgtctttactcttggggagagctaaatgatgaattaaactagtcagagatacaacagcaagttttaaattcttaaaacattccaacaaattaggtcaagattcaagaagtcttctgacaaaagcatcagaaatatttttctgttctataaaatattaacagggatgaaagctgttaatataatgtttttggcatattttgacacaatctcttgttacttcaagtgacttgcatctactcatgtattaaaatcttaaacaattgaatcaagaccattttgtgtatgaatttgtctttttcacagttttatatctgtaagtaaacacattttgagaaatcctttctgtatcaaatcttgcaagatgatattgtccctacttacaagtattcaattccatttgttttaattatatagattccttggtaaaatattgaggaaaagaggcattgttaagaattgaacaagacagtcaaactgtgcatttactcaaaagaaattttaaacattttattgttggcaggtaaaattgaaatcaat

SEQ ID NO: 52329 - DNA, 1713 bp, Bovine  19866881278937
  misc_feature (1)..(1): n is a, c, g, or t
ntgtttgctgagtgactgaagcacactcattctgtcttatttattattacgtactgatgatctaaagtggttttattgaaagttcttatttatctagatttcaacttatcaaatcttctcccaaattaaaaaaagctgcaagttttctttgaagagtcagttttatttctcctttagtgagctgtattccactgactattctaaaagcttcttttaaataatttgcatcaggcagttatgcttctattatgctaaactctgatcacacaagtgtggcccagatgtccatagaccaaataacttaaacatcttctcacatgctacagaagacaaagaaaaattttctatatttttcaagccaagatttcccttttaaatttttgatccttatctttttttttttccataacattagccaaagtctcatggatcttattttctatatgttgcccttcagagaggtcctttgatgacaagaagaaaatgttcaaagatttgatctggacaacagagaaccacagagctgtgctacttcttttttctttgccttgaccttacccagaagaaagcactcctttaggctcaaactcttgaaaatgattgaagtctctcttaggatgtgcttaggtcatagaaaaaaaaaaaaaatcatttaagttccattcaaggtacagcctccctttactgtatagattaaattggaaagtaccattgggaagggaaagaggatcatgagtatttaaagtttatcataaatgagaagtttgtgaacaaagcctgcccatgaggctgaggattgtgtcacattacttcttaaaagcaaatctgcaaaaaggagtactcaccatacaatcacaccagagaacaaaaattcagtatatgcctcattatcactctgagaaacgccagtaccaatggtctttctttaagctcttgaccaccttttgacatttttcctttaagtcacatcatctttggcagctcacacagcaactaaaaaattttgtttcttgtcaattataagtccttttatgttttctttctcacagatttttgaaatgaggaaaatacatgagaaagacatttcttagatgaagagagaaaggaaatatttgccataaaatgactcactgccaaagttactattttactagacaagagaaacagcagtcttggaataagtgtttacaataacagtgttaagtattcatttatctatttgaccacgttaattaaaaacgctattaccagacactgcaaaatgggcaagtgaatttatacttgatgccgatttgaatttatacatgatgacagtttgatccaagttttctattctcagcgtatagattgtaaaacaatgctatttggtgagattatataaaccctatattatagctttaaaggtaaataaaacaactcccactccaaattatttctcactccaactgcttttactacactgtactccatattgtagagtccactggtaaataaataacgtgcaatccattgtccttattgtcactgaaaacatgtattcattcagtgattcttttattcaacaaacattctgattctattgtatgcaagaacaaactatccataccccaattcagcatattccatattgttgagattttggggtctaagacagggatcagtacttttatctataaaagaccaggaaataaatatcttacaactgtaaaaagg

SEQ ID NO: 52330 - DNA, 740 bp, Bovine  19866881303478
  misc_feature (1)..(1): n is a, c, g, or t
ncaaatagattaactaccttttgtacataattgcacctacaacacacaaatacaagggggaaacatcattgacgtttgtggtgctttgagagaaagagaaatgccagtggagaggtctccactgtgatcctgaaagaagatgaacaattttagaaaggaaacgtagcccagaaacactttgaaaaggctgcaatgcaaattcacagtacacgttcctatactcctttgaggaagaggtagttctctgaaagatgataggattgacctgtggaattatgacagaaagagttcatcacattaaactacttctgtaagtggaggagagacagaactccatattctaaaggatggatgtgcacagtgaactgactgaatatcatccataaagtcaagaggagctgagctggttgaatggatagggcacatattaaattgatagtgattaattagttttatgtcacgttggtgcttttagacttgttcatggtgtggttttcaattattttagtattattggaagagccaagattagaccatagttattagaattagatgagttaccttatttgcagagtaggataacctttgctattttccttacacgtgataagtgccatttgcgaagaaaagaaaatgaggcagtgtgaatatctataaaggcttagagtaggctagatattttttaaaaatagaatcagatacaccatatgcccaagattcaaaaagatatttggatagat

SEQ ID NO: 52331 - DNA, 998 bp, Bovine  19866881345781
  misc_feature (1)..(1): n is a, c, g, or t
ncatccaatgcgagacacttgggttcaatccctgggtcaggaagatcccatggaagagggcatggcaatctactccggtgttcttgcctggagaattccatggacagtggagtctggtgggctccagtccatggggtcccaaacagtggaacataactgagtgactactactccctactcctctgtttttggctagtaaaatggacacagcttggatttataagaccatgtatccccactcatgcacatcccttaccttctagaagactacagcaataatagaattcttagttgtaaggaatgtggaaattccccaaatgagtaattaatcaacagtattcgaggtactagaatgtggctgggtggactcagacgcccttggccaaataagactgtccaggtcctgctgaataacaataggaatttagatactgacaaagtaggaattatttttatttctcctataaaccttgttaattgtggttagtgtggtagcatacccacctaaaaattctataaattcttatcacattccttctgcttgatgtttaaggtacactttcttagaaagagaggtaaaggaaaaagatgtataatagaagctctttaaaatatatcattttttttttttttatctctatggggtatggggcaatgtattaggtacctcagtttcttccttcaggtatcttgcagcccaataagacagacagattgctatagggtataaaagagagagagagaaaaaaaaaaaaagattaagtagtaaaagttgttttaaatagcctcacagaaagggaaacaattaagggaaatctagagggatcccaccaggtagaagaatggaaattatagacagaaaaagagcagggccaaaggcaatgaggcataataaaataattgaaatgtacaagaattgtgagtagtgtgttacacaaaaatgataggagtttcagcagtgaaaatttaatagtgcataaggtccaagaagggcttcc

SEQ ID NO: 52332 - DNA, 1359 bp, Bovine  19866881405645
  misc_feature (1)..(1): n is a, c, g, or t
nttaattaattgaaataaaccccatgacttatatatgtagcttccctggtggctcagatgataaagaatctgcctgcaatgcaagagacccaggttggatccccaggtcaggaagatctcctgaagaagtacatggtaacccaccccgtattcttgcctggagaatcccatggacagaggtgcctggcggactgcaatccaaagggtcacaaagagtcaaacacgactgagtcactaacactttcacttttcatgttccatgagcaacatataatttctattttacagaaaaaggtctcagtgaagttaagctacctgcctgaaaaggtatttatttgccaggatttgaatgtattttcatctgacataaaggtcactagctttattttatatgacaatatcctagatatccaaacaatgaagagtctacaactatgtatttgactattctgtacctctttagtgcgtatgtgaaccacaacaacaaaatatagattgtgggtaagaacttctcacattgtcacactgtttgtatccacatgggaactgagtctgtgaaacacagaaacctccctgaggaagaaaccagtcacaaaaaccaccatgagcaccagtaatacacaagtcctggtgggatcatcctccattcctcatgcccttcccacttgatgaaataaacatcccctagtttcctgtaatttgggcttcagactccttggagagtaaattcacatacttttctgtgttgtagtgggacggagtcctataaaatagcagaaaacaaatgattggtgaacaacttttttaaaatcagattctttctgagaacctgatttcattatttgttcactagacaagctccccctaaatctattcacaattaaaaaaaaaaaaaaattacccagctagtagtattgaactgtgccttaattagagcagccaagaatgtcttgtataattaactgggctttgtttataattatttccttgtggttaggactgctttctgcttgtaactggggcaatgctaatagtaacactaacctttgattttcatgtgagagtaactgaaggacaggcagaagaaacacgccagacctagcaaagtaaaaccaaaggacatgaaacactgggattccttttgaccttctgttttgcctcaggatgaacacaatctccctaacctctgccccagtctaaagtctagatgctgacctatgggtttctttatcatcctgtcaagtaaaagaaattattcctttacttttggaaaatggagtgaagtcttttctctttgaggtccgtgtgctagtttttcgcctccagatccactctcatcttctggacccagctctgtgc

SEQ ID NO: 52333 - DNA, 1338 bp, Bovine  19866881413712
  misc_feature (1)..(1): n is a, c, g, or t
ncatgtggtttatttcgacttctgcagcaaactcacatctactattaaagacagaactctatacaaatccaaacaaacaaaacaaagctgaactaaaccagttcctctgaaggctgaagtccaagtaactccagtggcagttgatttcacagtggagatgtgttttgttctgacatgtatgagtgctttagttatcactgaaaggttagcgtcatagacaaaataacttcatggtgacaaattcttctctcatctatagaactcaaaagaaaaataaaattttcacattgatgtgctttgctaaattttaaactaggaggaaatttttgaaattaaaattctaacttctccatttattcaactataacaagaattttaatagatcaagatttttcagattattttattaatgctactatttttgagtactaccaacatgctgctggcccttgcttcaggaaatttattaacactgttgcatttttgccttctcaatagcccatccaattatgcatttcccctatttcacagatgcagaaactaaggctcagagaattttgatggttcacccatagtcaaggtagattacaatgtctgcccatagtttcagcatttattcagaatgattctgaatgctttaggtaaaagaaggtcatgattttaaatctcatcagaatgataaaacaggcattacactgagggtttatattactatttccatggccctggaacttcatatgcataaagtgttattttctgacattatgtagcttgatttatttttatggtaaatccattgtagagtttgatacatatttaaacaagaaaaaggatattaaatcttaaaagatcatttatataagattagaaaagctatcctaaatacacacatgtggataaggaaaatgttaactaaactgaaattcatacctgagtcatattctcttcctgcttttcttggtctgaaaagtttttcaatcaccattctttcactgacagaaaaaggcatttggctcattcttttcaataggtcctgaaataccagtctaacagtgatgttagactatatgcaaaacaggtagtttatttaaagatgtccaaagaagatccaaggaagagctgcctcactggaaaagaccctgatgctgggaaagattgagggcaagaggagaagggaacaacagaggatagatggtgggatggcatcaccaactcaatggacatgagtttgggcaaacgcaaactctgggcaatggtgaaggacagggaagcctggcgtacggcagcccttggggtcacaggagagtcggacatgacttagtgactgaacaacgacaa

SEQ ID NO: 52334 - DNA, 945 bp, Bovine  19866881521089
  misc_feature (1)..(1): n is a, c, g, or t
nctaggcctggggttagtgcttgcaagttcaggtggaagggtagtttctttaaagcccaattatacacaaaatcaaaagctaaggagatcagttaagaagtaaggtcactaaaactaataggccaaatggcagccataaaactatctgcctccatcaaagtgaagctagatgctgtccccagcaaacccccaattcccagtggcttcaaacaaatgagaaccatttctccttgtaaaatgtaaaatccactgttcttttcaagcatgactctttttgctcctttctgtggctccaccctttataatgacctttgatctgctgcatcctctgactcttgctcacagatcaagaaaacagagagtggaagactgagtgggagagtattatgggataagcctgagaatgacctgcattgatttggctcagaaacaattgtcaagaacttggtcacatttccccctccccagcaggggaactgggaaaaaaataattcctgatttaaagagaatttcctagcaagttgtctaccttatagaaggggagcatgactcttcttagagagttagtcaaccttgccagataagccaaactaaaacagctcgataagataaagcatcactgaaagtggaattcaatgaacttgggcaaaatgaaccatgtgccagtcctgaaacccgccagaaaccagatgcctctggtataaatatccctgccaataagggtatgacccagttgataaaataagtaccagggtagaatgaacaatgtgaaaaaaccaatcagagaacaaactcccgcatgaaactcagtatttctttttccttccttcctctcatccaaagatgggctgcctaagcacaaaattcaatccaaaagtgaattctacttaatatcaccaatacaatttttcactgggcttgttctgcattcggggataaaagcag

SEQ ID NO: 52335 - DNA, 2319 bp, Bovine  19866880143853
  misc_feature (1)..(1): n is a, c, g, or t
ntctcccaacacccccagttcaaaagcatctatatatatatacccatacaaaaacttttataccaatgtttatgctgctgctgctgctgctgctaggtcgcttcagtcgtgtccgactctgtgcgaccccactgatggtagcccaccaggctcccctgactctgggattctccaggcaagaacactggagtgggttgccatttccttctccaatgccatgaaagtgaaaagtgaaagtgaagacgctcagtcgtgtccgactcttcacaaccccatggactgcagcccaccaggctcctccatccatgggattttccaggcaagagtactggagttgggtgccattgccttctccgaccaatgtttatagtggtatttatattagccccaaagtagaaatattaaaaatgtccatcaacagatgaagggatacataaaatgtggcatagccatacaatgggacattagaaataaaatagtaatagaaaaaagaaatgaagtaatgatacatgctacaatattaatgaaccttaaaacatgatgctgagtgaagaagccagttacaaaagagcatgtattatataattcaattaagacgaaatatccagagtaggcaaaattatacagacagaaaggagattagtagtgacctgggcctaggaggttaggaagaaaatggaaagtaattgtcagtaggtacacagttttgttttggggtaatgaaaatgttctaaaattgattatgttctaaaactgtacactctaaatgaatgaagcgaatggtatgtgaataaaccttttatttaaacaaatgcacaaatgaagtatagagcctgatggtgtaatatgtaatactgctaaagaagctaattagtaagtcaaacattaagtgaatatacttagccagatcacaattccaataagaaaaactaaaaaacattgacaatcaaaggttttcctaaatgagttatcaagtacttgtcacttaaggaaagaccaccactctttctagcttcttttttttttttaactcatagaccagctcatcatgtaaaaattaatatttttttcctttaatttctgctcttcttttatcactgaaacaacaggctagacagctaatggtttgagcagtactctagggctgctgctatatttggttggggatcaaaaaaatccaggatctggccctcagacttccaagttcaaaaatctgattttatgtcacttaagagcaagaattagtctcttgggaaaaaccaactcattaatcaaattcataggagactagctaacaaaccaaaatgtcaatttattcacttgtaatagatgcacagcctttataataactgaatgactaggatttgagagaccctcatctaggggtgcattttttgcaaaattgctttggaagtgtgattttaaacagaggggtttgggagatctggagatgagtatcatcgttcaactatatacagctttactaattatcccttctctactacaaagctccctttcctaggaaacatggatatttatatgtttccctttcaaaagcactaaacaagaattatttgactgctttccttaacaagtaagtttgggtgaccaaaaataaagatttacttttttggtaaatttcccaccggtcttttcttctgtttttaaatacagttcaacttctattgtttatactcttgttgcttgcttttctcatttaacattttaagaaattttctatcttacaacatattaaaaatattttaacttgagtcataatatccctttgagtggaatgtatttgtttatctcttttccttctgtgagacatatatattgttccaatttcttgatactataaatgaagtaattaagtattaaaaataacacttaaaaatttttttgaggcttagaccctttttttaaaaaaaaaggattatttccttgggacacttcccagaagtgtaactactaggtcaaatggcatgaatgcctttagagctcttgaaatataccaccaaattgctttccaaaaaggttgtatcaatatatactcctaccagcagcatggaagcatgcctgctttagcactgcctcagcagtaaatttaaatttgagtaagttaggaaataaaaagccgatcaatgctttctaatttgacacagatgtacagatgtttttagctttgcctgcaggtgctcctatatgcctgttccagagaatcttgctatttaggcacctgaaattcttccaagtgatgccatctataccaactctcactttacttagtttctacagcacagaacctacctcaaccag

SEQ ID NO: 52336 - DNA, 1460 bp, Bovine  19866880448930
  misc_feature (1)..(1): n is a, c, g, or t
nagagaagcatagagatgagatccttcgatttcccagaagtgagaacatttactaaacattttctaatcctggatctattgccaccaaagacccttcccttagactcagcatttcccattcggctaggccagtgtccagggagttatgagagaattccacagaaacatggagctcggggccccagtcaccgagcccacctggcctttgccaggccgtgcccaggcctccctcccagactgagtttgtctgcgtcatcccccgcttgtccagcctctgtgtgcactctgtaggttggaaagaacagaaggcatcaggcacagcccgtggctctaagggcagtcgcggaggtgggggcttccaatctcccatgacttcagacttgcctctgttctgaactccctaatttggcatcagattccttgaaagcattgaggtttcacttggaattaaaaatgttctctccagttttgcatcttctcttgtgcttcaggccatgacatatgactggtgcctgttttttcctctttcagccaagagacatttggagcaggttgggggattaatagtacctcttccaaaatagccatttctcaaagttttctctttttcactaaagcaggaggggaatatatcagtcagtagagtgtatctatatttgttgtctcaaactacaggacactgaacgtgtccagtcagaagttttccaggcatatcctctaaaggaggcaaggagtctgtctttcatccttcttaggtctttttacttcttttgctggatcttagaggatttgaatcacttgcctgtaagagagtttagagtaataaacatcttagccaacaccagaaatatttataaaaagaccaatatatcttttagaacaaacagtttttctaagagaacatgttgaacaaccagtgaaagtggttccatcacaagaggcctccagagtgactgtcaccagcagggaggggctgtcacagccccagagtcattccagggcgagtcaacccagatttgggctgcaggggatgaatggcttccaggcagtgcattcctggctggaatgaagaagcagcaggatttggaggggaggggatgaacatgtatgtgtataggcatgtatggtatgtatgtgtataggtacatgtgtatgcacacgtatgtgtgtatgtgtgtgtttatatgtatatgtatatacacacatacacacacagaatgtttttttttcttctccatgtgctttggtcatctgcaggaattttctttggccttcctacctagctgaggggtaggaaagtaggaatcaagtacattacctgggtttgctttatttgatgctcgcaaaacccctgagagactgatatataaccccactttccaaatgaaaaagcaaaatagtcttgaaagttaaggaattagttggaattcacatagcttacaaattcgcagagcataata

SEQ ID NO: 52337 - DNA, 1701 bp, Bovine  19866880648349
  misc_feature (1)..(1): n is a, c, g, or t
nctcatgacaacccttgtgatccaatgctgttatcatgcacattttcagaggaggaaactgaggcacagaggctgagaagtagtgaatgaagacagagctgtattcaagccctgtgtgtaacttcagcgctcactgtgctgtactgaccctcagcagggcaggcgtttcccgtgtcccagagaaagcagagactggttcctgttatgtctcaggccactggcctcaggcctggaggagacacatgcacatacacacattgaactctctttcgagacatatttttgatgggaagcagtccacacctcctgcggagcttcctagatctgtttacactgagaaatatgtttatgacttgggcaaagcacaggaaatcatgacgtgtagactagaaactagccaaaaaagacggtatattcaagcaaatagtatttgtgtttgttgggctttccacatagacaggtgtttgcataggtgtgactgtgcagaggagggaaagagagccgggaccagggaccacagctgcttctccctcgttgttgttcagctgctcagttgtgttcgactctttgcaacccagcagactgcagcacaccaggcttccctgtccttcaccatctcctggagcctactcaaactcatgtccattgagtcagtgatgccattcaaccatctcatcctctgtctccccgcttctcttcctgccttcactctttcccagcatcagggtcttttccaacgagtcagctctttgaatcaggtggccagagtattggagcttcagcttcagcatcaatcctttcaatgaatattcaagattgatttcctttaggattgactagtttgatctccttgttgtccaagggactctcaagagtcttctccagcaccacagttcgaaagcatcaattcttcggcatttagccttttgtatggtccagctctcacatctgtaaatgactagctaattcaaaaaccttctcaccctgcaattctgcacagctgaatgatgctatgcttctgtttccccagacaagccagaccccccagccggtacaccttgtgcctctgacatccgaagctcctcactgaccttgtcctggtatggctcctcgtatgatgggggcagcgccgtacagtcatacagtgtcgagatctggggactcagtggacaagacgtggaaggaactagccacgtgccgcagcacttctttcaacgtccaggacctgctgcctgaccgagaatataagttccgtgtgcgtgcaatcaatgtctatggaaccagtgagccaagccaggagtctgaactcacagccttgggagagaaacctgaagaaggtaggctgccttcctttcatcactggcttgagataaatgtacatgacttaccttgtgtgtgtagaagtctgaatggagagtggtacaggggaactgacaagactttgctggtgactgtcagggtcttttgggatcttgctttccaatgtatatactgaaccatactctaaaaggggtacctgtgatctttcaaaaaatattgaaccagcaattttgatacactgccaccagggggcgatggtgtgttaatcaggagttcagttcagttcagtcctcagtcctgtctgactctgcgaccccataatcacagcatgccaggcctccctgtccatcaccaactcccagagttcactcagactcacgt

SEQ ID NO: 52338 - DNA, 1249 bp, Bovine  19866880820908
  misc_feature (1)..(1): n is a, c, g, or t
ngagatgtgcatttgaaagctttggcaatgttctgaaattgcctccaacatccttgaattgctcatgccgagactcagggatctcagtcctttggagaggaccctgttaacatctcagtgtcctttcctaggaaagccgaggccagcgaggcagccccagtttgaggggtgactccctgcacttcttgagccttttggtgtgtttcctttcggtctgtgctcctcggggagggtagtcacggtgaagagacagacttgagtctgagcaacctcactccaatccctgctccgcctcttgttgcatgaccttgaaaaagttacccaagtgtgccagttgttagttttattatctgtaaaaggaggctgtaaaccaccccatgaataaagtggggcttagatagaataacatgtgtcaggcagaggctttacaactgagagttattcttaggagtatgatgcattgactttttctatatcccagtcttttctccacttaaaattattttgtgagcattttaacacacaaccgaatgtgtggaaatcctacttttcaggaagcccgggggcagcttctatgactgttgagccatgattctgtaattatgaaatccttccactgaagagcagtatttgatgagactccctttttaaattctgcagttctgtgtaactttcacacagattcaaagaaaatcctcattcgtcggttggaatcagttttcaacccccaattcaaacttcgctccacacttctagggaagattcagcccgagtgcatggcctcagtcgtcatgcccccacagcagccctgtgggctgctgctgttcacatttattgtacagcaggttgcttggtccaggaagtgtgggcatgtggggacatgtgaagaaatgtctcatctttagaaatcaaaccttgagcaagttcatgagaaggtgcaggagggggtaggaaggcagcccagcctgggtgaggccgggcagcagcaccagtgggcagaataccatacttagcttggaattgggacttggcaagctggatggaaaatgttgggagaaaacgtaagaaggcttcatctggtctggctttcatccctctgccccacgcctcccccatggacaggagtgagtcttccatgcacagacaccagatgattctcctgcacttgcagtaaggagcttgccccttgataggagctcgactaaagttgaaggagtagattgatactccgtctgtccttcccttccaa

SEQ ID NO: 52339 - DNA, 1963 bp, Bovine  19866880981810
  misc_feature (1)..(1): n is a, c, g, or t
nactctggaccaggatttgggatgggtccagggaaaagcccataacttggaggggttccctgaccctctccttccccttcaggctatttctgggtcgtctggggggggcaggggtagagaaggagggcgcaggtccatgtgcagcagtcggtccccgggtacatcagggcagctcagtaagcagtttgatcaattatcccttgtgtacaacagggtctagactcagcttcttgcctctggataccaaaggcatcaggcagcggggaggtggtatctccggctaaatgaggcagctcaagatgatagaggccgaccctacatgtatcaaagcaggaagaggccgaggccttcactgaggagatagatggggtagcatctctaagacagtgggcaagcaactaaccccgttggactttaggaggggccctgccaatccctgtctatccaattcaaacaacatgtttcagcatcacgaaaactaccaaaaaatatggactatctgagtcaatttttgttaaaagacaaccacaaagacacattaaaaaaattgaagcatatttttaaaaagtacaccactatatgcgacttatttatgtctgcctgtcatacaaacattgcttttgtaataagaaggaaacttttcatgcagtttttgctaattcttgtgtaaagtataaggaaaagaccatctagttgtattagacaaagaataactttccctctgaaaatagttcaacctcaggtgaaacagttaaaaagcaattactagatttagtaattattgtcagggcaaagtaaaagtagttttgaatttttccttgtaggttgtattaatgaaaaataaaatcaatctcccaccttaaaaaagaaaaacaactctaaatccccctccaaccccaacccttcctttctccccatttggctgaagaaaatctctctggagtcccttaccttcagattctagtttttctgcattgagcgggctggttggtgaccctgttgaggatttcctgccactgagccctgagatcattgccatagaggacagtcttccgatggctctcacagcattgcccgttttctggaaaatagacactggcgttgggctcaggccgtgtccctggttccagctgagcagctcagggagaaaagcccagcccgggagaagcagctgtccctgagacgagggcctcccgagtgctgagctccaccagaggagtgagcccaaccttgctctgctcagcactatcagcgtgtcagaagatgttcggagaatggaatggggcctggaaccgatgcgtgcgttaatgtgactaaacaaggtcaacatgagacaaaaacccttttcatactgtgcttcaactcccataaaagggatagtttatataaagcaactgcgggctgagacagctccaaagacttattgcggacggggcgcagtggggctgtttctcataaaacaatgctagtgataggattttaattgggcaagagaacagttactacagatcccacaggtcctgttggaaagacaaaaaaaaacccaaaaagccttctgttgatcataggcaagtagcctcttcgggcttaacttcgctgggcttcagtttccttctctttataaggagggggttggacaagatgatctcaaaggtctcatctaggtctcatctagttctgtttatgattcagatacttaggagatttggggaaacactctgctggccccagcacaagtcttcagtggagttctggaggggtgttcctccctgaggtacatacacccaggcatcaaaaaccagcatccgaagaaatgaaaagcacagctcttggcttttctgagttggggcgccttgggtgaggacagaatccctactgaaaaagatgccaggacttgaacattttctttgtattgtaaaattctacccagtacaggatttaggtcaagaagtccccaaccaca

SEQ ID NO: 52340 - DNA, 1731 bp, Bovine  19866881071321
  misc_feature (1)..(1): n is a, c, g, or t
nggagtgggttgccatttccttctccaaaggaagctacactagatgtttaaatatacctgtgtgtttgtgtgctaagttgcttccgactctttgtggccctattgactgtagcccaccaggctcctctgtccatgggattctccaggcaagaaaactggagtgggttgccatgccctcctccaggggatcttcccaacccagggattgaacccacatctcttaggtctctttcattggcaggtggtttctttaccactagcgccacctggaaaaccccgtttaaatatacctatgatatgaatattaggaaacttgtttaagtatagtagttttagtacattttccctctcagtgcatttttttaattgaagtatagttgatttaaaagttgcaggtgtgcaatatagtgattcacagttttaaaggttgtactccattaatagttattataaaatattggctgtaatccctatgctgaacaatatatccatatagcttatttattttatacagagtagtttgtaactcttaacccccctaccccaatcctgccgttcctcgtttctgtctccccactggtaaccactggtttgttctctatttatgtgggtctgtttctttttttgttaaattcacttcgtttcatttttgattctacatataagtgattttatacagtatttgtttttttctttctgacttactttacttagcataatgtcctccaagaccaaccatgctgcagcaaatggcaaattttgattcttatttatggctgagtagtattccattgtatgtctatagcacatctttattcatctgctgagggacatttaggttgcttccagatcatggcaattgtaaataatgctgctgtgaacattggtgagtatgtatcttttcaaattagtgtttgggtttacaccaggagtggaattgctgagtcatatggtaagtctatttttagtattaacaagaaacctccatactgttttccacagtggctgcaccaatttacattcccaccaacagtgtacaaaggttcccttttctccacatcctaaccaacatttgttgtattctttttgatcatagctatctgacaggcttgaggtgatatctcattgtgattttgatttgcattttccctttgattagcaatgttgaacatctttccatgtgtctgttggccatttgcatgtcctctttgggaaaatgtctgttgagttctgctcactttttaatcaagttgtttagggtttttttttttttgatgttgagttgtatgaactgtttgtctattttggacatgagccccttatcagttatctcatttgcaaatattttttccaattcagtaagttctgctttctttttgttaatggtttcctttgctgttcaagaggctttatgtttaattaggtcctatttgtttattttgctttctcaatgcattttgaaagccccatcagagagtggaattagaatcatgagaaggacactcacattctatggcatacatttacccatgatcatcactagatggcacccttgtattagtaaggagatacactgccctaaaggactcctggaggacgtctaataaaaatagacagtaatgagtcaatagctgaaactgaggaatgagcgagttaagaagagaaaagagaggtgggatgtttttctatcactgtctcatgctgctgctgctgctgctaagtcacttaagt

SEQ ID NO: 52341 - DNA, 977 bp, Bovine  19866881936645
  misc_feature (1)..(1): n is a, c, g, or t
ncagcctccttttatatcaccgctcaagataactgacctacatctctagagctacttcatagtttcacagcatttcagatcgtcccactgaaaggaatgttaagagattatctattatctagtccaactcctagttcttcagatgtgaaaactaacacctagggggaggatggctgacttatcacacagctagtgatatttccagtggggttggtttgccttagcttgattcctgatggcctggaaaacaagataatattacctcacagagaagagattttaaatatctcaataacagctttcaattcaaaccaaacccaaagctgttcctataaagatggcaaagggtaaaactccttgatctaggctctcttcatggctttcccttctgaactccaagtgaacacagaaactctcagggattacattttgcccactaataatcaatggagaagccactacagcttactgagtgcttgctaggtgccaggaggctctctgatcctgagagctacctctccttttgttaccgggagctgacatggggtcacatggaccttgctggctctcttccctcctgttctcactggctcaaccctgggacccgctgagttctggttaagcccagtgtgcatgagctctgggtaagtcccccacctcccctgctcaggcactctgggctcctgatgagcatgccctatttctaccttcatctcagtacattcacacagagctgggaacaacttagggagctgtgtgttccaggcaaaggacattttatgtacaaaattatggagtgtgaaaatgcaaagtttattcagagaacagtgaaactctgggcatccaggagcagaagatgcaggtgctaaaactatctttctttcctcttctctctctgtctagagaggaggaggcaaaatgtggtcaggaggcaacagactaattaaagtaccaaagcagagggagactaagctagg

SEQ ID NO: 52342 - DNA, 1579 bp, Bovine  19866880432357
  misc_feature (1)..(1): n is a, c, g, or t
natgatggtttggaactgaagtctaaatctcataggagcagatggggggcatcttgaggactccagttgtaaacgtctagaagattggtctaaggagaagaagaggcagggaaatcagcaaagatctggccagagcagggcaacttagataggatgactggccagtttttgtgtgtactgggcttgcttttgactacaaaggatatcagatcagatcagtcgctcagtcgtgtccaactctttgcgaccccatgaatcgccaggcctccctgtccatcaccgactcccggagttcactgagactcacgtccatcgagtcagtgatgacatccagccatctcatcctctgttgtccccttctcctcctgcccccaatccctcccagcatcagagtcttttccaatgagtcaactcttcacatgaggtggccaaagtactgaagtttcagctttagcatcattgcttccaaagaaatcccagggctgatctccttcagaatggactggttggatctccttgcagtccaagggactctcaagagtcttctccaacaccacagttcaaaagcatcaattcttcagtactcagccttcacagtccaactctcacaaccacacatgaccactggaaaaaccatggatcataggagaaggcaaataaaccaccattcaggaacagattttggtacccactcttccttaagggaaattttctgttttgtgtatgtgtgtgaagttcagaaatgaaaagaagcatgcaatctcaacacagaatgggaaaaacacagctggtgcactttgattgtatactgagcttttctttcaagagtcagactctgtgataggatatattcagttattttaaagccttcacattcaccaaaccaatatgagttcctagactcatggatttacacgcaagctgaaggtactaaatctcttttgagaaatggtgtatgcaagattacattaaaaacagactgagaatctaaccataacttaattatgcatacttaattatctggtggctcagaaggtaaagaatctgacccagggcttgaacccacatctcatgtctcctgtattggtaggcggattctttaccattaacgccatttgtgaagcacctaaaactgtgtaagaggaggatataatccaaagtaacaccatcaaagcacataatacaattggttgaaaatacagttgagcacgcccagcaaaggaaggtgtgaatttcctcatccttcatcttaatggcaacattttgtacaaagctacatggagcactcctttcatatttcatgagttctatttgcttgacttcaaaatgccaaatttgcctgtgaacagtgctttaatattcatgggtttttgagatggctttgacacttgtcaactggagaaatggcttcatcaggaaagaatctgacttgtgacttccagcacacacataaaatcatgtagtcattcacatatgcatcctatttgagaggtattcggtaatagctatattttatgaaaatgatatagacaaattccttataaaaaggtaggatggttttaagtcttatttggatata

SEQ ID NO: 52343 - DNA, 1676 bp, Bovine  19866880445311
  misc_feature (1)..(1): n is a, c, g, or t
ntgtttgtgatccatggctccgcaatccacagccctctccctttctgtgcaaagtgtttggggctgactctaacccagagaacttcactgtcattatcttttcccaaattgctatttagaaagtttccgacacacacttgcctcatgttgatgatgcttgcgattccccttgggtgaaataatctgatgtagtgttaagcctgtcactaaggattgttcatgtataatttatagtcacaattaaaaagcatttttaactgtcgcaacacagtatcgactaaagtggccttaggaagaaaagagatttttctaagtagctatttgaacatatgcatttcttaaatatttcaaaatctgcatattctcagttttagagtccttgtattttagttgctaagtcctgtttgactctttgccaccccatggactgtagctgccaggctccttggtccatggaatttcccaggcaagaatactggagtgggttgccatttccttctccaggggatcttcccagcccagcgattgaactggaatctcttatatctcctcactggcaaacagattctttaccactagcaccacctgggaagccctgattgaattaaggcttcacaatcatcatgactcaatgtcttctccttttaaagtggaataatgttcaacatacataactgttctgaggctctaataggccagctttctcaagtagatagtacattagctagcatgttataatacctgatgtgttagtactgcttcagctgaaattcctgtcctctgtggacgtggataaatgttccaagcagtgggactgttcccatgcttctgatagtagttctcagatgcccgaggtctttcaaagaaacttgaggctaaagaatcctgatccaagactccacaaccccaatcctagataaaacactgaaatttattaaaaaattaaggtataaacagatgaaagaaaaaaaaggagttcagttctaatgttaattaatattaaagcaaataaaagtatgatgatcagcaagtaaaagcaaatgatcagtcgacgggtatttaggttgcttccatgtactaggtattgtaaaaactgctgcaatgaacactggggtgcatgtgtgtctttcaatcacggctttcttagggtatgggcccagtagtggggttgctaccgctctccagtagtgggtatttgttgcagtagtggatgatacagtagttcagttcctagtttgccttggctttcaaaagaacacatttgagtcagtcctaatgaggtagatgaacctattatacagagtgaagtcagtcagaaagagaaagacaaatatcgtatattaacatatgcatatggaatatagaaagatgggactgatgaacctatctacagggcaatacagacatatggagatccagacacagaacaaacttgtggacacagtgggggaaggaaagggtgggactaactgagagaatagcacagaaacatatgcattagtccattcagtcttccagtcctgtccaactctttgggagcccatggactgtagcacaccaggcctccctgtccatcaccaactccaagagtttactcaaactcatgtacattgagttggtgaggacatccaaccatcttatcctctgtcatccccttctcttcccgccttcagtca

SEQ ID NO: 52344 - DNA, 770 bp, Bovine  19866880477078
  misc_feature (1)..(1): n is a, c, g, or t
nctattttatcataaaaaacccatagaaatgattgagacccaccagcacaggagggttttttaagacctatttttaacataaagtttacagttttctgttttcatttcctgtcagctggaaatcaatatactagtaaagcactaacaatttaataacttgcctgctaaatattggttcagtgtattacctttttattgagctatggaaccttgatttatgcagaaccacaatagaattattctacataagtgagcaggcttttcttgtgttttaatttttcagactgtttacagaagtttcaggaagacatttaaaattcacaggagaaattcagtaagataaagaaacaaatatttagcctcctgttaactaaatcctttcttttggagcagaatattgactaggaactataatccatggaggtcaagagcccaagtttcagaatcaagcagaaggtgtgagcacaccattaggtttaaatttggctaagattaaaacagagaatagaaaagacagtgtctcagccctcaattgggcaaatattcaaaatgatgagacatcacataatgcattttctagagtatgtctttaaatgaagtgcacatgagctgtgttatttgctcagtcactgaatagaatcccatatcaaacttatctactggggacaagatcacacttgttacattaagcccttcatactgggattcgtaagttctgggattttatgattattaagttcatcttttattataccttccaaagaacaaat

SEQ ID NO: 52345 - DNA, 2731 bp, Bovine  19866880512076
  misc_feature (1)..(1): n is a, c, g, or t
natttacttttcccaaaagtcataatttgaaggatttctaaaattcctaaaagaataaagttataatttatgggcaaatattgcttatcactaaacattaataaatcttgttagttttgtggctctaaaagcacagactttgatgtgagcatacgaattgaattgagatatgagattatgaagttatttgttatttgttattaatactcttaataggtggggttggggggtagaagggaggcccatgagggaggggatgtatgtacacatataactgattctcttcacggtacagcagtaactaatgacatcgtaaagaaattatagcacctttttttttctttaaaaaaaaaaaaagcactccagcaaaatacattttgagaccatagcctctgtgtggcaatcaaagtttactacctttgtttctgactaaagcttctaattacattttggtctgtgattaaaaagtccaacattgaaaattcagcaattatcagtgttaaacttggggctttctaccattaaaatctttgctgctgatagaccatcaatgctttgatggatgatcatatcaatgaaaagaatgtttttattccccgtggatgtggatataagtgaagcaggagcagtggggattttgacactgatgtaaaacatttcctattcaataaaactctgtgcacctgggaaatcaattcttgctcagcctgtatttattatgacactctctgacttatgttttatggattcagaatgagaaaatcattaaaaattgtacttgtcacattagaggatcatttaaaattatactcctcagggactgtttttagcaatgtgctgaaagacctcctttgctgaccatcttgtctttacacatgattttctgcagctagctagagaatgtagggttcaaaacatcactattattgagatatcctcctcaggcagaatgtattttatctctgaaattttctcccaaataggaagctgtttttctttttctcttttttattcaatctgcaaacagcctctctttttctcaattcagtttacttactgtcagtcttctgcaggtttgcagacatttaaatagagaaagtctgacagttaaatagctaaaaggactcaacaaaataaattaaaaaaaaaaagtcttggacctgaggccaaagaatcaaaccaagtaagaccggggttttccagtgaaaatataacaaaacagaagttcagatatatgaatagtttgccctgggagaaataaattgttcatgaacagaaagatgacatcccaaaactggcatgaagctcagaggcatgacatcacaggctgacatataatgtgaaaatgaggaaattgtccagccttacaatgatttattattacagtcagactttcagatggtggagattgataagtgattatttcaggaacataagtttaaaaaaaaaaactatcagagatatttataagaaataacctaagtttcactcatgttcatgaaatgagctagacttagttttgtttaaatggtttagttgcttggggaattttgaaatcttatttccatcttattttattttaatgtatctaagaaatctaaaattcaaaccaaggttgtatcgggtaaggatatcaatatacactttatctttccctaacagataatctctagaacatttttccatctagaaatcataattacatccatcagtcgctctggggcagtatcatcaagcagatgctatatctgcacgtctgccaatcacactgccacagaaactgggggaaaacccagctttacaacagtttggtctctgagccactgaaataaacatcctcttcatggctatttgtatttaagatagtcatccaattgccacattttttaaattaatatttatgctttaatatagctctactttgaaaatatagctccaactcagtaagaaaggcttcatctaattaaaccaaaacaagattatctaaatttgtgtatatatacggaatagaaaatacaattgatatttgaatagaatatgtaaaaaagttgaccaagagaaaatacaattatttggaaaactaataggccctaattgcaacatacagagaggcaatacatatataaaacctgtatgcaaaatttaattgatatttgcatagagttatcatgtaaatggaatgttaaccaacagaaaataaagttctttaagcatataacaagtactgactgcaaaagagtttggactgtttgaatgtatagcaattttttgatattttgaagatatctaaaaagataaatttttcacatatacactaatgtcaatactttatactatccacagtatgcataatacatatattatatgcaatacactaatgtacacaagcagtgatatatgtacactaatatcagcccttatgtttttctaaggaccaacatcatggtttaactaccttttcttctatgaacgatatagttctaatgttttgctaacaaaaaattgtatctagtcaatcatttcaccgaagtaaaattccaggaaagttctttttctaaaactcatctgtaggtgatatttttgtgaagcaaaataagtactattcatttcaagtctccctccttggattccagtggaatctgttttccttattgtaccatgcaaataaaagtgtgcacccaaatagaaaagcagaggtcatttgagaagcaaatacatctttccaaaaaaa

SEQ ID NO: 52346 - DNA, 1783 bp, Bovine  19866880580660
  misc_feature (1)..(1): n is a, c, g, or t
nccatgaagtggtgggaccagatgccatgatctttgttttctgaatgttgagctttaagccaactttttcactttcctttttcactttcatcaagaggcttttgagttcctcttcactttctgccgtaagggtggtgtcatctgcatatctgaggttattgatatttctccctgcaatcttggttccagtttgtgtttcttccagtccagcatttctcatgatgtactctgaatatatatctataatttatagcatatctataaatatatatctatcatctatagcaatagatggacatatctttgaaagtcacaatggctctttggaggcagatgtaataggggttggtttagtttctaagtcatgtacaattcttttccaatcccatggattatagccttccaggctcctctgtccatggaatttcccaggcaagaatactggagtaggttgccatttccttttccagggcatcttcctgacccagggttcaaacccatgtctcctgcttgacagatggactttctaccactgggccaccagggaagtccctagatgagacagtaggtgaaggctgaatcacttactaccattaagcagtaaaatattgggcttctttggtggctcagatggtaaagaatctgcctgctatgcaggagacctgtgtttgatccctgtgttggggaaatcctctgaaggaggaaatggcaacccaatccaatattcttgcctggaaaatttcatggacagaggggcctggtgggctagagtccacagggtcacagagaactggactcagctgagcaattaacactttcaaacaataaaagatcagtttagtcctgcttttacttggtccctggtgaaaaagtgcctacatgacccataaacattctcattcattccaagcaggcatgtctattagctacaagctctacattattaaaattataacctctctaagcagtcaactaactttaatctctgcttttatatgacagtgaaactctactgcctggaaataataatgttataaagaaattttctgaaaatttataaactgggcaaaagtcttaataactttctcaagtaatcagaagttatttgagcctaaagtggattgaaatactagtataagggagctatagatttccctgctcagtgtctgtcattgctccagtgagaaaggattaaaaaatactccagtattcagccaatattgttctccatacatatgtattcaggttatcctagtgtaagtcaaaataatccattctaggggatgcattggactccacaggaatattcacaataaagagaaatttagggacttgtgggtttacagtgtgctgactgatttctaaggaggagtctacatcttttgtgctctggtggttttcacacctcaaggaaatgtacaaatgaagtaggatttgtgttctgtaaggggtgtggctttcttttataaaatggtaaggtcagtaacaaatttaagaaggtctgttttagaatataatacagatagaaggtcagaatctaaattaatcttcttaaaattattcccatcctttccctaaaaatctgtgccatcggggaaatcagtatctgattttgaagaccactgttaaaaatcttttggagatgctaatactgggcttcccaagtggtgcagtggtaaagaatctgcctgccaattcaagagatgcaagagacacaggtttgatgcctgggtcaggaagatcccctggaggaggaaacagcaacccactccagtattttttc

SEQ ID NO: 52347 - DNA, 1299 bp, Bovine  19866880599988
  misc_feature (1)..(1): n is a, c, g, or t
ngagcgttttggccccgccacagagcattctgcccggagggcctgggaagcctttcagtcactgggccaggaccgctgggccgggtgtcagctcagctgccaggactggccaggtctgggccaagctaggacccctcaccgcatgctgctaggaaatgagatcacccgtgaaaacagataactccaaagcttggctcacttctcacagtgacccacattcttccttcacaagagagaaggtgagacacacctctgttctttttacacgacacaccttctcgtgtttagctctttcattaaaaacacctcttttgctcttttctgtaacacagttctgctcttttctataacagctcccctcccctcgcttccacctagaaaaagctgagacaacactctgagaaaaagatgtgttttagttgccaacatgagaaggtggcatctttttaaaccaccacccacttactcccctaagtgtatcatccatatcaatgaagctaattttataaactgaagatgctctttctattaagttctcctccaaatgaaagcagcgagcttcattctatttatcaccctgctctttacaattagttttatgatggatggcgagaatactaatgctataaatccagtctgcaactctcccaaggctactgacagttattaatcccttgaggaggactgaaaatatgctatataacaagtcagtctgacttgtaacctccgctgcagaactgtttaaccccccacactcagattcacgccacaggttttttaacaagatatgaggatctaaaataatcattttcccaaaagtaaggcaatgcctgagcattgagtaaaatcagacaatttctgatcctttaatacagccatacaatatcactggctattatatacaggatgaataaacaatgaggtcctatcgcatagcatgggaaactattttcaatatcctgtgatgaaccataatggaaaagaatattaaaaactgtgtgtgtgtgtgtataaaactgggtcactttgctgtacaacagaaattaacaacattgtaagccagctatatacttcaataaaataaaacaaaagtagcaaaaaataaaaacaaataccactggctgacactggagactcaccttcatttctttaaataaagacctaaaatatgtcatgaaaaatgagtttatgtatcagaaacagcttaaaaatataaagtgcctgaattttgatccagtgtctggatcaaactttaagaagagctctctgctaccatcctctgctcataactggtaacat

SEQ ID NO: 52348 - DNA, 860 bp, Bovine  19866880600697
  misc_feature (1)..(1): n is a, c, g, or t
nttgtagcactgagtccttgaaacagtgttgtcactaagttctttgtgacaatgaattccatttttgattcacttgacataatcactgaactgagaacagtaccagactcagtgcaaagactgaacaaatatttgttggtttatcaagagaaactattgttgggagaatgcaaagaaaaaaaggtgaaagagaagcagtattcagatttctttaagatatagaaagttaggctgccctctggagataacagctggccactatgatgttgattgcctgtaaaacatttgtgggtcattgggagaagagagataaccttggcttcttctgtccctctagagtttcacctggggaaataaacagaggtagaggaattttgattattctgccaagggttagccattcagaagcagcagtaattaattaaggaactaaaacgcaaatacagataatccatcgcctgaggtggagctcagcaccagggctggaaatgggtgagaagcagcctggatctaaattacaaagggctttaataatatagtaagattgttcagcaactactgcatgtgtgctcagtggtgtccaactctttgtgacccatggactgtagcccaccaggcttccctctgtccattgggaattctccaggcaagaatactggagtgagttgccgtttccttctcctggggatcttctgaacccaggggttgaattggtgcctcttgtgtctcctgcaattgcaggtgggttctttaccactgagctacctgggaagtccttacaaagcgctttaaaagaggtgtcaaaatctgatgagggacgagctctccaatcagatgttaacagctggagacgggtggag

SEQ ID NO: 52349 - DNA, 1637 bp, Bovine  19866880614554
  misc_feature (1)..(1): n is a, c, g, or t
naacctcatcccatacaattcagctgcacaattgctcactgtattgaaataaaatcaatctccctggacagtagtgctgattctatgcctagtatccacccagtatacatccaagtcccttttccacatgacagtattttcctcacttgatgatattctgtttagtaaagctcatccatggagcctataatgtatttggtaacattttcaatatcttaattttgattgagagtaaacttattagcttatttttacatataaaaataattttcataaagtagataaatttatcttcaggtacataatatatgatctttaattgggtggaagtttcattctccacccaatcctctttttctcatcccttatgaatgcagtttcctggaatatttcctactaaatctcccatgaccaagatacagtatccaaatctacttttaactgtgctattttctcaactcagaatgtgcagaatcagtaattctatattcttctgtaatattctacagcaatggtggtattttcttcagattataagcatatattaagtagtattataaaaccactttgaagatattttccaaaaatgacttaaggacttttcatggtccctgtttaattaacactggtaacatactttatagaaagtattacttagggaggaataaaaacaatatattcaacagctataatggctgcttttaatgtcaaaacattgatataaaatccccataatattatgtctatagtattaaaacctcatatattaccactaaagcagcagttaaatgaccaccttttttcccaatattcatttggataatctggcataagatgaactaggaaaggacagtcttaatggttaaaatgaaagtgtgaattcagatttacagagagtggaagtaacatcaaatacaaaacgataacattctgactccctgattttagatttccatctaacttgactttttgcttgctaagatctatcttgtcaagataatgccccactgtccatccttcacctatcatgttatagggtggacttaagggaactgacattctgtgaataaaccaggcatccaaagacgtctggagaaaaggactttgtactgatggaaaagggacaagcgtgttgtacctcttccccttgttgccctcacaccaggtacagtgtggctgaagctgtgttcccctcagcttccctcctcactgcttcacagtgagattcaggagtctttggctattttctgagataaaattcagatttgaccgttttgtcaaaaaattccaaatattcacgaagtacaaaaagatgcacttgtatacagcaataatttgttgttataatttttatttgattacatcctcatttcaacatcctcagttttcctagaacagtggtacattaatttcaaaatatgctgtataaaaaagaaaaagcagatttataaattaccctttgtcccttaagtctatcaagaccccacagataaggtaggagattcatgagtgatccctttatttgaataactaaggacgcctatctattttaagtaaggtaaagttttacttcattcaattttcatataattcttaggcttcttctaagtgtaagtcagtcttttaggcaagtttca

SEQ ID NO: 52350 - DNA, 3600 bp, Bovine  19866880662790
  misc_feature (1)..(1): n is a, c, g, or t
ntgtgaaggaaatagtcctgaatattcttggaaggactgatcctgaagctgaaactccagtactttggccacccaatgcgaagaactggctcatttgaaaagaccctgatgctgggaaagatgaggtcaggaggagcaggggacaacagaggatgagatggttggatggtatcacctattcaatggtcatgagcttcggtagactccaggagttggtgatggacagggaggcctggcgtgctacagtccatggggtcacaaaactttggacacgactgagcgactgatctgactgactgacttatacaaaagtgttactctgaaattccaatttaacaggatgtctcttatgtttacatgtcgaactaggcaaccttagttagagggataggtgtgtgtctagtacatggggagagagcttttactctttgacctaagacatctgtatctttagggtgagcgtatgtcccctctgctgaaaggtgatcctaccaaggataataacattgtgttcattaaaatgtttaaagatgttctaaggctattttgcactcaagtctcctcggaatggtgaagtgccttattatactacattactattgtaagcatcaagaagggatggagtgcaagatgaaaataatgcagtagtctatattaaagcacatttaagtttaaaatcatgggatgaaacttaattaagtgccagaaggtatattaacataaatgttgagtttgcaaacttaaatacacaaaagtgaaaatgtctagacactaaaagttccctggcaacattaactcacctacatcatgcaccgtgcataataaaattaacatttagcagccagaaatgtcgtttagagcacaaaatatgtgcaattcaagatcattaacattttccatattttcatacttatttcaaaggttcactattctcattaaactaatgtagaaaaaattactcagtctcagagttaaaaatcattttaaaacatatttgtttatttcacagtgtttcattagagtcctaatcaacctgggttgcattctgttatagcaacacaggaaaaaatcatttttacatcaagaaaatgttaagtatagtataaatcttcagtgtacatgtctttaaattattgcaaacttgctctcactatagatgttttctaaaaatatatctgtatgtattattctagtataattcctggtattttaataaaacctggggattgtttatagcatggtaaacctgccaacttatttcatctccctgcacgtcaaattcttcctctgtagaaggaatctaataatagtacttggttcatagtggtgccatgacaattaaatcagttactatctgtaaaatgatggcagtgaagaatggtacgtggttattgttgttgtttagttgctaagcagtgttggactcttttgggaccgtgtgataactacagcctgccaggctcctctgttcatgggatttcccaggcaataatactgggagagggttgccatttccttctccacgggatcttcctgacccagggatcaaacctgtgtctcctgcattgccaggtgaattctttataaagagctaaaacatcatagtgtttataaattgcaagattccagataaataggtacaaggagattttatatcaccattcttagacttctacagtaaaaatactaagacaactgaaagaatgttagtgagtctataatatttcaacatttaaaggcatcctttaagcttacagtttagagcaaaataaatctgttgattgttcaggctaaaaaaaaaattctctaatgagtgttcttgactagtaaaatatgaaaaaacgattcaaatttattagtaaaaattgggggaaaagccatgaaaattagttgtttttgcaggtgtatgatagaatataaactgaatcagactggcaatagcaagtgctggtaagagtctgcagccaaaggaatcatcaaaggttgctggtatgaatgtcaattgctacaaccatttggaacaactgtttggcaactgttgcctcctaaatttgacacagctacatcctgtaattttgcaattccagaaatgcatgtacttgtgcacccaaagaaattacagggtgatcacagcagcagtactcagcatagctaagaactggaaaccacccaaatttctgtccacagtagaactaattggacaaattgtggaatagtcatacaatgaattcctgtagagaaatgagaattaaggtgtgacagcagtgctcacaacatggatgatcttcacgatgtttagcaaactgtataacaaaagagcatacatagtgtgaatcccataataagaagcttaatatggggaaatttagtgtagtgtgttttaaatgaaaatatttcttttcctggatgttggttaccacatgatgattcattgagatgaaatcttatcatttgaccactcttctgtatatattacacttcagttaaaataatttttttaattcagaaaaggattttaattggagatgcaaaaaagtactgtgacctctattgttaatatgtctagttccctgtgttgttgttgtttagtcgctaagtagtgtctgactctttgcaaccccaagaactgcagaacgccaggcttccctgtacaccgctatctcccagagatgctcaaactcatgtccattgagtcagggatgctatctaaccatcttacctttgttgccccgctctccagtcctaccctcagtctttgccagcatcagggtcatttccacagtgttggctcttttcatcaggtggccaaagttgatttcctttaggactgactggtttaatctcctctccaagggagtcttaagattccccagcaccatagttcaaaagcatcagttcttcagtgctcaaccttcttaatgatctaattctcacatctgtacacaactattggaaaaagtatagctttaactctatagacctttgtcagcaaagtgatgtctctgctttttaatatgctgtcgaggtatgtcatagctttccttccaaggagaaagcatcatttaatttcatggctgctgtcactagccacagtgattttggagcccaagaaaataaaatctgtcactgtttccactttttccccttatatttaccatgatatgatgggactggatgccatgatcttagtttttgaatgttgttttaagctaccttttccactctcctttttcactagacccctataggatgcttaaaaacaacaacaacaacatccatttaggaaagaacaaaatgatcctaattgacatctttgccataccaatttgtcaaaataattcattagaactggaagaaagatatgtagtgcattgatgagaagtacagggtcttccctggtggctcagaatctgcctgcaatgcaggagacctgggtttgacccctgggttgggaagatcccctggggaagggaacggctacccactccagtattcttgcctggagaattccatggacagaccatgggtttgcaatgagttggacatgactcagcaactacgaatgaggtaagtctaatttttaaatactttcagttttag

SEQ ID NO: 52351 - DNA, 1140 bp, Bovine  19866880700503
  misc_feature (1)..(1): n is a, c, g, or t
nctggtaaggaatctgcctgcaatacaggaaatcccagttcgattcctggaagatacacaggaagagggataggctacccactccagtattcttggtattccctggtggctcagctggtgaagaatcccacctgcagtgcgggagacctgggttcaatacttgggttgggaaggtcccctggagaagggaatggctatccactccagtattctggcctggacacttccatggactatatggtccatggggttgcaaagagtcggacacaactgagtgactttcactttcactttaagtgaatagatcacagtatatttgagaaataatccaaaaaaactgatagctataccaactgatctagataacattgatcgagttgaacacttaacccaaatatccaaaaatatttctttgagataagcagataaataatgtgttagaaattttttttaaaatcttttttttagtacattctaatgtgtggaactgatttattagtgcttcatgatgattgaggcagacattttacaattcatgcaaaattacagttttgacttctaggagttagcatcctaaaataatgacatagatgtttataatactcttgctgctgctgctgctaagtcgcttcagtcgtgtctgactctgtgcaaccccatagacagcagctgatcaggctccactgtccctgggattttccaggcaagaactggggcaggttgtcatttccttctccaatgcatgagagtgaaaagtgaaagtgaagtcactcagtcgtgtctgactcttcgtgaccccatggactgcagcctaccaggctcctctgtccatgggattttccaggcaagagtactggagtggggtgccattgccttctctgatgatactcttaaaagaaagcaaattgatattgctcattaactttgttggccattttttaaaatgatgttgatggagaaggtagccctttgaatgcaatacatctagtgtccagagattttctttcagtgccttttgtgattttgcaatagcctctgctattgcatacattgtaatataatgtgttacaatgacttctctagattttaatatagtcattgtactatggactctttatccatgaaagtgttagccattca

SEQ ID NO: 52352 - DNA, 775 bp, Bovine  19866880769134
  misc_feature (1)..(1): n is a, c, g, or t
ncacgcatgcacttccccatttgggtccccccagagcactgaatagtgctccccatgctgaatggtgggttctcattagctagctgttttatatgcaattgggattagcatatgctgagtttcttgaattcagtggaagccttttaagcctgagggattgaaatcctaagaaaatactgctcttcttggctcattcctcccatcctgcttaaccctgactcttccttccatcaggggcatttttaagacctgggctggcaacatctgctggttttggatcacccacttccttttggaaaccacagcagtctcttatccttttttaattgtgtggcatcagttgtaataccttctctttcattcctaattttttaaataagaattcatttttaattgattgctctacaatattgatttgatttctgtcatatatcaacatgaattaaccataggtgtacatatgcccctccgtcttgaattttcctcccatctcccagccattcccaaccctctcggttattacagagccccagtcatttctaactttatgtgagtgttctttctttttgccttatgccagataaatggttcgtccattttgttgatcacttcagaagacaaactcctagttttattggctttttctgtcctttttcctggtctccatttcatatttctgctctgatctttattatttccatcttcatgctaaattccagcttgatgtgttcctttctagttcgttggggtgaaacattaacttatggtgtctgag

SEQ ID NO: 52353 - DNA, 2185 bp, Bovine  19866880861288
  misc_feature (1)..(1): n is a, c, g, or t
ntactctgcatataagttaaataagcgggtgccaaaatccagccttgacgtactcctttcccaaattggaaccagtccattgtgccatgtctggttctaaatgttgcttcttgacctgcatacagatttctcaggaggcaggtgaggtggcctggtattcccatctcttgaagaattttccacagtttgttgtggtccacactgtcaaaggctttcgtgtagtcaatgaagcataaatagatgtttttctgggattctcttgctttttctatgattcaattcaagaataaatacccatttttagaagaggaggcgcaggtaactgactctctgctttgttctgatttacccagtggctctgtggtggttactatagatagaattatgtttaattttgaggggtaagctcttgttttcagctgaaccattatcttcttgcagaaaacaaatcaaaaataaatcttcctagagttctctcatggtgaaatcgttctgaacttcagctcactcttcccatgagctgtagtactgaactttctactttaggtattatcttactagactattttttttttcttatttagatcaaatttcattgaaataaaaatttttttactggtattgaattctctgatcagtttccttgcagaatcttcagtgccagccatttagaaattttagaaattctacaagagcaatctgaccttaaaatattctgaactgcaggctgaactcccccattcatgtgagctgtcactactgtctgactctgctgatcagcagactatgtcaagcagagctgtcactgactttaggaaaacaagcaaaccatttaatcatgcagggtctgaagcaaagttggaaataaaaatcacaacagttttcccttctcttgtttctgatactgaagccaaataatataggattatagtgcctattaaaacacatattgaatgttttacttataaatgtttcagtctgtaactatttgtcataatgtctccatagactacattctataattatacccattttatagttgaatacaataagatattgtgagcttaagcaattttcccaagtgaaatgtctagtaagggacagaccttacacttgggcagcctacattgaagagcattattttcataatgctatgaccatcaataccattctataatagatatattgcaaactgtaggtttttatttggttttatttaacaataggaatttgaagaaaacattgtatttgcttttatttaataccatcagaaatcatttcctattagcttaaaaaaaaaaaacaaaactctttagttccaactaccatggaagaattcagggttgtggtgtatgtatgtgtttttaagacaatgacttcttaacatccccatgtctatacttattaatttgggtcattctcacagccatcaaatccaatgacccttctactgtgagctattctcatcagcctattaggagtgagcatttatttagtgcctactatccatcagaaattataataaacgctttaactgatccttactcctcacatccatcctctgattaagcatatttattatcttctttttatagatcaggcttagagtacttaacttgttcaaggtcacaaggacagactgacactaaaaatctaatgtcttctgccccaaagcacgttaacatatattttctttctctcttataaaaagaggaagcttcaaaaataatattccaaacatgtgtcaaatcttctgcatcatacttttagaactatatagtcttggaaatcccattttccagcatatactttctaaacattttattcttatcaaacaacttttgaaagtgtatcagcatctgcatttttctaacactgggtagggaaactggtttcaaatttcactagaggaaataattgcaattagctcctttcctcaaagagaaaaaggaggaggaagaaaaaaaatgtcagaaaaagaaagaactgtaaccatttgctgattttactgtggattcattagccattagtcaaaaactaactgatgctttcaaattgtggtgctggagaagagtcttgagagtcacttagaagatcaaaccagtcaatcctaaaggaaatcagtcctgaatactgattggaaggattgttgctgaagctccaatactttggccactgatgggaa

SEQ ID NO: 52354 - DNA, 1312 bp, Bovine  19866880892432
  misc_feature (1)..(1): n is a, c, g, or t
ncacacctgtctattatatgtactaaacagcatttgccttaagacactgaaatatatcattcactattaaaaaaaaaaaaaactttctgccctgtattggagtatagtcacttaacaatgctgtggtagtttcagatgaacagcgaagagagtcagtcatatatatattgtatccattctcccccaaactcccctcccctccaggttgccacatagtgttggacagagttccctgtgctgaaaagtaggtccttgctggttatccactttaaatatagcagtgtgtacatgttgatcccagacttcactacttgtttttaattcatcttgattaaagtgatctaaaacatgtcatagagtggaaatccattagatcagtacaatctggtctttccgaagaaagtgaaataacaaaagtaagaatactacaaaggatcccagagacttcaagaactttggttttctcttttaatataaaaaagaataagcaaaagaagtttgcgttatttgccaggcattaaaaatctattcatgctgcttgattttctgccattacctttcaagacctgccccgaggaagccaaggctccgttcagagcctagaaatacagacacattcagacacacaggtgtctccaatcagaagagacactggctgaggtgggattgaggctagagtttctgtcaggaagatgtctgctcctccgtggcctctctcatcctgctgttgcctctgtctggaagcgccccgccagggctgattagaattctgcagtgagatgcttgtgcacctctagaatctttgtctcagctgattagtgttcaggtaacccctgcattcctcagggaatcacacatttcaatccatgccagacataagatatctgttttgacagtctttgattgtacttaagtagtgcaggttttaaataatcaaagagggcttatatgatcaagtctaaggtctcagaagtgcttttctgtcaataaggagaagaagttttctgaaaaaatagaataataaaattacagataacatggagctgcctagactcaagcactcatgtgtacagagggaaaagggaaaacaggacaaaagatgataaagaggttcgatgcaggatacaggaagcttggggctggtgcactgggatgacccagagggatggtatggggagggaggtgggaggagggttcaggatggggaacacgtgtacacctgtggtggatgcatgttgatgtatggcaaaaccaatacaatattgtaaagtaaaaaataataataataaaatttaaaacaaaaaggaaaaaa

SEQ ID NO: 52355 - DNA, 3006 bp, Bovine  19866880913593
  misc_feature (1)..(1): n is a, c, g, or t
nctgagtgccaaagaattgatgcttttgaactgtggttttggagaagactcctgagagtcccttggactgcaaagagattaaaccagtcaatcctaaaggaaatcagttctgaatattcattggaaggactgatgctgaagctgcaatactttggtgaacttctgagaagaactgactcattggaaaagaccctgattctgggaaagactgaaggcaggaggagaaggggacaatagaggatgagatggttggatggcatcactaactcaatggacatgagtttgagtaaggtccgggtattggtgacggagagggaagcctggcgtgctgcagtgcatggggttgcaaagagtcagactcaaatgagcgactgaactgaacagaaagataatttattaaaggctaattgctaagttttccatatattaaaaatttgttttgcataagggtctcatagagtcaggcaggactgagtgactgaaccaaactgaggtcaacatcaagttatttagcagcaaagaaagaacaataggaagggatgaggctagtagcaaaaatagaaagttttttttttttcctatttctggtatgctgcaattcatggggttgcaaagagtcggacacaacttagtgagtgaacaacaaaaccaatcaattatattagtagtgcctgggaatcatttttgacttcaatccttaatctttctttagcattaggcatcacttcatttaacagtgagcctgaatatacattgtctttttcaatatttaaatctaataacaaaagatgttataagtaataataagtaccttaaaaagtacctgctagaagtaactactcaagccaaagaatgcttcctatcataaaataattatttaaaattttaatattgacatcagggtatcctatggcaatttctcctgggttatttgcttttatcaatcattatatctcatgtcatcctagaagagatacaactttatttccataatacagacatgaaaatggacatgtagactgtacaagtcatttgcctaaagcttcaggaacaaaagtatgtaataatcacagtgttcacatcactgtgtaattgatcacatcaagtgatttgaatatcaaaatactattcttcaggattaaaaataaagaaaatagtattttgatttacctccagagatgtcatatttaaagagaagagaattagaacaatgaaatgcatgatcttgtgaaaatcacctgactttataggttctgaaaattatgatatacagataaaggctagaaaaacacgtctaaactactatccccgactgtctctagggaagaacaagcattcagcgctggccaaggggaagacgaactcagacgctttaactcttgcttaagaatagttctgccaaaactaatacaatattgtaaagtttaaaaataaaataaaatttaaaaaaaaagaatagttctgcctttctacacttttaaaagtaacaatcatacattacttttgaattaattttaaacgaagcaaagtctttcccctggacttttccgctggcattaacagttgggtgctatatgctagttgtcaaaatattggaaaggatttagtacatttattcttctgcattgccaagtgtggtagaatatttgcaaaacataccgtatgtgagtaacagaaaatgacttgacttttccatcacacctgttcgctgcaactgctttgctacaagcattcatgaggacaacttatttgaagtcattattggcaacacaagtgggaattttttctaccttgttaatgtgtcaacattttatcgattctagaagcaagtctgtcatctttcaaattcattgttattcacttttttttctcagcaatttagacacccaaatatagtgacagccaaacctattataataaagcaatatcagagtactgtgattccgtctgatgggcatccagacatagtaacttagtaacctaatactccaaaaataaatttcattcaatggaatgattttcttatagattcagtctagagtgatttgatatcatcatctgcatgaaaatccttgcagtattttgctagtcttctgaatgtataaagcatccataaatatacaatttcccagaaaataatgacataaatacaaagatggaaaattgattattctacaccttggttgataagaaaacagagcaatgcttaccacaacctatctgtcaggtaagatatcttttatttatttaaaattaatttcatgctcctaaatattttcctggtttcaaattattttactgcatacagtaaatgtcttttgcttttttagctataaaaaatttacacttcttatgatgtaaagtctatatttttttccatcattttacttaggttactttttaattgagtcatcaattgacatctattaaaatttaacaactgctaaattctaaagacctcattagaatactctctctctctgtttttcagatcacataaagtacttacatcagggagaaattctttgttttatacttcagattgtgtatctatttactggcaaagaactacacagtaaatcatagtatttgtttggtctaaagacttaagtccagccctggaatactttaaatgaagccctaatcaaaggaaaagaaaatatctctggccattttcatagacatgcatgcacttcgtttgtagagattcagttcctatttacaaatgtcgtgtgtattggtgaggacctgggatccaagttttcctctttcaaaggaagtgctggatctttttcgttgctgttattgttcagtctttaagtcgtgtccaactctttgtgactccatagactgcagctcgccaggctttccctgtccttcactatttcccagactgtgctaaacctcatgtccactggagtcagtgataccattcaaccatctcatcctctgtcagcccttggtcctcctgccctcaatctttccaagcactagcatctttttcaa

SEQ ID NO: 52356 - DNA, 1858 bp, Bovine  19866880979422
  misc_feature (1)..(1): n is a, c, g, or t
nacactagtaaagtaatactcaaaattctccaagccaggcttcagcaatatgtgaatcatgaacttcccaagatgttcaagctggttttagaaaaggcagaggaaccagagatcaaatggccaacatccttctggatcattgaaaaagcaagagagttccagaaaaacatctatttctgctttactgactatgccaaggcctttgactgtgtgaatcacaataaactgtggaaaattctgaaagagattggaataccagaccacctgacctgcctcttgagaaatctgtatgcaggtcaggaagcaacagttagaactgaacatggaacaacagactggttccaaataggaaaagagtacgtcaaggctgtatattgtcaccctgcttatttaacttctatgcagagtacatcatgagaaacgctgggctggaagaagcacaagcgggaatcaagattactaggagaaatatcaataacctcagatatgcagatgacaccacccttatggcagaacagtgccataaagtgcacttcattttcttgagcttcaaaatcactgcagatggtgactacggccatgaaatgaaaagactcttgcttctatctaatcgaagctatcgttcttccagtagtcatgtatggatgtgagagttgaaccataatgaaagctgagtactgcagaattgatgcttttgatctgggtgtctaagactcttgagagtcccttggactgtaaggagatcaaactagtcaattgtaaagtaaatcagttctgaatattcattggaaggactgaagctccagtactttgaccatctattgtgaagaactgagtcattagaaaagaccctgatgctggcaagatcaaaggcagcaggagaaggggcgagcagaggatgagatgtttagatggcatcaccaactcgatggacatgagtctgagcaagcctgaagcacgttttattctcctcaagcatgtttctcagtatataaaatttcagtgcaaatgcttctgagttagaaaaagagagctaatttctgttttgtactttctgtcctttttgaaaataactttaaagtcagttttatttttccttgtctcttcataaaacgatgacctggttaatgaagtatatacactcctttaacactgtttgacatataaactgtgctttcatgcaggttgttttactacatttatggctgtactaaattacagtgtgagtatgaagcatagccatagaaacagacccacggaaatcgacatgatgatatatagttagaatttttatttagttgtgaaggtaaattacagtgaagcacttttaagctattgaatattagcagtaggctttccctggcatctagggaaatggaaaagagattaactcttattatagacaggggaccaccctccccgaagaaagaatttccaaacatcaaaatctctgttcaccatacttcttatctggattaataaaaatcttatccatgatacttttacttcacatgaattttttttttcataaaatatgccatttcattgccgtctgtggatctgcagaaagaatcactttttttctctcctctatttaaggagtctcaggctttgttctgtgatgtttgcctggcttaatacaatgaacttaattctgtgatgttacccctgtgattactaaaatgatttccccttatattctagaaattgcatctatgtccaatgggtagtctccttgctcactacagaatgatttataaacgtgtcattttaaaagataacacagaaaatctctccatgaggtcaacggcaaagctacctttcagtaacataatttccactatcaaaatacaatcaa

SEQ ID NO: 52357 - DNA, 1142 bp, Bovine  19866881003338
  misc_feature (1)..(1): n is a, c, g, or t
ntatcttttggtttttcatcattatgccaaatttttaaatatttctgtcacttttatataattgttctcggcttccaagaattttggttcctaacagctcttttatggaaagaatggaattgttaacttgcgggcataaatgaatgtttcatgtagtgatttattactacaccctgagaatattttctggagactaattgtattaaaagccctatagaatttttttttttcttctagcataaaaggaaatgatccacatctgaaaatatgttttgcctcacaaaagtctggctcctacaaattttgcatttttttaaattacaataacctgaaaggaaaaataaatcaactgctgaagcaaaaaatccccaaaattcagcatctaggacacctccaattaagtcagtgaaccaatgctttccattttgaacagatgttcctccccttttccaagtactgaacaggttttcatacctacttggtctatttttattgtacttggcttgtcttcaaattctattaaatgacagcctttaaatgaaaaagggcatttgattttgccaacaccatgggccacataagttcacacatccccatgttcatcaaaaatcaagttccttcctaatctaggggaccagtatttgaacctggagatcataaataagttttatctgacttttctaagtaataatgctaaattaagcacagatagaatcatccctaagaattattattatccttcatttactctgtgaaatgaagcccacctttgtcatgaatattatcattgttttacttttgagtaggcttcccagggggctcagtggtaaagaattcacctgccaattcaggagccacaggagacatatgttcaatccctgggtcaggaagatcccctgaagaaggaaacagcaacccactccagtattctagccaggataatctcagaggagcttggcaggctacagttcatgtggttgcaaagagtcagacacgaccaagtatgcatgcactttgactgctgctgctgctaagtcacttcagtcgtgtccgactctgtgcgaccccatatacggcagcccatcaggctcccccgtccctgggattctccaggcaagaacactggagtgggttgccatttc

SEQ ID NO: 52358 - DNA, 1248 bp, Bovine  19866881016047
  misc_feature (1)..(1): n is a, c, g, or t
naacaaaataattcagctcattcacactaaacttaagagctatctgagaatattcttgctttcttcaactagcagatgaagttaaaagagattggttgattctaaaaataaacataatatatagctatatctcaggcattgtcaagagcaatatacagagactgatgagccttcttcttcaaggttttaatgaaccttctttcttgattcagtcctagtgtcatttctttttaaagcaatctgtcacatctttctgctgggaagatatccttctgattctgccagattacagaacaataagaaatgacaataattctagaataaagcaagggatgagctaggtttgcagtcagctaaaaacatgagatagaaaagttaaggagtatgaacttagttctataatttgcaatatgtattactttggagatcaaggagaacaagtgaatatataaaaatgtttctattttcacattaaagtttgctgccatcttttacttcattttatgtcttgtgtatgctgtagagtatcagatgttcctggagaccttaataagaggctaatattgctcacaaatgtagaaatgtggaattaaagctctgcaatataatcattcttcacattgcattatttgagaatcatatccactaactatcaaagtgtctaagaaactcagaattcacccatgactatctcctgacagaaaatcatgtgtactataaaacaaatggaaacagtatcatgaacagtagcaatcagtgtattggaaagtgaaaaaaggaaaactatagtgtactgaaaccttatctacagacaatgactgtgtctgttcttgtagaaaaatgaggcaaaaaaaccccctgccattggcagctatggtgctaagtgggtcaacaattcattgggcatcaattattgacaatgggacattctctgcctgcattaatgagggactagaaactgttgtcacaaacagacctcaaatgctagttgtccaatgtgtgtgtgtgtgtgtgcgcgtgctcagtcatttcagactctttgcgacaccatgaactgtagcccaccaggatcttctgtccatgggattctccaggcaagaatactagagtcaatttccatttcctcctccagggacatggacacatggatggaggaacccaggtctcctgtgtttcctgcattggcaggcaggttctttactattatcaccattggaaagcccatgtttaataatgccaatatttttc

SEQ ID NO: 52359 - DNA, 1749 bp, Bovine  19866881021012
  misc_feature (1)..(1): n is a, c, g, or t
nagtgtcccctcccaggggaagtttgagagtaaatgagttaatacaagtcaaggacctggagaaagattgagggcaagcggagaagggggcaacagaggatgagatggttggataatgtcactgattcaatggatgtgggtttgagcaaactctgggagatagtggaggacagggaagcctggcatgcgtcagtccatggggtcaaaaagagttggactcaactaagtgactaagtttagttttttaagcttttgattgtattcctttatcaacctttagggttcctctaagctttggtctatattcctccactggttttaatgaaaacatctaagtctgagcatatcttaattttatagctttgggtgagccatacaaaacaagcaacacgtttctggaaaatcttcatctaacttttctttcttcacaaccaatacacttcaaattctttaattcttattctacagagacattcaggtaccatattccatgaccaagtatgacttagggatctcagcttccaccccaagtagggttttaaagcctttcttctggtggaaaaattgcagagctctttaaaatcattcttctgaatagtttcctgtcttcttctgtggcttctaggctgtgtatgcattactccttcattttatggttttgcaggtgttttcaagacatgtaagtatgtggtcatctgccctcatgagaagccctacagcccctcctccccgcacctgtcaggcccaccagggctcagcaatgctctgattcccctgattgagcaggagcggacacagtccttgtgacacgtgagtgcatgctaagtcacttcagtcatgttccactctttgtggccccatggactgtagcccaccaggctcttctgtccatgagattttccaggcaataatattggagtgggctgccatttccttcttgtggggatcttcctgacccagggatcgtgcccacatctcttaagtctcctgcactggcagctgggttctttacccactggggaagtgccctgggagacacaactagtgctgagaagggaaaggctggcagatagcagtgagagtgagtaaagggaggtcatgggacacagggcttctcagccagccctaagagtccgctgcatgtcctctagctcagaaaactgccttcaaagacagttcattctcaatcagcctgactctccacgatctccctttaataaacccagaaaaaaagggacttgcatgagaaacagctgaggctgcactcagcccagggatgagacagacagttcagagactgcaggcagatgagctttggttttgatgtgtctattctctgaaaggcctgtgctgtcagcaagctgggccatcagtctggacaggcctccacctcccattgccctgtgcagcctagggtgaggctctgcctccacagacacaacatagagccagtggtaactgtataccacaccattgtacaatgacaaaattaaaccagaacgtattagggggctaagtgtttgagaaaagaataagacaataggagttcctggaaaagacttttgagagtcccttggactgcaaggatatcaaaccagttaatcctaaaggaaatcaacactgaatattcattggaagcactaatgctgaaactgaagctccaatactttggccacctgattcaaagagctgactcaatggaaaagaccctgatgctgggaaagattaagagcaagaggagaaaggaga

SEQ ID NO: 52360 - DNA, 627 bp, Bovine  19866881137722
  misc_feature (1)..(1): n is a, c, g, or t
ncatattgtgagcacttaatcaagtctggctggatttaatttacgagttaccaatgtacatgtcatatcactaaattaaatgctggcctcatatttcattttttgtaatcccgtaatattatcatatgtaaaacttgacattttcacaaatgacagagataccacgtgaggatattttagaagataccttaaaaatctttttaggagattcagttaaatgggacagaaatgaatgatggggaaaatatgcatggaaaatgtagagcaatactatgaatagtttgtgggctggtttatatgaaacaagctgtctcatttgtctagcaattacttttggtgatgctatggatatggttatttcctgctgtagtaaattctccccaaatttttaatgtgatattttgcttgtcttaataaatccatatctttcctttgtctcacttgtagtttcgtgaacactatccagtgtacctattaccactataaaattgaaagaatgttattatcacatttgtgttatgaaggttggcatttgaaacgctagcaagagtgtgacatccttacactcctgttgctccagatacagaagctgggctattttctaattatgcagattgtgttctgcga

SEQ ID NO: 52361 - DNA, 2744 bp, Bovine  19866881190917
  misc_feature (1)..(1): n is a, c, g, or t
natggttgtgtgtgtgtgtttattttttttaaccagggcaataacaaggtggtagaatggagcaaatgagacctgacacggagcaggttgtgatggctgccagtggagcagctttcagacagactttagggattctgttttggacatgatgactctgagctgtttctaagatactcaaatagtgctgtcctgactattgaatatatgaatctggacttcaggagagaagcctggatcagagataaagattttggagttaccatatcttctgggcagaattgtgccctgctcccaatttatatgttgaagccctaactgctagtactcagaattatgactgcattcctaagtgatgaataccaagaacgctttttgttctaatgtttgttcttcagccctgtgcctgatgcaaagctcctaagcctctttgcgtatcctaggtgacagtagtgtcttttgtttgaatgaggtgactttgggtgggctcctgcatgggggctggtccccagaaagaacaagatatggttagaactctgaattttcagcccctcctcttcattccctggagaggggagaggggctataaatggagttaataatggatcatgcctacttgaggatgccccgaaaaaatcccaatagtatggggttcagagagcttccaggtcagtgaatgtttctagtaccaggagagtgatgcaccccaattccacggggacagaagcccccaaccttgaaaccgttccagacctagtcctgttggtctcttcatctgtgttctttatcgtttgttcttgtttagtcacgcagtggtgtccgactcagcgaccccatggactgtaacccaccagtcctctgtccatgggattctccaggtaagaatactggagtgggttgccatttccttctccaggggatcttcccaatctagggatagaacccacatctcctgtactagcaacttgattcttttgctgagccaccagggaaggccttgttctttatcatagcctttgacggactggtaaacttaaatgttttcctgagttctgtgagccactctagcaaatcatcaaagccgttggggaggaggtcactggaacctccagtttgtagccaagtcagatggaagtgatgggtaacctggagacctgagacccaccattggcatcgtcagtgaaggagtcttacaggactgagtcctttccctgaggagtctgtgccatctttgtagacagtgtcaggatggagttagattgcagtacacccagctggtgtcccaactttcttgatatggaaaaacctgcatgcgcacacacactatctgaagcattctgagtgtggtaatagtgtcagttaaggagacacagaggcagaagaactgagtttttgttttttttttttccctgcacacaaacctaaacagtgctacttacggccatggagagattacttctagtggattcaggaatgtgtgtagcaatacagccagatacagagcttaagatttctttctgcctttttaaaaaacttttaattttgtattggagtatagccagttaacagcattgtgtagtttcaggtggacagcagggggattcagccatctatacacattatccattctcctccacactcccctcccatccaggctgccacataacattgagcagtgctatacaatagtccttattggttatctgttttaaatatagcagtgtatacatgtcagatttctgatgatacagtaagtcatgttgctttttaatctgctcttgagatgaatgttcatgcagtctgtgaggatgcccagtggtgttaaatgactgtattgtttcatcactttgtaaaatttattgatatgtttttaatttgacaggcagtcttattgaatacttgggaaaattaaatacccatgctttcattttaataaactagaaattgcttagggaccccatggactgcagccttccaggctcctccatccatgggattttccaggcaagagtactggagtggggtgccatcgccttctcctagaaatgcaatacccctatagataatgtcttaaagtaaatttctcatagcattttatactatttacaaatatctcaattttgtgattcttatttgacatgattctatgattctatacaaagttttgaatccttgattaccaaaatttactaagcttaggatgaaataataatagcctaggaagagttaataatagcataataaatatttgtgaatacttatatgaaaaaattagccattaattaatggagaaaataaatcttttcaagaacatttaagactatatattcagttttttggtgttaggatccaataatttttcggaaatatattctactagttcaagtacccctgacaaatctgaatcaaagcatatttatgttactactttcttaactatctaatatctgaaaggtttaccagggttgggaaaagttaaatattaggaagaaggggaaaaaagtcttatgttcttcaataaatgtctttcagaataaataaaagtcatcttttatcccatactcaagaatcctcttacgtgaacacattttttaccaggagcacttggctaagaagtatgttagtttcctattgctgtggtaacaaattgccataaatttatgtcttaaagccatacaaacttattttcttacagttaggaagcggagatccaaaatgggtggcagggctgtgtcccttctagaggc

SEQ ID NO: 52362 - DNA, 875 bp, Bovine  19866881226649
  misc_feature (1)..(1): n is a, c, g, or t
ntttttctgaatggatttccgtgtcccagacaagactgacaaaatggcacttggatgcattagaattttaaatgacatcaggacaagtaagtaattacaaataattaaaatgaatagtttatcatcagctaaatgtgaactggtacaacacagagaaatgcaatgctgtctttccccattttttatctgttattaagtatgccaatatacatcacagtaaagagcaagaaatgtttacagcagtctgtgaattgaaaagacatgcatgcacttcagcatatggatctatttaataatataaaagtataaacattgttaaaatatcaaaattattgctgaagagactaatggtcatttttaagggaatgctgtttttaatcacacttttaatttgcagaaatagtgcaaagagagtccagagaattctcataaacccagagcagggtttctgctgtcattaacatcttacatcatcaggattcatgtatcaccattattgaagaatgttgatatatcattgttaactgaagcccacactgttaatacttctgtaacttttgcctgatttttttttttttttgatcccagcctgtactctcaaggaccacatcacatttcattaggctcttctgggctatgagtttcatgcactatccatgttattgatgaccttgaccattttgagtactgcttaggtataaagcccttcatttggactttgccatttttctcatgatgagattggggttgtgagtttttggaaggaagaccactgaggtaaagtgctatttttatgacattatattaaggacacataatccttcaatgacttaacagtctgatgacttagcagtattgatgttgaccttgaccat

SEQ ID NO: 52363 - DNA, 1423 bp, Bovine  19866881420006
  misc_feature (1)..(1): n is a, c, g, or t
nttctttgataaacttctcagattttttttaactgaggacaattcaagctctgaagaaaatgagggtgattcaatggtaacggtaactaaagcccactgcaatatgttatataatgtacaaaaaatccccttctgtcagaagtaatcattagtttttcaccacttaacaccaggcatattataatttaatctatttttcaaatataaaacttccaaaagttttgaatggagcaggaaacacgaatggctttgttgttattcagtcattaagtcatgtccagttctatgagaccccatggactgcagcacaccaggcttccctgtccttccctatctcccagagtttactccattcatgtctattgagactgtgatgccatccaaccatctcatcctctgttgccccttcctcctccaggctttactctttcccagcatcagggtctttctatgagtcagcactttgcagcaggtgacctaggtattagagcttcagcttcagaatcagtccttctaatgaatattcagggttgatttcctttaggattgacttgtttgatcttcttgaagtccaagggattctcaagagccttttccaccaccacaattcgaaagcattaattctttcttccactcagcatcaactctcacatccacacatgactactgaaaaaccatagctttaactatatggaataaattcccaatttattataaatcacatcatagatttaatacattggtacactgacgattatagcacctattttgtctctttaaaactacaaatgaaatgctcttattttaatttcaaattttagtcataaattgactttccttctggctgtttctgcttcaactaatataatgtataaaactgtataaacccaaaggtttcttctacattcattatcaaagttcatttgtaaaaactaaggttttatccttcactcagccttgtctgttttctgttttctaaatattttgttcattcactggcttttgtgacagtaatatctttttttgtgtgagtgatttcgtgtgaggaagggggcaaggctgacatggacacttcattggaagaagacggggcttctaatagcactgaaccatggaagcataaccttgaatgatttagttcagtattttggcatcaagaagctctaattccattttcagataaaataagtcttaagttattatatccaatataaacatccatctgtggggctttccatataaattattactctgaaaagaaccaaaattaagacttcagcttgctcaagtaaaatctcatttccttgaagtacaagaggagctgtatttcaaggaaacagcattcatcctcacggagagggagaggatttgaaagcctggaacccggccacccagccgagggcagaaattgctgatatgaaca

SEQ ID NO: 52364 - DNA, 1971 bp, Bovine  19866881545298
  misc_feature (1)..(1): n is a, c, g, or t
ntctctataataaaaaacctagtaatagcacttgtgtttgtttttgttaagcttgtgagcaaagacttatagacaggtgcaaaaataaaccctcttttgcaacccagaactcattgtttagtatgagttttgatacaggtaagaaggaacatgataactaaaacagattcaaatgatagggctgtattgatgaacttaaagattgcttccagggctatagtttttgttgttcagtcactaagtggtgtgtgtctctttttgaccccatggacttcagtatgccaggcttccctgtccttcatctcccagagttagctcaaactcatgtccattgagtcagtgatgccatccaaccatttcatcctctgtcatccccttttcctcctgccctcagtctttcccagcatcagggtctttcccagtgagtaggctcttaacattgggtgccaaagtattagaatttcaacttcagcatcactccttccaatgaatatttaggattggtttcctttaggattgactggtttgatctccttattgtccaagggactctcaagagtcttctacagaactacagttcaaaagcaacaattcttctgcactcagctttctttatagtcaaactctcacatccattcatgactactggaaaaaccatagccttgactagatggaccttctcttcttgccttcaatctttcccagtatggagctcttttccagtgaatcagctctttgcatcatgtggccaaagtatcagagtttcagcttcagcatcagttcttccaaagaatgttcaggactgatttccttcaggattcactggttggatctccttgcagtccaaggaactctcaagagtcttctccaacaccacagttcaaaggcatcaattcttcagtgctcagccttctttatagtccaactctcacatccacacatgactactggaaaacccatagctttgactagatggacctttgttggaaaagtaatgtctctgctttttaatatgctgtctaggttggtcataacttttcttcccagtagcaagcatcttttaaatttcatggccaaaatcttggcatacactaaatgtacagaatgaactaaaatcagtgatatctacattgctggacattaattctgacattgagacttttgttatttttgttgttggcttcagatataagagtaaagagtcggataggaaatattggaatttccaccacactttatacttaccggtatttctatgtcacctggatgaaaataattattagaaaaagattgtggcaattgtggacttttttcatgaatcattcttgtttcatagtgttctctgaattctcatgaaatgaatgaatttttctcccttaggtcattggtctatcattaaatcaaaaattaaaacatagctattttgttttggacactgtatctcgagcactgcattgcattgtctagctcaaaaccaatttacatccatgcagtgctgattgcttctaccaaacgaacttccaaaaatttcatctgaataatttgggggaaaaaaatggtaataaatgttcagccaatctcacactgtaactggatggcggtgcccccgactggtaaagaaaaactgtatgaggtgccgagtgtaatcttatttattgatcgccttcattctggagtcagtgaagggcaaaaaaaggaatggttaaatgaaagccatgaaatgttgtgatttattaatagaaagactgtgtcacatccatctgcacatctacaaaattgcttatttgtccttaatgtattttcagatggtgttttcattttaggaaccaagatgatgaccaagccactttccagtcatggttgtctcgtctctgagggaaaaaaaaaaaactttcccttatatatgatggctcatggtaaattacttaagatgtgttcagataactggacatatctcatattcccttcaat

SEQ ID NO: 52365 - DNA, 1599 bp, Bovine  19866880213808
  misc_feature (1)..(1): n is a, c, g, or t
ngagagagtcacttcttactgcagctaagcttttcacttctcagcttcactcacctctgccaagaggcctccttgttcctcagggaattgctttctcatatttcagaaggacagtgcatgcttgtgtcaggtgtgaaaagaatctttcctgcttgatgccaacgagaagcggcaccagggaaggccgacagacagagcacacattctcctctctaactgggttactctttgctctgcttatcttccaatgagatcttcctactggtgttcggtttgtaccgacatttaaaatcaatattctgatttttcaaggacacatccctaaaaaagaggacttaaggaaaggggggcaattctgaaaattctcgaaacttgacactggcctttagaaatgaaaaatgttgagaaacttctaggacagggtcctcaaattgttaagtattttctttaacatctaaagctcttattggtcttggtgcgtatgggtcaaatagcacattgttttggattttaatacttaaaaaaattccttgggaaaagggggggggggtgtggataaattagcagtttggaattgacatatatatcagatcagatcagatcaaatcagatcagtcgctcagtcgtgtccgactctttgcgactccatgaatcgcagcacgccaggcctccctgtccatcaccaactcccggagttcactgagactcacgtccatcgagtcagtgatgccatccagccatctcatcctctgtcgtccccttctcctcctgcccccaatccctcccagcatcagagtcttttccaatgagtcaactcttcgcatgaggtggccacagtactggagtttcagctttagcatcattctactactatatataaaatcgataatcaacaaggacctactgtatagcacagggaactctattcaatactctgtaataacttatatgggaaaagattctgaaaaagaatagatacgtttataggtttaacttaatcactttgctatacacctgaaacgaacacaacattgtaaatcaactatactccaatgtaaaataaaaactaaattaaaaaaattctttaagggatcaaaaagaagaggggggagcatcggaaggtaatctgaaggtaaaaactcggcaaacaagatatttcaaatgcataggctacctttattttagtgtaaaacattgtgactcaaatgtatttcctttctaaggtgtttttaggtcaagcaggataactgaatgtcaagggttaagcagttcttccagggtcacggttttctttttcctttcagtgagtctccacttgaccttgtggccagcagtccagtagctggtcatgaagctttctccagccactgctgttttccctaatgtcctcagtggatcctcaaaacctggataagagtagccaggtgcatggtaggctgctgaagctgctagagaacttgtttagtaactgcacatgtatggcaagcacactctttttatattatttattgcatggtttggggtgctgtagactggaactcttagctcagtaccaccctttccctctgcttccagagccatattcaggccacccaggca

SEQ ID NO: 52366 - DNA, 1502 bp, Bovine  19866880293093
  misc_feature (1)..(1): n is a, c, g, or t
nccagccatctgatcctctgtcgtccccttctcctcctgcctccaatccctcccagcatcagattcttttccagtgagtcaactcttagcatgaggtgaccaaagtactggagtttcagcttcagcatcattccctccaaagaaatcccagggctgatctccttcagaatggactggttggatctccttgcagtccaagggactctcaagagtcttctccaacaccacagttcaaaagcatcaattctttggcactcagccttcttcacagtccaactctcacatccatacatgaccacaggaaaaaccatagccttgactagacgaaactttgttggcaaagtaatgtctctgcttttgaatatgctatctaggttggtcataacttttcttccaaggagtaagcgtcttttaatttcatggctgcaatcaccatctgcacaaggtagtcagcatgtattaaataaatttttatggttttttactttaattaaaagcaattttcagtttaaagtgacaaagcaagtgactatgagtgacaaatttccctaagactagttagacagaatggttggaaattccttcagccggtgtgtcacataatatagcagagtggagtgggtttgtctatgccattctctcggtgtctcatattcatttggaatctgtttctgctgatgacagaacatgtcagaattaaaacagatgtttccttatttttatttttaaaaaaggcctctcaaatttaggaatggagtcacattcatcatttccctggaatcaggtttagtaaatgatatatggcatgtattcaatgaatgtttttattgaatgaatgaatacatgaatgaatgaaaaatgggcaaatttgctctgaaaactggtaagaggggcaaatttttcccatttatctcaagttaaacagaatgaaactggtttcataccctattttgtgattactatcatcttattttggtggatgatttttttatttttaaagtaaccttaaaactgctaatctctgcacaggtttaggtctctgaatgtactcagaggacaggaatgaaattaaatgaaacctggatcctcaaaagcaaatgtttttgtgaacaaatagactgttatttttcttggaataactttacatgatcagttttaccagcacagaccttttttttgttgttttaattttaaatgagtcttaactttattgtcagaactagttgctgagaggtggttgagtgaccaaacccgaaatggaagccagaggccacttactgtttcgtgtatcttgctggtcacagattaaccatgtttcactgtgcatgatcaaaggccagcgcatttgcaccaaggtacagtttattgcctaatacactggtgagccagaaggctgggcaggtacatgtcactcttctagactgtgagtcagggctcctaaaagacctgcttgctgggtatatgatgcccaccattgaagtttgccttgaagcttcaaacag

SEQ ID NO: 52367 - DNA, 1497 bp, Bovine  19866880399545
  misc_feature (1)..(1): n is a, c, g, or t
nacgaaagggtctaggagacataagttttgtcttggttctgtcttgcctggtcaaacctttttctctgctccttcctgggctaatgactatgttgaacagtagaagctttgtttccataacaccccatttatgttaacaacataggagacctacaatggaagaagctggacaggacccgttggatgatgtgtaagtaacaaggaggaggaactggtatgggacgcatctactgcaattcagtaaggaaggaaaccttgactgcacaggacagtgtcctcaagcctggaagccttcctagggaggaaaggcggtttcagttctttggacttcatcagactagaagtggggtttgtagagacagccaatgtctccaaaagcaaatcagtcttatttagggaaaagaccctcgtccctgccccctacccagtccatgttcctacatgactagtgcagaaggttttcaatgtaataaactccttagtagactgtaacaaaggaaaactgaaaacgtgcctcttccttgaattctttatacgtgtggcgtggagtccacatactctgtataaattttttgaaaacaagtaagttagaatataattattcaaatgaaaaaaatacttcttttgcttcataaaagatttgtgttgtaatgggttccatttataatattttaaattaaaatgtgatttgactccaagaatttggtttatgcaaaacatcatagaaatcaatttatcgtggacaatgataatgcaaggctggtgaggcatagtgacagcataagacagggcgataaatgagatgacagctcatctggtttcctgtcctgagtttggtaatgggatgattttcctgcaggcgggatgtgatggaaataccgaaactagagatcacaaagcagaacctggactcgctgaactcagaccttgaaaaggacctgcagagaatggatgaggcaaatcaggttcttctcaaaaaaattcaagagaaagaagaaactattcaaaggtcaggctttgtagttggatgggaaaggtctcctcatctgaaggccccttgggatcaagaggtgggtgggaggaaagtttacctctttgtccatgaattgaggcaagttgtttaaattctaaactataaacagtggcgtcctcaaaaggttttatgtacagatttttcactacgtttccacattaagtcattattttattgccactgcaatgggtgatcactttggctccctgagaccttggcgtagcttctcaagctggggccctggcagcttcctttggactgagccacccctgggtgactgtgtttcagtctggaaagagatatcacgctgtctgtcagacaagccagagagagggaggagctggaccaccgcacagctgagaaggaggcagccctgcgggacctggaattagagacggccaagctggtaaggaggtgtactagaaaaggacagtgtgatgcattttgctgcaatccaccagtct

SEQ ID NO: 52368 - DNA, 1284 bp, Bovine  19866880407632
  misc_feature (1)..(1): n is a, c, g, or t
nttaagtaatgtcccgggtaccacagcttccaagtgccaggatagagtgaaatccaatgaaattcggttttgatttgtgtgctttctgtatctaacccactctctgttttcagggtcatccttttcttgaacaactccagggggcaccattcctattgaattctgcaaatggtacccctggagcacaaatcaggggggaaatcaaaatggctttgattaaaatacgctatttccagaagtttatagattaactgtgaagaccattgtgagcacatttctaaaaacaacataaaataagaaaagataatagaggttggagggattaattctgttaggatttgagggtgtggtatctgaaagagtgtagaagaagcaccatttgagctgagctgggaaagatgggtaagctcatgacagataattgtgtgggagagagattttcctggagagagagtggtatgttctgtaaggcctttccaaggacttaaggttagtacaatttagctggaaaaggttagacttaaatcttggagaagtgaaccaagtaagaagtatagaaatgaaagatatgaagtccaggcacacccctttatagatatctcgccaattctgtatctcgcctcatttcctccatcaatacagagaggaatctagaactggttagtagagtgacattgataatgtaaaatcccatctactattccagtaatttaagatctcaaaaaaatgaggatagaattatttataagtgagcagttgagtagggtctctggacctaaccctcctctttcctccttccagcttgacctccacatactgaactacctttgaaacaccaggctttccttcccaatgacttggctgtgcctccttaggaaaaataaatttgttttgctgctccaaaaatccaacttgattaagaatgaggatttgcttggctcatagataagacatctttcatattcttcctaccctgctctcagatcttcctgcctctcacctcttaactgcattgactagaggtgcttggtttggatttgggtacagtaatttgctcacataccacacagaggttgtgaaggaaatgagcatgatatcaactactgctgggtcaatgggtttggggaaatgaaggaatgtgtcccatagagatgagtgctgtttcagagcagtttaaactgtgtcaagaaatttgttccatgggtcttatcgctctttagggagagaattaaactgtcctaaagttctgaactctgctctcattctgcctacagagatgacaag

SEQ ID NO: 52369 - DNA, 786 bp, Bovine  19866880442593
  misc_feature (1)..(1): n is a, c, g, or t
nctggcataataatgagatctgtttccgttggagggctctttagtgttatgggcaagtagtaattcccaggaaagactgaaacctgcttctccttctcacaagaccaggcagtgaaagccaacattaccatccacacaggaaatagcatgactgctcttggtccacctcctcttggctttgtaattttccttacttttcagtcccaggtctgtgcacaggaatttcttgtctgatggtgatatgatcaaacagagaatatgctaacaatggatggtggccagatttgtcttctgtggtcctcctcttcccacaccctcatcctcccctcactgccaccctggttttatggaaactgctgtattttatgttcccaagcctttgtggaatgtagtattttctcaagcctgagggactctagttgtgttgacctgcatagtgatatccttagggccgggattcccttctgtttttctggccttcttttacctttgatctgaaatagacccttttaatgccggaagaatcacatggaacttgggttaccatactcaggaagatccccagtgctgcagtgctctgctcagcaatctcatgatctttctccttttgaagttactgaggtggtgatggagccacatgccccaggcatagttccttttgatattgtgaatcatttgaccagtgtttgtgcccgtcagaagatgtaattaatgtcaactgattaaggattgagaggcatatttatagtagattttgttggatctaatgctactgtcaaagctttg

SEQ ID NO: 52370 - DNA, 1170 bp, Bovine  19866880472564
  misc_feature (1)..(1): n is a, c, g, or t
ntaccaaccaagttttgtggtaatggggtactttctaatttatattcaaattagagaagttaccgaggaaagataagttatgtaaaacaaagtaatttcagccttaagggagatactgacctttttttttcctttttgttctattgcttttacctactggtgcttagttgatgccataatctctatttttctgattcattctaatcttttagatggacttcttagtatgcccttgagaatctctatctttagatttgggattatcaatgtttccaaatggagtcagcgctaaactatgaggaaagttgttagtaaagcaaatgaaaaaattctttcattataattgcttagagagaactaataattaaaacagaaaaggctaaagtttcccacagaggattttaggcaatgaatcaaataattttaagtttgcaagctatgttttgtgagacaagcatttcttaaagagatatatacacaggtattcccatttactcagaattcatatgatttcatcttacaaaatcagaatcagctttagaaaaggtctgtccagatttacaacgtgttacatcattattttgatttaggatggcaaagactttctatttaggaacaggaaagagaatattgtttattcttcttccccactaccattccatcaccaacaacctagaacagatgaagaataggcattacagtgcagagtaaatccaaattttattcctacttcaaacactaatttgctatttgaccctgagtatgttttataactattgtttgctttaatggttcttcctttaaagatataaagtgtgtcctatctcatcaaaatggtacaaaaacactatttgtaatgtgatgactatttttagtagatgtaggtgaaacacatattaaattaagattgtttatgtatggaatcacttgcaaaacattactttctttttctatgaatctataaacttttgtctctgaagtagactcaataactttttccaggtgcaggaagcaaacattcagctcaatccatagctgagattttccaacagcagttttcaagggtaaatcatttgtttcggggaaaagaagttcaaaagcatatcctagttaaataagaatactccaagaattgaatgcaccttgtaagtctcacagccctctgtattt

SEQ ID NO: 52371 - DNA, 1065 bp, Bovine  19866880486248
  misc_feature (1)..(1): n is a, c, g, or t
ncccggaggagtaatggggtagggtttgcagagaagagagccaggaagagagctgagctcagattttgatgactggcagtgtagggctggctccttcatgaattaattcaataaacatttattgaatctttggctgttctggacaccagtgtcagcaagaagcaaaatactgctgtgacctcacagagcatctattccaggggttctgctgctaattcccagtgtaaccttgagcaaagcttccccactgtacgggtgctgggcatttctaagattggaatcttttttctctccaacattctaagattaataggaaaaggttagaaatttggtggaaccagatgacagagctacggaagtgggacttcttcatttgggcagcagaaagcctttgtgttttctgtgtatgggggacactttcaaggtttaagaggcttaaggagtttggtctgatcaactgaaggcaggaaaaaaaataggaagctggaaacaatttaagagataactgatctttataaggtgatgaagacccagacctacatcctaagatttaaattcatgggtgaatagcatagatttgataaaccatgaataagccattgcttcctaaaaataccgtctctattaaatagctggctatcaaggcttcactgccatgatgttagctgagaacaacagaactagagatagatctgcaggctaagaacaattttggatctccataagactaggcttaagggtacatgtgttgcttcacaggctacaaaggaatgtcctgcatgccagaggaataccatacagcctgtaccagatgcagaacactccaaggggttcggctttacaacgtgtaaatacacacctggctacaccatgtaagatgaatgaagcccaagtaatgtgagttgtcttcctggcattctgataataagtacagcatgtggaatttgctatctttagccctttcgctagagaatactagagtacttatcaccctggtagttaatcacaaagccatttctagttcagccttcccatggctaacggaactttgaagtcactcaaaga

SEQ ID NO: 52372 - DNA, 1203 bp, Bovine  19866880515784
  misc_feature (1)..(1): n is a, c, g, or t
nttgacatagttgcttaaatagacagatactaagtttcctgaacatgagacttctattcaaaatatgaacacaggctaaagaagaatgtcaggctaaaactggatactagtggctctaagttcagtaaatttcaacaaaatctttttacattaaaatgatttagatagctacatcattttaggaaaagtcacagtcattgccatttttttgtgctatgatttctctagttcttcaagcaagaatctctgtgaattatttgagttcttagccaatcagacacagagaagtggcttgcatctctcctaggctaccaagttcccccaaaaatgaaatcgactagtggtttgttcttatccagtgattattaattatgtacatgatcaaataagggagaaaattcctttgaggcctgagtgatcttcctggagcttacgggtactattctctgtcactagctgtttctaactggctacttccactctgtgctaagtagactgtggtcaaccccattgctgcatataaactgagtcacgagaaatacccttcccaaactgaattaagcatgagttgaagactgtgcaagaactctatgaatatagttatttggggggaaaaaaaaaaaccagtatccaaatgtaaaaagaggtattgctaagtggcaatgcatactgcagaacctctgagggttgtggggatgagagccttcaagaaaagtagaagaacctagagatctcaagctttcttaagtcaacggccactgttcagacagaaaaggcagccacttccctgtgtgaccctgaagttccaccagcctaaagtatttctcctgccacaatgtgtgaaatttccaaccatgtcattatacattttaagtcctcaatgttctgagtaaaacaaaaataacattaccctggagaaggaaatggcaactcactccagtactcttgcctggaaaatcccatggacagagaagcctggtagactactgctgctgctgctaagtcgcttcagtcgtgtccgactctgtgtgaccccatagacggcagccaaccaggcttcccgtccctgggattctccaggcaagaacactggagtgggttgccatttccttctccaatgcatgaaagtgaaaagtgaaagtgaagtcgctcagtcatgtctgactctagcgaccccatgaactgcagcctaccagactcctc

SEQ ID NO: 52373 - DNA, 1227 bp, Bovine  19866880568620
  misc_feature (1)..(1): n is a, c, g, or t
naaatggaaattaaaaggggtccacattttagtctcttcatctcttaaagcatggctcgcactgcactcttcttggggtcaccatgagtatacaggaggagcttagtagactgtctcctctctgaggttcttttaggcattattcctccctgtcttctgagcaggagtgggggccactctgtagcacacgaggccctaaacaagagcccagaagaaagtctgtctggagacagtaggtacaaagaggctagtggaaagaatgaggccaagttcctgaaaaaaccctcattctaagacacctaactcaggtgaagaaagggcttacgtgtaaccttctggatgcagagtagatgcccaaggccctggaccttcattttcttggttttcactgcagtgttttgtggacagcctgccagagggcaaccatagagacactgtgacctgtatcatctttcagttttaaagtgtaatttgaaaccaaccaacccaacaggcaaacaaaaagcaaaaccttgggtgtttccaaattttctcctgaaatgctacactaatataaaggataagtgtgttatcccacagtccttttgtttgctgacttactctcggctcagattacttgtaagtcaggtgttcagcatggctgaagtcattggctggctttgggtccctgccaaagagacactattacaaggattatgtgtaataaacaccctgtcacatatccagcagtcatctctattgcaaaagtacactgagcctaaactcttaacttctgcctggttgcttaatatccaagtttgcttaccaggaactagaataggtctaggagcctgagagctctatgggacattaggggtgatctcgttgtttctaaactctattcaagtggaacacactggtggcttgtgacatgtttaacaggtgtccctttaattggattctgtggtcaactaagtttggaaaatgctattatatagagttaagtttctttgctaaaggacatctcaagttctttagtatgctaacatgagtcatggctctgggtataaaagctacatgcttacttgaccacaaagtccttttattgtaggacaggtatcgccatctcaaaaatgtcaggcagagaccatggagtctcgtcattaagagcacacctgcctgtgtgtgactgcctgggttcaattcctggctttatcatttactgatcttaagccattcactgaaaat

SEQ ID NO: 52374 - DNA, 1078 bp, Bovine  19866880579158
  misc_feature (1)..(1): n is a, c, g, or t
ntgtccgactctgtgcgaccccatagacggcagcccaccaggctcccccgtccctgggattctccaggcaagaacactggagtgggttgccatttccttctctacaatggaatactactcggccacaaaaagaataaattttatcatctgcagcaacatggacggacttggagggtataatgctatgctaagtgaaataaatcaaagacagacaagtactatatgatatcacttatacgtggaatctaaaaaatataaccaaatcatgaatataaccaaaaagatgcagattcacagatacagagaacaaaccagtggttaccagtgggggaggagcaatataaggctaggggagtggaaggtacaaatgactgggtataagacaggctcaaagatacactttacaacacagaatatagacaatattttctgatagctgtaaatggaaagtaatatttaaaaactgtatacaatttttaaaaattaaaaatacattaatgggtttctataatggtaaacaaacgtatgatgtataagaacagaaagttaatgcaagtatactgaaccacatcaagtaatctatctcctgcttcccaaataagactaaacccaaatgggaagcattaatctttacagtctgaaaaaaaaaaaagaaaagaacacaatcaactccctttatagtgcagtattgtctaatggtgtattaacatatgctaagtgaagacgaggcaaatgtctacaggcaagtgactaaaagaaatctatttctgaaatgagcttactattattttttctgttcaatcaattataatagtcataatgattctattctacaggtgtttacttttccacatgaacttactttcacagacaagagttcatagttccatgcttggaacaaggcaggcactcattaagcgagaacaatctaaagtttcttaaaaattacagcaagacaggtcttaaaagctaaaggtgagtcctgacccacacacagaagctcactgtctgagcagctgggcactggagccccttgcaaaattaagttggaagagttacatattctcgaagccaacca

SEQ ID NO: 52375 - DNA, 1158 bp, Bovine  19866880584904
  misc_feature (1)..(1): n is a, c, g, or t
nttatacttaatttttttgaatcttctccagatccattacatttttctttaagaataacaatttgaacggcacacaatgtaccaaatacataagcacccttgttctccagaattataggataatattttgtaccttttctaatgatagttgacattttgttggccatttttctgggcaataacacactggatcagtgtcattaaaaatagtctgtgatgtcatcaaggcttcttttttaagttgtgccagggagaaagctctttaggcagctgggaaaatatgagttaatttttttttagtaaaaatactgtcttctggtcacctgggatgaatttttttaattaattatctttttaatttattcttttattgaaggaaaattgctttacagaattttattgttttatgtcaaacctcacccatggtgaaatttactagttgtttgttttgttggctgtttgccagtcacagcttcacaaacttgctctgcacatcacctccagtgccatggtggctgtggtacttactgtttgtattgctgcagaagctctgtgtcatcggcacatttaaagatttcaaagtatattagctccaggaggtgttagaactcagttgaatctattctttccttcccatatttccagtgtgtctaaaactatctcctctccattatacagaacagcactgaccaatttcatggcgatgtttttgaaaatagagtttggtatggaaccttgtcagttttatgacatgtttcatacatataaaaatacatagtacctctatgtaaggtacaaagaataaaatgaacatacgtacttattattcagcttagccaacattatcaataaccgtatgtgtctctaactgtatttctttccctcctccccagaggtaactcctggccaaaattttgtatttgttattctcttgcttttctttaagattggctacatttctctaagcactaataaacaatgtttgtatttttttttaaatttttatatacatggtgtcatattcttctggaacttgttacttaataatgtgagcttcgtttatgttgacatatatagttctcatcagttaatcttcaattgtcctatggtattccgatgcatacatttatcacagcgtatttatcctgttagtggaga

SEQ ID NO: 52376 - DNA, 2761 bp, Bovine  19866880591766
  misc_feature (1)..(1): n is a, c, g, or t
natatagtgcattttagtctgtgatctggaaaaatacatttaatattaaataatctcttctaatttaaattccatgactctgcatctctttcagtagtctaaaactttgaagagtaaccctggcactacattttatttctgggatgcttgcaaggaggttacaggaagaagctgacttacaaacattggttttgtctccccgcaaaaaaacagattctaaaaacaaaagaatcaaatgcaaaaaggtgtttaagaatcactggcagtgttttttagtaacttttaaatctttgatgagcaagaagggagaaagattaggagtagcctgatcttgaacctaaataagtttctggtcatgaaatctctggtagttcagatggtgaagaatctgccttcaatgcaggagacccaggttctatccctggattgggaagatcccctggaggaggaaatggcaacccactccaatattcttgcctggagaatccccatggacagagaaacctggcggctacaatccatggggtcacagagttggacatgatggagcaactaaccctttcaactttcttgaaatctttactctttactgaaaatccagacattctcatctctttgttgaaacatgaaaggagggtttctttaacatagatcttctctcttttatgtaaaaatatcccttttattctgaaactggtccaggacagtttctgtgggatagactttgggatgatgggtggtgtgctagaagtaacctagtgaccagttggcaattagttgccaaggagaggagaacccagaaaatcagagtgtacaggtatcagcttttgcactaaaatccccaagctgggactgagattagggatctggaatctttgaagttatatctgagctctggccaccagtctgcttcccctgtcctcctttttaactttgattttttagaattcctggaagcatgaaagatcattatcttctgctcctctgagagatccctaaaaacagtgtcagcctgtttctctaacttcaaggcagcagaggcaccaggtgtgacttttcacctatttataatctcaaaatgaaaacatcattcccaacaggctgtcatttaaataagatgagattcattacatataaagccatgaaatgaaaagacacttgctgcttggaaggaaagccatgacaaaactagacaccatattcaaaagcagagacatcactttgccgacaaaggtacatatagccaaagctatggtttatccagtagtcatgtacaaatgtgagagttggaccataaaagaaggctgagaactgaagaattgatggtttcaaattgtggtgctgaagaatactcttaagagtcctttggacagcgaggatatcaaatcagtcaatcctaaagggaatcaatcctgaatattcattagaaagactgatgctgaagctgaagctccaatactttggccacctgatgtgaagagctgactcattgaaaacaacactgatcctgggaaatattgagggcaggaggagaaggggacgacagattgtgagatggttagatggcatcaccaactcaatggacttgaatttgagcaaactcagggagatagtgaaggacagataagcctggtgtgctgcagtccatggggttgcaaagagtcagacacaacttagtgactgaacaacaacaacaatgatcaatattaatattacacattcatataaacattttttctccaagagaatggactctctgataccttaaaagttgttgcattatttggaaataagtcatggctatactaaaatgaaggtatcaaggaatgaaaggccagtgagtagaagaacttaggcattctatccttaattataccttcttctaagaatatataaagcaaacaagggagtgatgctggaagggaaagaatttcagggcctacgaataaaatgaattgccaccaacttgtataaatcggctagaaatttaaaaaaattataaatatttcagacttttaaatccatacattcttcttgaaaaagtgttgtttctgttttacaaaagtaggcacttttggagaaaagaaaggagggtagtggcatcaatacatttcatgaaaatttttaacgagacaaggcattcctgccctaaatcagtgacagaggatgaatatttggctttgtcattcagattttaaactctcaggttttgcttttgtttttttattgtaggaagaagcagccactttttaacttcaggtctcctccctttatatataaaaactgtactggaggtagctacagaaaaaaatgacttgaatcatactgctcatcatgcagctaaaaataggaagccacacttaagtatcttggcatttacagaggtaagaaagaaaatttccattgtcactgttgttagcaaagagaatatatttcttcatcttctacaaggaaacttaaaaaaaaaaaaattaccaatgagtacaaagaggtagcacctggctgtaattcaattctgccaagaggcccagaagtaatcaataaacacttattaactaatcacacagcatctcgcttccatgagtgaaatggcaagtgctgtacacatgctgaaattaaacaatccttaatatagacaaaaaaagtaggagaataaagaaaaagctgaggaactggtttatgtcaaatttcctaggaaggggtttagccttctttctattactgaggaccacctaggttggaggggaaaatatcaaggcta

SEQ ID NO: 52377 - DNA, 1151 bp, Bovine  19866880699239
  misc_feature (1)..(1): n is a, c, g, or t
ncacataaccaatataaaaaattattaatgaggtattttatgttcttttggttaccctaagtctttgaaatccagtttgtgctttatgctaacagcacatctcagtttagacactagttttccattggaaatacttgatctgtattcagagttcataaaacttgcagtgggaaaagtggattcacatactcaagttgtttctaacatactaaaatgtttcccaataactgaattcagtattagatttttgactttaaattaatttgaattaaataaaattgaatttaaattaactttaaaactctcaatcacacatttcaagttcttaatagccagtgcagttagcagttaccatattcaacaccagatatagttacttaacctctccaagttttgcttctgttattatcatgaaatggagattattctaacgtaagatttttgtaagaattaaattcggaagagcaatgtgtataaagctctcactcagcacagggcccggtacatggaaagtgcttcgtaatgaaggccactctgagggttatttctcttccccacttcggcaattgcccctctgtcatccttaagccccatgtgacgtactgcttccctccagctcttagggaaaggttgttaaatgaatttatgctaagctgccaaaaatgaccagagtattcaaagatgcatgcgccctcctgtctctccttactagacaacattccctcacccctggtgtacctacagcttcatttatcattcatgtatgaatcactcccaactctgtaagtaaaacacagatcttcagagctgtatatccaactacctaggaaaggattgactgagattttccaaacacatttttaactcaacccaccaagacctgaattcgttattatcatccctaaagtgactctcctgggctctcctgttggcgtggtgctgtcatccattcatgcctgatgcctcagccaaaaatctgacagccatcctaagcttttctctctccatcgttcccctcaccccagatccttagtcagtcaccaagacctaccgattttccctcctaaatagctccccaatccatatatgtctccgagtcttcaaggccaccgtcatccttcacttggatactgtaactggtctttctgcct

SEQ ID NO: 52378 - DNA, 971 bp, Bovine  19866880732677
  misc_feature (1)..(1): n is a, c, g, or t
nttgtattggtttccaatgcctgcccttcatatctatttgtgtgcctctttaaaaattgaagtatagttgatttacaatactgtgccaacatagggaactgtattctacatcctgtaataaaccataatggaaaaggatatcttaaaaacaatgtatataggtctgcctctgtcaaagttcctttctcttctgatttgtcatgaggcctctccccaccaagaaagacacaatgcctctgatttcaggacccaatttcatgccccaataagcaaaacgttctgggccgatctcatgtgttgtgagttcatggtgaaggccgacactgcttttcggtgcttgtttcccacagagttttgttccgagctgtattatgtccacatctttaatgagaaatgtattctgttgccatggcttattgaaattcatggcttcctctagtaggtggaatcttccctgcccacctccatcgtcaggttttgcctagggctttatgagactgagatctctgaaactacacttaatcagataagtctcagttacactcaactcaatgcctttgatttctaatttctgcattttaatttttcctgcctgcagttcagtggcacagatttattgaaactgttgccagcaacaatttgctctgacccgctacggttttaagagttgctgctgaaataggcaggtacacagtgggaaggagataaatggagtttcgtgtcatttatttcaggtgccagggtaagacccacatttcaggaggtaataatggaagtaaacaacttttattctggttctaaagtaatgtttccataaccaacttctgggttaatttgtcttttcagcctgtgctgagcagatctcatttccagtgtctttgagctggtgaaatttcctttacaatgattaaggaatttatcaaagcaaatcttcttgctctttacaaggatgcacaattttccattggcat

SEQ ID NO: 52379 - DNA, 2122 bp, Bovine  19866880886952
  misc_feature (1)..(1): n is a, c, g, or t
ntaggaacgtgctctcatgaagtagacatgaacttaaatttagcgttggaaatgttgattgtagcatcacagactttaggactcatgggcaccattttagttctttctcttgcttcaagcatctctgttatccaccagagttggatcctaagttctaaaaaacgattatctccacttcatgttttcatttagtaatacattccagatgaatctaacagtataactctcgcttaatttctttttagaagcatttgactgacactggcatctgaaggtcacttaggagcctgagctgtgtcggttacgtttcattcggaatccatgtctggtcatgaatggaatgcacttggccttgtgttcttatcctgatgaaaggactccttgtgctgaccttgacctaaaacatttgttttaatgtgagagaagtagctgtcatgagatctgattggaacagaccagctggcaggcaggcagggtcacacagcgtgttaaccgtggtgaagtgaccacagctaagagactgttcttcagtctttcagtcatatattcagctttgtcagtgtacagaggtaggtacaataacttgtgcttcatgcagactcataagaagctgatgaataaaccagaaagctagtatatccactcagaggacaatagagaattttccttcagcatgacaaaaatgtgtataatatctattcactgttacttccacctcacttatctctacttggcattagatatttgcttatgccattgctcctcttgctgagataacagcttggtcaccttaataatagttctggctgtttcagcccactgttacctcccacagaggtaatggataatccagtttttacttgttcaactcttaaaagcaaccttactttcttcatttgtaaagtgggcccttctgtgttgtctgtttgacactgcctatagtgtatattgaagaagtagaatttgggggctcagtacctccaggtctgttaactgatagcaagtaacagagccagtgtatggtcctttatcacatgtagcattactttccttagaatttctctggtaattaagcattgtttaccatgaactgggctagtttatcatatatagaagtcattcaataaagaatcttttaaattttaatttggttttaaagaatagagtaaaccttagactagatggcatcagaatgtcataaatttcattctagtgcatttggacaaaacttcttcctgcctgcctacctcctcccttcctctttccctctctccctcaataagcatgtgctgaatgccagctctgtttcagacaccgtgactacccacaacacataacatcctgaatttcacattctcaagagttcacaggatggtgggagagatgtacagagtatcctaagatcacagaataaagatacctgtgaaacaacgagagatcaatgtactggctcctcctgtaaaacttaagatgagtcttagaggatgaaatggtggtggtcatcacacagagaaggagcttttccagctgatgaaaggaggcatgtgaaaaggaggcaaatctagagtctacaagttgaatgtgaatgtgggtggtttcagaacaaagtactcgaagggcaagtagtatccagaccaggaaggatcctgactgtcatcagataaaattcaaatattatcctatcagtaacacggagacagaagttaaaaggggcagtgctgtgatctcattttgagtgcagaaatacttctccaatcacagaagactggcttccaagccctttcatgctctggcggcagacctatcttctcctgtactcgactgtgctcacttctctctcactgttctccagcgtcagtggtcctctgattccttaacaggccaagttctctccttcctccgtgtctttgaaggcacagtatgtgccctctgtttgaaatgcttttctagccccattcaatagcacactctttttctttgctcctaagtcgcttcagtggtggtctgactctttgcgatcctatggaccgtagcccaccaggctcctttggccacgggattctccaggcaagaatactagagtgggttaccatttcgtagggttcagctaaacatctcaaag

SEQ ID NO: 52380 - DNA, 1950 bp, Bovine  19866880975001
  misc_feature (1)..(1): n is a, c, g, or t
ncatagaaagccctctatttgtgattccccaagtgtgatgacccttgtatcaggggtggtccttcaaaagctacgcatgtggagttgttacaagatacatcagctcctgtggtacagagccttttaagccatggtgactctacacttgcctgatgtggaccttgtctctttgagcctgagctgtcatttggggtggggattcagaaggcagaccctggaggctgcaaggatttctgcagaagtgcctgacacttcccagcaggcaagctgtggctcttgtcctactaagcagattggggtctaccagcatcttatgagtctggatgttaagttgaaccaaaggcaacctcttggtggacactgcagatacaacatagatgagacacaatattaagaactagaggaaaaatagacgatttctgattcctggaaatacattttccacttaaaaatgactgtcaatatataaaataaattgccactgggaatctgctgtatgactcagggatctcaaaccaggactctgtaacaacctagaggggtggaatggggagggaggtgtgagagatgttcaagatggaggggatatatacctatggttcactcatgttgatgcttggcagaaaccaacataattttctaaggcaattaccctccaattaaaaataaataattttacaaaatgaccatccataagcatttgctgctattaataaaaacagagaagcaacatttcccttcaatgttgcctgctccctggtttcaacactgaatcttccctaccaaacaaaataccttttaactcctcacactgtgctcatttgaatgaaaagctgaataagggtgcttctgtgaattaatatctgcaatttcaggggccttcagaaaaggccatgacaaacaagactcaaagtcacaagaactctcccaagtgctcagcagttcctggtctatggcaggtgttgatattctaaaacttttgcttcctgtatttctaccctcttgctccctgcttcaatatgacctcttttttctcaggacttgtacacagagaatatcttttaagtaccttatctcatgtcttctttctctgaggtatttcttctccctagagttcatctcaattttacctctctgagtctcaactaagttgaaatacccttgactgggatggcccaaggtcaccagctggctctgtagccagttgataagagtgacatttgaggtctgtgccttatacccagtttgccaggctcaggaaaaaacacaccttctcattttattgcatggttaacattagtttccaagagcgtaagaatggcaccattggttgtgaaatctgatggtagagagttaggagaaatagctagtgaaaagggagggaacaggacagaagaggggtgtgcacggctggagccgactataggaaagcctggagccacataaaatgggttaatctagcaggctgctcccaggagtggtgacaggaaattctgaagacctatctatcctttccacgaacttatcctgtttttctgtgagaagccctcatggtgcactttcttcgtactacatacagaagagacacacactcatgcaatgatagcatgggtgtcaactctaacaactggtttatccttttggaaaaccaatttaatgttgtttatactctgttgccattaattcttctcctgaaaaataattcaggaagcaagagtaaaccaacaagaaccacgtacatgaatttttctttaataaccatgaagattacatagcaatatggaactggatgaaatgtgaaagaaaaaaggcagaaggtctgaatatccatgatgagtgtgactttgaaaatatatgggtacatgtggacaaaggccagagtgaaaaacaaaaatgaaaatagttgggacagggaatacagtcatagatgacacatgtcttacaaaactt

SEQ ID NO: 52381 - DNA, 662 bp, Bovine  19866880980186
  misc_feature (1)..(1): n is a, c, g, or t
naggaggtatcatttgaaataggctttgacagagagacagatttcaactctcagagacaaaggaagggctttccaactaaaggaagatgagaaatggtgattcagatactccctggtcttgtaaataaactaatctaaaaggcacagggaaagagttgagcgtccactaatcctttcaacttagaaagaaaattctctcaagagagaaaatcttaacagcagtttacttgattactaattgttcaagagacgttattaattattcacttatatttggtactcaagaaagagttccaaagcggattcaggcaacgtctgtcttcaatggattaaatattgacacgattggagggcaaattttgcaggtaaccctgagcatcccctgttggttcacaaactagcccccatacaccaggggtaaggagagacagaagaagcaaaccactcctggttggtgggcagcagtttaataagcaagaagctgaggaggtttgccttaggcaaaaaaaaaatgaggagacctccacaccaaccaacagatctcaaagtttctgtagaggccttaaatgggccttagtcacgtgtaccacccagatggtttcaacaaaacattactctctcaaggcagcattcttgaggcatcttctagtgtgggggtgggg

SEQ ID NO: 52382 - DNA, 1569 bp, Bovine  19866880999556
  misc_feature (1)..(1): n is a, c, g, or t
ntgcagtccatggggtcgctaggagtcagacacaactgagcgacttcactttcacttttcactttcatgcattggagaaggaaatggcaacccactccagtgttcttgcctggagaatcccagggacaggggagcctggggggcctctgtctatggagccgcacagagttggacgtgactgaagcgacttagcagcagcagcagcagcaggtaaaaacacaccatttgggtgtgctgaatacctaatctaagcaacgaggtcttgcagaaacacaagaaaaaatcatgcaagaaatcactgagccactgtgtacatgaatatgagcactgataggaattgttagaaattaaactaactaaagaagaccttgcccctagagagcaattcagttttgcagagaaaaggagatttatgactcatgaaaccaagtttgcacaatatgatcaagtgccagattacttagttcagacaacaataattagcgagcactttccagtaatagtccacactaatcttatagcaaaattttaaacaaaccatctgaatgtgctgatttgaattctgatctcctatttttcctcactattatatataaccatataatagggcagcaaaggcaagaaccagcatagaaaagcctataaagtctattcaagaaagggtcacattccactactacagtggctttagggctcaggtgccccgtggtcaagaaatggcctctggaagaagcacaggagccaaagttaaactgtctgaggtatgagggacactgatgatactaaactgttaacagccagagtcttccctcagtaacacctataatagagctacagcccttcagcgctagccagtttctattttctagatgttcctgaagtgcccactgctttttctgttaccttaaagccttgtcctgagccaagatgaaacatcttctatagctatagagtagatctcattccatgagggaaagtttaggtacaacgtgagactcttctttcatttccattccatggccaaggccaggaccctgttatagtgaaggttcttgctggtaatagcctaagtcctgtcaagtcctgtctttacagatgatgaagcttgagttatctgtatctgtccataaaggggagaaggcaatggcaccccactccagtactcttgcctggaaaatcccatgggtggaggagcctggtaggctgcagtccatggggtctcgaagagtcagacacgactgaacgacttcactttgacttcactttcattcattggagaaggaaatggcaacccactccagtgttcttgcctggagaatcccagggacaggggagcctgctgggctgccatctatggggtcacacagagtcggacacgactgaagcgacttagaagcagcagcagtccataaagggacaactggattctcaaagtatcagatatacaactgtgaactgaagaaatcagtagaaaagagtacccttacataagctggatctgtatgttctactctaccaaagctatgtaatagtgaattaccataagcatatatcttcagatcttcagaa

SEQ ID NO: 52383 - DNA, 898 bp, Bovine  19866881010005
  misc_feature (1)..(1): n is a, c, g, or t
ncttggctcaggactggcacagtgtcacactggccacattcagtttcaccagacaagtcacagggccacacccagcatccagggactcggagtccatggacctggggaaatgtatgacatctacatcggtgggagaagctacaaaagcaactggaaaggccttgggtgaataatcacaatgaagcgagagagtaaagatgtgggaacaataaaccagtatatctaaggtagggagactaactccactggggaagctgggctgtggagactgcctccaggtttaaatggcacatcacgtttcctttccgtctgcttcctttgtattgataattgacagcaaaatcccagtttgatgttgtaggttagcatcaggaagtgcagctcatatgggaaaaacacagactttcaaagtggtcccaaggtaagttgcccttcctgtactgtgactgtgctgtatgttgtattaacagatggtcaattgtggaattaacctgtgtgtgtacatgtggtccatcaagctgctgaaatgattctgagaaacaaaataactaataaatactgagtaaaaattagatttatagtctgggcacatgaaagggggaagacatgattatgttgataaggctgttttaagcttttcgtaaaatgttcccatgaaaatctaacacctcaaaatctatttgcattagaaatttaaatgatatttgactgttgtgacagaatatgcttacttaatttcggataatttttatctctctttattaaatatattcagttgaagagagtagtatggatactacctaatttagtaggcatagacatatgctttatttttgactgttcaaaaaatgagttgatattattaaaactcttcaaagacttactttagttatacaca

SEQ ID NO: 52384 - DNA, 1038 bp, Bovine  19866881169436
  misc_feature (1)..(1): n is a, c, g, or t
ngagtgttggtataatgagcctgatacagatgggagcgaaagttagagagttacttggaatactgtatcagggcttggaggtgtgctggagaattgtgtaggctggtatttgcttattcaacttatatgatataaagggttttgtgtgtataagagagagaaatgagtatgtttttgcaagtacaaagtggagggggctacctggtcctaggtaactccaaaaatattttaatcaatgactgatttatttctttgatgtatttgtcaattaactaacagaataggttcatagactgcttcttaatttgatagtgagcactttcaagtatcaattctgtaacacactgtcccgtatcgggggactagcaggatcatgtatagattctggcccttgtaggaacttaaactgttcatggtaaatagaaggcaggactatgtacatgcaaaatgtctctcctatgagtcacggcactttggctctttttacttttgacccctttggccaatagcctaaccttccctggccaccctgtaaaatagaaataatagaaagtgtttaatttcttaagttcctaggctcaaccagatgatctcgtttcagtgctgcttccacctctgaactttattttactttttcagttttaagctcctcacgtggaagaggagaaacctcagcggaatacttggcattggccctaaattaacctctccattgacttcttcctctccccgactcctcccccaggtcctaaggggacagcaccttgcatatccatgcatatccatgacatacgcatatgcgtatgtcaccttgtcagctcctctgcctattttgtggtggcccaagccctccctctacacctaaacggaaaacctcaggctgatttgacaccagacttgcttccctgggctcagttgatgacagcactccccagagctctgcagtctttctctcctgttctgttctttctgtccacagtactctggctttcactacctctgccgtgctaactaagttctaaaagattctttccaaat

SEQ ID NO: 52385 - DNA, 769 bp, Bovine  19866881197867
  misc_feature (1)..(1): n is a, c, g, or t
nagaatctgtatggaatatatgtgaccgctgccccataaaagtctacctaacgtggtctgggccacactgccatgcactgaacaaatacattgatgaccagttatgattagaggtttttcaaaacctatttccatcttcagctgacattgacttgttcagaaacagcaccatataagtcagtaaaaataataaccctcctcatcctcattttgctatagcattttatagtttgcagtgtactttcccacacatctgatttgatcttcccacccaccctgagatggtccctgcaattattatttaccttaaaggtgaagaaattgaggcccagaatttaagcaaattcctttgagaaatacagctagtaagagatggaaccaaaatttggatctaggttttcttagtacaagtgtaagcttttaaactgataacagtttgttgatatatgatagagctaatgtgggtagtttggttctaatagtgtggttgaaagaatcagataatttcccaagccttctggaaaaaaaaaaatttcttttctctcattaaaaaatgtatgagtgtgtgtatatatataattatagtaattatatttataattctagaaaactttggaaacatagaaattattttaaaaattgataattaaagctgcatcaattctataagtaagcctgtagtagccacttaatattttgaacttttaaaactgcatatctacattaacaaaattatgagtttatattgtatcacaacattttcccatgc

SEQ ID NO: 52386 - DNA, 743 bp, Bovine  19866881226898
  misc_feature (1)..(1): n is a, c, g, or t
nagaatttctggggccctggagagctattttctagggatacctttaatttccttcgctaactcccagttcctccatcactgtctccagcttctcccacatgatgtcttgcccagatctgcatctcctacactacaccctctaggtgtttccaaataatccaacctggagtagcccaaggggcttagtctgtgagcacacacccccctctactggacaaaacactaagacacacgcacagttgggaaaggatcacagaattctccagtacaaatatcctattcactaccctcactttgcacaagagagagacatgacaaaaaccaacagaatcacagaaggaactgaaggcaaaagctctaactctgtaccattgttatcccgtgctgttcaacagttcaactcacaagaacagacgactacatgactgagctcatggaggtctctgagttgaaacattctccaaggtgcagccatcagtgaagaagtaaggtattggttgaaagagtcagaggagctggtctctagttccagttctagcatctacaatctctgtgatgctaagcaagacatgtaaaagtctctgggcttccctgccctcatgtgaaagagttagaagtgaaagagttagaagagatgatctctaaaggagtctctcacggtatgaacccataaagtctataattgtacataagcgggtgaaagagcacaaacaggattcaagaaatagaggggaaaatgcatt

SEQ ID NO: 52387 - DNA, 1415 bp, Bovine  19866881274305
  misc_feature (1)..(1): n is a, c, g, or t
ngcaactaagaagggggagggaaattgattttgaaagccaattctgagaaatgaatggagaaaaaattggaatttgaaaggtagggagaactggtatatggtacaccatgagtcatgacgagttttaaaaatgctgatgcctgggtgccagagggttccggtttcatttgaatgatatggagtgaagctttggcactgggattttacaaagccaaaatttgagaaccaccaggttagaaagtaatgtgtgttcttccccgagttgtgatgtcaagataagttttagagaaaaaacaaaatttactgagatgaaccagaaggcttccctggtggcttagtcggtaaagaatctgcctgccatgcaggagacctgggtcaggaagatcccctggagaagcgaagggctacccactccagtattcttgcctggagaattccatggacagaggagcctggcagcctacagtctacaggatcacaaagagtcagacacaactgagcagctgacactagacgaagaaggtggttgtaaggtctgattgagagaaactagtccctgccctcttagtgtgcacacatcgaagtgtcactttccatattagtcacaaacccagggggctagctggagctggtacctcaagcaatggactaatgggaaagcatttctttggagatgatgtttttaggtttcatatttctttacccagagctccgggagcactgttgtgcttgtaatagtttgaaatttaaaagtggaagccatccagggcccttttatctctaccatgggctacataatgcactgcgcagaagtagtttggcaccaggcatttctaaatgtcagactaggctctcggatgactgacaggcaaaccagagagacaggcagaacataaaatttgagctggtgatagaatctgtgccggacccactgactgacaggctgccagggaaccaggcaggagctctactgagtctttcctctggagctggagccccacatttgtcagacatcctagaaatcatatctggctgctctctgcagtgacgaacgtggacttgcttcagtctggggctcctgcctgttaagtctcctctggttagcggagtgatttattttggggaccgctggcctcagaattgagtgttttggtctgctctgcctgtccctggggacatctggctcgcatgagtgggtgtcagactccatccacctgtgttgtcattcagggacacagacgttttgaagtcatgacttttccttggattctgaagaaatgtgggtgttttctgaagtgatcttgtattcagttgttggcccacttgggtaattctgaaaagttgggtgtattctaacccaaagtggctcactgaaagagtccagcacaggctttgttgggactgccctcatttag

SEQ ID NO: 52388 - DNA, 1927 bp, Bovine  19866881296429
  misc_feature (1)..(1): n is a, c, g, or t
nttgttctcattcattttcccttctttgaaaataaccccagtgtatatataagcatgggcttcatatacataagaccctgcccctgtacagggctacttaaatcagggatagcattctgatccaagctgggccagttgcagcctcttccccaaaaatttgagtttagggttgaagggtgttagtgactaagagtgagagagtcaagtcacagagagtgctccaaggacagcccctgagcactgtcccagtggcctttggaagtctctgcttcctattcttcttgctcttgggtttcctgctctttttctgatttcatgaaattgtccatgaatttcatgaacttggatatgcttctctttttgttaacatagccaaaattagtttcagttccttgcatccaagagtaatttaagaattgtccttagaattacaaaggcagaaaaacatggtgacaaggaaactgaaactcagaataggcaaagagtaagacagaagttagatatttagcgtgtgtccatctaatgacttaaagtgaccattgcaagaattgtatttggaatcctggaacgagttttggccttttttgaggagtcgtttttaacagtgctcatggctttgtggtggaaactttgacacactgagggacagtcagatggtatactggggtttcaaggatgaaagcgtttgcatttgaggacttgaagagactagggtgttttagtcaggatgagatgtcttaggaaacaggactgtctttcaggtgtttaaaggacaaatggatggaacagaagttgaatttactcatttcagctccagaagtaagaacaagcccccatgaagagatattaatggagatggattttaacttgaaataagggaattttttttgttgttgtttttaacatttagagctatctgacattctatgatttccttggggggtagagaacaatatgccatagaagagttcaagttgaactttgatgtccattcacaaaggttcaatgaaagagagaatccagaattgggatgaaacagataacttctaaatttactttaaattctagatttcatcattttccatataaatattactaactcctcaactagaaaaatgccaacacacattttgacagaatgtaataggatttaaagcactttgcaaatacagtttttatgaaaaatttcttcctttattaaaaaaacaaaacaaaacaaaaaaccctgttggctacaaactgtctttgaaggaagacattttcaaaaaataaggcaacaaaaatgtattttctctaaatggaattgacagtgattaatggtttcactgccaggtggttcactgaattgaaaaaactctctgtgatgttaacataatcatacaaaacccagggaatactgaattccactgtctctaaatttctaaactgtaagaaactgagtagattctttgaattattttaaggaataaatcagaatccgaactcttctcccaaacctttataagtgaaaagaatgtcaccagagcacattctattaaacctaaacagatattttatccaccactccccagaacactcacagaaactagtccctttcacaactctgagaccctttgtgtattttagattattgttcttaactagagggtaagaactaggttattctagtttatcatttacatagcaagcagatgttgacactcagtaatcatgtcttaaacaagaagggacaaggaaagccacttagtttgaaatcctggccttacagactccaccagacagaatctgacatcatgaagctttgcataatctctttcataatctcgtgttctccgtgtaaaaacctttgaaaacgtaaacacatacataaccattcattagctctctactctgtttatttaagtggattacatttataaagagcatt

SEQ ID NO: 52389 - DNA, 1204 bp, Bovine  19866881345171
  misc_feature (1)..(1): n is a, c, g, or t
ncttctagcttagcactggaggccagagaagtcactgaccccatcaaagtcccttcactaatactcattctcaaaccactgtctagctccagccagttacagtcttagaaaaggtctaactatatatataaatgtgttaagtacaaatgaatgaggtccagaaaaatacaggtgagatttcaaaaattttactctactaggaataaaggataacatacttaaaaaaaaaaaaaaaaacacacagatatttggaagtgttctctcatagtacatcttgtaacatctaatcaatttctttattttccaatcagagaaccctgagtccatattcaaatacatcttcactccctttaggtatggacaatgtaaagaactctgtgtgtgtggcggcaggcggggggagaaggaagatgatcccaggatcagtctcaaaggggctaaatctaatacttcataaatttttacactgctgtcattcattctaagtactggaactgtgcctactaatgatttctattctactaatacctataagtctttctagtatgcatttggctcccaatactttgagtggataatttgctgtaaaatctggcctcatggtccaaaataaagacatttaacaagaagaaaggtagtgctgaggggcagttaactttcctgtaggttctactgccccggctctaggacagaagccactttagctctggagctcagcattcgaaggtgccctcttgtggtgtgggtaggaactgaacaccctacaatcctcgagctggcttgaggtataaatccagattaagttactgtttaacagccaacaagagaaacatagctgaactccaagaataatactcaaattcaacattctgaaagaatcactgatatccatacttgacaagttctaacaaccattaaaaaaaaataagtaaataaagtaaaagtacaacttaactttctgggctgtcttatttccaaataaaatttacaagacagaatttttgtaagctggtgcttgccacggaatagaagctccagtttgctttcagtacatttggccagtcagagatctttaaaccgaagaataggaaagcccagatcattccaggtatcactcaaagaatctggacatagctctaatgacctcaaggtcatatattgggtgtaatcgacacacggggcaagtgatttcactcactgctat

SEQ ID NO: 52390 - DNA, 821 bp, Bovine  19866881361603
  misc_feature (1)..(1): n is a, c, g, or t
ntttgcaaagtttcaggaatggacacacttagatttgaaggccctctaacagtggttcccaccctttttggcacaagggacctggtttcgtggaagacaatttttccatggactggggaggggtggggcttggaataattcaagcacatcacatttattgtgcactctatttctattattattacattagttccacctcagatcatcaggcattagatcccggaggttagggacccctgctctacaaggttgcgggaatcagtgatgttcaagaatttctttgcaaagttttcatatttgttcataaactaagagattattacatttctagagaatacttaaaaagtactttcacaatcatgatttcattttatcctcagaacaaccctgaagggttgttattccctattttgtagagaaagaattagtgtgtacaagttatacgacttgccctgaaagctatccgagagcaaaaaaataggaggtggtattaagcattagtggtacagacaagagatgatgttttgagctctggttctcaatttggtaaatgttacgtttgtcagggcacaatggtctcaggtcacaaatgaggaaggctcatgtctgagtatgcaattaagaatttgtcatagttagggtcaaaggaaaacagttccaattctccatattcttttacagttggacttatacctaaagtgtctttttattcaaagatttggattcttactgaaagaccctgaagaaaactctggataattttaccatgtaggacacattttagatttgcacaactgtagctgtatcttgttgatgattct

SEQ ID NO: 52391 - DNA, 1047 bp, Bovine  19866881475615
  misc_feature (1)..(1): n is a, c, g, or t
nagtagggtttcgcccattaagatataataaccgtcagcagggacaaaaagcagatcagtatcacaaattcaaactaacaggcacacataaaaactatgcgcctgcttcaggcacaggacgggggtcaaggtcttacacaataggtaaattccctctccactttggagacagctttttcacaagagcggggtaaggagaaagaacaggcaggaattctcacagccctctagccatttttaaccctgaatgcttttctatcccaaagcgcaccttgtcggaataaagaatggttgtgtttgctgttctgaagggtttctaattagtaaaaaacatgtacttactcaagagagctgttcttgatcaaaagtagtatctttgggcaagaaacacatggcagactgaggtaggaaaggcatactccttttattgttgttcagccgctaagtcgtgcctggctctttgcaatcccatagattgcaacacagcaggcttccttgttcttcactgtctcccggagattgctcaaattcacgtccattgagtcagtggtgctatctaactattcttagtttgttcggttagaccaagtaaatctggttgtccaaggtgtgaaagatgtcacatgggtagggttgggttgctttagcaggctttggctatcgctggttttaaaactggagcctatcatacagagtgaagtaagtcagaaagaaaaacaccaatacagtatactaacgcatatatatggaatttagaaagatggtatgtatgcgagacagcaaaagagacacagatgtgaagaacagtcttttggactctgtcggagaaggcgaggctgggatgatttgagagggtagcgctgaaacgtgtgtattatcatatgtgaagtggatcgccagtccaggttcgatgcgtgagacagggtgctcagggctggtgcactgggatgaccctgagggatgggatggggagggaggaaggaagggggttcaggatggggaacacatgcacacccaggctattcatgtcgatgtaggcaaaaacca

SEQ ID NO: 52392 - DNA, 879 bp, Bovine  19866881525483
  misc_feature (1)..(1): n is a, c, g, or t
ntgggcaggctgccagggtttgtggctgtttttagcccatttcctgctcttccctttctgtctcagacctgctgcagaatgaacagaagtggtgtaagaaccctcagcgagattcatggacctttttaatgagttttagaggttgatatatgataacattgaatataagtaatatacatactctgtgaataagagtagatgtagggtagatgtcttgaaagaactctggacattctaggcatcgaccctcgaccatctgtgcccaccttcctttctagctttatctcacactcagttccctggcacagattgtgtgcctcaaggcttcctattatttgtgaatattctgtgctgctttttcacactgcctgtccatggcacttgtatacttcttatccatccagtcttgcccatcggtgaggtggaagccgccatcctgtctccttcaaggtgttacttcctcgatcattccaccttcttgtcctcctctgaatctagaactgtttatataatatttcttcatggtgcttaatcacacccagtgtctctaatgaggatgagtgctccttatgaccagggataaactccttttagtcagcagttatggcagcagcagctacagaaacataacatttacatggtgcgttatcatttgtaaagccctctcatctctgctatctaatctggtttttcagaattgcactgtgaggttggtattattattatttttgtctcgtatacagatctttagaagctgctgtcccagcttagtgacttattgcaaaggagagcctttaaccatgaattattaaaaagagatggtttttaggaagaaatttggcatttttaatgggctatatacataaatgatcgattgtt

SEQ ID NO: 52393 - DNA, 874 bp, Bovine  19866881653414
  misc_feature (1)..(1): n is a, c, g, or t
ntggaaaaacctagccttggctgacggacctttgttggtaaagtaatgtctctgcttttgaatatgctatctaggttggtcataactttccttccaaggagtaagcatcttttaatttcatagctgcagtcaccatctgcagtgattttggagccccccaaaataaagtctgacactgtttccactgtttccccatctatttcccatgaggtgatgggaccagatgccatgatcttctgtgctcattacagctatacaaacgttaccaccctcaatgatctcaacagttacatgaaaagttatcaatatgtgcatttgagagatgaggaaactatcaggatcttatattgtgcaaacgatcaatccaaaattcacactcaggtttgtttgacctgcagctcttaaactctcttatcaaggacgatatacaacgatggtgttgacactgatgttaatgaaggtaatggtgatctgaaaacggtagtagtgctagaaaaaccatcaacagaagaactgttaataacaggagagctaagacatgcaatttttaaaaatggtcttgctaggcaacatttatactaattatagtcatttatgtgaatcgtgtacaattatgcctaattataagtcaccacaatatttatgtacaaaaataaatatgtcagaataactttgatctaaaatggatttgattataatagtcacctctctatatatgtaatcagacttcactgttgcccaggttctaacatgcacgtgtgacatcttgacagcattttatattctgcaaaagatgctgtctgaggacattctcaagcaccagacattatcaagtattgggaggaaacaggcaactaataataacaaaataggg

SEQ ID NO: 52394 - DNA, 921 bp, Bovine  19866881834900
  misc_feature (1)..(1): n is a, c, g, or t
ngagcgaaataaaatgtaatattctgataaaataggtatttatgaaattgtgaatgattctttctttgcaaaatttaatgtttttatattactttttcaggatgcagtttagtatttattattattattatatgcagctgttttacctttcagaaatatttacgaaaatgtaatgtgacagtgaattacatgagaaaatagcatcctataaatatgctgctttggcactaagaaaggtcactttggctataaaagagttacaatgaagaggaccatttataaggctatgctgatcagtttccaatttctctcatttcaaacataaattattgctgaaaacatggtttatgtttgtcataaatggattttatgtcactagatgagttggcttcattgctggaaatctatgcttttattccaagcagtgtcttatggttgggagacaggagaagagatgggcttagtttctaacgtgctttgcaaatgaaagcaatcatcaagcatagcccatttgtgttgtcaattggagatttacaaaatctggggttggtatattctttgggctgggccaagactggcttcaatacctgtatacttggaggcatcaggcactatgcctgagccacttaatactgatgttttccaaactactcaggactatagaacttcctactaatttacttttctttctctattgatcttaggatgttgaaaatagggggaaatgtgttctattggttttcacaaattcttatttacaggaatggtagatgtgcagaaaagagttaatataacaggcctgaggccttttttttaaggctctgcttacaagggctggcccttggctagcatttgggaaaatgtggcacttgactccttccctttagagataagggcagtccactgtgcctagactgttca

SEQ ID NO: 52395 - DNA, 2078 bp, Bovine  19866880255453
  misc_feature (1)..(1): n is a, c, g, or t
ntcttgatgaaagtgaaagtggagagtgaaaaagttggcttaaagctcaacattcagaaaactaagatcatggcatctggtcccatcacttcatgtcaaacagatggggaaacagtggaaacagtgtcagactttatttttctgggctccaaaatcactgcagatggtgattgcagccatgaaattaaaagacacttactcttttgaaggaaagttatgaccaaccttgacagcatattaaaaagcagagacgttactttgtcaagaaggtccatcttgtcaaggctattgtttctccagtggtcatgtatggatgtgagagttggactataaagaaagatgagcaccaaagaattgatgcttttgaactatggtgttggagaagactcttgagagtcccttggacctcaaggagattcaaccagtccaccctaaaggagatcagtccttgggtgttcattggaaggactgatgttcaagctgaaactggaaggactgatgtttggccacctgatgtgaagaactgactcattggaaaagaccctaatgcggggaaagattgaaggcaggagaagaaggggacaacagaggatgagatgcatggtatcaccatctcgatggacatgggtttgggtgaactccaggagttggtaatggacagggaggccgggcatgttgcggttcatggggtcgcaaagagtcagacccaactgagcaactgactgaattgaattttacagaacctggaacatagtaggatttagataggtttgttcctttctaatctatatttcttgttttgccttacaatgttttaaataaagatcatatggtgtagtctagcaactaatttttgcagttaaatgtatgaattagttacctaatagttgctatattttaaactaaaattattgttttacagtaagaaatgttataaggaacttattttctaggctttaaaatataattgcactttctagtttttgtgttatatatacgcttacattattattgcttcttttgaattgtgctatcatagaactattttgtttcttcttatcactatttaaatagcaattaacttatcagtattatataggacatatcagggaaaataaaatataggagttacagagatattttcattatttttaaatctaatactaacttggtcttgaaattgaacacaattataaagaattatatcacagtgtaagtctaggcagggaaattcaaggaaactgataatcagagattcaattttttgctcatgatccataacagttttaagatattaatcatagtggatgctgtccaaatgcatgattttccaccaaggtttattttttccacatcacaacttaatatttacattgttgagtgctacctgtatttttttaactctacctaccatcttctctttctttcttgaaccacttacaatgttttgccctgttttattctagattgatttcctccagtctggtcactcagcaaagaaaaagtaattttctgcaaaactctacagaaactggctagagtttagtgaataaggcattcaatcctggacagcccaaactgaaactgatgtcaccagatcatgtcagaataatctgatcatattttctaaccaaggattcttatgtggggaatcttactgccaatgttttatcttatacagctacaagctccaaacttggaaaccagcccactgatcaccccagggaaagagctggtactgctcccagctattcaagctgagttagcaagattgggttgcagccaagtttctgccaaaatgtattctgttgtgtcctgcccttgttcacaccagaagaagagctagtggttatttaaatcagcataagattcccaaagccaagcttcctcattagtacttttatgttcattcttgctggatatctgacagttaccttagaatgaatgtgcatgataggatctgtgtatttgctccttctcctggatctgggagttttatcccagtgaaaccaggggacaaacaaatgtactctttgaccacttaactcccccccctcctcaatttttaatgaaaatac

SEQ ID NO: 52396 - DNA, 2067 bp, Bovine  19866880361797
  misc_feature (1)..(1): n is a, c, g, or t
ncttatagtttcctttgttgtgcagaagcttttaagtttaattaggtcccatttgtttatttttgcttttatttccaatattctgggaggtgggtcatagaggatcctgctgtggtttatgtcagagagtgttttgcctattttctcctctaggagtcttatagtttctggtcttatgtttagatctttaatccattttgagtttatttttgtgtatggtgttagaaagtgttctagtttcattcttttacaagtggttgaccagttttccaagcaccacttgttaaagagattgtcttttctccgttgtatattcttttctcctttgtaaaagataaggcatctggagaagactcttgagagtcccttggactgcaaggagatcaacgagtcactcctaaaggaaatcagtcctgaatattcattggaaggactgatgctgaaactgaagctccaatgctttggccacctgatgtgaagagctgattcaatagaaaagaccctgatgctgggaaagattgaaagaaggaggagaaggggatggcagagaatgagatgagtggatggtgtcattatctccatggacatgagtttaagcaagctcagggagttggtgatggatagggaagcctgtcatgctgcaatccctggagttacaaatagtctaacatgactgagcaactgaactgaactgaactgaactgaagtaatttaaggtaaagccctaggtgatctagatcttttgttcatttccagtttatccattttaaactaaactccagctacagtgagcctcctatgtcttgattcctctgccttaaaagatctcttacattcccctccacctgtcttaatcaactccatgtttgccagtctggtttgtttctttacctttatgttttccttttctaggtaaatgatattcagttatttgttcaatactctatagaagtattggctataatatcttctttttttgtgtattgaatacagaaaggaactgactaatgtgagctgtgaaagaatttccctattttcaaccaagatctctttaaagatgtttgaattaaaaactatttttaataggtaacatatgcacaatgttcaaagagtagagaaagcatattgctccacccagcctatacttcccttcccagagataaccagagttagagtttccccaaatgtcctttcagagacattttatgcttgctcaagaaaatacacgtaaatagaaacacacacatttctaatgtttctatgggtaattatattttcaactagtaaatgatataaagttataaagctttcatctgacctattcatgctgtggatttcataagaataattttttttggtttcactgtttcaatcagtaattgagtaattaaccatttattaataaagaatttataaagtcctgattgaaaattttaagtgggtcatgccctacaaaattatgctccatttcactgtctcaagtttttaaaaatttaagcagacaacctctctaaagtttacatacttccttttgttttcacttttttcttgttatatttataaatttcctgcttcaccaagaatctttctactcattctcaatgctcaaagaagttaaaaattaaagcatgatttactcaaagaataggagggaggagggttcagtatggggaacacatgtatacctgtggcggattcatgttgatatatggcaaaaccaatacaatattgtaaagttaaaaaaaaaaagaatatagaattagatatgtttaataaaaatataaactaaaccaaccaaaatattaacttattaaagcaacatacttattttctctaagatatttaaaattatataatgtgttttgcctctattttaatgtaactcaaaattctaaattatatttatataaaggtcattttatttagctttttgaaaaaagttgaatttatacatatgtatttgtatagtaaaaacacaatttgcaattatagctttagagtatataaagaatattctggttcaccaatggaagaacagagatcatgcttcagatgaatgatgtctaa

SEQ ID NO: 52397 - DNA, 1451 bp, Bovine  19866880612421
  misc_feature (1)..(1): n is a, c, g, or t
natttttatttgttctgagtggaagggtaaaacctatgtctgtcattccatcttaatggaaattaaaaatcttcattcattctatactactcttagaagaagaaatttctcctttgccggtgaagaattcaaagccttatcaatatcaaataactttctgagtttcacacagaacatggaagtatgagttagcattcacgctcaactttttaggaaagtagggttcagggtcctgttgttatgcaatgaatggcttatgccattttctctagctttcagggaaatcattcttccattgttatgcttcatatttgttcatgtctcctcgacccttccccctattggagtacttagatataaacagtatgttttatcctataaacttgctttctttatgggaatctaaaatcttgattatggtgatttttttctgtatatcatagacttggttttccattttaaaaatagtttctacttattcttgcattttattctaactttacttttataaattatcagttatctctaatgcacattcattgatttctctcaatattttctgtctacataattgatatatgtgcatttcttttggaagaaataatacataagccgagccacaaagggaagcccaagaactggagtgggtagcctatcccttctccagcggatcttcctgacccaggaattgaattgtggtctcctgtattgcaggtggattctttaccaactgagctatgagggaagcccctgatatatgtacattgttattgaaagaaacaatacataaacttataaagaaaagaatcacatgaggttcagtcaagagttgccttttttgttatctcttgatgaataaatatactttatgctgttttaaaacttggaaaactacttttgactttactttgttatgctttttcattttcctgaaaattaggaaccagtattttgaaggcactaccaaattgccagaattggtaccgaatgattctggaatctactatcgtgtgcatcaatgatgtggaatgttgcatggccagtgattgttcctgtaacatatttagtcaagaaactaaaaaatatgatagattgcacagaattttttgcttgaattttaaagttcaactcagaaaatagatggcaatcttattttaaagaatgttttctcccatttctttcttattttagctgagacagtaaagaattcaaattacataatatctctgtcttctagaccagctgtgttttgtgtttgttaaatgtttcaagtgattttcaaacagctgggctttctcagccgtatcttatcccagttatatttctccatgatctcaaagctatttgaaatgatttttcccctgattcaatacacatgtttatagtaaaaaaaaaattggaaaatggagaatgaaatggtgaagaaaatgagtcagctataatcacactaa

SEQ ID NO: 52398 - DNA, 3262 bp, Bovine  19866880739856
  misc_feature (1)..(1): n is a, c, g, or t
nctcttgaccttttattaagagattggaactgccaagagtgtgtgtgtgtgtgattggtaagttgaagtgttgctttcagaaaagaatacagtgtaatctatacattagatataagaatagcatttcacagaagtgaatttttgtaggatagttgtgattcataacacaacactatacaaatggcaacatttaggtctcaaacaatttcttgccagaatctgccaaaatgtttttctattaatcattaactatgatgttataaaagattctaatttgttatctttcagttattgatgctattaagaaaagaaaatacaaactgagcttgtgccaagatgcaaagttaattcaactaaactcataggcaaagatgcaataaatgcaagtcaaaacataacctttttcataggcagttgggcatttacatttctgagtaggtttttagaattataattatccaatttagaagtcaaaaagataatttccttatgaaaataaagcctcaccaagcctgatcaaaatgcacttggggaccttatactaatttatgatgccggaattggagacaatcttagagtaatgatttcaggagatgaatcacagagcaatttgtacttttccccatcatgaggcaataattttaaaataatcatctcctatattcatatatatactcgtttcacgtttcctcttatttccactgataagtgttacgtaggcacaaattggaggaatcatgaattttgtgttaagctgataggagatggtggaaaactgacatgtaactggtttccagttcctctagagaatggattgagagtattgtgagtattgaagattatgcagtgttcatgaaaagagttctcaaatattatggagttactaattataaaaagaaaagaaattggataagagtaaggcaaagagtggtaaagaatgaggaaataagaatgaatggtaaatttactgctcatcaaatattccatttgttccattcattttgcagttttcttgcagctggcaactgccatatgacaacttctaatcaatggattctgagcaaaagtaactggcatcatttctggatttctggactaaggtcataaaaatgtatatacaggataccttttcttgttctgataaacctggaaacatttaagtttgttctgttacacaaagttcccattagccttgtgagtgagtgtattagtcattcagttgtgttcgactctttgcaaccccatggactatagcccaccaggctcctctgtgcatggaattctccaggcaagaaaagtggagtggactgccattctcttcttcagaggaacttcccaacccagggatcgaaccctggtctcctgcctcgcaggcagattctttactgtttgaactacaaggaagtctagtacaggcacacagtagtactctacaaatgctgctaagtcgcttcagtcgtgtccgactctgtgcgaccccatagacggcagcccaccaggctcctctgtccctgggattctccaggcaagaacactggagtgggttgccattgccttctccaatgcaggaaagtgaaaagtgaaagtgaagtcgctcagtcgtgtccgactcttagcgaccccatggactgcagcccatcaggctcctccgcccatgggattttccaggcaagagtactggagtggggtgccatcgccctctctgctacaaatgctagttaaatcctaatcacctaaaaggttaataaactatgcacgtgcacatgcctatgttgtttataaggagagtgacttagttttctgtgagccctctcctatcccaaccccactttcccccatcctcatacacacactccaagaactggaggggctgtgagaagacaaaaagataggctggaagccatgtgtccagaatctccaaaggagaagaaaacacacaaccaacaattcctctctgggaggaatcagaaggaaagtcagtgagaggacacctgataaacgccactgcctgcctagaatgattcttcagagactcactaaatccagatcaggagaatcagtgcagaacaggaggaaatctcaaagcaaggactgggagaggtacactatattaatgtcagattgacgcagctccagagtctggctgtaggtagcaaaggactcaagaggcctcatcacaaatacgtatagcgtgcggctccgtcacactcaagagcatgagcaggaggaaggcagaagcagttgtggagctggaaggcaggtcatttccaactgatagtgacatcaacgaacctgataagtggggactgaccctagtgaacccaagtaagtggaaggaggctcaagatacagactctctagtcactctgcaaagcccgagtttccactgctactctttcagtgcctcttcttgaacctctgaaatgttaagactcaaggttaccttcatctgcccaacatacatagtccagcttgctctcgcccagcagtcaaccactaacgttgtgcaggaagatggatggagaactcttaagttctcaaggagtatttaaaaaaaaaggcgaattcagtttatttttcgcttaactctgtcaagcaagaagttcatcccccaattaaatttctctgatgcagtctgagactggaatcagcaagaaggtggcgactctttcactatgctctttcccaaatgaggcagtgacctctgagcagcagaaccggcatggccgcctctgcccatgtggatctgtctctactcgcagctgtgggtcgcacaggaataataagagggaagtgttcatcagtacctgctgcaactctgtagcgccctgcaccaagggttctcagattcctcaaattcatctggggccactactaccctttaggtctgcttagacactcacaaaacagactcagatcactttatataaccaactctttttttttcaatctctctatgcttggcacatgattctcttttcctctactccagagattttcaagacaccaaaagctcctaaaagaccacttatcaaaacttccaagggaaaagaagttcagacatcctcccacatacagcatttcagatttcactaggaaatacagacgatctggaaatggtcacaactgggattactactggcaccaggaaggaaggcgaggaggccattatttcttttatcccagggttgagctagaaatcccatattacagtatttaggggacttgcccactgaacagaacaggtcccccatttgacaac

SEQ ID NO: 52399 - DNA, 835 bp, Bovine  19866880754409
  misc_feature (1)..(1): n is a, c, g, or t
ntaaaagtgatagaatattttaaatttctgagaagccagtgtatgcattcagcatacaccacgctaccttttttagttcatagacaaaagcaatgtatttcacagtattcaattctgaatacttgttcttctcctagcattcatgacactaatagtattataaatagtgaggaatcaatttttattctattgcaaattcccaaatgctccttgttggtaagaagttacataaattcagcaatattcatggcatagtttacaaatatgataaatattatagaaatagctattatccttagctcaataacttttgaaaaataattggtttgagtaatgaaacctgtaatttctcacaaaaggaaaataccctgaagttatttcacaccatcttcacatatggtctgccaaaagttatataaagtcaaacctcccagcctaaagctgtagcaaggtaattagatttctattttacaaatgaatatgttgatttcattggaagatgtttaatcatatattttgcttataatgctaaaatgtcacatttagagggtgataagttgaattacaattaattgaaccatttaggggaataattggggcaaaggcagtataaagttcccattgagatgtaaatgaagcccacttaggttttaggaccattgatttatttgctgtttagaaccaacccctttattcaaagacttgcagagtgaaaaatctggtgacagttcaaagcagcatgtgaggatggctaggcaatttgatagtctaacattcctagattcctgaactggaaacagaaagcatgttctttgtgttgggactgatgctagag

SEQ ID NO: 52400 - DNA, 1565 bp, Bovine  19866880816916
  misc_feature (1)..(1): n is a, c, g, or t
ntaccccattcccttctcttaagacttggttagtctgggatcaagagaaattcaaacacagggtagaaatggcatattgtgtttctgtgccctctactcaaaacttattctgtaacatcgaggagctaaggaatcacaagaaataaaggatagtttagacattgcctagcaacacctcataaaatgaaagatagaagactcatcagaaatgagaacaggtgaaatcatataaaaatattttagacatactgtctaagtcatctaggaggaaaaaagagctaaacagaaatgggctcattttctgtgcaccagaggagcaatagaggaggagagagaaacagacatactcttctagtcatcactgcaaactcacatcttggaagtaaaattttaatcagaaatcataaaaaatgaattccaaatgtaaagtagtaagatataaatctaatataaaaacaaataattgtgccaaaatagtaatagttcttgcttcaatgtggggtccatagaccatttctagttcttatcattttatgaaataatagctaaatctgtccttcattttaaaatttaaaggtttttatattaaatatatgtttctttgtaatcactgagcatactgactttttttgcaaatggctctcaatagtattaatagtaagattcaagatttcctctaaggcagttgtgatagaatgcaaaaataaattgtggagaattgaaataggagggaaggggatagggcacaaactttaaaagacgacaacataaattgctgtcataaaaagatgacaacataaactgataagaacaaaataggtccaagatagggaactagtccatttccactagaccttaaatctcagtatacacacattgtaacacatcagtgagctaaatgacgcagccacaggcaccatggcagttctgaggccaaccatcaaagaccaaaaagtgggaggcggtccagctcctggaaatccccacctgttcctcaaaatagttggaatatttatctgacttagcctatgaaattacccagcctatgaaaagtaaccatgccttctgagggacactcttgcattctaggatggcccacaccatctgtgaagtgtgtttctttctaaataaattcacttcttacctgtcacttcagttctcactgaattccttctgtgaaatgaatcaggaaattactaccaggcagtttttaggaaagggaagaaacagagccactttgtgtggagataatattagggtaatacaatctgtcttaatataatctagcttttggttgaaaccactatgcatgtcaggagtgagaagataaaatggggaaacaaatcagatcagcagtgtgaagtggctagcttctgagtaggttagggtacatatgctaagatgtcatcccatatagtgctagtggtaaagaatttgcctgccaatgcaggggacgaaagagatacgggtttgttccctggatcaggaagatccgaagatcccctgcagtaataaatggcaatccattccagtattcttacctggaaaattccaggacagaagag

SEQ ID NO: 52401 - DNA, 961 bp, Bovine  19866880967330
  misc_feature (1)..(1): n is a, c, g, or t
ntgttaggtcactgaaagagagcttgaattactcttcatagcagtcaaatgtaggaaactgatacattttctactgaccatctggtgaactctgcatcagatcagcaatatgagttcactctttaaatttaattattattcaaacattgataaagaaaactaaatgaatagctttaaactgttatttcataaaggaaggtcaggctcagcaacaaaaggaaagtgaacagcttcttatgaatgttaaacagaggacaagaaaagttgttctgtaataatagaatcttccctcattcccaactgatgttcatgtgattgactaagaattatgacatgcacctcgatccttcatttctcattttaatttacagtgtcacatattttaaatatgtaataaaggtgactttgttaataaaattatgcaaaatgaaacaaagaggatacttagaggaatataggcaagaaatagcaactgttcttaaatgcactttatagtaattcttattttgtatttttgcaaatgcaaactacacacactacaggaattctattgttttatttatattttttcacatttatctttcttgttgctattttgtggtagtacaatcctctttttgttctagtttttttgtttgtttgtttctgcctcttcactgctcacattaaacaccaagtactgtggtctgaattaataactcaatatgaatccttctatatttttctttgtatagtcttcatgtgtatatgtgtgtgtgagtgcaaacccataacatgaatgcacatgtatgagtttgtcattcattcataaaagtatattttttatcttgcttttatcattcaaatatgtcccatagaaatgcttgcaagtcatttggtgtatttctacttatccttaaatattccattatacagatgtagcacaaggtcataaccatccgactacagaggagaattcaat

SEQ ID NO: 52402 - DNA, 1821 bp, Bovine  19866881014089
  misc_feature (1)..(1): n is a, c, g, or t
naaaagaggtgagaaatgaagtatttccttcctatcagtaaacaaggatgtcacagtcggtgacattggagggctagcgattgtagccctccagtgtgagctggtggttccaaagggcactcattcatgctatgtcacttcagttgtgtccaactctttgtgaccccatggactgtagcccgctaggttcccctgaccatgagattcttcaggaaagaatactagagtgggttgcttctacaggggaattcaggacactcaggagggagaaaaatacttgcaacctagcacaattagactgtagcccctccttactgtggagaaggacatggcaacccactctggtattcttgcctggagaattctatggacagagaagcctggtgggctacagtccatggggttgcaaagagtcagacatgactgaatgactacacacgtacacacgtacacacactcctcattgtgagcccaggatgtgaaaaacacaggatattggccctagatagctgacgttcttatgaaaggaatgatttcagtaaacccaaagtcttgaatcatcccatatatagaaaagtgttaaattctttaacttgggacatctacttttctttaattaaatatttttatatttagactacctgtccttcattgcaaaacttccatatagcctggctcctctcctcacctcctcagagcagttttctcacgattacttgagatgctgacttctgagcttgaagtcctccctcctccaggggatcttctcaacccaaggcttgaactcaggtctcccacattgcaggcagattctttactgtttgagcaccaggaaagcccataaaacataactctcaacttttaggttgtgaatatttttttaagtcaacagaggtatatttacgaacatggaaacatttttgttagataatattaagtgtaaaaggaaattataaaactatgtatgccaagttcatatatttttttaatacctaaaaatgtgtatgtgtaaatgcatgtatgtaaatgtgtttgtgtatgtgtgtgtttacttacacacacatttgtgagctttataggaaggataaatatcatctaaacaatggttctggctattagaaaggattattagtgacttccattttgccattatctatttttaaaatttttaaataaccctgtgtacaagacagcaaaagaaacactgatgtatagatcagtcttatggactctgtgggagatggagagggtggggagatttgggagaatagcattgaaacatgtataatatcatgtatgaaacgagtcgccagtccaggttcgatgcacgatactgaatgctttgggctggtgcactgggacgacccagagggagggtatggggagggaggagggacgagggttcaggatggggaacacagggtatacctgtggtggattcatttcgatatttggcaaaactaatataatattgtaaagtttaaaaataaaataaaattaaaaaaaaaaaaaagaaagggaaaaaaaatttttttccaaaagaaagtacatacattaatacacacaaaatattttttttttttttaaagaaagtgagcaaagcctttgagacattctttatcattggttgtacagttgaattttagaaaaggagaacagacccttcttgtgcttcagtagtgtggagcctgccagcctcaagtaacatgtaggcttcattctagtgcaggacagtctgcaaattatgtcaaggttctatgagtttgacagccgttgtcggaaggggacaactgctcattttcaactgggtctcacaagcat

SEQ ID NO: 52403 - DNA, 1305 bp, Bovine  19866881075617
  misc_feature (1)..(1): n is a, c, g, or t
nctgatgtacagcaaaatgtaaatactttcaaaacagcatcatcatcatacaatttttataaacaacatagatcatcactttcctaaatgcgatactctgcaagtaacaatccatctattcatttatttaataaaatgtcatatttcttctacaaaatgtcttctccaccttgatttatatatatatatatatatatatatatatatatatatatatatgaggagggcatggcaacccactccagtattcttgcctggataatcccgtggacagaggagcactggcgggctacagtcagtggggtcacaaagagttggacgtgactgaagtcacttggcatacatacttatataatatatatatatatataagattgaaagtggaaaaggaaagattcaaggtgggaggagaaggagatgagaggatgagatggttggatggcatcaccaactccatggacatgagtttgagtaagctccaggagcttagtgatggacagggaagcctggcttgctgcagttcatggagtcgcagagtcagacaagactgagcgactgaactgactgaactatatagtcttagttcatagattcaaaaactgcattgatttgatcgtataatacttcttttgtgggaggtcgtcctgtacattgtaatctgtttagcaacatctctagtctcttccccctagaaatcagttacagatcccatgccccagttgtaacaatatctccagacattgccaaatagttcctggcaggcaaaaatatctgcctggttgagaattactgcactactttgatctgcagatatgacagtggtattagttgctcatcctcaaccacaaagtataacttatggggggaaaataagaggataaaaagatgagatggttggagtccatcactgattcaatggagatgaacttgggcgaactccgggagatgatgagggacaaggaggcctggtgtactgcagcccgtactgcagtgcatggggtagcaaagagtcagacaatttagcaactgagcaacaacagcaacaacaacatagattatttttacaactaacttagtaccatcaacaatcttcaatagttagctctttgtggggccaaattttggtctagttccaatgtaaactcacacctctttgggcttcattaaggtttaacatcaatcacattaccttctttcatgttattggtaagccagagtttgaactcatagctacaacaagataacaatttaaatatgtaaaactgatgccctagtttttgaactttccgaacaaatgcaattttt

SEQ ID NO: 52404 - DNA, 1125 bp, Bovine  19866881093854
  misc_feature (1)..(1): n is a, c, g, or t
naatgaagttttagttacttagttccaaggttatttggtctactttgtggtgatataggatgcttgcaatagaagaaatttttattgttacatggtgtgatatttttcagattgacagttgcagtcttttagtgggtcatgaaatcattttaggacccggtaactcagtgggtttatcttacagctaaggaaccaatcacatttagataaaccccagtattatagtattgctggcagattcgtccaactttgtgcaggaagaagacattgtctttgttattctggtcaggaacaaacctgccatctctccaggaagggcaatctgtctctatcctccaaggctttctgttatacaaacatccttggaaatctaatctggaataagagctgtcccaaatcatgtagaagtaccatggagaattgattttcaaaaggttgcctttatctttactcttattaataaagaaatctactgaacgatttctttaaaaaaattaatacccagtatatatatatttccaataaaatagaaaatatcagaatgcactgtaaataataactacagtttttgaaatttttatttcagttctacatatatgtccactgagtcatgatttaaaatgtgtttattcacatgggtcattgtcaaaaacgtttggaaaacaattatctatttcttataaacaagggaattgtgttagttatctattgccgtgaaacaaattatactaaaatttagtgccttaaaacagaagcaggtcacatttcctttggttcaggaatctgggagtggcttaggtaggtgattctggctctgggtctctcatgaggttggagtcaagctgttatctgggccgccagcgtctggggctcaatcaaggatctggtcccacaggttcactcagaccatcagtcctcagttccttgccatgtaggcctcttcactttcatgacagtggcagctagctttccccaaactgtgtgatccaagagagagaggaggcttgagatgggagccagtgtcttctataacctggtctcagatgtgacacaccatcgcttctgctgtattttacttgtcatacagaccagctctggtaccatgtgggaggggacttcctatca

SEQ ID NO: 52405 - DNA, 1953 bp, Bovine  19866881228260
  misc_feature (1)..(1): n is a, c, g, or t
natcaccaactcctggagtccacccaaacccatgtccattgagtcagtgatgccatccaaccatctcatcctctgtcattcccttcttctcctgccctcaatctttactagcatcagggtcttttccaatgagtcagctcttcacatcagggtggccaaattattggactttctgtcattagagtggtatcatctgcatatctgaggttattgatatttttcctggcaattttgattccagctcatgatcagtccagtctggcattttgcactgatatactctgcatataagttaaatacgaaaggtaacaatatacagccttgacatactgctttcctaattttgaacagtctgatgtttcgtgtctggttctaagtgctgttttttgacctgtatacatgtttctcaggagataggtagagttatgaataaattataataattatacataccacttagtacagtgtctagcacaaaggaattgtgtaacctaggaggactctgtggggctcctggtcacagaagccttttttatccccgtttctgtaggcaagactccagtcttcataaccttccctgagttccaaaggacagattttaacagttgctaatcaaggaaaagaagtaagaaaccacctgaggcaagattacaagaaccagagaagttcaccaagattaggagaccaaccacctgaaacctggaacacaccctaatcttgtcagcacactctcacccttgaactattgctgtaaaattcctcaccatatcctcctcccaggttgggagcgatggatttttgaagcaggagcccactttgtcctgctttgcctggcaaaacaataatgctatccttttctacttcacccaaaactctgtctccaagatttgatttggcaatggtttatacaaagactgaactttgggcatcaaatgctcagtaattggtggctactgtggtgtatgtaaatcaaatacaatacacatgtgtatcatttattaactactccaccttatataaggatttgagagctatatttaatgtacacattcatatgttcatttcatgtttatcagttatcttatctgactgattcagatatcaattggcattctgtgatatcctgttttctacatcttcatctttaaaactagcaataatattaaattaaaagaaacatgtaaaccgtggtaaatatccagtttaagtaaactgaaaaacatgttaaacaactctaaatagatagactttttcttatctttttcttcttttaaacaggatacatgcctatacatgtaaggctttgtcttttttaaagttaattgaattttttggtttgtgtaaagttaacagagaagatataaacctttataaaaaaatcatactacacattttcaatattctctgaaatagacacttttttgcaagagtacttttctatttaaatttgcatatccaaacaggtttttaagaaaatggatgattcttaagctctgaaattgtataaccattgaatgttgataatttctgattttaaatttatgcaataaagaaattaaatttgaaaaatatgtcatagctagagaaataaactattgctaaaattaagtagatattactagataaaatattaccacaaaatatttcataaataagaatgatatttcatgaggttttaccctgaaatagtgtatgtctcagaaagcttttctatgtcattatgtcacatagattatattaagtagtaattactgctaacaaagtgtaatattgcaaaaattaccacagacattcttttatgaacataactttataaaaaataagaaagctattgctaaagctatcaaaacaatcccctctgaaatttgaactataattgccatttttattctgtcccgtgagacacagaggaattcaggaggcagcgacaatccacacatgtaatagtttctc

SEQ ID NO: 52406 - DNA, 1206 bp, Bovine  19866881505681
  misc_feature (1)..(1): n is a, c, g, or t
nactgtcagaggataagatgtgttgatgaaaaaaaaatttttttcctccagtgacacaaataccatgcatcagtgaagtgaatgaagtgtttggctctatcacagatgccaaagacattctttgaatgtgcagattttgttttctgaacaagataaatattgtcctctacaaaaaatatatatatcaattttctggcactgtcaagtcatttatcaatggacttgtgtctaagaaagtgagtttatgaacgagagatgattcaatctggtgctgaaaatgaaacatcagaagcatgaaattatattattgacccagaaaattagtgaagtatttgaaaatcttatgtatctcaattttctgattcctttaaaaactatccattttaatattccatttcatatttttgaattaatattgagggatagctctgcttttaagtagttttgataactttctttctgaaacatttcttcactctttaataaagcacacccttagaaattctcaccactattcatctcagttcctgttcaaatcctaaacttaatttaactataatgccatttctgttaacttgctctctgtgtgataatacagccatgtagatgatgcattttgctgatggttgaatatttatatttcctcacacatattccagctctcttgcaactctcttgcaacgcaggaccaacaggttatgaaataccttgaatctctgagccaaatttagaggtatgcccaaccagtaactaaagttccatgagtaaagagtaggcatttatttgttaagtcattgagatttgggggattatacataaatggagatcacccttacttatgtgagtcctagaccctagataacctagataacttatagaagatattctgtaagtagaatatctttatacttcagttccagtcttgatctgaagagtaggaaagaagcatggaaaagaggagtaacttacccagagcagtgatatttaagattctaagagctctcagtcaagcttaattcagaaattctgctagaaaagcagatttacaccattggttgcctctttatacacactagtatatataaaacatttgaccaataggatctactgcatagcacagggaaccatactcaatattttgcaataccctatatgggaaaagaatctgaacagattctgctttactttctagtacaactaaaacta

SEQ ID NO: 52407 - DNA, 720 bp, Bovine  19866881527714
  misc_feature (1)..(1): n is a, c, g, or t
ntatgaatacgtctctgccacttttagtagtataaccagcaatgattttaagagctcagcaatagcatatggctatgcaatgaaaatttaaaacatgcaccaacttttagaactatgttgaatattaaatacctgaaattgctagtggctaaagcacttcatttagcacaatgtatataaactttgaaactattttcaggcaccggttttaataaatgaagtgcaaagttgaggaagtttactaaaaaatattttgttttaaaatcatttattttggaactacccatattgaatctttgtaagacatatgaagttagagaaaagagtaattctcactcagaatttaaattaagttcaagcatgcttttaaacatattcttaagaataaagaacaaaaatattgtttataattcaatttctgtagtgtatatacaggatttgaatttatattattaaaaaaataagaaatttaacaagaggtaaacaaaatagcctaattcatatgtaagccaatgaagaaaactagacaattgatgttgtatcagtgctgaattaactagttctgagtataaagcaataattaaaatctcaaataactgtattttatgctcatcatttcaaccctcagtttatatgctccaatgttctcagaattgatgtacattagaaatgtcccttcttttcatacatatgcatgatgatgctcctaatgtgaagaat

SEQ ID NO: 52408 - DNA, 1134 bp, Bovine  19866881947824
  misc_feature (1)..(1): n is a, c, g, or t
ngttgcatacataaaggatggctccttgattcttaagtcctagtcttgaatgaagttacttctctgagtattttgtacagcccctaagatctgagaaatagtaactcatgtaaattaatacgaaaaataaattgaaccattttctctttctttaaaggccaaggcaaatgcaatttttaaccatgaataatgatacagaattctgctatttctattacatcttaaattaaaaactcacataccttatttaaaagctgaattttcattttatgatgatacatatttttatattggttttctaggtggagtattcctttgagcaaaaagagtatttttagggttaataggatctgttctcattaaaactaaaactcatgaacgattttagatatcacctaagggaaaacacagcaaatgcgaactgccaactcatatatatgcattctaaaatctcaatcaagcacagtgaagtctttttaggaaaaataattattctcctgattaaagagtgcattttttctgtccctagtgacaaaggaaacatttaattattaaaagcttatggttcacagttgacatcttgtttaatacacctctccaaatatattataatactctagttaagaaaaaactcttagaactttcagatggtttcacagaaggttaaaataaatgactattatttcaatattaaactttctagttaccaaaatctaatcagcatcaattggcatgaaaagccaaggagttgtaggatagtaaaaagtgttctgaactggctttatgaagccattcatagcacttttccattcctaacacttccatgaaagctgtgatgttagcagagacatatagcttttttatctttttagtttccaggtaaaacaactatagacttcgcctaaacatgctttatggtccattatagaggcaaactatttatttcttttcttaaacagctttctgtgcacttggtccctctataataagaaaaaaaaattacaaattgcaattgaacaattaatggccaatctaaacaataagaaaataattctaaatgaaagcacatttcataaattctggatttgacaatgcaatgctgattagcaaagaaaaacagctgatcataattca

SEQ ID NO: 52409 - DNA, 1524 bp, Bovine  19866880115550
  misc_feature (1)..(1): n is a, c, g, or t
ntattgctgaagcctggcttggagaattttgagcattactttactagcatgtgagatgagtgcaattgtgcggtagtttgagcattctttggcgttgcctttctttgggattggaatgaaaactgaccttttccagtcctgtgaccactgctgagttttccaaatttgctggcatactgagtgcagcactttcacagcatcatctttcaggatttgaaatagctcaactggaactccatcacctccactagctctgtttgtaatgatgctttctaaggcacacttgacttcacattccaggatgtctggctctaggtgagtgatcacatcatcagttactaatatcaaccaggtagttattaggaggagaaattctttttccatttgagctcttattcacctagacatccccaggtgaatgaacccggaatctttgtgtccttttccccctccctcttctctgataaatgtgcgctccttttcatctagtcttaattaaaattctgttgagtattttaagttttggtaacaatcaaagacaaatgagacaagggacttacccataaaggggttctgtgaattgggaccaatttaggaacttcactagctgatacaattttcttaatttctgatcaggcacccatctgacggggatgtgaaagtagcaatacgcagtactcccaagatcctacgaggatggtcagagctgcaacttcaggtccctgacagccaatgaggtttcaagagccttgcctgagagtgcaggctgggcttccatagagcctccactgcattgttataactggtatcataattagctgaggtgaggtcttgtttcctgttttttgaagccacgtttgctgtaacctcggataaataccctcctaagcagtcattagaccaggaagcattttttagggcctatatcctgttctggcagggagatgggatcagatgagctaatgggtctttccatgactaaatgctgtgacagctgccatgttagcagtggcaggagccacaaaacagtgagctgtccagtgtgagaaaggttgagttttaatttccatcagcataggaaaataaggaatcaaggccaccatgtttattgttagtgtggaaattaaaattagaatggaaggtgttggaacccacctgttctaggatgtgtcgttgactcacaaccagaagggataagtaacaacaaacaatagcagtaataacaacaacaataataatataaaaataaaccccttgggattatattttagatctgcaaggaaaacatgtggtccatacctcccccgttttggtgacggggcttcagagaagtagaagatctgaatggtgctgaggccattcattcatggagtatttgtaaaaaaaaagaaaaaagaaaaaaggatccagtcatagtgacgggagttgatatgaggtctagtcccctaactctgtgtggggaagatggggttcaagtctttcccttctagcgaacatcctccccgaaccgtagctttcagccaa

SEQ ID NO: 52410 - DNA, 1064 bp, Bovine  19866880390039
  misc_feature (1)..(1): n is a, c, g, or t
nattagttgtggccttcacatgacaattcgttcttgtcctctcgctggtagtgtggcttctgaggtaaattacatgaagaaaaccagttctcatttggtaatctccggtgggttacagagctggggaactgatcctgtcactgaccaccatatacatagccccgctggtgagctcaagaccagtaaaattattaaaagtatattaatactgggacaaataaagcaggaaaaacagaccctaatcagctatggacatttcacttaaacaaaatagaaagaagaaaaaaaaaaaaacccaaacaagggaccatctggagagagtcaagagtcatgaaaatcagcaaatacggaaacagttggagaagctgagtatgttttgctggagaagagatgttttaagaaagccaagacagctaacttcaaatatccgggaaagaacttacaaatggacaagtaaccatagtcgttaaagtgccagagggcagaatgaagtcagaacatagatttacagtgtaagagggctttgaattcaattccgtgaagacaagatattctcacaagagcccaactaccaatagtggagatacgggaaaattcctgtcccagcagcaaatgcctgatggttatttgtcaggcttcctgcactaggagggagattggattcaacctctaaggacttttccaaaagtaagatgctatctgtctaattaattgccagtcatagtcttaggtactgccctgggttctcatctccctgtcagcgaaatttggattcagttgtccctaactcttagataatcgaggagattcgtatctttaaatcagtcgtcagcaagaatactgatggaagagcgataaattcccaggccttcagtctgattaactagagcctcagaggcttggttgaggaaaatcgaggggaagcatgaggccagttggagctgagtgttgttgatacccaccaggcaggtacccatctctatctgcctcctctaaggaaaaagtaattcccgtttttggtggtttgagtttggttggggatgtttcagcgttcagtggggagt

SEQ ID NO: 52411 - DNA, 851 bp, Bovine  19866880439220
  misc_feature (1)..(1): n is a, c, g, or t
ntttgtcccctgacagacagagaggaagggggagagggagagggagagacagagaagtaggggagaatgggcaagttcctgcccaggctgttagagaaacatatacactggacttattttgaatttgaatgaataatctttgtgtcctcagcaggaatgttgttctgggaagtttgcattcctgtttacatgcctgccctggctctcacagcctgggagcaggcaaatgttaagtggctggcttaacgtttacactggaaagcactttatcaagaaagtgtatacactcggccacccaaaaatgcaacttatatatttccctggatttttcatctctggtaccctttagaaaaagtggaaacagtggcagattttattttcttgggccccaaaatcactgcagatgatgactgcagccatgaaattaaaagatgttcgctccttggaagaaaagctatgacaaacctagactgcatattaaaaagcagagacatcactctcccaaaaaggtctgtagagtcaaagctatggtttttccagtagtcatatatgggatgtgaaagttgaactataaaaaaggctgagtgccaaagaatagattcttttaaactgtggtgctggagaagactcttgagagtcccttggacagcaaggagattaaaccagtcaattctaaaggaaatcagtcctgaatattcattggaaggactgatgctaaagctgaagctccaatacttgggccatttaatgtgaagagcttaacactgggaaagattgaagttcaggaggagaagggagtgacagaggatgaaatggttggatgccatcaccaactcagtgggcatgagttt

SEQ ID NO: 52412 - DNA, 2086 bp, Bovine  19866880479582
  misc_feature (1)..(1): n is a, c, g, or t
nctggaaggcgactgaactgaactgaacgcacaagaagcatggtcattgtctagagggaggaggggtccctagagaatcccaggtgaaattcccttcagtctgtcccagaaccacaggggacaaatggggtgaaaaggtcagttctcatacctccttcatgcactcgggccacacctcctgagagtcactgtcccaaatgttggattctagtctggtgaacctatagctgaacattaacacaaggatccaaagatttcagaatccagaggatccagagatttctggtctcatagccttttattctaattactattcaaaagaaactcattacaatgaaaatatcattatacaagtctaggtatataatcccatgagtgtgtgcctgctcagtcacgtccaactctttgggaccctatggtctgtagcccaccaggctcctctgtccccaggattctccaggcaagaatactagagtgagtcgtcatttccttctccagggaatcttcctgaccctgggatcaaaccggagtctcccgcattgcagatgaattctttaccactgagccgcctgggaaaccaatataatcttttgctgaaaccaaaatcaatagatggtgttctcaaaagatagtatgtgagggacttccctggtgggccagtggttaagactctgcactttcactgcggggggaagcacagattcaatcccaggtcagggaagtaagatcccgcatgtcccaaaatgttttgagcagtcaaaaacaaagacagtatgtgaacagaaattgcttcatatagtaagtcatgtaacatatgatgtatgcactaggatactatagatatgtgtttgtttttttctttgaatttaaaaaaattttttactggactatagttgatttacaatgttgtgccagtttcggttttacagcaaaatgaatcagctgtaagtacacatacatccacgcttttctttagattcttttcccatgtagcccattacagagaatattagacatttaaaggactcctttactgaattattatacattatatttatatgattatatatgtattttgtttttataatatattttattatacatgtatgtgtgttagttgctcagttgtgtctgactctgagatcccatggactgtagcccaccagactcctctgtccataattatatatatcattatatatgttatataaatcatatgtattaatatataatatactagtcggacactgagtgacttcattttcacttttcactttcatgcattggagaaggaaatggcaacacactccagtgtttttgcctggagaatctcagggatggaggagcctggtgggctgccgtctatggggtcgcacagatttggacatgactgaagcgacttagcagcagcgtatgttatattatataatagtttataaagaaaagaatcatttttgcaaatgaaaatatcatcctctcacttatgtgatttgtacaagtccgtgtgttgtggggatgtgtagtttgttttgtctgaaaactagacacatctgtgataaaatgatttttaagtcacctctctcaagtacccaactcaaatggcactggcatttaataaaagaattttaatgtttaccaagagttctatttattatgtatccagagaccctgttattagtctgatccttctagttctctatggtttgggttggtatcacatcaattcagtctttccagcccagaaaggaatggattctatgtggactaggggccttgaatatgctttactgagtgtctgcatcaagaaagtacactttgtttttgcgaaaacacatagaaccccaaacctcaatgcctcataaaatagtggagtaattcaactgatgccttgagcttggccctacgggactagtagtcatgaagcggtaccacaggtgaagggtttcctgtgggtccagcctcacaccaagaaacacgcaaagagaaggcacagaactgagtttggagggggcatctggatgccttccagccccatattctagcttatgtttcctgtcacagcccggggaggggcctttcaggcagg

SEQ ID NO: 52413 - DNA, 2046 bp, Bovine  19866880572869
  misc_feature (1)..(1): n is a, c, g, or t
ngggttcccaggtagctcatgggtaaagaatcagcctgcaatgcaggagatatgggtttgatccctgagtcaggaagatccccttagagaaggaaatagcaacccactccagtattcttgcctgaagaatccccatggacagaggagtctggtgggctacagtccatggggtcgcagagagtctgacatgactgagtgactgagtacaagattattgtggtatgggttaaagctggagaggttgactaagattcactccaaaataattatttgtttatatcacttatctgctcctctaagagaaaaatcttgctttattcctatttctgtttccatgaggagtgcagcaagaacactggagagatggatgaagctgcgtggactgaagagctccacagggctggaatcaaacttcactgaacagtccatgtggaagaaacatagattttcacacagcttttggttgactttgagagaggatgttgatttcattctttcaactccctatttcatccattttattaccatatatttcctaaagagaaggcctggccagtatcaaaacaaagcactctactctgttttaaattacccttttcaaggccacgctaggcaatgcagatgctgcctggtctaacttgaactgcaaacagcaatgttttgtccgctttccttgaaagcgctggatggagtgtgtgaagcttagagtgataaggattgaattttcaggtttatcttttaataggcacgataagattctaatgcctcagcgctccatgctatctggatgttggtggtgggaaccgtcaccagagggatgtactgggcggtgggggtgggggtggggggctggggttaaccctcaagaagaacacaaacatgagtgggtggagtgcgccctttccatgagaatcgccgtccctctctttcacagcctggcccaaatgatcaggctttatgccagtaagcaaagcaacggattattttttccattggtcagaggaagttttctttctttctttctttcttttttcctttttgtgaatggagataaaaaacgctcatttgaaaagggaactataggaatttcattttagtaaaatgaaaggctgcttaggttcccaagaagccctggaggaaggtgcaaagctcaaggcaacaagggtccttggaatcctgcagatgtgcatgtaaatcctatttctgttgcagaccagctgtgcagccttaatgtggctttaccttcatgaacttcagttttctggactatcacaaggggaaaattctaggtaaataaagtgaaacgagtgcaagtaaaatatttagaagacactcaatatttattagtttccttcttttgcctttgaactaagacaaaagattacacaggcttcccacccatcttctgtgtatttgggaacaaagtcatgaatacaaatataggaagcccgagggacggctctgcatatacaacatcttatcctgccagctgatctcattcacttcaactcaccaaatatttatgaagtgtatgcttgtgcttcaagctgcttgggactgtcgagtttacagttgaatgagagatggttactgacttgtgtcttccagaaacttctctcttacacaacaacaaagctttgtacgttgggcaggttaatagtacacggtgatgtgtctacgtgcgtgtatttaggcacgcacacacacacacgttgcacataaacagttttggaagggagataatccacaagggctggaggaatgaaagggacttcttaattttcttggctgggatgggaggggctctacaaggagcaaaaataccaccctataactattcttctttctaaactaaagtcaggggcctctgaatttcacaactacccagataattcccctcttaatgctattcaatatttatttaaatgccaagaacattggagcctccatgcctccaggcttcagctatttcttctggctggaattctctcttccaactttagaaatctgactcacgcgtccactcccagctcaaagctcctctct

SEQ ID NO: 52414 - DNA, 960 bp, Bovine  19866880606278
  misc_feature (1)..(1): n is a, c, g, or t
ngaaatggcaacccaccccattattcctgctgggagaactccatggacaaaggagcctggcgggctacagtccatgaggtcacaatgagtcagacgtgactgagcacaccatacacacacacacacaaacacacacgcatgtacacatgcacacaccttgatctcttactttctaacgcgaggtgcctacatctttatggagcctgtcacggcagagacctgtgaattctcttcctccatttatggtaacttaaagctacatcctacctagcacttccaaacactttatctaagtttttcctcactacaccactgcgaaatagattaaacaaatatcgctggcattttatgcatgaggaagcacagacttcgaaacgttcaggagcttgatctaaacttgcaaaaaccggaacctcctactcgggtttccaaagtccaaattgattctgttctaggataggatgaaatcatttcaaaagatacatgacacatcgcagagctgttaaataattgttctgaagttatacagccatctcagattaaatagcttttccctggaacatgagtgactgataatcaaggtcttttattgccattttaaagaggacgtcagcattgataacctgtaacttgaacactaaagaaggcaaagtatggctggcctgccaatgacttgctcagtgagtagttcctgtcagtatatacttgagaaccttgctggatacttgatgtatgtttaaaatttaccgtatttgaactctgagttaaaaaataacactaatccagtttttcaggtgaggaatggaagctttgagagaacaataaactgctcacatcaaattgctaatgagccagcatagagcatgtggaaagtgacttggggatctcgtagctattaatatttatggccatatatatgtatatcacatgactccagtcatggcctgggtgccaggaaaa

SEQ ID NO: 52415 - DNA, 764 bp, Bovine  19866880617890
  misc_feature (1)..(1): n is a, c, g, or t
ntcccactgcaggcaggcaagggtttgatccttggttggggaactaagataccgcgtgtggtacagtgtggccaaaaaaagaaaactaagatggggatatcaacaaaatatcaatcttaaaattttggcttatgggtattaaatgaaagcatgcagaaaagagtgaagtgaaatgaaatgaaagcatcgctaatctgaccacttcaagagaatgaccattaccattctgctatctcagcatcctggcttctttctaggcctccttaaaatatgtaacttcgctgaaaaattctttacatctaatgatgcaggatcacctctttctgtgaatggaactctgcctgggaccccagctccacacatggaacatctggggttcaggctcccctcttcccatcacctatgagatcctcgggagtctacctgaagccagtttcctggctgggcactgaggtctctggaagaatttccgctgaccctgagacctgggacagctaaagggcatatgcccctgctactgagctatatgtttccccgacaggtactcctcttcatcctctctagcccagtggatactcgccagcagacagcaagattcacggccgtctggcttctccctctcctcccccagaggagatgaagccagatgagagcgcctgagacagaaccgaggagaggcagcctggaggatggatggcaagcctagcagagacggacagtatctggttcccactcggccttcagcttaatcgtaatcacatgaa

SEQ ID NO: 52416 - DNA, 743 bp, Bovine  19866880722586
  misc_feature (1)..(1): n is a, c, g, or t
ncgcccaaagatagataccactgtcaaaacgaattttctgcaaggtgagttaatttccatgtgtgagatgttcttcatagtttgaaatatatatttgagatgctctctaatcgctttacctttactccatggtttcggtgtagaaaaaacacagaatactccttcaatacagcctacagatcttggtggtcatttgctttcatggagaaagaaacggtggggttgatcttagctggactgcggttcctgaagaactaatagataaacgtctgaggagctcagtgtccaccctgtggactttgaaatcccaattctgttggcgaagaagaaagccctaatacctgttcagaaaaagatgtcaggagaagcttttcatcagaatcctaaatgtctggatgagccttttaaaatgaaaagagccaacttcattttccttttttgtgtgtgtctcattatcacttagctgcttcagtgtgggtgtaacggcggtaaacatccttccccttcattccacctctggtcacacagtcatactggttgtgtagggtagcacggagagagacaagctttcctaaaatgttactgatgcaggatgagaacaaagacacagcttgcctgttgagtctccatgccttgggggaagagccaccatcatctctgccttctgctccagcagaggaccatcttcaaagtagatgacttcttccacattgtcaccccttcactcacacctcaaggtcagt

SEQ ID NO: 52417 - DNA, 1543 bp, Bovine  19866880747294
  misc_feature (1)..(1): n is a, c, g, or t
ntgacctgccactgctgctgctaagtcacttcagtcgtgtctgactctgtgcgacccccatagacggcagcccaccaggctcccccgtccgtgggattctccaggcaagaatactggagcgggttgccatttccttctccaatgcatgaaagtgaaaagtgaaagtgaaatcgctcagtctggaccaaaagctgcagtctgcacagtcagaccaaaaccaaattgtccttactccttcctatcctcccttcgtgctagaaggtcacccagaacccaggcacattcccgcctgagagcccactccacactctcccttcagagaagggaacaaactgaaacagggagaagggaacaagagaggaagcgaagtaaagtaagagagtctggggtagggagaaagcacgtacttcttttctctttctctctcttaaataaagctcctgggctttctcaagtcaacctccgtctgaatctggttttcatttgcacgcccccacaaccgtgaaccgagcttcttctcatagataatttgacttgattactttctgaaagggcaacagagccggagtagcccagcgctcatttacttgtcactcccagcactgccttaattggggttgaactgcacctccccctccaggaatgaccctgagacaggatcaaaattccccagggatgagctgctagggagctggacagtcctctccgcccagttaggcaggcagggccttggacaaaatgttaacaccatttgacaaaagaagtttcacaaaaggctgaatataagataaaacttggcttcccaggtggcacagtggtaaagaatctgcttgccaatgcaggagacgcaggagacaagggtttgatacctgagttgcaaagatccaacctactctgattatcttgcctgggaaatcccatggacagagaagcctggcaggctatagtccatgggatcacaaagagtcagacgtaactgagcgactgagcacgcaagataaaactctgggatggttaaatatcaaattattggttttgtgagcatggggacgtgtgtcatactcttatttcacacatttcaacccgtaatatactgccccttccttctttgagactgagaatggattctaccatctcttcgcttcatacctaggaggttactccattcaagattcacaataaatgcttaatagttactgcctgattagggcttcaacatcttttagctttaaaaagattttgatggatcaagttgctaaatttgggcattagtgtgacaaggagtagaaaagagtagccaagagcttgggattagggatcagacatgttttgatttgagaatcagtttaaaccctgtgtctttaggtgagtgatttggtccctaggctttgatttcttcatctataaagttcaaacaatgatattgatctcctagagtttgtggaaatagtgttttacgcaaagcttcacacgtggtaagacaccagctgccattccataattataaatattaatagttatatatgaaataagaagactaatg

SEQ ID NO: 52418 - DNA, 1904 bp, Bovine  19866880864746
  misc_feature (1)..(1): n is a, c, g, or t
ncattcgaagagttgactcattggaaaagactctgatgctgggagggattgggggcaggaggagaaggggacgacagaggatgagatggctggatggcatcactgactcgatggctgtgagtctgggtgaacttcgggagttggtgatggaaagggaggcctggcgtgctgcgattcatggggtcataaagagtatgacacgactgagtgactgaactgaacctgattatgtataaaataaataaactacaagaatatattgtacaatacagataatatagtcaatattttaataactataaatggagtataacctttaaaagttgtgaatcactgttaaacacctgtaatttatataatgttgtacataaactgtatctcaatttttaaaaagtgttctgctttgaacagtgaattacaaaatagttgtcctagccatatggagtatatttactcatttacagtcagcatttagagagccactttcacacatggccctggggttattaggtacggttagcttcattttaccactcattctattctaaaagaactcaaaacctgcctgcatcctcagattagctccacagtagacaccgggtagcttctggaaattatttagcctccctcctttactcacattatctgtgaaatgggaataatttcttcaatcctgccacatcaggtaacaaataatagtctagcaaataatgaggcttaggaactgggtagaaattgaacaaaatgcttaagtactaattagcaatatagcttagcagattgtagttgacagaagtccaaatccataccaagtgaatgtcagcttgttgctccacttgtttcagttatatatatatgtatatatacatatgatatattatattataatacataaatgcatatatatatatttaatgaagagggcatggcaattcactccatattcttgcctggagaatcccatggacagagggtcctggcacctacagtccatagagtcacaaagagttggacaggactgaaacagcttaagcacatgcatatacttaatcataaatatatgtatcttctaagcaccttctctttagaaatgaccaatgctgaacccaactgggccagatgctgtattttttccatgctttgccgggcgtctgttgatcctaacagtaaaaagtgttagaatggccaaagtgatttcatatcattgtgaatatgattttgtctatgtgaaataccatagaaaacccctaaattttaatatcagacatgtttatgcatgaggtttgagtgaagaacagttattgtgttcttgggttgtgtcaggcaggcttcatgcttctgacgtgttttccaaataagatgtagaatcaacccacatttgtcaaatgcctgctctgtttcagagtttggactagacagatggttatgtctttaaatcctcattacaattctgtgtggtgaatattctgattctatttttgtagatgagcccgataaacttagcaagaaggtaaattcttcacctaaagttacagaaataataaagggtatataaaatttaaactcagatcttttttctaactttaagactcctctacaacatgtggctgacaacagtgttgccaagaggagcaactgaggatggagatgtatattttccatgttgaaatagttaaacctcttgctacaagaatggcatataaataataaaaagctttttctcaacattctcctctagcccagatcctttagaagtcctgattctatttttaattcttatgtttttctggttactgaattcctgtgcaattaaaaaaagaaaagcaaaggggtgggggatggggggaagaaaaaaatgctttggaatttctttcatgctctgttcccagccagcgtgtgtattt

SEQ ID NO: 52419 - DNA, 2557 bp, Bovine  19866881001882
  misc_feature (1)..(1): n is a, c, g, or t
ntgtaagagaaaaattcctcaagattgtgtttgtccagaaatagacagtttacggtccctgagtcaaaacactcaaagattggaagccagggtttcctgggctgaacccagttactaaataaaatgaaaaggaaggagcaatcagatgccgtggattgttgggaagtgggtggggtcggttcgaaggcttgaattcagcagatgtgacagaagaaattcagggaggaggcccttgggtttgccaagcccccttccctacccaaacgggcgctgctgtgccccacagctagactttctgggtgctggaggtgcccggggccccgtggaggctctgagcctggccaggtcttacgaggcagccaggctcattgcagaaataaaaagacactggctctcttcttgttcatttgaggagcagtcttcactggtgtcctgcaaagaatgacccccatggggagtctgcctgtcctcttctaaccttccagaaatgttgggagagtggggatcagggactctatcatctatgaggaaagggattcatggcaaaagtcaccaggtgggaagagtgggaaagaaagagggacagagagagagcaggaccatggggaggctgcccggtaacatcgggggctactgtcctctttcctcctcccccaggccagcatcccacgcgctcagacgccgcactgcacacagggcagcagggcgcctttcaggaccaccctggccgaacactaagggaagaaaggggccgggcgagcacaggacatgtctgtgcccctggtcaccgactgtgagctgctagtaggaagttagagtccagctgcctcctgcctgggggggaaagacagcagccacatggagcctggctctgtgtgtttggggttgcccagtgacctggccgttgctcagatgatccccagaggatcacacctcagtggtctccagagggtgctctttctgggttgaggttactgatggagcagtgaggtatagacctttgaagtttctccaggattgaagtccaaaagatggactcggagagctcctccaagggttttcttgagctgacttgaggacaaggtttagcccggtgcttcaagtaatggcaaattcagagggggtgtgaaatttcttcccaaaggtgaggagcagaaacatttcataaacaaatgaaagaggaaaaaaaaaaaaacccaccgaagcttgtaaaagattaactgtgtctctgatttctatttttgctctaaagtcctttcaaaggaaagctccatttttacaactgacccttccaggaacagaattaagtggtttctagaattgaatctgattgtctgtgtccctgaggagtgtttcatggtcacccacaccgcatggcggaaaatagaatgtactgtcagacctcaccgatgccttcaaagggcttagggggcgcaccgctaatatccaggtctgtctctacctttctctgctgacttgggtaggtgcggagggcgaggttgttttgaaacagtgtagatggcctggattgaagcacagctcaaatcaccgaggtgggctggggacccatcctcaggaccaggctctactgaaggctcttctgtgccttggtccctgctcttcctccttccacttcccactcctaatttttgtcagcaaaggagctgtaacctagaatcacacaaagatgttagggatgaagtcactcatcccttatggaggcatttgcattttacagagtgaaagccatgccagggctgcgtgagatggatgtgaacatgaagccaggaaggctgaggccaggttcaaggcccgggggtgacctgcagaggcctctgtgtgcacccaagacccaccagatgggccccgatggctctgcccaaagggaggacctttggataaaggtgaactttggagggtgagaggaggcatgagttggggggtggggcaccgggagacagagggaagagatcttaagagcatgatcctggaaagccctgcaagaagagaggagagagagccaccgaagctgagtgatccatcttcagctaagttctggccattaaagactcctggacttacatcagaggacctagaacctcctaaaaccctcgtagctgagtggcattctggccaccttatccctctgtaccattttacagggtatagagattatttacaaggtacagagatggtcacagagattgttggcagagacaaaatggcctaatgtagaggtccccaacctttttggcaccagagactggtttcgtggaaaacagtttttccatggatggtggctggggagtggtggggagcggtgatggtttggggatgattcaagagcaccagattcactgtgcactttatttctaacctcatgctgctgctgatctgacagaaggtatcgttctggggcctggaggttagggacccctggtctaatgcatttgaaggtgcctccattcagagctgggcagtaaatgcttgtcaatcacgtccaggagcagtgggattggaattgttttctctggacccgggagctcttccacactta

SEQ ID NO: 52420 - DNA, 1093 bp, Bovine  19866881034154
  misc_feature (1)..(1): n is a, c, g, or t
ntggttaattgtcgtttttcgcgttgtgctatgtaaacgataaattattcttctgacatgcttattttggggttgattgaaaaaaaaaaagttcatgttggaacagtggtgtgatgtgtactctagagagagttgagtgccagaatttgatatcatgttatgtgacaacagcaggagcaatgggagaaagattaaaggtcaaagaaccaagttaagaaattatgagttaattagataatacagagccaacattcaaatgtccatctatccatctgttcatccatccatccatccggtcattcattcatccacttgctattccttctgttcatccactcattcatccatccatctatccactcattcatcacccccaacagatactcacatagtcttcagttttctgggacaatgatatgagttacagggacaatggtgaatgaggttgatccatttcttgcccctatgattttacaataaacaaaggagatggacattatgcaaataattacagtataatttatgctacaaaagagaaagtcgtgtactattaaaacataacgagatgacatagtccagtgagagcagagacaggggtgttcagagaaagtctctttgcagaggtagaattcaggtcgaaaccagatgtagatgaatgtctgggacatctgcgtcttcctagcttgtctctttggtctctgagttcagggaccatcttggctatattgaggaagaaagggaagtatccaggataaacatgtcagcagcaatcctggcatttgattgaaatgatattccaaaaagctcaaaaacaaacaagtttactgctaatcattcatgagcacctggccaaaataaagagtgcattacccactgatgatgttgcttcccataaatctctcaatgcctttatggctgtggctgactgtggttattggacttttggtcctaagtatgttttgaaacagcaaaattcatgatgatcttttgtggtatctggatcgctctttcctcttccctggcttactggggggctgagctatcaactgaatccccaggcactcgatgtgaaaatgagagaattaatccatca

SEQ ID NO: 52421 - DNA, 1266 bp, Bovine  19866881035145
  misc_feature (1)..(1): n is a, c, g, or t
naatttgatctcaaaagtgatggatgggtaaggcttttctaagtagagcagctcaaacactctgacccaaatgtccttcccatcttggctactaaacttcaaactaagcgtagagaccagagattctatttatagcatttctcagcatcttcttcttgaaactcaggataaaacaagtgcctgacaatgacgccaaggcagactctgtctccaacaagccaaaatttctgattgaaaattaaaagagaaaaataacaactgtttctgttgggcacgtgatagaaagcaacacgagttgtatttttgttgagttgactagctgttgggacagggtaaaattccgcccaaacaactcacttggaattctaagcccttggcagtcactaaatctaattttagagaattcagccaggttttccttcaaggtttccagcgagcagccaaaagcataaaacaaaaaatctcatcatctcagggtgttttgaaggtttttttcccctccaacagattggcctcaatagctttattttatttgtaactcaagtctaatttcagtgaatgccagaaatacaacccaaatcctaattaactaatgaattagtacaaaaaagcctgccccatctataagtaattcaccacgtgctgctctctactgtgggtacacattccacagaagtaatcttgaaaaggacataaagtccttgctatttctctctcggttgtatttctctgagaagacactgttgtcaccagttatatatggtcactagcaagctcccaacaatgtagctggaaggcaaagaaagaaatcaactgacctttctgcaaaaggaaggaaggtgctgatagatagcagggaagccaaaccagttcggaagggaccatgactagagggccttctccttagttgcgaatgcatctggcctgtgtccatggctagatcatatatctgacaatatcctcccttttaatgctttgcagatccaaggtatattatcataccccaagcctgaactctccagggaaattatgtcaagtcatagccaaggaagttggattataagaaaatcactagaggaaccagctgtctcgtattcactgttttggaggaaggagaaaccatttaccaaaaggtggcactgtgagactgcaggatggtgactcaactcggctttactctcaagactccggaagatccgtgctcagcatttactccaggatggggagtggggagaaggagagtagaactcagctttatttttagaa

SEQ ID NO: 52422 - DNA, 1208 bp, Bovine  19866881095399
  misc_feature (1)..(1): n is a, c, g, or t
nttctaattgataccaattttgccataaatctcttctatctctgacataaccagataccatttgttctttccctcaattagtacttgttgtagtgcaaaataaagagaatttaactcaacagcaaggggcccccaattccaacaatgacaaaatcaaggttggaaccaggggtgttcaatctgtttttctatagtttcattacatgatgtgaaggacaaataaaaatcaagggaatggtatttctgatctttacactttgtaaaaataatctatcactgtcacccatttcttgtttgttttccccaagatttcactattttacatgacaaattctatagtttttgtccaatgactttattttaaaattcttattttttttttctctaggataacaattaagtggcaaattactttttctgtttctaagaagggttgactttttttcacattatttttttctttcttcaatattcttccttttcacccagcgggtctggtgctcttaatttctgaatgacatttaagacatgccctagaggggctccagtgcaaaggggaaagctgaaatgaaaacagagcagaatttgttactagcctccaggaagtcaggcaaacactttttcttaaagtttagataccccctgcagtacatcatccgacttcttctgaggaagctagctgtgcagaatgtctgaggttctgggagaaagagagatttggtatattatgataacccaatgcacattgcagctagtcatttgctgtgcttagagcttaatttatatctcagtcatttgatgagcataatacagagagagtctccgggttttatctactctggacagcatagcgtattgctccagtaagcataatgggtggaaattagggacagaacgctggctggagagttctttccatgtgaggaaagtggatatagacaaatcagtctctctgtgtaatgcctttacggtaaaccaagaaataatgccatggggaggagatggtggctgcagcttggtaccctccacaaatagctcagagaagtaggagcagtatggtctaagacctgaggttattgttatcaatcgtagacctcaagggtctgtgcttttcacaggaaggtggctgtatggatttgtcacatcctttaagtccttcccttgacttagtcacttctttggctcaccttttccatctgcactaaaat

SEQ ID NO: 52423 - DNA, 807 bp, Bovine  19866881109377
  misc_feature (1)..(1): n is a, c, g, or t
naatggaaggggttcgcctttcgggtaaacttattttggtaagtcattgactgcctcaaatttgaacactctggctccttctacctggcacggactctacacggggtagtttctcctcccttttcaacaggcagctgagctcgccagccgaggccagtgtccagccagcacacagaaggcctgaacaatgattttattttctgtgaccaacagcaccgatacctaggaaaaatagcctatttttacagaatgacaaagcgtgctgcacacatgttcaggcactccttttgttaaatatagtcgtttctattttggacctggaagagatggctgtaattctggaaaggtgggaccctgcggatgccaggaagtgcatgcccgatggacaggacagacctccgggccactcttgtccttaaaggcaagggtgggcacgtctgggtgttcccaggattcctttggggttcagaagatcttgcctctcctctctcggcaggccttgtccgtggaaccaggcactgagggtagaaagtgtgatgtgacctgttgagggcggggcttcccgaatctgtgcgtcagggttccggtgacatttgggaaactgtcatggagggtggccagggaagaaggtgcagctttcccaggtaagcatttccatagagaacagggtaccaggtgaagatgtagatgcccctccccaggacgacgagctcagaaggctgaaggacgttgggtggcacccagtgaaaagggttcccgaagtacctgcgggggacgatgaccctcctctcgttggtggtcatgttg

SEQ ID NO: 52424 - DNA, 626 bp, Bovine  19866881112937
  misc_feature (1)..(1): n is a, c, g, or t
ncacaaacaaggcaggcttccaggtctacatccagccctgaaaccctttctgaaagggattccagattattcttcacttcgttctcaattcatctgtttccccaggaccaacaagattttattatttgcatgacccttgggatgaatgcccattgctggctcttaaaagtaccagaaaagtagaaaataggacaacatgctcaagccacgagtatgcacctccttatccctgccctgcatgcacacacacaaccctgatgagtttggtaccaaacccagagatgggatacttccaccagctgaccatacccagagcgcttggggaaagggatgatcacatgctccttggttaagccatttatataaaaatgaaaccaatacatgagcattgatttcatgtaaccctgcaaagcagaaaatgaatcaggattgctcactcaggtataattttcctgttagtttttccttaataacaatgtgatggtttcatttgtttgttttgcatttgttctttagtttttggtcagaaaggaggattgtagctaaaaaaaattgggcttcccaggtggctcagtggtaaagaatccacctgccgatgcaggagacacagcagacatgggtttgat

SEQ ID NO: 52425 - DNA, 1326 bp, Bovine  19866881131759
  misc_feature (1)..(1): n is a, c, g, or t
ncgggggaagcgtgtgcagccccaccctctgcacggcctctcccagccagtgaaaacgttgctgtcttggttaaaggccaacttaatcctcccaacttcggctgcacttgggttgtttcacagtggacaagtatgctggggaaggctgccaggccgtggtggaggtggtgtgtgtgtgtgcggctgcgggcctgtgcatgcgtgcatgtgtgtgtgcgctcctgcacggctagcgtatgtgcccgtgtgcgtgtgcctgcaccggtggcgtcggcgcctgtgtgcgcatgcgcccacttgtggtttgcttggactagggtgggggggacccggccagctccaccagagctcagctcagacgcgggaccggggtctttccgggactgcttcatctcaggccaagtcctgctccagcagaagccaaagggccaaaccctggtgcaaagccccgaagtgctactgccgcccctcagactgccatggggacattaaaccttcaacaatctggggctccgacggctggttcttggttctctgcctggaaaaacagtaggcgaatagtaaaaccttaaattctaacatgtgtaagttatacatcttattttcattttcagcccttgttcccctctgtaagacatcaggaaaaaattaccgtctgacttctaatatctcagtggagcatttatctcccagctatgataagtgatcttcaatatttttttcctttcagattaagaaacaaattcatttaattttctttattgaatgtgctctggcctcccccttcccctgccgtgtccccaccctccttcccctctcctctcgggctcagggaccattgcttgcatgccctccgtgttgctgccttttcaggatgggcgggtccatctggcacaaccctgctcctcgcctgctcctttaggcttcagcatggtctgttcctgcccacagcagagagagggagggcagcggccagacctctggaaaaccgttgtaggttctgcagcccagagttggccggctgtaatctgaaccttatctgaactcctgggtctgagggcctggtttggagctcttgtgaagactgactgtctcccaggttgccagaactgatgcttcctgctctgggcaaccgggagggtgggtgggaaagccgcagcctctccttggtctctagtcatctccttcggccctggcactgggggagtggctgagcggaagtggcagggcaggatagcactgccctaggcacaccaggagagtctgtgaccccaggctctgggtaggtgggggggggttttgccagcctgctgaggcaccaggtgg

SEQ ID NO: 52426 - DNA, 1068 bp, Bovine  19866881228429
  misc_feature (1)..(1): n is a, c, g, or t
ntgcctggccgcattctccttggcctcaagattccttggaagacagaaatgttttaccaaacagaaggcaatagaaataccagcctgcgaattctcttcattttcctgtcaagtttttttttttttttttaagctgctctattacttatttatttattcttggccatgctgggtctttgttgctgcgtgggctttttctctagttgtggcgtgtggacttctcactatggtggctttttttgttgtggagcatgggctctaggtgcatgggcttcagtagttgtggcccatgggcttcgttgctctgaggcatgtgggatctcgtcctggatcagggatcaaacccacgtgtcttgcactgattgctggattctttaccactgagccaccagggaagccccttgctgtcaagtctttttaccttaccattttccagtttattaacagatcaaaacctactgtggagataagggtacaaatcaagaacttttgcagctgacattgtagggagaaagttaatgacggaaagatatttgtgtcccaacaacatcgagatgaaataaaagactcctttctaagggaaactgaagaataagaaggaagtgttacagggagaggctggaaggagtttaaaccatagagtggatcctctactgaatcaggattagcaatggtgacttcacaatattttcctaagcttttctttactggagcaatggcagaaaaaaattaggggtaatgctctaactggcagaatctgtcatctcacagaaaaaaatgtacttatgtgagatgatggaaattaactgaacttactgtgatcattttacaatatatacatgtaacaagtcattgtgttgtacatcttgtactaatagaatctcagagttgcttagtcatgttgactttttgtgaccccatggattgtagcctgctaggctcctctgtccgtgggatttcccaggcaaatttactggagcgggttgtcattcccttttctaggggatcttcccgaccagagaaccagagatcgaaccagattctcccgcattgcaggcagattcttta

SEQ ID NO: 52427 - DNA, 791 bp, Bovine  19866881248391
  misc_feature (1)..(1): n is a, c, g, or t
ngtgactttactttccttttaatatttattgtatggacaaacctcatttatttattgattcaccagtagatggacatttgagtttaactttctggctgagacgaataatgccctaccaacattcatggagtggtttttgtatggatgtgtgtattttccagtgaatcccctgggcaacaaataggtgttataatcactgatttattaggaaaagttgcagctcagagtggttaagtaccatttctgagatggaaaagcttcttgtgattgggtttgattatgctagaagggcaaataagaggaagtaaggtggaatttcacttcaccttttgcaggacattatacacaccagtgagtgaaaaaacaagagaagcctggggggacatgcgtcagcagggctgcgtgggctcctgaccttctggggggcaggtctggccgggctctgagtctgggagatgctctcctcattctctcattcaccttcttgtttcggaggcagactctagtcaagagcagctcaagacagctgccagagtcgcctggcagtctgtgaggaggcagatgggaggtctctgcagcctcatccccactctgggagggtctcctgggatgggccctgcccatgacaagaagagccccaaagagaggaattcagcaggggcccaagggcggttctagggcagagagcaccccgctgctggctctgcttccctctgcctccagggctttcccagaaagttcttggacgtgggaggctggcatgcaggcgtgccgccccattaatgcaactc

SEQ ID NO: 52428 - DNA, 1649 bp, Bovine  19866881281750
  misc_feature (1)..(1): n is a, c, g, or t
ncaagaacactggagtgggttgccatttccttctccagtgcaggaaagtgaaaagtgaaagtgaagtcactcagtcgtgtctgactcctggcgaccccatggactgcagcccaccagactcctccatccatgggcttttccaggcaagagtactggagtggggtgccattgccttctctgaatggggtgggaaggtggggattggggtatggtcagggaagtcagcctctgacctgacatccttagggacatccatggcatgtcaagagggcagctggatgtttatatctggagcttaagtcagtagagtccaaagttaaacactgtattaagaagcagaggcatcattttgccgacaaaggtccattctagtcaaagctgtggtttttccacaggtatggatgtgagagttctaccataaagaaggctgagtgctaaggaattgatgcttttgaactgtggtattggagaagactcttgagagtcccttggactgcaaggagatccaaccagtccatcctaaaggaaatcaaccctgaatattcattgaaaggactgatgctgaagctaaggatccaatactttggctacctgatgcatagagctgactcattggaaaagaccctgatgctgggaaagattaaaggcaggaaaagggggcgacagagcacaagatggttggatggcatcaccaactcaatggacatgagtgtgatcaagctctaggaggtagtgaaggacagggaagcttggcatgctgcagtccatggggtcgaaaagagttggacacgacttacaaattgaacaacagcagtgtagatgaaattagagacattatgctgagtgaaataagccagtcacaaaaggcaagtgtataatttgcagtacatgaagtaccctagtgtagtcaaattcatagagacaaaaaggagaaaggtggtttccaggggctggggaaggatggggtggggagttattgtttaacaggtctggcatttcagcttgggaagatgaaaaatttctggtgatagataatggtgatggctgcatagcagtgtgagtgtgcttaatgcccttgaactgttcacttaaaaatggttaagatggtaaatgttatgtgactttttaccataattttaaaaaatgtgtttcagctgaaataagccaatcagaaagttttacctaaaggaactctttcgacacctctagctcttgtgatattaatggaaacgtttgaagacagcaatcagtgagggatcaaaagattccaggtcttctcttttccagacgaatctccccaatcaagtgcctatacattttcctacaaaacctggctttttatttgaccttctccatctgtcatccagtttgggtatgccagagaattcagaattactggtaatgttcaacaagcagtgagtaaatttttcagtgtttgttttatggaaatgttaatgtaccttaagacattataaggtatttttggaaatgaagagttttgtggtcaaatgaactaaacagctattgcttgttgttattgcttttgtaggattttccagagtatttgcatgctaagttgcttcagtcgtgtccaactctttgtgactgcatggacttatagctcgtcagtctcctctggccatgggatt

SEQ ID NO: 52429 - DNA, 3120 bp, Bovine  19866881392014
  misc_feature (1)..(1): n is a, c, g, or t
ngacgtaggatgtccggacttggcaggtggcactggttgcctccaccgtgccatctaaaaacacgactagttcaaagtcctgctggggaagggtttctgctgccatgtggaagaaggggctggtgtgatcaatgacatggtaaatcgtcagtggggagatgaagaataaattttcattccctgcgtcaaccacaaagttgatattgatctggtccaaaatgatggtctctccttcaggagtgatggtggtcctcagaagctttccgtatatgtgactgccgataaggaggctcttccgaagattagccactcggatcaggagacaaagcttcccaccccgcttgctgatcactgcgttcttgctgaaagtaatggtcttggcgcgttttttgggtctggagatcttggctaaaatagcaccacacatgaaagaattgatgataacgccgagtatagactggaagatgagcagaaagatggcagtgccacactgctccgtcacacaccggaatccatagccaatggtcacttgcgtttccagagaaaacagaaaaagctgaggtcaggccattaatgtgttccacgcaaggggtgtggttggcagggggatggaactcagggaggtctttgtggacgtaggcgaccacgtaccagaggaggccaaagaagaaccagctgcccaagaaggctgtaatgaagatggtcattttgtatctccacttgaggtccagcacggtcgtccatatgtccacaaagaatatcagccttgactgtgcctccacgttgccaaactcaatgttgcaccttccgtctttggagaccagcctcgctctccgccgagaatgcccaaaaaagcgagtgacaaaccatttccgaagatgcttgaacattctttctgtcaacacactgatctgaaaacacatcagagaaagaccaaacagaagaaaattatgtgtattgcactaatgagctaagtgactcacatgaagagctgtctatgaaaaggccattcagctacaatctgtgtgactgatcacttgggcaagctgacaactttattctgcatcccacaatgctatttccagtaaaaactctctactctaagaccatatggcttgaagataaagaggaaaactaattacagggagatagacatgtagaggaatctaagagaatatatatccacgtgttttctgaccttagtcacgcccaaccttaaaaatgtttcttataacacagacatacagaacagacttgtggttgccaaggggatgggaggtgggggaaagatggagagggagtttgggattagtaggtgcaaactagtatatatatgatggataagcagcaaggtcctactgaatagcacagagaactattcagtatcttgggataaaccataatggcatagaaaaaaaaaaatccatctatttatctatctatatatgtatgtataactgaattacttttctgtgaaatataaattaacacaacattgcaagtcaactacttcaataaaataaaattttaaaaatgcttatgataacaaattatgacctgtactctgatttatttgatagtattctttaaactgactctccttttttctttaataaatttagccttatgctaagcaaaaatatctgtgacagcagaaacttgatgcactatttacatttttggttcatatatagaaataaataaccatggggaaaagtttcacaacatattacctaaatcaccttgtagctagagaaattataatccaattcagttctctcatttatctaatgaaggaattgagaaaatttcagtgacatatccaaagtcaggtaccctagcaaaaatgaacacaacattgtaagtcaactataattcaatcaaaattaaaaacaacaacaaagtcaggaacctgaccagtggtgggatgacaaccagaacatgagtttctctgctcccaggtcagaggaatctctacttcacttgtgtctcagttattactttgtttatattctaaagtgagatttctctggaacattttaacacaagctttgatcaacttccttattttgtgctcaacattacttgaaacagaggtcctcagcactgtttagtcaagtcttatcgtaagatctgagacgttttctctatggatggcaagcctgggatgccaaaattcccaaagggaagagtaaggtggtcactgtcagtgcctcccactttcttccctgctcccaagctgacagacggagcactatgatttaacaaatcctacataaggtagaaccatgttttattcactcatctatcctagctgttagcacagaccatggggggttactatttattcaatgagcatcaatggaatcattctgtgaatgaattaagagcttcaaaatactatgtgggcaaaggtctcattaaaaacataattgtagcttccattttacagcatggcactgaagggatttcccccaaagagccaacacagctcaatatcccggggtcataacactagacggccccctcccctaggtgtgcccaccccactcccaaggtgtgcctgttgtggttagcagtgtcttcgtggtatttttaatcaaatgcaaacacgtttctaaaatagatttcaaaatcccccttcaaaaatgtgtttattcatacaaactaggaagcgaaaccaacttagtgataaaagttaaacaaaagtgatattctaccgcgtcttgcccatggccttcaactatgtgaaaacacaagaagaccccaagtaaaagtggtaaagagaaaaaaacaaatatatataaataaaagaaaatattaccaggagagcagacagaagttcactctctctgagggccctgctctcatcccacccaatattcattgacctcaagcccccaaagagtcccaagtacatggtcccaagagtaactcagccagggaaatggtctgtttcttcctcaatccttccctttctctgcacacatctcatctcattttgcttctatccactggggactttctccctttcccaggtttgtggaagctcagactgtttccagaagctcttcatagggtgaagtgaagtgaagtgaagtcactcagtcgtgtccaact

SEQ ID NO: 52430 - DNA, 1037 bp, Bovine  19866881589563
  misc_feature (1)..(1): n is a, c, g, or t
natgggattctccagcaagaatactggagtgggtagccattctcttctctagggggtcttcctccacccagggatcaaaccctgggtttcctgcattgcaggcagattctttatcgtctaaggcaccagggaagccccaaattacttagagtaggcaaattgcccacagtagaaatctcagtctccagtgctgtgggctcaagtcgaaagggttttcatggacaatgaagattcttcaatcagattttcaagatcctctgtattaatttatgcattcacggaacaagcactaattgaagagctatttgagtccagctcctgcgctcagagctggtaataaagcaggaaggtgagtgcagagccaggccttgtatgctttgtattctagccttgcctctttgaacccagatgtctgtggagagagaagcagggaaagcgtgggcctggccaaggcaagccgagtgtgggcactgctttctgcagggccagggagaggccatgacgtgagcaaatcctactcaatctcatcaaggccaatattgctcttcatctttcatcctctcctacatcctgaatggaaagttgtgcccagacatgatttaaagctcctgggagaggcagagcttcaagtccagcaaagtggtttagtctctttgatataaaaacacaagtggagaaagaatcaaaagaagaaaactcaaaggaagttgtatttcagaggatgcattcgttaatctgacatccatttaaatgcacctctgtattaagaatttcaaaaaatatctcccacccaacccccagtgaagaaaactccgtgtcatcaggtgttttaggaagtcgtggacacagcagcttgacagaaactgccagtggggaccagcagggtatcctgaagacagcactggcctgggagccttgtctcagactcagtttccgactgtgaagtggccatagcaggcacccttagcgatatcctcctttctctctcagatgtgctgggtcaaagtcctgagttcccttcggatttgggatgagat

SEQ ID NO: 52431 - DNA, 630 bp, Bovine  19866881803883
  misc_feature (1)..(1): n is a, c, g, or t
ntgccttgcgattgcaacttacagttctgcacaagcagaaaagttatgaatggttctgttctccgttcttttcactcctcccacctctgcctcccaacaggaacagctgttttctattacacgatagtctgacaaggtgctggtctggcgcggtgtctctttggcaggtaattttgatgaggcccagaggtaagagggtgggtgtctctgatgggtttccggtcctgttatcagccccgtcccgcacccccagacatggctgccgtctgtacacggggctgatttctggctccaggcccatgcttgctgagagcatccgtcatctgtcagggttaatccattaacttttttctacttaagcccggaactaggatatgaggccaatatccagctttctggcagagaacttggtccttgaataccgagtaaccctgctagttctgactgggcactcaggctttgatttgtttttgtcatttttggccttgatttaagaaagtagaacagcaattccaaatggtaagaaatagatagtatgagaaaaagcaaatgctatgtgggaacaagttgcccttcacacttaagctatcttcacggttaggttatctgcaaaaaaagtgagcccagtca

SEQ ID NO: 52432 - DNA, 1351 bp, Bovine  19866881924465
  misc_feature (1)..(1): n is a, c, g, or t
natcacaactcggtacagaacaggcacaaaacaggtatgtgtggaaggaatatggctttgtagactcagggaaaattagaaaaagaatctatttggacacttgcgaaaaccttaaattttgctccggacaacacgctagtagtaaaacttagctgatgtatgtttctttgggcctttttgtttgtttgtttcagaaaaagtttggggagcgtgcattcatattagatctagaatctcccctttgggggatggcatcaagattcacagttatgggagtttccaggccatgcaaacacagaactgaaaatcagggggcttcatgtatgtttttctcctctaagcctttggtgattttcagctctaaaatgtcagcactccacatcccatctattaagtaggggcagaattctaagcctcaaccctgcaaaggaacatcttttcagactctttgctgggaattttagattttgttctcaacagcagagtaatcattagataatgtgtttgatattttgtataatccctttcttgtcaggaatcatttctgtcaattgcctgacctgattaacagagtaaaaagggtggattctgaattagggctcgggccagctttcccaaatcgaagaaaattcagtaagaagaatgtgtgcacatctgagatgggaggggtattcaacagtgaccaagatcactctggaagcactgcagtctgggccagtcacggaatttccatctcaattttcaggtcagctctctaagatctatgtggggcagtggttttcctctggtggttctgtgtagatcgagggatgtttcaggagataaacaaggagacaaacagcgttaccacagatacctgaatttgtttttttctcatcaaaagatactcaccacaagctggcttttttgctctcgcgcgtgtccctaccaaaggcactgacgtgcatgctcacctaattctcaaatcaaactactgaaaatttaaaattaaagaaaagtttaattcattgtctcatctttttgtctctttctgtccttgtcttcatatttcctgcttccctgcaaagtgaacgataaagttgcctcacctcagacttatctgtcaggggaaatgttgaaatgtgctgctttgggggacttaatacttgagatgtagattaatttcattggtttttctttttcagatccaaagggagatcaaaggccttaactgagatcacctagcaactggggagcaaaggtaggaagtaaaattcatagctactggatcccagggacacaaaatacgggaaaatgaaagaccacccccttattatcctcagctccagtaagtcacttgagtaaaagatta

SEQ ID NO: 52433 - DNA, 740 bp, Bovine  19866882025756
  misc_feature (1)..(1): n is a, c, g, or t
natggcttggcagaattggttcctaccgctagagaacgcgtcttagagaaggtgctcttggagaatgggccacgagaaggttcttggtgaagaatttgatgtcggaaaatttgagcctgaagtaccgagagcaggtggtgatgggagactcaggtgtgaagcttagttgtgtgtagtagctcaaaggctcaggggtccgtttggaaaaaaagggggaaagtggatccggatggacccgcttctctgagtcttcacagcatgttcctgcttgctcctaagttgggctctcaaggttaggacacgtttttcatgatgtgtatgagatatcacaagacatcttggtttctctgttttcttgcaaaagtgtaaaactctctctttccagggtgtgtctcgttgccacaattgagaagtgtacgtttgacagcagcagcacctttgataataaatggaactttgtggccacttttctcctatgattgagttgaaagaaaacaaaaaacaggctcaatgttatgcaggaaaggcctgaatcaagcaacaaaatatttttttgaaagagacgatcaacatggcagggtcacaagctttcattggcccaagcagaggagctctgctaaatcctgtcctgtgaagtgcctttccttttctactgcatggcgtgggagggactctgtgtgagcattttcccctaagagcacagacactgatgagatgtccagtgtaattaataaccacaa

SEQ ID NO: 52434 - DNA, 1763 bp, Bovine  19866880685097
  misc_feature (1)..(1): n is a, c, g, or t
nttactgaatggatgtacagatgaatgaatgaataaatgagtaatgatttggtccaacgctacctcccactttggctatcgtgtttattgttgttgttgtttagccactcgggtcccactcctttgcaaccccgtggactgtagcctgccaggctcctctgtccatgggatttcccagacgagagtgctgaaatgggttgccatgtctccaggggatcttcccccacccagggattgaacccaagtctctctcctgcactggcgggtgaattcattgccactgagctaccagggaagccccgtgtttatcataatttacatataaccaagcatctagtaccattacctgacccaagggaaatggattctgaaggtgtgaggactgagttcctctttatttccaagcttgcagtcagtctgagcagtaaaaatacaaagagctagatcacattagggtattttagctatttgtttcagttcctcaaatcaattcaaaccccgttaatacttaatttaattccttggtttttttcccccctagaacattaacagatatgttattaagctgtggggccatccataattggtcatctctctgtgaattaaattttaaaaaggaaaagtaagatcaaaggataatcagatttcctatttatgcaagacaactgagttaaattacattttcttgctaaaaatagattattttcttaagaattaaacatttatttttatctcaaacaatctccatacatcttctgtagagttaacaaataaattccaggtaatagtattacatatttaataaatgtagggtgatttgaatggtattagagtgcaaagcatcaagcaacttctggaggcaagtaaaaatggattgaagggtctcgtcccaaaaaaaggagtttgtgaaccaaagaagggtatgagccttgagggaaaggctgagcaaagctggccacagaacttatatttcaaaaaaccaagttgaagctttgagacattttgaagtattggcctagtgagatggttcctggaggagagattttttgggtctgaagagaaacatgtggtataacagaagtattaccgtgaaagtgttagttgctccgtcgcgtctgactctctgagaccccgtggactgtagcccataggctccttggtccgtggaattttccaggcaagaatgctggagcgggtagccattcgatcttcttgacccagggatcgaacctgggtctcctgcattgcaagcagattctttaccatctgtgccaccaggaggcttccttaaatcacactcgccttattaattccccacagtgatgggtacctggagtgtgttccgattgccacaccactgccaagcacacttgcacctgattctctgtgtgccacccctggcatatgtacccaggacagctggatcactaggcactatccactctgatggcacaaaaggtatgatataggccaatggttctcaactggggacagttttgccccccaggggacatacgaatatcagaagacattctgattgtcttgttcagcatgtggtgagtaggagtcaaagatgctgctaaacattttacaatgcacaggacagcccccacagcaaagagttatccagcctaaaatgtcgatatgctgaggttgagaaaccctaatctaggtatcttaattttttggtccatattcctttttgatgacctactgatggaattgagtgatttatgagcctcctgcaaatgtatgctgaattt

SEQ ID NO: 52435 - DNA, 1211 bp, Bovine  19866880741975
  misc_feature (1)..(1): n is a, c, g, or t
ncatgataacagaaaggagtcacccaggcaacaggggaagaagagaaaccttgcctttcccatcgacagtcttttcagtgcaccactgctggagtaatcttcccagagcaccagctttatttcatggttaacctgcttaaaaacttcagtgggtctgggtgcttagaaaaatcttaaactcctcggttggagattccagaccctccataatctagtttcgctaatttatcactctgtcatctgcacacccatgctcccacggccagactaatttcaaagctggtccctgaaactcattccttttcaatcgcagtattttgcgaatgcttctccaccacccccctttccccactggcatactctcctccgtccgctctgttcaactctgtggaagcccatgtggtattccgcaattgcttgagcactcagtgacgtcgactgaaacaaaacaaccaacgacaaaacctgtttattccgggtcctgagcactgactctcattctgaattagttttgtattgtgagccaatacacagactgggaccatgccttcgaatcctgtgtatccccttttccctccactgtgtacctagtacagcccttggtcatagtagtggctcaatagctatgcactaaatgaagttacctggtattcagcaggaaaaaaaaaatcacttaagccagttatttgactgaattgaccaggcaatgaagtcaaagtaattgatctggtagtcccaacagacaaagtctaattctgcatgtagttatcttgaaagtcaaaagtgtgctgggtgtgtgatatattataatgtgagattctaactgaacaaggaaggatcatactatcagaggcttgaaatgaaagggagtgtctgtcttattctggaatctgtataaacacagaacttcatcttttcgcctgatccagctcatctggctgttatgcagatcatttgttacataggtttataggatgggtcttggtttcagtctttattctgaaaaatatgatatgccacactccattttactcagcatttcagaatatatatccaatacgaaataccagagatgatagatattatagataaaaaccatgaacagaaaaagagtccactcaggccaagcacattccttacctgactgctcattaatcctgttctaatccttaccccatggaggtaaacgctttttaaaagttacatgtaag

SEQ ID NO: 52436 - DNA, 878 bp, Bovine  19866880811701
  misc_feature (1)..(1): n is a, c, g, or t
naaattttttttaaataataataaataaaaggaagttggacagcctgcttttttcattcaacaaaatgttgagggcaatctttttatgttaatgactacagatttacatcatccttttaaaatggctgaacagtagtttggaatggatgtaggatggaataaatgaagaacaaatgaaagcactacacatctaatttattattagcatttctagaaaagggtacttatttgtttgagtgtggtggtaaaatttaggtgagagatttatggttgtatttcattacaaagctctcctggctcaaataccagtggatacactgaagtgcaacattcaaatagtaggaatatgttgttggagaatcgaagggtttgaaagattgccaaattacatcattcagcagctgagtatgtaaagtaactaaacagcaactgtggcgtttcctttccctttaaaaataatgcttcacaaaaccagttctgagaagattgttttctgaacacatagacacacaaacagatgtaattcatcaaaacaggaagtgctttaatgctactctcagcgtaagtaatgccgcatgcagacctcttactaagtctcacttgagcaattacccaactagtacttctcattaacactcatttctcagcaaagattttaatagctgatggcttttgtaaggctctgtattaataaggcttcattaagttttcaaaatatattgcaatacatttactggaataatacaaaagtattatcgtccatcactagacctaaacaatacgcatctagataaatcagccaagcccatgtgggtagagcagtggtagattcaacactgcttttttgactctttaattcaaataaaaaccctgctatg

SEQ ID NO: 52437 - DNA, 1552 bp, Bovine  19866880981108
  misc_feature (1)..(1): n is a, c, g, or t
natgctattatgatctctgttgtgcagatgaagaagctaaccaaccacttaagtaacatgcccagtggcgcacagcctgttagtggtagacctgggatggtatcccagcctgctagctcatccctttcagacataagagagtagttgaatgatcatctttcaaggaagcccatagtcccgggttagaatccacgatctactatgaatatttacaaatctctgaagcttgcccagatttcacttactcatctataaaatggggctgtcagcattgaaaggactggatgagtctgtgcatgcgagtcaagtcactccactcgtgtccgactctgtgcggcctgccaggctcctctgtccatgggattctccaggcaataacactggagtgggttgccatgccctcctccaggggatcttcccaactcaggggtcaaatccgagtctcttatatctcctgcactggcaggcaggttctttcccaccagtgccacgtgggaagcccttgggtgagtccatgtctgtccaaatgctctacccccagaaggtaccacaaacccaagcatcctcagtcacccttccagccttttctcccccactgtatctagggagttactgtacatctttctctttttgctttactgcatgctcctccgattttcattttctttcacctaatttataccaactaattttgcccagcttgacctgcgaacacagtggtgagtggtgtcttgggcatgtcaccagcagccagctcaagggctgggtggaagcaatgtatgatttgctttgtctttgagcccctgcagtaagaaacaaaacccagacacgctggcataagcttcctaaagcaggactgtggcattttccagaagcactgaatttacttccagcaggctctcactggctcctttcattgaaaaaaggatttgtctctacctcctcccagccctggaaacctgtgttcacagtgagctgctttcttgcacgtagtgcctggatcacgcaataaaacatggccttctggtttcttttctccaggtattgatcactgttctgaattttccattccagttttgtcctgctatgatttatttgtaaaacagggggcaggtcactgcttctcaagctgcccttcctttcttttgttgtttttcattttttcctacctactaagaagaggaaaatagtcattgaatcttaacatataagagaaataattgagacctgtatttctcaaactggacgatatgcatctctgggggataattgaccaggtatcaagatgtagttttttaaaaatacaaatcaagtttggaggagctgtctgcaggattgtttcacccaaagattcagcagagaatatttttatattataacaaactaagatttattatagagtggactgcaaaatccatttggatttttaggatggaaatgaaaactctgaacttaaggaccttcaggaagagagaggcacaccaagcatcggtacttctagctcccagggcactgagaactgacttagactccaggccagagatggaggctt

SEQ ID NO: 52438 - DNA, 1145 bp, Bovine  19866881042556
  misc_feature (1)..(1): n is a, c, g, or t
ngcagattctttaccatctgatcccaccagagaagcccatattaataggtgctagttgctatttattttgctttagggactttcccccgttagtctgcttctaataaaagagtcaactcttggaaagtatacccgtcaggttactgctctgtattcactgctagtatgttccgtttattctgttctcaaccagttgtcattctgcagaggagagacgaggaacccgaggaattggagtctagtggctgagctttgacgcggacgggtggttcctgagaagggtggtcagggaggctggtctgtctaggtgtggatccagaggaagcgatctttgagaaaaattgagaaactgggacttctctggtggtccagtggttaagactctgagcttccactgcaggaggcccgggtttgatccctggttggggaactaagaacctgcatgcattgcaatgcaaccaaaaaaaaagaaaatttagaaattaacaaagaaaagaagctatttccgatgttggctctttcctatggttttgaagaaggagtctgtctttttactggagtctttgtctgggccacttttgcatttattttttactgacgagaatattacttcctggtagacgtgtctaggaaacatttttaaatattcctgtgggacgctaagtgtctgatgagtttctcttcctgacgttgtaaagtaagtgctcagccttggagtctggacctcctgtgccttcctgaaaaacacttggatgtgtcaggctgcagagagatttgctacagatggataatcactctataagggctaggaatcttggtgtggaccctggggtcaactttgggggaataagaatacttggatacatatgcttctatttcatgttttgtagaaaatgaatatattggccagagtgaactttgtctcaataacaggtatccgttgagtacctactatgttccaaacatcaacatccaggaggcaaccattatactaaatttcctagacattctctcagattattctctacaggcaaagacacacacacacatgcattttgcaaaaggtacttttgtgtaccttgccttttcacttaacattgtatcttacaggtcattttgcatcagtgcattctttttaataacta

SEQ ID NO: 52439 - DNA, 828 bp, Bovine  19866881172810
  misc_feature (1)..(1): n is a, c, g, or t
nattgggttgctgtctcctactttcctacttatttagcttcttggatggtctccaggcctggctcgaaaagggccacagaggggttgaaatgggcctttgcctaggtcgattcagtggggccctgaggctacctagccagctgtatccatggcaaccatttgctcccagcaataaccccccatctctgccattaggcccactggacagggggctccgtttgggggtccaatggccaattgattgctcagctgctgcacactggtcaccagtcccatactgaggctcacagccaaaccccagcctcttggggttagggaggagtcgaaggcaactttttcttgaatgccttgactatcatctcttcttttaatcatgtcctaaatgcctgtcagctattctgaagacaaaattggggaaatggcttctattctgaagatgtaagatgggcttccttgctggctcagtggtaaagaatctgcctgccaatgtcagagatgcaggttccatccctgggtcgggaagatcccccggagaaggaaatggcaacccactccagtgttcttgcctgggaaaccccatgaacagaggagcctggcaggctacagtccatggggtcgcaaagggtcagatacgacttagcaaccgaacaacaataaagatgctcttaaaggcagagatttcagcttgtaccaaatttttgtatccaaccaggtgtgactcccagaactgctgtgcaataggattcagtgccctgaacctgactcaggaaacttggatgtgagtccaggaagcccccagacctgcgactaacttaaccctgctctacc

SEQ ID NO: 52440 - DNA, 1576 bp, Bovine  19866881189013
  misc_feature (1)..(1): n is a, c, g, or t
nataaccttaaggaagaaatctaatttttaagagtatctgctcactcatatataaaatgttgacagtaatacctaccttataagattttaggaagattttttcaagtagtctatatacatatatatgtcatttacatataaatgttctaatacatagcagatgtatttcttttctttattcttctagacacatttctggtaacaatcataataactaacgttcaactaacacttacttatacgtcaggcacttttcaaagggctttagataccctaatttatttatcctcacaatactcctcaagaggtacatgacattattgttcctatttttcagttaaacaaacagagactaaagcatttaaggccacaaagctactgagcagtgagtcagaatttaaacccaagcaatccagaacactgaaactccaataaaaaggctgaactacctaaagaattaggtctgagagtaatagaaatgttatttattcactctgattagttcccactacctcttccattttaaaataaaaagaaaattacagtttgtgcattaaggtagtttagtgccccaaaccaccatagaacacttaatgtcaaataactataaaggaccctgtcttctgctgggtttgtctactctggctacagatgaaaattacctatgaagcttaaaaaaaataacatagacgtccaaatctcacccctgacattttaagtaggaactccagggtagggctcagacacatgcattttcaaaacactccagatatgattttagcacacagctagagtgagaattagagttctgaacaccaaagataacgatggcaatgcaagccaagtagcatctggaaccaggataatttttcaagggaaaattaccaacgagaaggagcagtaaagaataggaactgctgacggaggacaataagaagagtgaataaggtggacagcagggtaagaagccagacagggaggcaggttcactttcagatgccaagaaggcgagttacacacgaggaaaagcaaacagaaatgcaatctctacagccacaacagcagctcagcaacatgatctgaggacttacatgtgaccagggaaaaggcccatttttttggtcattgcttatccttgcaaatgacacaatgctttcctcatcattgttgctgcttgtttttcacaatttgccactactgttagttttgttattaactgcaattcagtgactttgtcccaattttgctgataaaacatctgaaatttggcttaactttttcaccataagatcagaaataaaattcattataacaactccaacaaagattaatgtagtcattatataaaacatgcatggttagaaagcacacaaagtaatcagcgaatcattttcacaacagtagaccacaaccaactaaaatcaagcatagcaccagaagattattaatataaaactctaacataggtttcataggattaagacattgctgctgctgctgctgctgctaagtcagcatcaaattgaggcttccaatttgtggtattacagctgaactaatcaagagggacacaagt

SEQ ID NO: 52441 - DNA, 734 bp, Bovine  19866881231574
  misc_feature (1)..(1): n is a, c, g, or t
ntggtgtaatttaaagtttggcattggctcaggctcataagaacgctgtccaactggctctgaacactactgatgctgaaattccatggtatttaatttttatcagcactcagatctgaaaagatgatagctctttgttaacagggacagaagtcaggacaagagaaggatcccctaaaagagacactgactgattagtaaatgtctaaggtgatagaggcccatccccgctactattctaacaaccacctaacaatttctgattctttttttcaaatttggaaacattgaaaatcactcgctttgcctgttttctcctaaataatacaagatatacacaattaactgcaatgttttcctacaaatagacaaccaaatgggagattctgagatattaaaaaataaaataattctggaaaagtagatctttctacagtttcatttgtctcatgaaaatttggtgttttttcacagagacatgggtccatttaatcatgctaaagggtgacatggagatccattttcttgacaggacggttgatcaccctatcacagtaagaaaattaataccttcaactagccctgtgtggaaaacagaagctacatgcaatggtaaaggacatcaatgttctatatttgaagctgcaaacagaatacttgttctgtgtgaaaataatgtttcctcattattgggggctttaaacaaaatatgagcctttattttattaaaacaa

SEQ ID NO: 52442 - DNA, 2579 bp, Bovine  19866881239174
  misc_feature (1)..(1): n is a, c, g, or t
ncttatgggatattttcaaagcacattatatgataaatttatacttttaagttttaaaatcaataacagatcaaaatcttcacattcaaaaataaagcatacagagttttaagatatataaacataatagctgacaacagtacagtgcttctgaaaactgttctagcttcgcttttgaatttttcattctttgttaattaccactggatctacttaggcttatttggaaaaaggtataactataaaatattatagagtatactaatatatactaacaattcatcctatttactctttaagcgtaaatgtaaaaaaaagaaagacatacctataaggtacctataatcactgaaatctttttttgtgaaaaagtattgaaagaattcaacagcataattgttagtgtcaggcaagagtcacattccactcaaagctattaagcatgcattccttatcctaattaaatgttcaaaatggctagatttgattgtcataacagagacaaatcaatattatgatacttgtttttttaaaaatatttttcaaaacccctaaacaccctgctctttgttacagagacaaacacagaagatccctaggttcttgaaatatgctaacgacagtcctgttcagaaatgaaaggcaatactgtattaaagaaaaaaatgaaaccacaaataaataacagaattatcgcgggccccactgtatcggagacgctcggtactggactgctcggctgctggaggagctccagagagttaacctggtgtgatagaagacttgacaaagcaattctgactgtgtagcaatgctaagttgcggactaatacgagaacaggaggtccaatcgctgtctttcaccaagcgcaatttacacagggctttatcaatagccttagtgctgaatacagaacacactctatttggctttcagtcaattaagctttaagctgtcagcaaacaagacttttaagttaattttgaatcaccacgaatcaagttgaaggttgtgaaagggcggctcacacgctggcatgaaaaaaggcagtttaattgcctctgaatagctattatatgctgcaattggcctattgaatcttagatgatctatttatttatcaaagtgcaaccatcaaagattagtaaaagactgaataatctgaattgtacattccctgttttgcataagaagggatagtctgcaaaggtctgaagcaatcatatttttaaagcatattttattttttaatgtaaaaattctgtgaaatggaaatcagcaatacaacctaacatgaaaatggaatcattgtatttctaggaaaataaagatataccattttaaaaggtatacttgctaccatgaaatattttcatgtgttatttgatatcaactgtactatgtagaatataaatactcctttataaatgttcacattataaatgttcatcaaaaaagagacagaaaaagaattataaaattgaattaagtcaaaggtttaaaacatcttttttagaattccttaaactccatcattaattgtgtgaaggagaacaccaaaacatatcattttaataccaaggatttctcaagaagatggtataatcaaattaaaaggattattatattcctaataccgcataacatctatttttttaaaaaagactgtggctgaccacaatcctaatcagttttttcctgcaattattttttttcaattgcatgtattctgtttattattatagggttactcatgagtgctggatgtgtatattgatttttttattagaaaagagcactgaagcattagggcgacggggggtgggggggatgctcagattttataaacagatgtaaacacagatcaactttagggatgtaaaatggaaccattttgctttggctgaaatgtgctgtagttttttgacatgttagaccctcaatagcaaacgtattcaaacatacactcgtggttgatttacatagggaaatcatatggagattaatggttataaattattcacggtttataagaatttggatagaatacaggctaattttagtattccctcaaggacagtcacatcttcttggaagactggacccatcactctccatttccagtcagcagaggtgatggttgggaagcagtactgactaccatcattccaggaactaccacactttcaggggctgaaattcaatgaaagagtgttaaaaccctttctccttctctcttctcccatccattattataaaatactcttgtttctttgcctttagattcgcaaagtataatcatttactagttacgccttacaaaaaaatcgatgctactaaaaccataaacataaagatgctaaaggagagaatgcccgacgtgatttctaagggaaacaggaggaagaaacagattaagataaaacatagtagaatccactcgaaaagtggacattcttgtcctgtcatcattaagaattattaacaaaggactttgtgttcaatggtcccaaaggtgcattgtgcatctcctgctaaatttttgggattttatatatatatatatggatatgggggg

SEQ ID NO: 52443 - DNA, 1857 bp, Bovine  19866881273049
  misc_feature (1)..(1): n is a, c, g, or t
naactcataacatggcagcctcaaagcaacagagactgcccaagacagaaccccccgtcctccttgctgtaattttggaaatgtcatcccatcaacacatgccatgttgtgttagtcactcagtcgtgtctgactctttgcaagcccaccaggttcctctgtccatggaattctccaggcaagactccaggagtgggtagttattcccttctccagggggtctttcctggcgtctccttggatcaaacccaggtctcctgcatcgcaggcagattctttaccatctgagtccccagggaagtcctatgctggcttggctaggctcagctcaccagggcaggcgtcacttgcatagggtctgcaggaagaaattaaaggaggaaaagggggaaattgtatgtatgaggaggagtgcagaagagagaagattggaaagaaagaaaactggaagattttaggctatggttggaatttcttggcttcttcatggggagagagggaaaccattttctctaacgagtgcaattttaaaaagttttttatttacttactacttggctgtgctgggtcttcactgcggcacaggcttctctttagttgcagggcacgagcttctcactgcggcggcttctcctgttgtggagcgtgggctccaggacttgaaggcatctgtaggtggcaagtgggctcagcagctgcagctccacgtctgggacgtggaggctttgttgctctgccgcacatgggatcttcccagatcagggactgaacacccatctcctgcgttggcaggcagagtctttaccgctgagccgctagggaagcccatgagtgcaaattatacaattaatgcacaaatctaggggctgctgcgggaaatgagatctgcaaagcaaggccaggttggcgtcttgagtgatgggtgtgaacctgtgtgatgaagcagaatatcttctctacactgaaatatctgaagaataaatcaggactagaatctccaaattctgatggtacattaggagcaacgtactttatcttttcttttttttaaattttatttggccacacagggtcttaagtgtagcctgtgggatctatttcccctgaccaggaacgaacccagtccccctgcactgggattgcagccttagccactggacgaccaggggaagtcccacagtttactttatcttgattcatctctttggagataagaattagggatttggggctgaatgcaaaagtctatgatccttaggagaagttgttcatgaagatgaaaggagagacccagagagaggctttggaaagtggattcctatacctgaagggatttataagaagttttgtactgcctcatggaggaaaaggctcaagtaggtaaagagatatgacagaaaacaagtgccctttaaataattggctcaggggactcaggaaaaacgctggaacgtagaaaagacaggaagcatcgcaagatggagctgcattctgggatctaaaaaggggcaggtgggagcagatggctagggagaggagagggagaccctaggagggaagaacgaattacgaggaacaaagaaacacgcacagaaatgctaagactggcttttgtgaaggtttaccagaagtcgtcctcatttacattacagaaaagaaaaacccgggaaaatacccttccagagggtccgagagggcaagcagataacaggaggattcaaaagagccgaggttttgatgggtagttttacttctgtctttaacaaaagatgctccatttggatgtaaaatctgtgggctatagtcagaaagcgaccaccagacattttgtctcatgtggaacccgacactcctggt

SEQ ID NO: 52444 - DNA, 2073 bp, Bovine  19866881430244
  misc_feature (1)..(1): n is a, c, g, or t
ntctttacatcttgtgtctctgctgacagcctatttttattaaaatatttttctccgtcagaaaaagaaattggggcttccctgatagttcaggttggtaaagaatcctcctgcgatgcaggatgcctcggttccattcctgggtcaggaagatcccctggagaagggataggctacccactccagggcttcccttgtggctcagctggtaaagaatccacctgcgatgcgagagacctgggtttgatccctgggttgggaagatcccctgcagaagggaaaggctacccactccagtattctggcctggagaattccatggcctgtacagtccatggggttgcaaagtcgtacacggctgagtgactttcacttccacgacgaaattgatattattagtctgttttctcctttgtgaaacttcctaagactcccttatgattattgttcttactctgcctcttctttgtgaactttttaagactcccatatacagagttaagcactgcatttgctgcccaaccctgcccccagtatgtaattctcctccagcatccaacatagcactcacccctggagttatttatcttttaactacctgccctattagaccctgtgctccttgaagacaacatgtcattcatcattgtattcccagggcctagttagcacctgatacacagtaggtgttcaataaatggtaccaaattaataaaatacaattgctttcagccaaatcagaaaaaaaattaacattcagcttatatatgtttctttagtattcaggcagaaaccttcctctgcagtgattaaacaactgcaaacaaacatgggctggcagaaatgaacgggacttaagcaacggaggatgccggaggaggcagactttcgggaagggcagagataggccctttaaacgctgaatgatttcctcgccttagctccaggaggcttattttcacagcagacactggtgctataaggaacgctttgctaaccttcaataggataattcctaataaaactgcttcccttgcttccgctaagtgacagataaatgtccattttttgcttagacgtttccttagagaacagttgactgggaacgtaacagctacatgtatttttaacatcaattaattatacaaaaaagatttaatatatataattttcaataaaaagaacataaaccagaattaaatatggcatgattttacaaaattactgtattctaacatgcctgatctatatcacaagaaaatatgcatctgtacaacatgcatattagggaaactttttccatgtgttcgtgatttaacctctggtggcatatatcagaaacagcaaaatgaagagactaggatataaaatctattgtaaatacaagggaaaatatgggaggatgcagagtacaattaactcagcaaacatttgctgaaatgccaggaaatacagaaggcgtaaggacgcactgcgtaatgccactgcaaactccaggctttccagcgcagcacgctcactgaactgaacagacctgcagtaaggacagcactgcgcttaccttaaaaagaacaatgttacataacgatgcctaactggttgttctgttttctacaaaaacaactgctaaaacaacttcaacagacattaacactatttctgctgaacacatggaagttaaaaaaaatttttaacaaaactgtatctcaagctataaacattttaagaaccaaaaactactttaaaagaaaaataaacgtgattacattttgacattaaaaaaaaatcttcatttcctactgataaatgctatacacagacgagggcctcccaggggcaccaaggtaaagcacctgcctgccagagcaggagacatgagggagggggtccgaagatccccttggaggtggccatggcaacccactccaggatccctgcctggagaagcccacggacagaggagcctggtgggctatggtccacagggttttcgaagagctggacacgactgaagcaacagcagggcatgcacacacacacacacgattagaattatatgtcacctatgcaaca

SEQ ID NO: 52445 - DNA, 2396 bp, Bovine  19866881475810
  misc_feature (1)..(1): n is a, c, g, or t
ngaagaactgatgcttaaactccatattttggcccctcatgtgaagaactgactcattggaaaagaccttgatgctgggaaaaattgaaggcaggagaaggggatgacagaggatgagatggttggatggcatcaacaactcgatgggcatgagtctgagcaggctccgggagctggtgatggatagggaggcctggcgtgctgctctccatggggtcgcagagagagttggacacaaccgagtgactgaactgaactgatatacagcaggcactcaggaaatgttcattcaatgaatgaatgaaagaatggctacctcacaaaaacatgcaaagtgttatggggtagaagaataggtttttgaaaaaccagtcttatacctagtaatcttaggctcacagaatttaagtaatgaacctagtaactgggtctcggtctaagctttctggctccttgtttggtgatcttccgttttgctttcttcctgaaatttgcccgttagcctgtgttgtgtgagagacgatccacctgctgcattttgtattcacagcactggcgacgagtgacaaacggcgggaagtgtacaagcgcgtgtaggctgttcccttctttaacctctgtctactgcagaggctgtaactccagaggcctgatacacatgtctacaggtaataaatctgtgtgagttatagctgtatccttgtagatttacaatgataagttttaattcatgtctggcaacatatttacataaattacagcaatagagtaatgatgccatatgctggaatgttcacccagagaaattcaagaggcttacggcagctggctttcttatggccacaaagggccgccctcatatatatgagaaagaagcattgaatttggtattgtgggcattatacagatgttttcttactcttgacatttgtctgaaagtaaactatgcttccagtgcctctcactgcattaatgaatagtctcgattaagatgtaactttagggaagagcagaattacttaaacagtcgaaaccttcagaggagtaagtgcacattacttctaagggtccactctgtcttcgagtgcatctgcttaacagctctgaagcttaacagccctgatgcttgagcacaagctcaaccaggctgggagggaccagggacagtgagagtaaccagggcaggcctctccctctcgggcgatgaagggaaggggcccttggcctcggacggaacatggcaagggaccacagccggatgtcatgagccttgcccagtacttcagcattccagttcactgtttctgttccaagagaagggaaagtggattcttctaaagttgtgttactattagtctcctttgctgggacagatttcccattaagagttttgttcttacatcaaaaagactctttcaaattcagaaactcacaattggatattaaggatgaccatgaatcaacccaccactaccatttactgagactgtaatagtcatgaaactaaatgtcttatgttagtttaattaatctttataagggcctaaaattaggcccataatttccaggcgtcaaagatagtaggtggaagggcaggccccaaacccagatctcgtcaaccttccttcctgtttatcacatcttacatcattccaagggccagatcaccaaactcccttgggaaggaaatgctggttgccttcctcaagccaaggtcctgtgttcaataaaggtgacagccttcatctcgggagtgaacttccactagtccatcataatttcatttctttgccagcaacaggtttagggttagggttagtggatgatatggggtatgtgatgcaatcttggtcaactgagacgtgagaacagactttctcagatggcctttctgcctctggatggtatcctctgcataggttgctggtgctgtggccacatcttgtaccctgaagtggtccagcccaagagacggacgctctgaacatggtgaagaagggagggtccttcacgacaccgctgactgctcacttcaccagccgcctctagatgtttcgttacatgagataatagatcctttaattgaaagtctctttcgtgccttctattactttgcaaataaaatatcctaagtatgaaatccttcccaaagctccatagtccctttatttaaaaactcgcctctatgcccaaacgggcttccctggcggctcagacagtgaagaacacagctgcagtgtgggagacccaggttcagtccctgggtggggaagatcccctggagaagggaatggccacccacttcagtattcttgcctggagaattccacggacagaggagcctggcgggctacagtccatggggtcacaaagcgtcagacagacgagcaaatata

SEQ ID NO: 52446 - DNA, 963 bp, Bovine  19866881531472
  misc_feature (1)..(1): n is a, c, g, or t
ntaaggatttggtttagaaggtttatatgtctgccggaaaaatatggggagagatttcatgcttcaaatgtggtgagagactatattctttcatggcttatccatccatccatccttccatcttttccctatttttccacccacctccatccattcatctgtactgcctatttatctacccatctaatctatctgatctgtctctatcaactatctatcacctatctgtgtatctatctagccatcatttttgcaggttcataatagcgatgttgaggccaccaatctggatgctccctggtatctcaccgccacagccctgtttatggccatcgtaaaatgtctgtggagagtccaacggctgatttcccagggtctttttctcctgtctgagggatcaggaaaaaaaatctatcagctggagaaattaagccatttttcttcgggggagagaaatggaggagccagcgctccacattaaaatgctgcagtggattccagatgagtgaaaaattggtctgcatagtgaggagtcttgaggagcaatctggagggtttgtggctggctcctggccaaggcgcgtggggtgtgttgggcgggggacaggacatcaaggcgggatgagtcaggcaagtgggtctctgggactttcactcatggggagccggcgccaaggcgtcaccctccttagtctccctgccatttatttttccaaaaagctggttgtccacgtgcttttatcagagaggggcaatttctgggctcctcttccagttatctctctttacgccctccagatgcctgaccacaacctcactgcccctcacaactcacacaggccaagtctgcaggaaagaggggttcagccttcggagggggtggggcctgtcatagaggaaggacattagcccagcttcagacaattaacccaaatagatccaggtataatgctagaccggccg

SEQ ID NO: 52447 - DNA, 581 bp, Bovine  19866881557217
  misc_feature (1)..(1): n is a, c, g, or t
nttagtttgctttcccaagagctttctgttttaataaaaggatttcaagctaaaggagtggggattgtgaacgtgtgaaaggagaagaaagcatacaacaaatgaggaatggccacatagggctgctgagcagatttgctgtccgaagggatcaaaggttacggagccagctggtggacagcccacacctgccgtaaacgtgctcgtggtgaaattgcttccaccattgtcgttaatgtgtgaggaatgatggtcgtggcaagttacagcggaaagcagtcttttccaaacctaaaacctctttccagcatagaaatctatttaatcactaaagtaggtaaaatgttaagcaatacatctggtaaacacaccacacatcaaatattttcttataattgaatcagccgagcgttcaaacatatgcaataatggcctaagtgattttggcagcttctaagttataactgagctgggtcataatttggagttatgatagctaaagagtccctctctgttagatatttgtctgaaactcaggaactgcttttagctgaagagcagaaggttacaccgcgctaatg

SEQ ID NO: 52448 - DNA, 2215 bp, Bovine  19866880143722
  misc_feature (1)..(1): n is a, c, g, or t
ntgaaggagacacagattcctctgtgtgagagctgttgcttttatttgataaggcctaaaatagtgggtgtttattggaatgaatgatgctaaagctgaaactccagtactttggccacctcatgtgaagagctgactcattggaaaagaccctgatgctgggagggattgggggcaagaggagaaggggacgacagaggatgagatggctggatggcatcactgactccatggacgtgagtttgagtgaactctgggagttggtgatggacagggaggcctggcgtgctgtgattcatggagtcggaaagagccggacacgactgagcgactgaactgaactgaactgaactgaaaatagtgggtaggtaatgtttgctgaaatcaagttcactgctccaaatatgtgtcctgagcagcctgtcctcatgctctcatagccctgagcacacgacactgtcttgctgctgttttccccaccagatgatgtaccgttaccgaggtagggaatatacattatccatttttgtgtttttgtatttctcagggttgcctgtcattataataggtttctggtagctgtttgttgaatgggattaaggaataaataaaggagtagagactctaattcaaatctagttgatgttttgtctgtttaatcagattccttatcccattttgagatggtaccatttgataaaaagtgtactgagagtgggtcacatatttgttgcctgaatgggttaatcttaatcctactcttgtgttggattagaaaagctgggttagatacagaataaatagcttctgtgaaatctttcctaagccttacttaattcatccattatccttttctcggcataatgattattttgatgtctaggacctgttttcttctggtcttctgtgttttcagtaaaaataaaaatttaattgatattttggctattcacctttttctaaagatggttgagaaaactctttagcaaagctaacaacctatgttgtgtcagttgctcagtcgtgtctgactctttgcaaccccatggactgtagcccaccaggctcctccatccatgggattttccaggcaagaatattggagtgggttgccatttccttctcctcttatattgaatcagcagtaattttattttatggtgaatttacttgtagagtttagttcgatcctaatgctgtccatcagtggctagttttaggtctagatggggttatagttttgagtagaatgtgtgtttggatctctgtttctagcagcccgggagactttcccaggtgtgtacttcttcttcagccaagacttaaccttagtaggcaaatggaggcggcttcctgttcttagtgctggcccaggtgctcctccatgtgtggccccctttgagtcctggtgtccccacacttcagaatcttggagaagcaatctaagaactgctaggcagtacttgcactgtctcttgagagatgagtaacatgataaattattttaaaccagaaatgacagaattgttttggaaggtctgtgcattcacgtctgtgttggatttataagttcttgcaaaaagtgtatttagtagtataaaggggaataatgattcataagctttttcaaattcagatctacaattcatttatacttaattatgtcctcattaatatcattttgaatggttttatgtggttttctaggaacttctcagatcagaagtttagggaaagagtagtttcattgcagttggggaagcatttttctaagagtgtctgtgtgtattgagttgcatacattgtgtgaaatgtaaagccttagcaggtggaaactgatgattatttaatgaggttatttttgtctgagattttctcaggtcaaaagaccctgctggactactgagaacaccagcttctttcttattctgttgaggtctctgtaaaaacacccacagccactttgggacttatttatttctactttcctgaaataattcatagttccaggatcagaagtctattgaaagaatacaaatactgaacctttagggataggtgggttagcccagcatttgggattgttttgtcagttggccttaaatatcttctgtcacattttcccctctgtagttttttttttttttttttttaaattttatttttaaactttacataattggattaagttttgccaaatatcaaaatgaatccg

SEQ ID NO: 52449 - DNA, 1223 bp, Bovine  19866880352155
  misc_feature (1)..(1): n is a, c, g, or t
nctgatgactcatattggagactttaagctttcaattcatattttttttcactctaccaggatttcctccacaaagtagaagcctcaatagactgatcatgattacctgatatcaggaaacttaacctctacacactacaaggaaaacaagtaaaaaacaaaaaattcaaatattttttaaaatctacatttattatataattttaactcatttaacacatatctgagtactacgaatattagtgtattctcttgatgattaaactgacagtatgaatttgcctttcatatctaacatacaccatatgtacctaaaagctggtcactaaatatttggtgaaaaaaatgcaaacaaaccactagaagttgcactagcagatgaaatactgaatttggagccaagagagctgatttcaagtcccagccctactattcactagctgtataatcttgaataatgagtcattttatctctacatattgtattttcttatttataaattacagttggaattatatgatgctttattccttcaggatgctaaattctagtatcaatatactagtcactgttcacaatataaggatgatcaagaggtgtagaaatgggggccactgttggtcacactctgctatattccatagcgcttctcttttttgtcccctccctgtgtctgcttctatcctccttaggccttacctgtggcaacaagccccaggagttcctgtcactgagggaaaacagtacattcagccatgcagatgcagacaggcaggataagaatcagagttcaactgctcctcctgcacaatgtggtacaaaggagagcttattccaggaaaaagggtatctctgagtcacagagtatctaaagaccctacactagattcaaaaaggaaaaaaaaaaaaaaaagactggacaatatcctgcagcctaagatcttagaaatataacaggtataaccacatatgctcaacagtttgacaaatgaggttcaccaaaaattaactggaaagaccccaagctaacatgccttgcacggaaagcttccagcaaactgatataagtttaagtaatataattcttaagtataagaatttatggagttcattaaactgtcaactctgtccccagaaaagaagaaaaaaaaaaagaccaaagttttaattaaaaagaaaatgaaaactcataaaagtggtactgatactactgaaaattata

SEQ ID NO: 52450 - DNA, 2722 bp, Bovine  19866880401324
  misc_feature (1)..(1): n is a, c, g, or t
ntttactgatgctctgagcatgtgttgtgaatggctgggtgtttaattgcacttgaaagctaggcttggtagggggaatggaaagagaattcagaccctcttgggagtaggcaccagcaagtaaattggtcagagcagtggcactgtagtgaagttcagtgggaacagggatgcttgtatattaagaaaggcctatttttcagtcatagtaaagtctaagtataaactatttactcatgaaataagattagtatagtgattttatgatttaaaatttgcttctcaagttacgtttgctgaagggctagcattttaatctccaatttatcatagaccaataatgttataaaatatatatatattttttattaaagaaaattattaaaattatttttaaaaatgacatgagcctctctttgttttcttagtttttttcttttttaccttttttgctgccttctgtttttctctctgggttaaatgcatatttttctcttttattatttggtcataaagcctccttctgtattcttctgtattcttttttttccctccccatctcttctgtttgtatggccatagtagaatacagtgttgtggggtgtgtgtatgtaatgaataatgtttgtcatttagaaaattatgtattttctctttaaccctcctatggcttttggttatttttgatgaataggatttggccctgtaaggaataccactaactacagttgggatatgtgggttccttggcccttgttggtattggttccttgttcagcactttaaacaaggagagattaagaggaagaaatgattggtaaatgggcttttggtgaaacattgactatactgcggaatatgtaggaagatgagtcttcttgagagcagataataatacttcttgcttgtaactgcattctctgcaacatggtttatatgatggacactgaacgcttgtttctagtgtcaggtcattttctttcaatgagcctctccttggcattcactgatgcagtttcatacttggtatcaaaagaaaacaatgatgtagctcttcctaaacaagacataattagaaacacctatgatgaatttttaataaactgaattttaaaattttattatttttcaaactgggagtgttttgctatggaataaaaggtatatttctattaagcaagaagcagaccatgttaatctctggacattttctccccaagaacactgttgctgtttttggtttgttttcctttcttttcttcttttagcttgcctgctggctgttaagactagaggtggcagacggtcctgatatactgttgggcagagagtctgctggtttttatttggcatagtaaatgattgaaaacagagtgatattttgttacagttctaataaagccaatacagtgctgattcttacagtgcattaattttaagctccagaaacaagtgccttagtatactgggtactgtaaatatccctggaatatatgaagaaaatcccaagcattaggcaaacatgatagaaatcacatattgcaacttttctgaaagcacataaaggatggggctcgtattttcagggataatctctcgataaaattttcttactcttgatctgttccctccccatccctcatattggtggaataagcaaatcaattaacttctcagtggcaatcactagagagcctgcctcctactaataattcctaccttagtttgttttctaaattaaaatggcatattcactattatttttttgtgtatgatcacaggttagaataattcttccccctgcacacattttcatatctgctagtttttgtcatgggaagcaacagagcagaggaatgctttcttccttgctgtgatacctaattttggaagatgtactaattggacaatgtttgatgtaggagatggttgcatagtccaaaaacacttaataagaatttgctgaataacattctctcttgtggattgggtttttttgtttgtttgttttgcatcttttgatctatctggactatttttcctatcttttgacattccataaagtagaactttacaaatcaaacaataggtaactttttattagggtctttgtttctactccttacccatatcttctcagacttaattttttttttaaagaaatctgaaaagctatcttttagtgaatcttattttctacttactatttttcattaaaggtttttaggttgactcaatttcaagcatacttagtaatacatgggttaatagctgttaaacctttttatttaataacttgaacaaagtagtggtgttcagtgagtatttttaaagataataatctatttctaacttgcctttccacatcaaggagggagcactgatattttattgcccaagaatattccatcagtgtcctggagcctgcctgtctatcttgtttccagcctgtctggcagatttataatggatttatagttacaggattagatctggtatactgggccttccttcctcttttccttttcccaccttccattaactagtgctgttctgtgatagaaattacagactactttggcttttcgtattcatctatattttgaaaagagaaaaaattgtttctaggtttcaagatccatgaagtctgagattctactctacttgccatgagttagcctgccacatttttatatatgtgctaggtaactcaggcacagca

SEQ ID NO: 52451 - DNA, 970 bp, Bovine  19866880512167
  misc_feature (1)..(1): n is a, c, g, or t
naattctgacatctgcataatcatatatagtttacaaagaacatttctttatgctgactcaattctcaaacaaatctatttgatgggcctttatttctattttatagacaaagtaagtaagatccagaaatcttaaatatcttggcctaaaaggataaactgtgcaaccagatacagtatattttacttataccatcatctgggtttttgtaaaataaatgaatccaatggtttctttggttaatatgactacaaggctaagaggatggaggcatataaattaaatatgtgtaagtattacaagataattgaaaccatacatggttctgcagatgaagtgaaactgaaagttgctcagtcatgtccgactctgtgaccccatggactacacagttcatggaattctccaggccagaatactggagtgggtagccgtttccttctccaggggatcttcccaacacaggaattgaactagggtctcctgcattgcaggcagattctttaccaactgagctatcagggaagcccatcagtaaatttatgttagaatttgatagtattattgttaccccttatttgaatttaatttgacattccataaaaacatgatttttacagttgggcttataatataaagggcttggtatctttattttcattctaatcattatccttccactgagacgatttgttcatgaagtgactgacagggctattaaaatccatgagtcatctaatcttaaaaataagatgtataagcattaaaaacactatctccaacaaagcaatatccatttcctctgactgaaaaggttataaaaaccaagagtaattcagtagctagaaagctggggggccgaagcagaacattaatatatttctaaccagtgtctttagcttacaacctgactttcagattatttcagatggagattttatcctttgcatcaagagaattcacaagtga

SEQ ID NO: 52452 - DNA, 1253 bp, Bovine  19866880600144
  misc_feature (1)..(1): n is a, c, g, or t
nccaggactatcaatcatcatgacttatgctccctctggcttattccacctatagttttcagcagagttgcccaggtgtcattcactttcctgaactgcaaaaggaaaaaaaaaaaattatcagggataaaatcttcaaaaagatcttgtttcaacccagtaaaacatcattgccctctgttctttttctttgtagaaatgctcatcaaaattatttaaagaagataacgataaccctgtatgagagacagcaaaagagacacagacgtattgaacagtcttctggtgggagagggcgagggcgggatgatatgggagaatgacattgaaacatgtatattatcatatgtgaaacaaatcgccagtccaggtttgatgcatgatacaggatgctcagcgctggtgcactaggatgacctgaagggataggatggggaggcagatgggagggggttcaggatagggaacacatggacactcatggcagattcaagtcaatgtatgcaaaaccaatacaatattgtaaagtaaaataaataaattaattaaactaaattaaattaaaataaaaaaaagacactaaaaaaaatcatttaaagaaagagaaactttagcaccacatagaaagtatcctatccaaactcaaagtaggtgcctttgtttacacctgttttatatttaaccaaggtatctcagttaactttcaggataaaatttccaaagtaattatttctattttgtagactaaaaactgaggctctggatgattaagcaatttccctcaagatcactcatttagtaactgagtctggttttgaattaaaatttgctcctaactatcaatacacagagcatatgctcattaactgtttactgtgctggtggacaagagatgctatttctctgtgcactagcacataggactggaatcaaatggaatgacccacctttttgagctctgttctgttctctcacgagaacctcatggccttcagaccttgctgtaagagtcagtggatatggcagttctccccttccaaagacaagtaaatagaattatgcaaatcaaattggtaaagtcactgcctctgaaacacacccaaaagccacaaccacccaccaaattgcataaaacagagctgtggctctgagaatacacagtagctccaaatgcactgaaatagaatgcaccagtatagctgttaggatgtcctactgggggaggaaacaagcagttactccctcaaggctga

SEQ ID NO: 52453 - DNA, 984 bp, Bovine  19866880651289
  misc_feature (1)..(1): n is a, c, g, or t
naattaaatgattgccgaattacagagttagcaatattagaaaatctctgttaggtacagatcaataatcatttcgtgacgctcacatgaaaaataaaatatatgaacaaatgtcaaatatcctggttagtaacatattttacaatgcagaagtaaactgacatctactaaataaagaatgactcctggatttaatatgaggttgtcaaatttctcgaactatagtcaaaatattttatttcctttagacagctgaagtgaaactacagctacaaatatttttctaggcctaatttaaagacagagcacctaatttacttaaaaactaatagcaccctgtcacgtagtcctaagtaacatttctaaaagagcagtaattttctaaaaccacagtatttttcttattcatattcaaagatgatgattaattgcatacaggttaaaatttcaatgaagggacaatacaaagatgtagcataaaagtccttaaagcagtctactttttaagttcagcggcactataggctgctttgacactttccctaactttcataagtactattattaacaggttgttatattcattaactcagaatcaaggtacaaacctactttggggaactggcaaactattataactgtagatttctccatctttcagttctactaagaaattatgcttttttcagaatatttaaaattaatttgaaggtcagttacaatcttgcaagaaagttaatatcttaccaaaaacaaagaaatgaaaataaagatttaaattgcaatacaagtagtctttcatttgcatgtcctatctgacagaatacattattaaagaacatgcattggaaaaaaagctttttatttcaaagcttatagaatgaatttaagatttaacctttatgttgttacctatactaaaatcactataaatatgacagttcaaaagtcattttattcaagttttatccaactcattgttta

SEQ ID NO: 52454 - DNA, 2580 bp, Bovine  19866880900630
  misc_feature (1)..(1): n is a, c, g, or t
nctgtttgtcctcaggaatatgattaactcagggaacttctatttcctcatctatataatccaaacattgacatctaccactcaaggttgttgtgagtattaaatgagaaaagcatgtgaagatgtatacaaaaatgcctatgatcatcattaacaacatgtgcacactggggcaagacattctgacaatttggtggtcttacccttcttaagtattcttctgttttctccaaacccgattctaacataggcaaaaatgtgaaatagatttaaatttccttaggaaacaatgtattcattaggaaaatagaaaagattacacacaaaggaatataagtgaaactacaaaaatcactgaggttataaaaatatcagtgttagaaccacagtatctaaggcaggtagttcaaatttaaaactgatggctgattcatgttgatgtatggaagaaatgaactcaatattgtaaagaaattatccttcaattaaaaacacataaatttttaaaaagactaccttgtaaaccaaatagtaaatagtttggtaaatggaatattattcaacaatgtaaaggactgaatacgttacaacatggatgagtctcaaatgtgacttgctaagcaaaagaggacaggcccaaaggctatatactgaatgattcaacttatgtgaaattctggaaaagtaaaaaccaatagggatagaaaacacatcagtgattgccaggagctaaggcccaggggaggcaataggaatgagtctttttttgagatgctgaaactatcttgtatattcaactgtggtggatgcacagctatgtacttgtcaaaaatccatagaagtaaatactgcaaatagtgaattttactgtgagttaagaaacaaaggaccctccaaagattgttttagggacatttaaaagtgctcacaatgaattaataaagtataaagaccatgctgataaaaataattatattgatgaagctttgggtggtgggactggattacaaggttttccccctttctaccaataaaagtaaaggcatcttacaataagcaatacattttttttaaatcaaagagatggaatattgtttttaaaagattctagaagaactctgaatgaacactctaaaaacagattaagcgtggtcactggattagaagtttttaacctgcagttcctagaagccacaaaaccactgaaatagtatgaaaaatattttctgtatgtgcatatatgcatttggagaggaggaaaaccataattttcaacagtccttgagccaccagccagtagtcaacttgcctggaacaactgtacttcttggggctaaactgataataagaacttattatagtaagacaataagacagttatgagctttgagatggttgttaaaaaaaaaaaagccttgaacatgatttaggtttcaactacccagtaataccagtaagacagttctgagctttgagatggttgttaataaaaagccttcatgatttaggtttcaactacccagtaatacctgccagtctctctcttaagaaatgctctaggctgttgagaaacacaaaaatataaaacaaaagtcataaattcaacattttaagggcaagaattcataacattacaataactcaaaaaacagccacagaagatggaatcatacacccttctgccacagggctatgttttccacctctggccaaaactgtcacagccaagaaagaaggaaaaaataaaaaaacaacccatgctggagttaacggagcaaaaaaacactgacaagatgggatttcagagctatgtatgttgattttactacactcttcatggtttcttccatcagttcattatcacttctccaagaggaaattcaagtccagtctgagcttctcagtgacctactggaaaactactctctgcaaggactaaaactggcccacatttggtggaaaatgaatagcaatttcaaaccagaaatgaatggaatgaattcaggttctgacaaacacatactaataaatccacaagaatatgaaaatccattaaccaagtgcatacaaaaaggcaaaaatgctaagtagtggggaaaacatcccttacaagtgtgaaactagaaatcatgatggcatatcttccaaggaaatatgttactttgatatcaacaaatgagatgtcactgattatttccaacccaaaccattttttccttttagcagtttgtagagaagggtctcagccacttctatcttgctctgatagtcagtctcctgaaaacagcaggatcacttgcaatgggctagtttttttaaaaactgtctattaaaaaaagaatacaacaataaaaatttttttctctctctcccattatacctcccaatattatagcagcaatgactcaacgggagaagagacacaaaaagaggattcttaaaattaataagtacttaaacagatgattctacaacaagttaattcttgttaccaaacaacccagcaattccaactctaggtatataggaagagacgaaatttatgttaatacaagcactttcatagaatgttcatagcag

SEQ ID NO: 52455 - DNA, 979 bp, Bovine  19866880908895
  misc_feature (1)..(1): n is a, c, g, or t
ntgcaagaaaagcaagacagataccctcatggaaagaccacagagatccagcccactttttggtcagagagagtgaagctgacacttacactatcactatttccaggataaactaatttttagtagtaatgactatcatttttataagcaactgatgtatttgtaagatcttaatttggtggaaaagggagacagtctatgctcaatagaaaataaaagtggacagataacaagaagttatcagacaagattcctaaatattggatgcaaattgtaagaatttgggatgaaaaatcatacatctgcatatatgctcagatatataagatttatacataaagacatggacataaatgtaaaaattatataaactgacagatcaaagacaaagaaaatatttacagacacacagtagagggaacaataaggtgtacctgaacataaggaattaagaattaccagataaggttagcttgtcattttcagtatacatttatatttgtggccaggatgacaccagattcagatctaaagttgaggtacagggataataataatatctcaagtaccaactttggacagccatgaggaacagggagggagcatgaaatgagatttcgcaaggggttgctgtggacatgaatcatatttaccacaagaagatgactactgtttgtgatgctatcaattttatttatataaggtgagaggaagtaaggagtagaagagagaacagaacatagatagttaccttttaaaattcaagtctttttttaaagtttttctgtttaattctggataaaactagagatgtaagtatgagatttccagattttccagaaactacagtgaaaactgaatgtgattatttctcgtgtgaagactatataatgtgaggttttttttccatttagaatttgtatatttcagtagctaagtggaagcagccacaaatgtagacttctgtctagaaattctt

SEQ ID NO: 52456 - DNA, 1230 bp, Bovine  19866880971788
  misc_feature (1)..(1): n is a, c, g, or t
naaaatgatgaaaaatcatattcttatttcatactgtatatcaaaatcaattccagggttaattaatgatttaatgtctcattaacttaatataattattaaagtatagtttccatgtaaaaacaaaattttaaaagctccagaagaacacaagataatctcagagaacataccgccatgtctgtcttcacagtgcaatcccagcaatccatccccttaaaacccagttgttatatttgagtgaattgaattgaaaaccagttcttaaaaggaataagagccacattccataaaatgcctgtgaatatacaaatagagtattgccacagagtctttggggaaatacggcattgcctgtagtagtaagagcttaaataaacttgggaaagagacacactcagttccccacctgagagaagtcaagggtttcctgctagcagaatgagccctcagtcaaaatccacaggacagttcctgccctctcctgcagcaaagagctcctccattcaccacatctgtcatgcacagcacctgcccagctgagttgtagcaaatgtacttcccatcctgctccctggcaagcctccaaaagtgttgcttttggtgactccatctgccagtagatgtagagtatgtcacacagacaaaattgcccatggctcactacaaagagcaggcaaatactttatggatgacctggtacaaagcttcaagtggtgtggcaaagcagtgggccaaagagaagcagcagctgcagtcagaccagctctgcagtaagctattaggattccagaagctccttttgagcaaaggaatctgtccaatcgaggttgaagcaaccttagcaacagtggcaggctttgttcaagacttgctatatccaataagcaaaggtgagctctaggtggtgtcaagagggaaggatcacaagtcccaaatccacaagcaaaagatcatcatcaattagtgctaacaacctgaaaatgaaaaactatacaaaaaatatctgtgcaggtgtctaaaggcagtgagggtctgctttgtctgaaatgtgaagcttcttcaagaggaaactctgctgaaaatgtccccaaaataccaaagtgctctcattcaatgtttagctcaccttttctttaaaaaaaaaaaaaacaagtagattttgtttgtttgttcggctgcactggggtcttaattacagcatgtagaatcttactgcagcatacaaga

SEQ ID NO: 52457 - DNA, 881 bp, Bovine  19866881083624
  misc_feature (1)..(1): n is a, c, g, or t
nctttcctgacttccagctgagagctggtctattctcacagtaaatgccatacttatgcataaatttaaagttggaaccctttgtctatgcagacagaggaattcacagaacaattactgtgggaagtgactgttcacaatttgctgggaaacagctttgctgacttgtgtgcactgcaagataatttagctctgaagaacagggaataataaccaagtcctttcttgaggacccctgtaataaatgaaagcacaaccacagcagctgactatatgagttcagaaaatgccacccctacgggcagtttttagtcattgagaagctgatgtataagccttgccagtgtgctgtttcccactcttttcctttttactgtaggcacacagagctcatccatccctttacctgtgcagttgagggtttgggcgggatcctgtcagacattcagcccacttccctcccacttttatggctaatgcattttaggtgcaggcgaatgtctttgagctaattcatagtaaaggatgaaaattagtcactagaaggctgaaaaaaagaatttctccagaataagttttttccctgtgataaataacaacactttttttgagttatacttaaatttaaaaaataataaaatattttgatctttgaaaaatctgttacctttatctagagagttgatgccctttagatagggaattaaggtacatcacttagaaggccagctttgtctctaatgacctctgtagcctcaaataagtcttcctaatgatgagtaggggttagtttcctcatctatgtgtagctgacagggtggcccttggctcagcttaagcatagattgggctgggtgtcctagcagcccaagctcatcttc

SEQ ID NO: 52458 - DNA, 1406 bp, Bovine  19866881104912
  misc_feature (1)..(1): n is a, c, g, or t
ntgtatgcgtcccttacatattttgaatattaacccattatcagatacatagtttgcaaaaattttctcctgttccataggttgcatttttacagaggttgtttcttctgctatacagagattttaatttgatgcagttccacctgcctatttttctttttgttatctatgcttatgttatcatatctaaaaatcattaacatgagctagtctttgttttctggaaagcagaataaactgagtttcatactatctgaattctcctttgaaatcttatgtcactcaacaaatataaagagaaacagtttgtggggaattagtggagcagaggcagtgcctacattccagaagtcaaaaccggaagacaggcacctagagcatttctgggcacagttcatggtcaggtcccacagtgttgattgctattgcttcttgcctttctgactgaagggaggacacaaaccttcctaaaatgtacactagtcatcctccaactcctagacagtttctttctctgttcagtataatactctgctcagggacttcatcaacccatctcttctccagatcctttgtgaaaatggtctttttatctgagcattgggtgagggattacaatgaccaagtttgttgtaatggcatgtgcatgactatattgtgtattgttacactgcattagagtacagtgatgactctatttgaaccaagggacattttctggaatctctgctgtgatatttgagaatattactatgctgtatatggatttgcctcaagaactgcagttaaaaaagaaaaacaacacaaaccttccaataaatgtaataattccgaagtggaaggatgcaattctgaatcttcctttctttcacttccaaacatgtgcccataagaattactcagaagcactgaaaatataaattgtgagacaaaccaagtttaattgaatgcaatctcttttggtggatatgggtcaaaccaatcctcttaacctcatttcatcagattgcaaagagcctcctacttcttactgtatacttcagttctgatggttatatggataaaatacacaaactgagattatcttaaaagaatttcagaagctcccaggatattggcagaggcagtaatgatgtaaaatccctgctgaatggttagcaatattcattctgtgttacttcttctcatgtagcctttatcttttgggccagctgcagaggaatggtttggcagctgggtttttggctgaggaatttaggttatatgtttatattatttattggtgacctctggacctcagcaatcaacatcttcacaacttttgccagagagattgtgcccctaaaggttctcagtaaatggttattcttatttctttcttctttccttcggtatctcccctgcag

SEQ ID NO: 52459 - DNA, 1629 bp, Bovine  19866881116579
  misc_feature (1)..(1): n is a, c, g, or t
nctgtctaggtttggtatagtttttcttccaggagcaagtgtcttttaatttctggctgccaacaccacgtgcagtgattttggagcccaagaaaattagtgaaatggaaatcaaaattacaatgaagtatcatctcacattggtcagaatggccatcatcaaaaatctaaaacaataaacattggggagggtatggagaaaaaggaaccctcttgcactgttgatgggaatgcaaattgatacagtcactatagagaatggcatggagatttatttaaaaactagtgataaaactatcatatgacccagaaatcccactactaggcatataccctcaggaaaccataattgaaaaagacacatgtactccaatgctcatcccagcactacttacaatagctaggacatggaagtaacctagatggacattgacagatgaatggataaggaagttatggtatatatacacaatggagtattaataagctataaaaaggaacacatttgaatcagttctaatgaggcagatcaacctataacgtattatacagactgaagcaagtcacgaagagaacgacaaatgtcatatacttaagcatatatatggaatatagaaaggtggtactgatgatcttacttgcatgacagcaaaggagagacagacagaaagaacagacttttggacacattgggggaagaagagtgtgggacaatttgagagaataacattgaaacatatacattactagataatagataaaatagatagctagtgggaatttgctgtatgatgcagggaacccaaatccagtgctctgtgacaatctagaggggttaggtggggaaggaaatgggaggggtttcaagagggaggggacatatgtatacttctggccaattcatgttgatgtttgacagaaatgatcacaatattgtaagtaatcatcctttaattaaaatttaaaaaattaaaaagaaaaagaaaacccaaaactcttttctcaaatttttgaacacaactctgcagattcaaactttactatgttatagctttaatttattgcctgagagtctatgaattaaaataaaactccatccctgacagcaaattagaaaatgatggaattaagtttaaaaggcctcttcctaaatttaaagaccagatcagagtgagttttccgatatgcagttttgataagacattatcaggctaggagataaaggctgtcttcattgccaaaaataaatctctctcttccttttattcatcaagcttctattaaaatttggttaagtatcaggctaggtgctagatgctgagattaataaacacaagtaaactgagttgtatttcttttcaaagagctgctaatatctctcatgaaagaaacaggtacaattctaaagaaggccattaataatcaaataaatttatctctatcgtttttagagattcatttcacacttaggagcagaggagcatttttgatatataatttattcatgattttaaggaatctttaagctattaaaactgcatgtccaatagcacacttgacaccaaagaataaactgtggcaaattcttttgagttggtaacattctttacccattctttgctgggaata

SEQ ID NO: 52460 - DNA, 2596 bp, Bovine  19866881228622
  misc_feature (1)..(1): n is a, c, g, or t
ntcataatgaacataaatattatttcaatgctctgtagtactctaatatgatatgaaatatctatgatttctattaaaggcaaagatagttattgctcaaactactgtgatttgttccttacattttataatgaaaggaaatctcataattagaaatttatgaaaataaacacataatttttatccctatccaagtccatgaataagaaagtgttagccactcagttgtgtctgactctgtgattccttagattgtagtctgccaggttcctctgtccatggaattctataggcaagaatactatagtgggtcatcattcccttctccagggggtcttcctgactttgagattgaacccaggtctcttaaattgtaggtgaattctttacaatctgaaccatcagggaagactcaatattcaaaaaactaatatcatggcatccagttccatcacctcatggcaaatagattgggaaaaagaggaagcagtgacatagttcattttcttggcctccaaaactgtggacagtgactgcagccatgaaattaaaaggtgcttgttccttgggagaaaacttgtgacaaacctagacagcatgttaaaaagcagaatcactttgctgacaatggtccatatagtcaaagctatggtggcatcactgactcggtggatgtgagtctgagtgaactccaggagttggtgatggacagggaggcctggcgtgctgagattcatggggtcacaaagagttggacacgactgagcgactgaactgaactgaactgatggtttttaccagtagtcacttacggatgggagagttggaccataaagaaggctgaatgctgaagaattgatgcttttaaactgtggggctggagaagactcttgagagtcccctgggcagcaaggggatgaaaccagtcaattctaaaggaaatcagccctgaatattcattggaaggactgatgctgaagttgaaggtgtgataactggccacctgatgcagagtttactcattggaaaagaaaagaaaagaccctgatgttgggaaagattgagggcaggaggagaaaggcacaacagaagatgaaatggttggatggcatcactgactcaatggacatgaatttgagcaaagtccaggagatagtgaaagacagggaagcctggtatgctgcagtacatgagatcacaaaaagttagacatgacttagtgactgaagaacgacaagtccatgaatattttgacttctgtcatgaatgcttggagaacccacagacccaggtttagaacccctggaaagaactgacttcttatttctttctggctagtctcagaactctaggcttttgattttggcactttcttcccaattacccctggattctgccttacaggtcatgactgacctaaatgtagtttaaacctcatttttctttcccccctctataaagattctcttactttcatagagataaacaatatgtttcaaattttactctttttacttctgtaggagccatttgtattatattagaagaactctttttattataaagatgtggtatcattggccacacagtgaagagtagaattataggtttctcctcttttataagatcttagaagacagaaatctttttgttgttgttgaacccacaacaatggagaaaatgtttacatgtaatggatactacatgtaaatatttgttgaatgggtaaataaatgcatggactgtgggacttaaagatcacctctgacttctcacttcccagggccaactctgaactattcaaagaattttatagtttcaaggggtgaagatgcaattcttctgtgaatgcagtctgacctatgttcacagtgaattttctaactacaggtctctatatatagagataatgagtgaagcatataccagggagctatatatagatttatctagctccagagagcaagggatattagaacagagctcttacacaactaaaaaaagattacaccactttctacatttttaattgctctaataaaatcatttttttaagaagaaacattttacaagattgtctcaactttaagtaccactcttccatctgaagatatgttagttttcatttttgtttaatatcttaacctcaagggcaaaatctgccagactctaacgactgctgcttcctcctaagcttctgccaaatggaagataactgactataaatcaaacttcgggacaactttagtagaaacctaacagtttccccaactgtcattatttcaagctactataaagaacaagcaaaaacacccagatgtgttagtgacatttttctgttatgaaagattaaaattgagttctttctatgtttggttcccactgtaattagtctttcctttataaaacatcattgctctattactcctctgctatttgttagtagcaaattatgtattacttttagcatttcattcaccttttatctactaaaatgtggtactgaataagaaaaggacattttgttcagaatgttcagtgttctagaatgctgtctatagaaagatgaaaaagggagtgcaaaggagaaaccaca

SEQ ID NO: 52461 - DNA, 674 bp, Bovine  19866881275567
  misc_feature (1)..(1): n is a, c, g, or t
ngtgaggtttttccacagcaatagaattcatatccccccgtcctgcagaagactatgtcatttacataacacattcaacccagttggcactgttgtcacctgtcattcaattaggtatttaggctatgtcctactctagtcataatgaaatcactatgaaaattaatagagaaatgcattctacttgggcagacattgtcttttaagttataacatctccattgttattattaattgtttttgtgtgaaaatatcatgtgattggaccaaattatgaatcagtcctctgtcaaattaaattcttaaaatcaccatcactattgggttatgctaatgtgaaacagaagcaatcaaacctagcaaacattagaacatgcctaaccagtagagaaacagaatgatttttttaaatttaaatttatttattttaattagaggctaattactttacaatattgtattggttttgccatacatcaacatgaatccgccacgagtgtacacgtgttcccaatcctgaacccacctcccacctccctccccataccatccctctgggtcatcccagttcaccagccccaagcatcctgtatcctgcatcaaaccaccactcctttatcatcccctcgataagtgctttggtatgtgcatgcatacatatatatgtgcacaca

SEQ ID NO: 52462 - DNA, 1357 bp, Bovine  19866881506388
  misc_feature (1)..(1): n is a, c, g, or t
ntaccacaaacagcaagtgctacattttggactcaaatgcacatccacctggatccaatatcctgttgacaaagtctccaggatatgttctcctgtgtccagtatatcatttatcattattagattttcattttaagcatcttctgttttgatacaataatatgttgtcaaaatccatttccccttttgatatcaaaaagaagtatctctgtgttgtgtgatagcatcaataaatacttctgttgaactgatgccagtgaagactgattccccaggtcccaggatgttcaattattgtgtccaggtgctgagatgacaagttttatttacatatcccttatttgtttccatgcttggtttggttctctttgctctgcatctgtccttggggggcatttttgcttaatggaagaacaagatcaataaacaagactattttattagcctcaacaaatagcagaataactggcctgatggtaacatttttgtagatctgttattaggactttggtgttctgcattttataacaatcatttctcagagaaagtagactgagatataaaaagagagtactagtgacatataaaccccatatattgccatgcttgaaatcaagcatcacccctatctggataaaatcttttattctctctctcttaaggttgttcaaatatagacacaattactgtttcacattgttgattcaatttgctatgaggaggtttgttagttatacttcttattcttcatgacaaataacttgttaagtattataaagcatagattaattctcacctttagtctaaatgccctatgtttgcattgattcagaagtttagaaagctgcctatccttctacaaagtaatcttcatttcaaaattattcatatacaatactgtactctgatattagcatttagtataggtaattataataaagagcctgtgttagtttcctatgaccgatataacaaattaccacaaatttactgactgaaaaccacatgaattcactcccacatgggtctcgaggtcagacttcagacattatatcattgggctaaagtcaaggtgttggcaaggcagggtgtctccagtagagattccttttccagcttctagaggcatattccttgttttccttagtttatggcaacttccttcatcttaaaagtcagaaacatcctctcttcaaatctctctccttgcttgtatcacatcatcttctccagaagcagtacctccctctgcctacctcttacataaatacttgtaactatatttatggcccacccagataattctagataatctctccacatcaagatctttaagttaagatcttttgcatataag

SEQ ID NO: 52463 - DNA, 1400 bp, Bovine  19866881709695
  misc_feature (1)..(1): n is a, c, g, or t
ncacagcaattgtctgcttaggaaaagcctcaggattccttggaacatatccctaagggggaaaaagtgacttgatctatatgaaactgtaaaagaaatcctattccaataggtaaacaactactttttgaggcaaatcagatttattttctctattctacagatgagaaaggaggtactcaaagaggctaaatttcttcctccatgttaaaaagcaactctgtgtcattccaatttttgtaacttaaaaaacacacaaccatatgtgaatttcatatagttcagcctaacagaaaacccaagcttgcatgcagggattctgtctcccactccagagtccaatttgatacatcactgtttcttacttggatcctcaatgattacttcaagtgtgtttatttaaaggtcacttaaatatgtacaaacataaagctaagcataaacctctgagttatgtagctttattaaactacatgagcaacaattaaaggaaacattcaattaaatagtgttttcccttacagtactaagaaataaaaacactctttaaaatttttttcatttcatattaccactacacttaatggtcctgaactcttgaaagcatctatgtaagaagatggaatttatgtaacacaactgctgttttatgaagacatgcactttatagcatttgctatgtgatgactcagttcaattctaccacttgtctctatttgtacaacttgtaaaactctacctcacttaaacaataagcttccacttggattgaacctatcattgatgattatatttgctccccatgttttttttctctcattggcctataacaatttaagaatttagttcataactcctctgcagcacataattttcatacaaacaaatgagggtcttaatggattgacttttctatgaaaccaaagttgtttttctatgaaatgtcttttaattttgaattatcattccataaaaagaagtttgactctggtaaaagcattaagcatgagtttaattgaatgggctatttgaacatgagcttgaacacatagctatttgggctatttgaacacagctctgcctgcagtggcaatggtgagcagaggtaattttcagacttggcaattaactctaatatttagggacatggaattttaaacctatgcagggacactgaaaaggatgtatctctgtgaaaggactagaaaaaacttccccactgtctcagggagactcaaagggaattgtcaatgcctaggtctttaggttggataaggcaatggcatcccactccagtactcttgtctggaaaatcccatggatggaggagcctggtgggctgcagtccatgggatcgcgaagagtcggacacgactgagcgccttcacttttacttttca

SEQ ID NO: 52464 - DNA, 484 bp, Bovine  19866881731338
  misc_feature (1)..(1): n is a, c, g, or t
ntgcggagcagcgaggcggcgcgcaagcccgggccggggcaggggcgggggccgaagccacggccagaggtgcctgcgcaggccgccagggctgtcctacccgctcgcgcctggccacccggccgccccgagtttcagtcgccctgcgtcccttacctggggccgccagctggctgcaaggagggagccccgccgcgcggctgcagtgtcggctgcagaaggcgcggagtgaaggggccagaaaccgagccgcgctgccgccgccgctgccgctttggggagctcagctcgcagcctattgccagagaggccggtgacgtcaggcagccaccgccagggctccaagccacccttcaggcccccaccccaccctcataccccaacacctcgtcctggcaaagccaggctctgccacacaggttctcagttccctgctgtttccctgcccaggcgctggggagtaatccccagctccaccctgtaa

SEQ ID NO: 52465 - DNA, 1665 bp, Bovine  19866880399500
  misc_feature (1)..(1): n is a, c, g, or t
nttacatgaaatccgattttaccccgaactcctgggaacctcagagacaaacgagagcaggagagttcaagggatggcaaaggacctgtagaattaagcctgtcctcctcctgacaggagtattctcttggtccccagcaaagtgtccttacaacgccttggcttactcttgagtttctgccccccgcacccgactcctgtgtggtttgaagggaccaggcaaaccccaccccacccaccccccagtcctaaaaagggcagtttattcacagaaagagtatggactttcaaattagattagagctaatatataatcaaatatgtattctctttttatgttctcctttgtcctaaatcctgtccatcctcaagtttctgaatatcagtcaagtcaccagttgactacaaatcagtgaaacttgagattaaaattctgtctgtggtcacccaggcagctccactcaagaaataaaagtttgcttccacaaaccctccactgagagtcaggaatatacagtcttcccctcaaatgctgagcttgcagagaccatggctgccctacacatccccaacccgtagtagtaagtccagacaaggtcttgggggaccctgaaatgacagattctgcagtgccttctttggagaaagtcacatctttaaaaaaaaaatgcccatgctcactttgttctggcacttgtagatacacactatgtctcatcctccccgttacaacattcccagggttaaacctgtgggaggggaattgtcctcaccttgtccttagagggtggaaatgagaatgtaacatagccctcattcccaatgggaggaaatgtgtgataaaagacagtatcctaagatcacaccccagcccaagggtccctcagagcctgctccccagagtggtggctccagggagcagctgccctgcacttacttggtgagtctctgccctcagcccctggggtgctcagcatcaccagggtcaccatcacaactgctgtccagaggcctctggggatccacagagcccaccatcccagacataattgagaacaaaggaagaactaatggtagtcaacacagctcaaacacagtggatctggtgagaccacttcacagaataaaagcctatgagagcttccatgtatggcaggattggagagtccctagaaaagggaccaatcagcagtggagtggaaaaacttcatctgtttctgggtagacatttttttttgaaggtccttaatctaatgcctggcactgtgtcctaatcaaattacactggattgagatgaaaatgttctcccagttatacaatatctgaatattgaatgccttaggagtttaaataatgaaaaaaaaaagattcaagagtagatatttctgtgatatttatttaaaacctattgttcttagaatttggggtatgggaaaataaaagtgaaagtgttaattaatgagttgtgttccactctttgcaaccccatggactgtagccctccaggatcctctgtctatggaattctcaaggcaagaatactgaaatggtttgtcattcccttctccagaggatcctcatgacccaggaatcaaacccaggtctcctgcattgcaagaggattattcctttgctgtggagccacaagggaaaataagggggat

SEQ ID NO: 52466 - DNA, 913 bp, Bovine  19866880499519
  misc_feature (1)..(1): n is a, c, g, or t
ncaaagtccagccaggtggcccatcgaggtgcttgtcagccatgcctacagttcggagctttgccaatgaagagggtgaggcccagaagttcaggcaaaagctgcatgagatgatggtgctcaaccggaaggaggccctggcctacgcggtcaacgtctggaccttccagtgtgagcacctgggcatgaatgcctatcccctgatatcccctatcaccattccccttccgctgaccctgctccgcactcttccttcactgggcaggggtgggttcagtgtctgtatcctagcaaccaggggctgggtgacctagtgttctgaaccccctccttctttctaggcatgctacatggcttcttttccccatggtgcacagaatctccatgaccccctttgtaggaaagcaccatgtcttccagtcccaggacttctccttgcctcatggggcagcatggggaatggcaggtagcttttgttgggcagcttcatgctgggactatgcagatgaacttgtgagagacaagggactagcagaagccaaggaggaggggcatcttgtgatgtaattgaccgagaattagaccagtgatcagaagttcctgccttgatgctaccacttgttagctctgtagccatgggctattaatagtaacttactttctctgagacttattttttcttattttaaaagatgagagtgctataaccttgtttataagattcttgatatgaaaattagatgacatcacgttcatgaaagcctcttgtgaagagcagaatgctccccaaacaaggcattcctggtgatggtgatgatggtagttgacttgtattctgtgcgcctgagtgatcacactacgggatgctgtgattcatcctttaatccccgttgagccccatgtgttacttggt

SEQ ID NO: 52467 - DNA, 737 bp, Bovine  19866880518392
  misc_feature (1)..(1): n is a, c, g, or t
ntattttcctttcgacctgtcacccgatctgttactctcaagctttccattttctaccaattggcgttttaaactgctcccttctaggtttttcccctcctaaaaataaggaaagaaagaaaataaccttaatcaataccatatccccttgtggactctcttatgtacttgtcagctccccttcccagtcaagacctgaaattgtgttattttcctctctctgcctcatttcccattctttagcccatttcttccactactgacactgtcttggcaaatgtcaccaaggaccttctaattggcaaaatcaggaagcacttttcagctttcaccttatttgacctcactgaagtatttaacatttgatcaggcttccttcctgaaattctccgcacccttaatttctgtgactacttctcacttgtttcttttcctgcttgtcctgctgttcctttggtgtcctttgtggactcttctttaacctgtgttgatgtttgcccagattttgcctcagtttgcttctaattgtgtttatctttcctaagtaatctcactcagtggctcacagcctctcaaatctgtatctttatttcagtcaactcaactgagcaaaactcagtacttaattttaccacttagatagccctgacacttaaacacgttcaaaacagtgtaaactatatgcagcctagacctgctccttctattagtgtattatcctggctgatagcagtaat

SEQ ID NO: 52468 - DNA, 1701 bp, Bovine  19866880697829
  misc_feature (1)..(1): n is a, c, g, or t
nctggtaggctacagtcccggggtcacaaagagtcggacacgactgaacacttgtgtgtgtctgagtgtaggatacggtactgttgtctatggcttagatcatgaccattcctccatccacgtgaagactgggaaacccattaggcccttcacaagtcaacaggatggcctgggaattacacaaaggtctcttctgtgggagacagtagccctgtgctaggacttcccaggtggtgctagcagtaaagaacctgcctgccaacgagggaggtgggttcgactcctgggtcgggaagatcccctggaggaggaaatggcaacccactctagtactcctgcctggagaatcccatgaacagaggaacctggtaggctacagtccatagggtcgcaaataattgaacatgactgaatggacttagcatgcacgcacacaactctgtgccaggatgcatggcttggttagcaaaatgcaagctgaatttgagccacaacttacctccttggctgggtgctttggggcacaaaaatacagtcagtgctgcgactctgtcaactgaatttgtcactttagatcctagaaccttttacttgttatagctttagatggttgatgtttttatggactgggaaagtttggagagattctgtaatttcttttttgcccctattgggaggcagagcctaagtgacagacacaagaggggttgtaaacccacccactgcccccctcctccctggagcagggcttgctgttttctttttttttttttttaatatttatttatttggctgtgttgggttttagttgaggtaagcagaatcttcattaggttatgcaggatctttcgttgcggcaaatggattctctagttgtggcacaaaggcacctaaactattgctcagtagctgcagtgcacaggcttagttgcttctcagctgtgggaccttcgtttctcaaccaggagtccagccgaagtcccctgcatcgcaaggtggattcttaaccactggaccaccaaggaagtcccttgctgttttctaagctaaaggggatcccacctccctgaaccccaccctgtctcttttgcagctcctgctccagggtggagggatgagctacaaaaccacacgttcctgcacacaatgtactgccaggactggagccccaacgtggcgctctctgagtcctacgacgaggaccagcttttctccttcgacttttcccagagcatccgagtgcctcgcttgcctgaatttgctgactgggctcaccagcacggagatacttctgacattatgtttgacaaaggtttttgccgggccatgatcgaggaaattggcccagaacttgaagggcaaatcccagtgtctagaggtcagggcatttttctgtaggggtggggaggggagctgccctcttaacctcattatacactgaatttttccctttcacaccaattccccatctctcatgctttctggttctccccttgaaccttgatttttctaccacccatggtctgcactctgtttttgttgtgggcagaagaaaagcccctggggtgtagtaattcaaaattatggaacttgataaatttagcggggaccaactgatgccttctgactgttagcacttgtgctgtgattgatgctcagcaagatggaaggggagaatggaagtatctgatgatgtgtctg

SEQ ID NO: 52469 - DNA, 822 bp, Bovine  19866880942228
  misc_feature (1)..(1): n is a, c, g, or t
nccagagtctgtacttttttgtatattctttttttctgtattcggggatgggttagtgctttaggtacaaaaaaaaacaatagacctgtgctgacgtacttgtatttatttttcaaagcccaactgagattaatataaaatatctgttgtgtaaagaagctctgctcccctgaggagcacacatgtgtcctgtagcccatctctgactcactcatttgccttaatggaaacagttgttcaggcaagaaatccagatcactggattaagtagaatgtgttgaggtaatgcgttcccccaagtgataattttcttttgctcagactccccaaaaaggccacaaagacagccccacctgccctgcctgctggctacgactcagaggaggaggaagaaagcaggcccatgagttacgatgagaagcggcagttgagcctggacatcaacaagttgcccggggagaaactgggtcgcgttgtgcacataatccaagccagggagccctctttacgtgactcaaacccagaagaaattgagatagattttgaaacactcaagccgtccacacttagagagcttgaacgttacgttctttcctgcctgcgaaagaaacctcggaagccgtatagtgagtatgaaatgagattcccaagttgccttagcgagttcttgtgcggttctgaggacaatttagagaaggaggtgggggggtatgcttgatgcacttggaatcatcagttcctgggatgatgggttgcattagttgcttccttaagttcaagaaaggcattggcaacaacaggggacagggaaaccggagtgct

SEQ ID NO: 52470 - DNA, 1082 bp, Bovine  19866881229423
  misc_feature (1)..(1): n is a, c, g, or t
naatgcatcaagtttacgttctctctggggctcctcaggaccaggtgttacccaaggcccaagatctcattgtttacatcccagagcttagctccacctttctaccctgaaggaaactctcaatggtacctctcatatacacacacacaaacgacaagaaatccaatcttctgcaacacaacacactcctctcaacacaaaaccaaaccactcacggaaaagggacctatccccgacattaggaacccagagtaagagtgggccttgtaccctactcagggaatccccgttttcagtccccaaagctctatcaccatggcaaccctgtaaagcacaagatgtggccacgaaccccagccactgaaggccggacaaacggtcgcttagacaccagacccactaccctcaggacctgctgccccatccaagtcctcccccgttgcatattccgccgccacctcgctctgcccgactcagccaaaatctgaccacagcggaaaagtaacgtgtaaattgcctgcgctccctccatacgtaggatctgcggccgctaccacagtccccaaaccgccgctcacccccctccgcgagcctcgacagccaacagttgcgccacgaaacagcaacgcgcccgagtcggttccgcactccctccgaactcggcacctcacccgcgcgcgccgcggccccccaacgcccccttcccacacgcggctcgcagggacgtacttgttgtggggagtcacgttttgcagcatcttgaccacggggaaccggcgctgccctcagccgcggaaagtccgggtggcctcggttccccttacctcccggtccagcataacccgggaagtggggggagggcgggggccgctgccctcggccctccaggcgacaaccctaccccgccgggctggcacgaaagcaatctcctccgctgtccctcggagaactcccagcagcttggcgcgctccgcaggaggcggacagcgagaaaatggcggcggcctcagctgaggcgggcgagcgaaaggggacgggctcttcaaaccccaggacggcccccgtatcccagacaccgtcgc

SEQ ID NO: 52471 - DNA, 1056 bp, Bovine  19866881767994
  misc_feature (1)..(1): n is a, c, g, or t
nggcaattaagaccatgtgctctagaggctgtgctgtgtaacaagagacgccaccgcaaagacaagtccacacaccataaatagagtagcccctgcttgttgcgactagagaaagtccgcatgtagcagtaaagatgcagcacagccaaaatacacacataaataaacaaaaagccgccccaaactcaagaatagtccagatttccaaggagaatgggagtggatgctcttagggagaaggttctcctgtaaggcatcaccgaagcagaggctgtgtctccagtcttctgtatttcctttttctttccaactgtgcttttgaatatgattttttcttttttccccacagtgtctgagatccagcatgtggctcttggtgcttaagttctgcctttgtctttgtttcatctttcatctctactccacggggagcaatctatgtctgtgggaagggaggagctgctgtatttcccccgcttttctcctttcttctctgggggaagacatagacgagacaccataatgagtggatgatacctggtcttaaggttaggggcctctggctctcttttagtgtgtggttctctggcttccaggggctgaccttcacccttcgtcctggtgaggtgacggcgctggtggggcccaacgggtctgggaagagcacggtggccgcgctgctgcagaacctgtaccagcccaccgagggccaggtgctgctggatggggagcccctccccaaatacgagcaccgctacctgcacagacaggtgagcaagaagatggcatgggggagggcagggagcctcaagtcaggagagccttctctgcgggcactctgagcggaagttaggagaccctgggggagaggtgggcgtgtggtcagcagagaggccgtgtcactctgtgacaggctgtcagtggagatgctcagccttcagtctctagatgaccacactcctatgttcctcgttctatgactctgcactgtattttgtcctaggtggctgctgtgggacaagagcctctgctgttggaagaagctttaaagaaaat

SEQ ID NO: 52472 - DNA, 1023 bp, Bovine  19866881936410
  misc_feature (1)..(1): n is a, c, g, or t
ngttttttttattttttatgtctgtgagtctgtttctgttttgtgtatagattcacttgtattttttttttttacatggcacatataaacaatatcatataatatttgtctttctctgtcttacttcacttagcgtgaagggactggagtgggctgtgggggttgtctgtcttctgccaaattggcccgctccatcgttggccccactgttccaggcagtcctttgggagatccaggacgctgcggcgaaagctgggcaggtggttcgggagtcggttggagggctgcagaccgtgcgcagttttggagccgaagaggaagaggtctgtcgctataaggaggcccttgaacgatgccggcggctgtggtggcgacgggacctggaacaggccctctatctgctcttaaggagggtgaggaagctgagggctggaggaggggcacaggtgggggctggtcttgggggtccttggggttcccgatgcctttgccagtgccatctttttcgtgtgtctcttctctgttggaaggtaggtgatgagcgatttgttagcccctagttttttcaggggacctcactctcctgttttcaatcccctttgtgcacaaagcacaaaatacttaaacaaagaaaagtctgcgtttgttcattcaccgttctgtgtcaagcatccatccatttactccttcattcgccacctggctccaacatcttcaaagtttatattacttattatagttacagagtcgagtgaatgtggtataacaggtgtttttgtgtcggatggaatgtctcctcctaggggcagggaggccaaagagtggaaggtcctcaggctctcctttcttctccctccagatgctgcacttggcaatgaaggtgctcttgctgaactgtgcgttgcagcagatcctggccggggacctcacccgtggcgggctcctctccttcctgctttaccaggaggacgtgggtgaccacatgcaggtgagtcgggagctgtgcgtgctctcattttcctc

SEQ ID NO: 52473 - DNA, 723 bp, Bovine  19866881946086
  misc_feature (1)..(1): n is a, c, g, or t
nttagggaagaagggtcaggatgaacaaacattgccccccaccctgacaataggctaactgtggaaacaaacatgagccgggaggtcagatcagaaaagagaaacggaacttcacggagataaaaatgctcacaggcaactgagagacattccactcaacacaaaaacacctattgtattacactcactcatatctgaactataataagcaatataaactttgaagatgttggagccaggcggcgaatggagtaaatggatggatgcttgatatagacggtgaatgaactcatacaggctttttcttcatttaagagttttgtgctttgtgcacaaaggggattgaaaacagcaaagtgaggtcccctgtaaaaactgggggctaacaaatcgctcatcacctacctcccaacagagaagagacacacgaaaaagatggcactggcaaaggcatcaggatcaaagtcgccccccaggatgtcaatcacacggccaaaatagtaagggatcacggtctcacctgcaacagccaggagggcccagtcagagtgcggctgctgaagggcctcctcccaacccccaagtccctgcgccctctccccactcacccaacacggccagggagaggaaggagaaggcggcaaccaggaaaggcaggtcaggccaggacagcttcagcagcctccacatcaagactctgttctcctggccctgcccctccgc

SEQ ID NO: 52474 - DNA, 1129 bp, Bovine  19866880286517
  misc_feature (1)..(1): n is a, c, g, or t
ntcctgttcttaaatcccatccctttctaaatggttgaaataggcaatcttatgtttatgctgctgctgctgctaagtcacttcagtcgtgtccgactctgtgcgaccccatagacggcagcccaccaggctcccctgtccctgggattctccaggcaagaacactggagtgggttgccatttccttctccagtgcatgaaagtgaaaagtgaaagtgaaggtgctcagttgtgtccgactcttttcgaccccatggactgcagcccaccaggctcctctgtccatgggattttccaggcaagagtactggagtggggtgcttcttgcaaaaaagattccaccctctcctaatgtttgaggtcttctgagtcagttgtgctctgcatttggtctctagaaaagcagcatcagcatcactggaaacttgttagatattcacattccagagcccacctcagatcagaaagctctgagcagaaacctgggagttgggcccagcaatctgcattgaacaggctccacaggtgatgccgatgcacatggaagtttgagaactgctgttcttagtaggaaaaaaaatcacatgtgacctccttaaatcatggccttggaattttccagaggggcttggaaccattgcttggagtttggctgtggtatatgagtgaggagaactgttgatggcagtcatgcatagttgggtgggcttcaggtggagtgaattaaacttcttctctttcagccataaatgaagaccaaatgctcgtcattgggtttgatattagtacattcctgagctgttcatcgagttccaagaaaaggtaatgttagatttcctgttgaactatcagtaactgatgtttgcagaatgctccgctgttcttcacctgtgtaaactcacgggactgttatcatgtgcctttggattagtgagtcctctgcggccgttctggacatgaaagatggagactcaggggaaggctgggagcagtgtctctgggccccatgcagttctgacattctcaccaatcattcagcctcctctagttcaccaagagcacacaactaacagagctggtgtttgaagccctgccttctagtttagatctttttggaggcattgttaga

SEQ ID NO: 52475 - DNA, 974 bp, Bovine  19866880344573
  misc_feature (1)..(1): n is a, c, g, or t
ntgctgacattttgtagattaggaaataaggcacaaagtcatttacccagacatcagcaactaagtgatggggctgagactggaatatggacaatctgatcctagtggtcacactccttgatgatacacgaagtcactaaactgaagagtaacttttacattagagatctcatttcccacatctccaggtgttatttctgatttacattaacaagacatgttggagccttggatttatgttgtcaataaacaaactttattaataattccttttaatagatattgagatgaaattcaatgtctaattgaattcatgccatatacacaaactcttgttttagattttctattggcaaacatcctgttcaatagtccttgggggttctgagtacattcacaaaatgaaatcccaattattgctgccaacaaatgagtacataagtttttcaaactaggtgggtgaaactgcttgaaaaacacaacttaaaaaaaaaaaatgtactcattaacaataggcaaatcgagttaaatcaaccactaaacaggttttaagtgagatttctcccccaaacttggaaataaaggaaatcagccctcagaatttacttttgcgattaatggatcacagagaacagggtaagtcacttttgagagaccagaattactcctagccacacaaccttccaatgtatcttgcttatttagcaagctaccttatgaaacttcaaccagaacacatactggtaaatgaacagaagaggagtcatagaagcaaaaggtggctgtgcccaaattaacattgcaaaataaaaaatggatgcatagtatcagacctaaaatgcttggaatacagatgtttcagaggcaaacttctcttaccaagacaaacttctgactatttggcttacatttgttggtttacaggaaaaaaaatgtcaggttatcaatatagttggaatcctcaaattaatgca

SEQ ID NO: 52476 - DNA, 1632 bp, Bovine  19866880347692
  misc_feature (1)..(1): n is a, c, g, or t
ntgcctaatacataaaagacacttaacaattatttgttgaatgaatgattttaagaggcagtgttgcataatagcaaaattcagactttacattagaccaatcagagttctagacttaatatcaccacttactaactagtgataaatgattaaatatctctgaaccttagttttcttgtccttaatgtgaggataatgataacttatctttgtgagttgttttgagaattatagattttctaaattttcctagtgtactgcctgacagatagagatcattcattagtgggagttgttttgtctttctgaaaacagttccctgtagaatgaaagattgtagtgtccttgcttttaaagtaattagacattagatatggaaatattaaagtcccatcagttattttaaaaatatgtaattttatagtttcctgaacttgatcttttatcattttagaacatgattcaattttattaacaaagtgaaagtgaagtcgctcagtcatgtccgactcttagcgaccccatggactgcagcccaccaggctactccatctgtgggattttccaggcaagagtactggagtgggttgccatttccttctccaatgcatgaaagtgaaaagtgaaagtgaagtcgctcagtcgtgtttgactcttagcgatcccatggactgcagcctaccaggctcctgcatccatggcattttccggctaacaatactggagtggggtgcctttgccttctcccacccctagaggcagtcaacctctaatccctctcaaagaccttggaaaacacttgtctgctttgtgtctcgaaattaaaagacgcttactccttggaaggaaatttatgaccaacctagatagcatattgaacagcagagacattactttgccaacaaaggttcttctagtcaaggctatggtttttcttgtggtcatgtatggatgtgagagctggactgtgaagaaggctgagtgccgaagaattgatgcttttgaactgtggtgttggagaagactcttgagagtcccttggactgcaaggagatccaaccagtccattctgaaggagatcagccctgggatttctttggaaggactgatgctaaagctgaaactccagtactttggccacctcatgcgaagagttgactcattggaaaagactctgatgctgggagggattgggggcaggaggagaacgggacaacagaggatgagatggctggatggcatcactgactcgatggacatgagtctcagtgaactccaggagttggtgatggacagggaggcctggcgtgctgcgattcatggggtcacaaagaatcggacacgactgagcgactgatctctgatctctctctctcttcctgtatgtttcatatgaaagaatcataccatatgttgcttctttaattaatgttttaagttaatacatgttgtagcatatataataaatttcttcctttttcttactgaatgatttttcattgtatgcttatactacttttttttttttttcattcttccaattttattttatttatactacttttttaaaccaaaatgtagttgatttacaatactgttttagtgtcaggttaaagaaaagtgacttgatat

SEQ ID NO: 52477 - DNA, 1760 bp, Bovine  19866880448727
  misc_feature (1)..(1): n is a, c, g, or t
ntgggggcaggaggaaaaggggatgacagaggataagatggctggatggcatccctgactcgatggacatgagtttgagtgaactccgggagatggtgatggatagggaggcctggcgtgctgcgattcatggggtcgcaaagagtcggacatgactgagcaactgatcttaactaaactgaactgaagcatttcctgtgagacaaatagtattaagtatccttatttcagaattgagaaaatggagatagaggtagattaagtaacttgcccaagggtacacaactagtgagctgcagagaagaatgtgaagtaagcagtctggctctagagttcatgagcttaatcactttgacatatcacctatttctgattgtataatatttaaaacgtcttccacactctgaattagtttagctaacagacattaccacctattcttacttgctccttcctgtggtacagagtagagcaagcctggtccataaactcaagaatatcaagccagcagaaatttaaaaactaacatccatagtaaaatctacaggacttggggatgataagattaggggatagagaaaatacaatgctcaaatttctggcttgtgcaactgagtgtacagaggtgaactttgttaagatcaggactcctggggaggaggtagaggaatgggaagtcttccctttgctgtttccttgtacattctttggctttggagggcaaagacaccccaggactcagtggttagacctctaatctccctgagctggttccctatatgcaaactgttcccttagcagccaagtgataactccttaacctccttcctctctaacaggtcaccaataatccctttgaatagggttccttttagtgaaaaaagtaaatttaagaattactgttgggacttccctggtggtccagtggtaaggaacctgccttctaatgcaggggatgctggtttgatccctggtcaggaaactaagatcccatatgccatggggcaactaaacccatgcaccacaactaagacttgatgtaacaacaacaacaacaacaacaaattatttttaactgttaaacttacatcaacaccgaactacatttcaaagaaaaaaaaaaagaaaaacacaggaaaactccatccagaaataaaccagaaatgagaccagttgatgattcttgggcatggtttagccgttcaacgagaagaagctgttatgcataccatgccaatttagacacttaattaaaagtaagaagagctaactttcctttttttccccaaaagaaagatataatagctgcatcttgatgctactctgggatattcaccctattggtatacatcaaatgtggcagcatttcaggcaaacagggagcccctggccctctccaggggctttttaccagcagtggtaaagactacactttgggagtgagaagtaaagcttatgtgtatgtccttgtgcacacacatgatgcaattatccatgctgaggagtaaatctgtaaacatgattccagagttcaatagtatccaaagaacctgggtgtataatctaaagcagtgagtactaattaattatagtgagccctaactggaccaagtctacaaagagaagcaggattgttaggctgcagcatggattaccagactatgggctgcaaactgctaaggtactgctgagttatagcaaaggactcttacatccacctacatccaaagcactattactgatcttttttgaacttaata

SEQ ID NO: 52478 - DNA, 1611 bp, Bovine  19866880487631
  misc_feature (1)..(1): n is a, c, g, or t
nttctgttacttcttgacctgcatacaggtttctcaggaggcagctaaggtggtctggtattcccatctcttgataagaattttacacagttttttgtaatctacacaaaggctttagcatagtcgttgctcagtcgtgttcaactctttgtgaccccatgggttatatagcctacgaggctcctccatccataagattctccaggcaagaatacgggagtgggttgccatttccttctccaggggatcttacccacccaaggattgaacccgggtctcctgtattgcaagcagacgcctttaccatctgagccaccatggatatttttcaatgaagcagaagtagatgtttttctggaattgtcttgctttgtctatgagccaaccgatgttagcaatttgatctctggtccctcttccttttctaaatcaggtaatttcataggctaatgagtgggaagagtattccaaatatttggggggaggagtggggatttctaggaattgggccactgcccattttttggtcctttatggttagccttagaactgtcatggtgcctgtgtatgtatcatttagcttgttgatatgttacagtgaatgtatactgaggctcaaggtctagtggaagtcaattatgtgctgtcttgaacctatttggttccaataagtttatgtcatattgtcagacgatgttcttcttttaaaggttgtgccctgccctcctcctgcctgtttcagtttcacaatttatatatacttggttttgtttgggttctcttctctttgattgttctgtcttttctttgactcgtaccatacccattttcttaatttctgtaactttatgtttttgtatctggtctggtgtgctttcaccactttagatattttcttgccgttctcacattttcttgctttttattaggtggattttggtgtcattttgtcaagttaaaaacaaatatccacactttttattttttggctccactgtgtagcatgcaggatcttagctcccagtttagaaccgaaccctttccccctggagataaagggcagagtcttaaacactggactgccaaggaagtctcaatatctgtacttttatattttaacaaaatacaagtttgacatttttacagatgtagaatactacctaaaggcatatttcatttcatattaacaatacagaatttttcattgtagagtcaaggttaattggggcattctgtgctttgttaaaatatgtttttattagagttagatctaaatggtgatactttaagagcacatgtaatttttaaacttacatacttactttttatacagaggctaatattttgtaggggctttctgtaggatctgatcacttctgaatgcttttatttctatttgtaactacttattctactgtgtcttttcagagtacctcacattcaccctatctccttaatgtgttcatcttcttttttactctctatatcaattgtatatttggtcaagaaatattgagcatctcttatgaaaggtattaggtaatggtcaagaagatgggctccaggctgggaaggcttgattgtgagatcttccttgtactccttcagtga

SEQ ID NO: 52479 - DNA, 6072 bp, Bovine  19866880514225
  misc_feature (1)..(1): n is a, c, g, or t
nttgttcctaaaagacagcacggttcaatttagtacttaatatttacttcttttttaaaaatgtgtttgtgtgtcttggttcttacctcagtggagatgaccaaatcacatatttcttttaaatttaaaaatgggaaaaagatgactcaaatgctactttaaaaaagatgttttcccagttaatgttgcagcatttcaggactactgttcctgaatcccaaatacatgggctgaatccactttttctcacgtgtctgactttattttcactttggaattagtggtcctgtaactttaaaattagtctgatccatcttttaaagtttgtatatcactttacctagaacattattgaagacaataatccagttacaattatggaactcctgttatatctgtcactcctgtgacatcacacttggcattgatggtatgaagatgaattaaactagataccattctcaagcagcttaaaatatttaaaaataagaaatttttataagcaggtttaagaaatctggttaagagtcttatacaacatttactaaccgatcattttcaccagtttcggttttattgtgtgaacataaaaataagctgtaacatgtatataataagatggagcttgtcctaattttgccatttcccttgttgttgatggtagactcgttacatcaggatagatggaagtgttccatcttcagaaagaatacatctggttaatcagtttcaaaaggatcctgagactcgtgtggctatcctcagcattcaggctgctggtcaggtaagaagtttcacgtctgaatttgataatgaaatgttgagataataaaaaggccattaaccttaactataacttcctatttggtgtgataaatactcattccaccttgaagagtgctagaaagtgtaacagaaggagacctcaacacctctgattataagcttcctgaattttcaagtaaagaatttcctgaaagagtaaagttaaatttcattataatgctttcccatgaacttttgtatagcattttctcatccctttcttacagcactcatcttacttggttgttttcatcagagtctgtgaggcaaggtggcctgaggaaaaaagaactctcctgtctttctgagttttttgtggaatgcccttagtttgtttcttagaattaggtttggctacaaataaatgtaaatccaaattaacaatgacttaaatacacaaaatttcactcttggatacagacagtccaaggctgtttaccactcttagcaggtatctcatctaagagttctgctagagctgatatctatgatccaggcagctgagtggagaaaggcatgctacatctcactggccctgcagttattcccagagccacaactgtcttaaaatgaaactggaaacagtagcctttattggtcatcaagtgttatgttacaaaggggtaagaaaagaatagatattggtctgtactacccactgtagaaggggacgcttctgaacatttttcctactagcattctagaatattttgatgtaaatatctaagccaggatatttaacagagggaaaagcaattgggcatattgttgttaaatatccaacctggtatatggcaaatctggcaacttctgtggattctggaatctggaccagggccaaagttctccttttagtgagctaattgatgtatataaaattgtctatatagagagaatccatgaagatgaagaagttgtagaactcactaggagttctaatcaaaaagatggttgtctcaacactttcatgttagattgaatttctagtagtctgagttttatatctgttagaatatttcagccatagaaaatattataaaaaagagcttaaaagtagaaatggagtaccaatagcttgggagtagataagtaggaagaatctgggcaggagagtctgggagtgacctgataaaagactttctgaaattaagattgtacaaggcactcacattctattcaaggctgtattcctgaaggccttgtataattcaaaacttaatacccttgaatactattaataaaatcttcatcagaatgaaggaaagtagaaagggctttgtcctggaggtttctgaatcttccattgtagtttagtattaatagcatctttgagtgatttgatcttgccaacatattttcccttttttcttgtatggtcatatgatactttttacacttttatgatactttttactttaaatgctacttaattttcttgcgttatctctgatattttgcagcttttcaaatcctaaatagcagcacattttaacatggtgtttatttgactctgtccatgtttttattacttctaagttctgttccaaagtggttgatcttcagcttgagaatgagtgccactgtttagtgaatgctaatatgatgttgttatgtgatatgaaaatattttaagttaaaataacatcagagcagcacagcagtcatgaaagtcactcacagaagttccagggcatgtgaacaacagccatggattagataacactaccataatatggtaggtgttcctgttgaccacgtaataccacccactactgtgtggcaataagcatggtccacattttgcttgacctacccactttaaagtcatgcattttttaacacagtttaaagagacttgcattatttcatatattagttataaaacaagacctagttaatacttttaatgtcatactgtttcaaactgatataaaatacagttacacaaagatgcaactgtattgtatacatcaagatacaaatcagtaaacatcagtctttgggatgcaacatgagaaattccaaagatagaaaaggttttgactgtagacatgattttattgctttataaaacagaatgaattaaatgaatagaggatgtcattgctctctgcctagttgctatggataccatgtgttagaattatattctcatttataatgtattttattagattttccaatggtagtgtgaacccagtatacatcagaggataaagtgattttgtttatgtatacatccgtcaaactgacttttgaaatactgaaataccttttaaacatgtactttgtagttcacctgactaatttgcagtaagcagtcttcatttatctgaattaaattttcttaatttgacttaaaatgaaagactgatttgtttttaagtccttcagtgttctcttgtccagtgaacgtactcagaaagactttattatacatggctctatgttaaattctcagtttatttgcatctcagtttctttactttgggcttccggggtgactgcactgcaggagaccaggtttgattcctgggtcaggaagatcctctgaagaagggaatggctacccactcagtccagagaactctatggacagaggaacctggcaggctacagtccagggggtctcaaagagtcggacacaactgagtgtctaacactttcacttttcactttttttcttcactttattttgcttagggtttgacatttactgctgcaactcatgttgtgtttgctgagttgtactgggaccctggacatataaaacaagcagaagaccgtgctcaccggattggacagtgcagttctgtgaatattcactaccttattgcaaatgggactctagacacccttatgtggggaatgttgaatcgtaaggtaaagcttgaatttaaaccaggttaccaacttttactcagagcttattatccatagcttgtatgagttaagaggctgagttttggtgttttcaggcaaagcatatatacatacactgagatattgatgttgatagagaccaagtccagaaaaggcttcggttggtaatactttacctgctgtccttggtaataagagagcaacatgaatttacttgtgttcctattgtcttccaagtccttctctaccattttagaggccaggggaggatgagctagtaaggaaacaaaacattttcaaaccccaagtcctttttgtaagctgagaacatacactttctcaaaagcattcttgaaccttgagtgattcttgattgctaaagcccatgatatattgaaaaaataagattttctttattggattgcttgtgactcaaatgcaaaaccaggttactgcttagtaaatgtcatctgtaaggcaacctgtcgtaaaatctatatgcttttccatcttacaggctcaggttacaggaagcacactgaatgggaggaaggaaaaacttcaggccgaggagggtgataaagaaaaatgggatttcctgcagtttgctgaagcttggactccaaatgaaaggtctgaagagctcagggatgaaatgttgttcactcatgtaagattatattcttttctatttattttaataccgtgaaactatgactttaccatatattattttaaatagtaattttcagttgtttatgcttttgaaaggagtctccatgtaaaggtggaaaagctctgagaactaaaggatgactttgatataaggaggctgcaagagtggtttgtatttttcaacagtaatagatcagggctcactgttcagctccttataaaaacaagccaagtagaattcctgccttcaggagaaaatatgggagactatctctgagaccctgagggtagggaaagatatattaaatttgccacaaaaagtgacatacagaagtctcatactcagtaaagatattttgcattacagtgttcaaagtatataactttatacaattcagttagtaaaacaaacaagctagtagaaaaaataggcaaacaatgagagcgtcagagactggcctgaatagacaaaacatgaagagaaactagcttctccaaaataagacaaatttataaaggtacccttttctctttacaattagtatgtaatctatggtgtgatactttgagatcacatgactattactatttccaaaacctttcacgccttggttttaacattcattgatgtttgcctgaagcagttttgaaatagtgattttttgaattccatcattgcttcttcattagctggcattttttctgtagagaaaaatttctgatttcctcctttttaaaaaatatcactatgaacttgggattctcttattatttagtgtgttataatctgggccttttttttaagatctggctgcaggaagcacctttattttattttattgggtttttgttgttgtttgggatttttattgaagaatagttggtttacaatatttgaatttgtctcagatgtactgcaaagtgattcagttatgtgtttttttcagatttttttccattataggttattataagatattgaatatagaaccctgtgctatacagcaggaccttatgtttatctattttatgtatagtagtttatatctgtgaaaattatcccatactcctagtttattcctctccaccccctttcccctttgataactataaggttgttttctgtctgtgtgtctgtttctgctttgtaagtaagttcagttgtatcacattttagagtccttataagtgcttgcatatgatacttgtctttctctgactttgtttggtaatctataggttcatccacatcgctgcaaatggcataatttcattcttttttatggctgaggtgtattgctatgtttcagttcagttcagttcagttcagtcactcagtcacgtccgactctttgcgaccccatgaatcgcagcatgccaggcctccctgtccatcaccatctcctggagttcactcaaactcacgtccatcgagtcggtgatgccatccagccatctcatcctctgtcgtccccttctccacctgccctcaatccctctgagcatcagagtctttttcaatgagcctatccatatatctatctataccacagcttctttatacattcctctgttgatgaacatgcaggttgcttccatgtcttggctattgtaaatagtgctgctatgaacattgggtgcatgtatcttttagaatagagttttctccagaggtatgccctgaagtga

SEQ ID NO: 52480 - DNA, 1877 bp, Bovine  19866880562168
  misc_feature (1)..(1): n is a, c, g, or t
ntatgggatggcaaactaaatttaaggatttcaagttaaaaaccaagtatttccttataaagttctagaaaacaatagatacttacttcgatttattatgtttctgactctggcatgaaacaagaatcaggtttgttttcacatcctataatatctttgccagtttactagccagagcctcacaaatatatttccttattaacaccaatacgaattttcctcatactgcagaaattattttcttaatgtttaaaacttgtttgttaagatttaaaaatctaaagtatttagatttttaatgctaagagtagaacactctcattgttctaagtagttaaacaaaattattttccccaatatggagataatcttttcccccaagattgtaagcaaactcttactgttgtaaaaatttggatagtacagagaattataaagaaaaattaatgaccctaaaaaaattaatcacattaatctcactacccactgatgatcactgtcaacatttaacatctagtatattcaaatatatgtaaattttacaatataggattatattatttgttcttattttccatctaatgtgattatttttctcatgggtaaatataggactatatcatcttttcactgggctcattgtatagctaatctcctttaatggatactgaaattgtacatttatcccacgttatgtaattttcaaatatttcaagctttcagaccttgtagtgaatgttttttacagattcaacagactgtaatccatataacaagcacctggttggtctatttttaaactcagctcttaaatatctgggtaattaatggaaacaattcaggtttactcatgtaatttttcataattaactaatactttatatgaattctattaaatcaagattttaacatttttaaagttagaaaattttactgaaaattttttataccataattttacatatttcaaacttttccttaatattaaattttaataaactttcatcatgattacatttatcattgttatatccatatttaaatagaattctgcaaacaaatcactgattggattttgctttggttgtgctaaattaagtcagacatctaatcttaaattcattgggttatctattttcaagccatgagtactttgttttagtatttttaatcttgtgaaagagctaggtttttgcttaacatttcctcattaagtgacattctgtacgttgcctgttgagccatcagatgcatgagtggtgggatttgtctgctcagctggatggctaggtgtgttgtatgtggtgtgttttttgtcttgatattctttttgataggaccatgttccttaatgtagtgcatgctgtctctgaaataatcttgaaatctcttgtctagctctttttaaaccatcttgcttgtttccctttcatcactgtttcttttctcacccttcctcaagctgactgagtcttctgatgaggtaacaaaatagcctttgtcccttgtagtttcttgtttcttgttccttcccatttctctaacttcataaggtcattaagactaaccaacctcctcttcaacagtctgggtttggcatacctttctttcttacatttcatatttccattgccaaaacaacttttttcctgaaattaatggtatcgtgaaagaaatatagtgatcagagttaaaataaaagctcttgttgaatatatgttttatgcaattttaatgaaaaaatagatgcctttaatgttgagaacttctcttttgtggccactgctacatttcatggatctctctcacttctgcatcacattaatcatctggcaaacaaaccagtgttcccagttttaatttgacaagtgaaaaga

SEQ ID NO: 52481 - DNA, 1357 bp, Bovine  19866880617545
  misc_feature (1)..(1): n is a, c, g, or t
nctgaggcctggcatctgtacaatgacgtgtaccgtgcccggcaaggtggcgtcatctccatcaccatcagcagcgactgggctgagcccagagacccctccaaccaggaggatgtggaggcagccaagagatacgttcaggtcagattttcctctgggtgttgtttttgctccttctcttttcccctcctgtcatgatctaatgaaaacagaagtagactgtgaaacaaagattaaggatctaggctttgttttgctattaccttattttgtgcacttgggaaaatcatctaaccttttaatatcttagttttcttgtctttaaaatagacgtgacctaactaccccacagctttgctggaatgaaagttctttggggttgagttttctttcaagtcttaaaaaatcagttatacatgcaactcttactggatgcaacattggcttgagactaaaaaatagaaattcagcctcttcagtctgtggtttgactataggacagggctgcaacgtcacacttcacctctaggtgtcactgtctgattttacttactctgcctaagacttccttaaattggaattctgtgaaactcatcagcgcccctaattttctaattccatgagtttaatataaagacttgcatcttttggtcatggaattttgctcttaggaagtagagacacaagtaagcaggtgccaacatggcccgccttatttcagtctgggtccctgaaaggagaaagagagaacagccctcttcaggcatagcttgtccccggctcctgctactgtctctgaaaggttggaaggtgccctcttcgtgtttcaggatcaggaaagaaaggcaagcatctctctctccagactgctcccacgtttggccctgaggagaccatgcagcctggcatttctgaaaggacaccaatggccttggtttgccaaatccttcacaaaggaacttgacaaaagtggtcaaatgaattaagtgcaaacgagaatttaatgtccccatttggtagtcagcttgtggggcgtgggggaagcctaggaccaaaattaaggtattccctcatttcagatgcacagaactgatgaattagagctataattcatttttggaaatcaaaaacaaacctgcagaaatgtcacgctgtagtctcatcatcagtctgttagtgagctgtgattctgcagcccaggacagtgatctgcacaccccctcatgaattcagcttccccagaaacccaattcctcacctcccagtgaactgaagcttcttttactggagcgagtatcttctaaacctcatctttggctgaaaatggaaggctgctctcactccacattccaggcag

SEQ ID NO: 52482 - DNA, 1611 bp, Bovine  19866880618268
  misc_feature (1)..(1): n is a, c, g, or t
ntggcttgtggtcgtttgcctgtagattaggtgaaaggaggaaaggaagcacagaaacagtgatacccgtcctgattagaaactctgcctccacgtctggcatcactgggatttgtctgactgtgcttggggttaaggcacatcagattgttcatcgaaacatttaatgagcacccgccgtacaccagacattgctgcactgacagccgggccaccaaggtgacagatgccacgtctagtcttcctagtcttgctggagggaagccagtcagcagacacataactgctcagtgcagtgtgatagtcccatgacgttcagaaagtgtgtacaggaagctgcaggagttcagaaatcggggggagcagagaaggtgatgctgacttacgtcctgactcaggaccccccactgacaggaagggcttgactacatgactgacttgaccatgtcttgtcctcttaagatcgaaggtgcatggagagcagacggcaaaggactcagtatctgggacacgttttctcacacacccctgaaggttgagaacaatgacacaggagacgtggcctgtgacagttaccacaagatcgccgaggacctggccgccctgcagaccctgggcgtgacccactatcgcttttccatctcttggactcgcatcctccccgacgggaccaacaagtacgtcaacgaggcgggcctggactactacgtgcggctcatcgacacgctgctggccgccaacatccagccccaggtgaggggccctgagcaggcctgggccaagtccacgagagggagccggctgggctgggacgcacatctcctgggaaaaatcagtgctcttgccaagtttaatttttgagttgtctgtaaagattttccttctgtccctgaccaccccctcccagctatctattcccctccttacaggtgaccagggctgctgagtcttcacgtccttttgggtatctgaccagtgggcaatatgtgtgtgtgtgtgtgtatgcttattaccctcctttttcctaatggtacgatacacatagtttgatactttttatttaccaatagttcttacaggtatttccatatccctatgtgttttcctcatttgtcctgtctttttagttatgtggaaactgtacctcacttctctagtcacttccctataaatggacactcttccctgttttcactcttcttcctttgtaaccagcactgcaatgagtgtgtatgcatgctaagctgcttcagtcgtgtccaacccttcgcaaccctatggacttcgggcccaccaggctcctctgtctgtgtaactgcagttacataattacgctaggatagacgtttataggacatggtcctaggagaagaactgctgaaggcaaaagttcgtgtgcttttaagctgtgagttcttatgaataataaagctcatatgggggcttcctttgctgccaccagatcttttacgttttacctgggagcctaagaacccttggccttttctcctgggccatctatgataaagggccagagggcactagctccaggggactgctgtgtcctccgcggtagtgattggagattacgtacggcagccagagtatagt

SEQ ID NO: 52483 - DNA, 4718 bp, Bovine  19866880638130
  misc_feature (1)..(1): n is a, c, g, or t
ntacatgtcaattgtatctcaattaaaataacccctcactttaccaggatttctacagcaaaagagaatattcagagaactgaaataaatcgtaggattgtagttttgtctccacccccatgattaagtaattcctgctgcagtattggccctaattatgtatcctctccatctgtgacattctacagtcaaacacttaaaaattccacagtccttgggagtgagtgattttcacagtgctccttcctacttctttctctgtgtctggctccttaatctgactcatttgggaggcagctcgcacctgctttcaggagcacaatatccataatcgcaacacaccagcttgtgtgtgcagggggcgacgggcgggggtgggttgggatcccctgggaccaagtagggctttgcagatgctctagagggagagaacatctgcaccagagcctggtaacacctattgctcttgagctgcaaaaagtaaacccgcagtctgggctggaagccagccaggctccaggcaagctgcggatggcagaatccccttcccctagcccccattttgggtttcctagcagtttgattctgctgggccaacaagtggggaaagctttctataaagaacttgagctaaactggacaactgggtgctcaaaacatcagctaagaccacaaattctttaaacgatcataatgttctgttttcagctgtctcactctatattcattcatactcacaactgtctacaactgactggtattaacttacgagaggacaaatgacatgagttacacccacaagaaacactcctatagagaaactgatgctttgtagaatatttgtaaagtggggggatttcatgtctttcatcttccctaagtctgaaaatgaaatcttcaagataggttaagtcttcaggactgactctcatttaaaaaggtgattttaatttacaaaaagacaaagtgggtatatatttgtaaacatttattcttttgaactgaaaaaggcttgcatcagcacacattgtacagccttgcaaattgaaaaaaaggttccttgttcataagtgcaatgaatctttgatgtccagtgatccgctgcaaacaatgaaaacacatttttaaccacttaagaagtttccagcactcatcaaatgcatttcctcaggtgaccaaaaaaaaaaaaaaaatccacaagaaagggaaagcaaataagtggcatttagttatcggagggagactttaaaaaaaaaaaaaaaaaaaaaaaggaagtattttcctgcctagaatgattcctattcccttttgaatctaagtggtttgattaagaggtgttaagaacataatttacttgacagtgttcatatgacctaagtgaataaggaaaggaccctataagggaattctttattttctggaaactgtttgtgtttagagatacaggggaagagtaatcttttgtttgtgagctctccttagtcacctactgggccccccaaaagacagtatgtagttttaacttggctactccactcctgcattcttattcccccaaattctatgtcaggtcacactgtgctgctggctgcaaaaaagaaatacaggttgcaactggtggtactcattttgaagaataatttgctgtacaatcgagctttggatctgatacaagaattcagaaatataaaacaaaataactataaaagttaggaggcatttgaacagcatttcctcagaaaaagctgctaactctgtatcattctgatgtggattcctacagtcatttggggtgaaatgtgcatttttcccctctttgctggatcactggcctgtcttcagaagttgtaacgccatgaccacacatcctaggagtctctatcatgttaacagaagctcccgataccaagccagttaaagatgggtgacgatggggggatcacaaaaggccaagggtctgaggtggctgttactgagaacttgccctttccaaaatgtgaaagtcatagtgcttcttgcttgttctcagcttaaacttgttaaccgagttaatttgtttcttcaatgcattctgcgcagcggagatggaggggaatgtggctaggacggtgtacgtggaggccaagtcactgggtttcgagcgttcggggttgacagtgctgtcaccactgccacagcagagcgggtggcgacgcatttggggctgggactgagggtcccggagccaccggatcttggcgccaattttaaagagttccccaaagagcttctcggcttccatgcgagttattccatctggtagttcagtaatttccaagaccttcccaacaactagaatggaaaaggtaaagaattaatccctgttaccaagaggtgggcagaatgtactgcagactcaaatgacacaagaaatgaacataattttctaaaaccattcaaatccacagttatacttggtatggccatcttctaaatatttcttacacccaagcaaggggtgcagagaggcccttgccaccggccacactcacagcctcacatacaaaatgcagcctgtgcagtggcttcttcaaactaggtgtgtgatcctggtacagtttcctgaacttcagattcccattgtcaaattatacgtatcttcaatttttattttttggctgtgtcgtgaggcacgtgggatcttagttccctgatgggggatggaacccatgcccccttcattggaagtgcagccttaaccactggaccacaagggaagtattctgtatgttatctttaaaacagcacttgccctaacaaacccaaggctattgaatagaaagttaaggtacagacttgaaagccctctgccacagaaaggcaatgtatttgttcttcagactatactgcctgaagggtataaagaatacttcctttctcaaagaacacagaggcaatgcatttcattctacctattcctctctcacatctctttcgaatccctttggtgcctgccctcctcttaaacccacctttgtttcagtactcccaaatccgaaatgagacagaattaaaagaacattcaagaagcctgccttatagacagcataactgtctaagactttgtgtaggattctagacaaggaaaacccacttctgtggcgtggcagttttagactctcaggccaacagtttatagaagcacatccggatgcctcttggggacacacctgcttctcctgcacccaggtcggtggatgcagcttttttggcttgtttccttcctcggttgccatgcctgttgccagattgaccctgaaaatccacaaacatgagaaataagttgatgctgctacaaaatgtaattgcagtgtttgaccacttaacaactaactgcactgagtctggggtttgtactttagaagaaaaaaacccccacctctaggccttctgaattctgcctcagtggcagtagaactttggcccatcacttgctgacagtcttttctaagtaacggcacccaatgcctcctgccgcccgccccccacccctcatatctggactgtgttgggaactgatgctcctaccaccttctccctcactctgctctcggtagggccaggacgccccactctcaccagcagaagtacaatgctctgccaacaaagcccaggaagtcagacagcagctctcacacctgttgggctggaatgtgtccgtgcagaacagcaggagggttgtactgcagggtctggccaagtaacgggtatctggcatctcctgaaagttaataaaacatcactttcacattttcctttattcgggtacaaagtacttcacagttttctcagttgtctcaggatgagagagggaacatattctaccaaatagaataaaaaagtggaggtactgatatctttttttaaaaaaattaaaagcctccacatatccttcaaagaactggggtaaacttctgcaagcactagggactaataacaacagttatgaaggaggttaagtgggagagctggcagacaaattagcatggagagaaacttcttggtaaaccttaacattctatgtgaaatcctccaaaggaactataagaactcattccacccatctgagatactaaaatccacattttctctgatggttaaaagtgaacagaacatacattcaggggacaaaagaaaccttggaaaaacatgaagctctctatctcccccaaatcattattaattactataaatatattttctttcacaccttagtgcctagagtcatcccatggaaagcgcttcacacatgctgactgcaaaagttttgtctgtaatgttttcatttgttgtagtctcattttaactgtaagtccccaaatgtagcacattcagtgtctggaggagggttatgggtgggtgctaagagagcatcttcagaaaatcatacagtgcttctcctgatagtttcctaacagagacaagcaaggcgtgagcctcttgctactgtgtggagctcttttctgatgaacactgtcggggtgcttgggcagctccctggtagaacacacccacgacatacttgctccttcctaaacactagctgaaaggcagatacaacatgaaggtttagcactgagaccagagacacgattttaagcatgaagatggagtgaagtggtatttcattgagattttaatactcccttccttaatgaatgatgttgagcaccttttca

SEQ ID NO: 52484 - DNA, 1343 bp, Bovine  19866880644055
  misc_feature (1)..(1): n is a, c, g, or t
natgtagaagccttcagaatgagatcaccttgggctgtgcagggatttagaaatgggacacattctccaccttcaagaaattctctagaaggggcaaaacattgaataggtaattaattaaggctcactctattttaaatcgttgttacttcatttacaggtcttcaaagtttctgtgctgacaaacagtaaacacagggcacgcagattctgcgatccactgtggagacgaaatagtaatagctatagtcggcactctgttacactccaaggaaaagagaggatggtgtgttcagaaaaattaatttgaatacaaatacgctgcctctctttggaacttagatgtcttcaagttacacagactctgaggcgtctggagaagatggaaaatgaaaagttagaaaatccttcttcagtctgggaaaagacaggctgccctgctcactcaatgtgttgggtcacacacttcattaggaccaggaggccattaccaagatttccatgaacatctatctgaatattgctggccttcgggagacagactgttcacatccattcagtgacagaaccagggaaccagcagtgctgacaggaattagaacgggagacttgctacatgtgcctcctacaggtaaactcagacagaattaaaattagagatgaaacatggcaggacataagctcactttgttaaactaaaggaaaaggtacattactcaagaatgttggaaagtcctgcatgggaattacaatagctactttgctgttagaagtgttaaaagaaaaactttttatgatagaaagaactcaagactggggggcagagcccacattggacctcaggactagtatctggtagcctggggcatgtcttataacccacttggcctcaggtaccttcttgatctctaatttctaagataagggcatcaggagcctcgcagcgttgctaggacagaagagctattacattgtgaaagcttttagtaacgtgtaaactggtcacacagtggtaaactattgttatagaaattaatacattcatttaaagaaagagtcttagtaccactacgcctgacaagtaaaaaacctcttactttgtagaagggtcccctggcttgggcccctttgtgatcaatcggacatggcccccgtcattcttcaccttgtccatcgaggctgcagcaacatcttctttcgttatatatctgaaacaaatacacatgaagtggatgtcctttaagagtttctctatttcatgttcacattgctccttgcaaaagcagtaggagaaaaaggaatatataagtctattcaccgtgctaatacttaaattagggaac

SEQ ID NO: 52485 - DNA, 1433 bp, Bovine  19866880704798
  misc_feature (1)..(1): n is a, c, g, or t
ntcaagaatggggattaccctgaggtgatgaagacgcggatccgtgacaggagcttagcggaaggcctcaacaagtctcggtaggtcctggtgccacgccctcagccactgaggctcctgggtggctggcacaggtgctgttggggttggagaggagtgtcttaggcaagttactgtctgagcttccatgcatgctggaaagacaacacgagtgtgtatgtggagctctcagccccggacaggcacagctctgacaaaggcagttgctcttgttattctttagaataggcaggccatctggggcacccacttcttagtgacccactggctccctctttgagcctcctatagcccagctgtgaggattaagtaatccaccccaacccttacatcatgcgtgtgctggcctggttagggaagtcctgctgagccaaaaggtctgatctgtcgaccctggtctccaaccagcaagcgagtgctccagttcctcaacacaaccgtgctgaagcacctactgtgtaccaaggccggtgccaggcccagcagggtccacatagaggggactctaagtatggcttcctcaggtgctgacacaccagctggaaagacagtgaccttcatcactccagggaattctattccccaatttcttcatgcgttgaagactcagatgagatcagggcaggctgggtcgacccaggagaccccctggacaagacaggatatcggctgactgggccttgacaatgaacagcactggggaaagcagaaggctttcgatccaagggaaagggtgtgagcaccggcctagaggtaggagtgagtggaatgctgcaattggggacactggcccagcagcagggagagccaaggccgcgtggcagagcgactggaggctggcacaggtgctcagtcttgaagccacaggatctgagaagcccttgctggctcctgagcagggaagtaaaaggtatggcagcggtggtgtggggaacttgggccttagttttgccccagtatttcagaaactccaggaagtaaggttctttcctaggttaatggtagcaggaaggtcaaaatgaagtgtcagggcctaagcagggcattctctcagcaaccctaaaccagcagcatgtggtcaggatctgggagaggggaacctctaagtgctgcacacaagggcatgttaatcacatcacacagaaaagtctaagaatacatggaaaaaatgtaaatatgtatagaaataagtcacacagcagagactggcacaacattgtaaatcacctatatttcaatttttaaaaatatatatggaaaatgttctcctagatgtttaaaaagaaagggcagtaaaatcatgagagcagaaaagtccagatctcaaaaggtcgatttgtaaaagcatttcccctacttgtaaggcacagact

SEQ ID NO: 52486 - DNA, 2579 bp, Bovine  19866880796016
  misc_feature (1)..(1): n is a, c, g, or t
nttttcctgtgtttttaaatcatgagtatgtattatgtgatgccaaaggaaaaccaaaagaggaagtgactgccactattggttctagaatcctaggatgaaatttcacatttctcactatatgcctggcacatattggggaattaataaataagaggcagggtgagcagtggttaagaattcaggaatgagacagagctggatgtgaatctcagctccaaagtttgctgaccaaggccttaaagtcttattgagggtgaggacagataaagtgggagactggcattaacatatgtgctgtgctgtgctgtgctgtgcttagtcgctcagtcatgtccgactctttgcaaccccatgcactgtaagcccaccaggctcctctctccatggaattttccaggcaggaatactggagtgggatgccatgccttcttccaggggatcttcccaacccgtgaattgaacccaggtctcccgcactgcagatggcttctttaccagctgagtgacctgggaagcccattgacatatacacattactatacataaaacaggtaactaataagggcctactgtatagcacagagaactctactcaatactctgtaatgacctaaaggggaaaaaatttacgagtggatatatgtacatacgtaactgattcaccttgctgtacaggagaaactaacgcaacatttgaaatcaactaatacgccaataaaaaaaatttttagtcttcactgagctccaatttcttcacctataaaatgtcacagaacaatccttgcagattgctgaaggagacactcttgaaagcacttaacaccattcctggctcaaaggaaatagtcaataaaatgaaaaccatcattattatttattgacttgatttatactggaagcactcatgacaaaaaaaaatctaagcatctatagaagaactttctgctaaattataagaaatccccaattagcattaaaaagaaagaggcaacactctgaaggactcagaacactgtttggctgaaaagtgagatgacattcctgtatctaccagtattacactataaaatttatcatctagttgatgtataaacaccactcatgagtctaggaaacaaacctatcagtgtttcaagtaaaaaaaaaaaaaaaaaaacccagagaaaatatgcttagtttagtccacaggtagaatgaaaaaactagcaaaacatgactaatgaagatctgacttagagatacaacaagtaaccctaccattaattttgtttggcttctgtcttcctcactacttttgcataaggagcctgtctttttggcactgctattcctaaatctggcatagtgcctggttggcctgggtttaattgctcagtctagcaattaaactagactctttgcaaccccatgcactgtagcctgccaggctcctctgtccattggattctccaggcaagaatacaagagtgggtagcctgtcccttccttctccagcggatcttcccagcccaggcatgaaacccaggtttcccgcactgcaggcagattctttacagtctgcgccaccaggaaggcagcatagtgcctaacacaatattaaattctcaataaatatttacaatataacttcgaagacaaagtctcagcgaaagaagagagaaaattgagtaagaacttatcggagaaagtctgtcaaaatgatggtgaaagccatcaggcttggggagggagtcctgtttttggaggggttggggggaagaacttgtcttataccaccttctgcatttcctttgatcaatgagttatccaaggaacctcaaagggaacgttcaacggtaaacacacacacacaacttagcacccagacaggggcacaaacagggcctagtgtgttcaactttttaggcttttggctccaacgcctttctgatgatctgtattcatcggggtactatagttggcatcctgtcgacccttgtttaatgtctgctttactaaaaaaaaaaaaaaaagtaatgcgcttattctcaagtatcaatcatgagcccttctgcagtttttcttcgaaccagcctttcagttggtttgtaaaaatgggaagacttcgctcagaacttctgagtcgcttccttttagtcaaagtgaagacgtgaaggttttagaggcacactccccaaatttatgcgtgcaatctaatacttggcaagtcaaaagacaagtgagactccgggattgacaaggaggctggagaaccgcatcttggactttggaactacccccatcccattttacccactctttcttaaaatgcaattaaattctgttcaacttcctatcactcacgcaagaaactaccaactaccccgccacgccacacccggacgaccacacctggtgtatccgctgcagaatctccaactcccgccacgggtttggcctgtgtccgtcccaaagcggaagtgacttcaaagggacaaactgaaagtaatagaatgcaaatagcaggaatctaaaacccctaccacgttgcgagaaaatactcttccccgactcgcttttctaaccctttctcgctc

SEQ ID NO: 52487 - DNA, 1224 bp, Bovine  19866880854223
  misc_feature (1)..(1): n is a, c, g, or t
nacctgaacacaagcactgcagtatttcatcagtcttatcggatagccaagagggctgcaaggtgactaatgagcaggtagcatatacagtgtggatatgctggacaaaggaatgattcatgtcccaaatgggacatgatttcctcacactatcacaacggtccgaaatttaaaacttatgaattatttttagaattttccatgtaatactttcaaagtgcagttgcccctaagtaattgaaagcagggaaagagaaggggcagatttgggggcactgctgctgctaagtcgcttcagttgtgtccgactctctgcgaccccccagacggcagcccaccaggctcccccgtccctgggattctccaggcaagaacactggagtggattgccatttccttctccagtgcatgaaaagtgaaagtgaagttgctcagtcgtgtccaactcttcgcaaccccatggactgcagcctaccaggctcctctgtccatgggattttacaggcaagagtactggagtggggtgacactgccttctcccttgggggcacaacccatacgctaaccaagctatggaagacccaggctctcatcccagctctggcacttaaggtggcacatttaaattttctgggcctctttttttttaatatcagagattaaaatgttgttaggattagtatgtttaaaacttaatgtgatttttatgttaaaacatttttttttaattgataaactgcaatcatacataaatacaatgacaccaagtcagcagattagacagatgagggaagaagttgaaaatgtatttagtgtgtttagtcttttactaacgttacaaatataaagcccaggataatggaacaataaattaatctaatatttttggatactttggattctaattatccacagtatattttttcactttcccttcctctaattataagaaaaaatcaacagcagaacagacagacctgtaagaatagaaaaaatatacatgcatatacatactggcaacagtaccactgaagcactcggggcaagttccaaatccaataacttctttttataatcttctttggtaaattccctcctgggaaacattgttgctaatgaaaagttaccgtaagtgttgccaacagtctgtaatataaaaataagttttaaaaccttacagttgagcctttttaaaaactaagatattacaaactcatacacatt

SEQ ID NO: 52488 - DNA, 1520 bp, Bovine  19866880990581
  misc_feature (1)..(1): n is a, c, g, or t
ntgacagttccttgaagatggagctggcctggcatttagtccttactgttcttttaagtttttcttgctggggtttagactgggactctgataaaaatttcatctcagctgctggtcctctaaccaacagcttgctacacgacctgagagatcccctgggaaaccaggcttctccctttgtagcagaagatgaagaaatttacgtttgtcgccagccactgcctgcattcctgccagagtactttagaagtgtccgcgccagtatgatcacccattacaaagtatttctgccatgggcacaacttctcccagaaggaatctcggagaacccagacaaggaaacagtgctgtgctataggcaactgcttgaagccctcaagactgctcagcttcagcccttggtggttctacaccaccaagaccctccctgccagcactctccagagaactgagacctttgccgatctctttgcggcctatgcctcctttgccttccactcctttggggacctagttgagatctggttcacttttagtgacttggagagagtgatcacgaagcttccccaccaggaatcaagatcttcacgtctgcagatgctcactgatgcccacagaaaagcctatgagatttaccatgaaaaatatgcttctcaaggtgagttcacacaaccctgatggctgacccaccagcagccttcatcatacaccttcatccacccttcttaaagcaggactcagcatttctttccacttactttcaacagtcccctcatagctatttacaagtgagaaattaatatcctgaagatttcttggtggaggtaggtaggggtggcttgcgttgtaccatgcccaacatcccctttgaaaaatgtctttaaaccctccttacccagtcttgagtctacactattatcaattatctttctgtctttccttcttcagtcttgcctccctgactctccctaggatttcaagattgcccattttctttcagcctccctgctttcttttttacattttaattttttatactttttgaccatgctgcgtggcttgggagaccttagttcccaacgaggggtcaaaaccatgccccgtgtaatggaagctcagagtcctaacccctggaccatcagagaaaccttgagcctccccgtttttcttatgtgaagagaattacatgctctagttgaagcttatattccagcaggggagacaaatacaagataaaataacgatacgctgatggatagtgagaagaacatgattacaattgtccatattcctgcttcatagctcatttaagcttcccattcagtaggtctggacagactaaggacattgattttaatatattccctagatgaatctgaggtataccaattttgagaaccaattagataattaggttaattggattagatatgctttctagtttttattatatactgagtatttgtatacttactatatatctgtatacttgtatattctactttttaaaatttattttt

SEQ ID NO: 52489 - DNA, 1219 bp, Bovine  19866880991126
  misc_feature (1)..(1): n is a, c, g, or t
nctagtgtgaaccataccagaactgtctgtcctttaagattttcacctgttcactttttcctaagtttttatcaagtatatgatataagtatatcaagtatatgacaagtgtaactcattgtgctaaatgtaaggaaacaaagaaggtacagctgtggccttagcagagactacaaataagaaagcgaagcgcatagccagataagcactgtgaaagaagtgtgcaatgtgtgtgtagaacatagaggcatatccttcgaggaagatgtagggcttttcccagtattcagcttatccatctaactgtcagagccattcattcagtctgtggatgctggaggagccatggttttaatcagctccactgatcgaagaatagtagagaagatttgagcaggtcgtgattcagagatacctgggtctccatccctcctgccacttccgggggggaccttgggaaagttacttaatagctatcgtcatcagtgtgtgcatgctatgttgcttcagtcatgtctggctttctgtgaccctatgggctataacccaccaggctcctctgtccatgggattctctaggcaagaatactggagtgggttgtcatgccctcctccagggaatctttctgacccagggatcgaacctgcgtctcttaggtctcctgcattggcaggcaagttctttaccactagcaccacctgggaagcccaatcaccatcagcgtatcaattaaagtttttattatttttaaaggacattggctattttgtcaaatatataggaaccaccataaggaaagcatttttaatgttaaatgtttatgcttgtgttatttataagagtggtgcatttaaaaaaagtaaatatttccaaaaggagttttgtgggtttttttttttttttttttttgcaatctctaaaaatgaagttcccttggaatggtggattttctttttaacttttcaaatatcctatcaccacactatgtagcacaacatgacaggcttgggattatagagctgggaggaacttagaggtcatcagacccaaacccttcgttttagagatgaaaaaactgacagtcatgaggttgtgagatggctcatggccacttttgtaatgaaaggcagatggatgtctttcacaccatttttgtagtcatccttgagggcaaacacctagctgacatgttagagtaagaaaaacatacagcataca

SEQ ID NO: 52490 - DNA, 1211 bp, Bovine  19866881085749
  misc_feature (1)..(1): n is a, c, g, or t
nttgatataggttttgtggtaaaatatcctgtcggtgtcttcagtttggggtctgtcagccccactccgttctcagtgatgtaaacggggatgtccccatactcttccttgatccagttgagcagtctccgcatcccccaggcggcagccctgttcatggctgtggcaggccaggaagtgtcctcccactccagcagctcctggtcacttgtgtaggagggtgggtttaacctgggtgtcgtgtgttgcacaatcctggaggagtaagtgttgaggcagaacacgtcggcggtagctgcgatgtactgcttctcctcctccgtgaagctgggcaggcgggaggtggccaagtgctgcagttcactcctgttccccaccttccacttcatggcatcggggtagtctccgtttcggaagatggggtgggcaaaccaacccaaggagaactgcagcatccggtcagctgcctccacgtccctggggaccagcgactggggctctgcccagtgggaactgaggctcaaggagatgacccccttctgctcttgcctgtacttctcgtcgtacgtgtgatagactctggcatgagctttgatgattgcatggccaatccggtaaggtccactgcctgagtcattcacatttgggggaaattcccctgagccatatcccaaccaggcctggtacgtgggctcattaaaagtcatccagaacttgactctgtcaccaaaggtctggaagcagaagtctgcatagctgttgaacaagtcaaccagtaaaggattctcccagcctccgatgtcctgcagggcctggggcaggtcccagtggaacagggtcaccatgggagagatgttgttttccaccaagccgttgatcagcttgttgtaataatccacaccatgtgcgttgacagaagtgtttctcccagttgggaaaatccgagaccaggagatggagaagcgataagccttcaccttcaatgcttggagcatgttcaggtcggcatccaggtggttatagctgtcacaggccacgtctccagtggcattgtctttcacgttgctccctggtgtgtgggtaaagttgtcccagatgctggggcctttgccgtcagcgtcccaagctccttcaatctgataggctgacgaggacacgccccacagaaagtcatcgcggaatgtgccgtggtagaacagatctctctcaaa

SEQ ID NO: 52491 - DNA, 1197 bp, Bovine  19866881102348
  misc_feature (1)..(1): n is a, c, g, or t
ncactccagtactcttgcctggaaaatcccatggatggaggatcctggtaggctgcagtccatggggtcgttaagagtcggacacgactgagtgacttcactttcacttttcacttttatgcattggaggaggaaatggcaacccactccagtgttcttgcctggagaatcccagggatggtgtagcctggtggtctgccatctatggggtcacacagagtcggacacgactgaagcgacttagcagcagcagcagcagcagtggttttgatttgcatttctctgataacaggtgatgttgagcaccttttcatgtgtttgttagccatctgtatgtcttctttggagaaatgtctgtttagttctttggcccttttttttattgggttgtttatttttctggaattgagctgcaggagctgcttatatatttttgagattctttgtcagttgcttcgtttgctattattttctcccattctaaaggctgtcttttcacctcgcttatagtttcctttgttgtgcaatctgtttgctattttaaattgcattttttattgctgtctgcttttcttgggcagatgcattcctttcatgaaagaaaatgaaacttatctcatcatgataaataatttaatagaaaatatctcagtataattaggatttttcaaactctagtcatagaatcagtgttttccaaaatagtataaacacaagcattttagaataaacaacaaaaaaggatctggatttctatttggagttctggagttctgtcaacaaaaaaggatttctattcgtggtaatctgattttacaaatgttcccttccaattacccttcagaactggaacatttgatacaccataaactcaatcctacatctcttgaaccctagtacttaactattctgaatagctatggaaataatttcccagaaagaatgtaattgctaaatcactacctaattagttgatttcctttatgtacaaaaatgcctgatatttggtaaaatacctagattttaaaatgacatgatatttctgattatgcagaaacaatttacattttttcttaacaagtgcccccaaacacttacaacactgaaatattatgggatgcttatttggaagccaaggagcttgttgctgacatagtaataatttggttgtttgcacattttataaaatattaaaat

SEQ ID NO: 52492 - DNA, 1358 bp, Bovine  19866881186053
  misc_feature (1)..(1): n is a, c, g, or t
natggcacagtttacaattgagactgtgcccagcaaaacatattttaagtgcatgcacacacacacacacacacacacctcttaaaagaacaaaaatgaaaaacaaggatcattgctttgctgtctaaattaaatgtggtttttgttgttaaaaacattaaaaaaatcttccttagtataacattgtctaagcttctagtctgaaagaaatagactgtttcatctcacactttgacagagatgggctttttgaaaaaatttataaaaagagttgaaaggcatgaagcttgtcatttgagctgattttaattccaaatgttgatctatcctgttaaattttcactccagccttgatgtagggctcaccagtatgattttgagtttgtccccaaaatgagtcagggaggactgacccagtgtgaactgagcagctcctttcccatcctttccttccctctttctcccaggtttgtgagttgccttctggagcaacccgaggtgttagtcgttggtgcaggccgaggacacgctggcaggatcattcacaagctgtttgtgaatgctcagagggtatgtgagattccttcttgactgtgtcatgctctctccaggcctctactcagtaaggtactgttttgattcccacacatgaagctgctaaaggcactgggttcaaacattgaagaaataatgactctaacagtgacttcttagtctttgaaatccatctgctcttttacacatttaaataaaatgataagtttatttctgaaatttgtacctaagtttcagaagttagaatggtctgaaattccttgttaaagaatccgatagagacttgggtagcaatgaccagtgcagtggtgtggaaaaaatgtttactgctgtcaaattagaatagagtttagttttactggttttaaactccatgtactgcaagtggattcacaacttggcttgtgaaattgcaaatcttaactatttttataacagtgaaaagatataacttcaaagttttcctcagaaagaagagcaagattcagatttttaggacagtggaaacagtcttcagcatagaagaaaaagcccaatttgaaaacttttctgtcattacctttattggtgaaaggaaatgtttaaaaattatatggtaccttctgacattctaaaccactaagatttgaattttttatgaggttggtattagttatactctatgttgactctttgtgtacaaatgtttactggttgtttactggttaagaggtgctggctttttgcacatgagtctcacattaggacttcttaaagactctataaaagtatttgaagcatagtaaatatagggtgccccttct

SEQ ID NO: 52493 - DNA, 1632 bp, Bovine  19866881222694
  misc_feature (1)..(1): n is a, c, g, or t
natggaagttctttgaaggccttaaaggtattaagctctgtcatcaaagagtctcagcaaaattcacgctgagctactggcacatttatctaacctatccaaaggttctttgatggcttatgtatttcatcaacatgtgaaacttcattttctctagcatttgaatcagtaggtttaacatgacccatttcctccttatgacaaaaaatgtttcctttacaagattttaatttaggttacaattggcagacattctgttttataactattaatgtgccacccttcacttcttgaactgccaactacattctttccaacaaaggatcacaaccctctttcaagaaagcacctagggattatgttcaggggaaaaaaggctcaaaaatgttttatttcttttcagtcaaagagcatttcatggtcagtaaaaatagcttaaaaacagcttgaggtagaacaggtgttgtctttcaatggccaccatctacagtcatactctataaaaggatgtgcacaacaaagtgcaaatactattatagcttgaagatgctgctgctaggcatgtgtgaacaccactgagaacctcctggtctccagaaattcacactatcccctacatttgtagaatgagcagatatagcttctgtttaaagtgcctaaggttctgtccaatttaattagttcaaaatgaataaatccagtctaatacgtgcttataacaggaaaacatagatttgtcattgctctgattagcgtaatcaattatcacattgcaaaagagaacaaatgctaaccaagctgtaatttttgagaactgatttctaatacgtttcagattggatttattaatgactttctttcattattccttgaactatacccactacatcaaattgttttagtagttattaatagtttataagtttctgttgctttctttacaattgtcactgaaattcaatggggcattcagtctacaatttctgatgtcattcatttgctacctgttaaaagaagttgtggtttagctagcactttgaaaatactgagatgataaaatgttctactgtctctctctagtgatcctgtattaggcatgacattagatatgcttggtaatcagcactgcatatgttcaaactacttgaaaaaaaaaaaaaatggaaaaggcacgtgatttctgtcgaagtgccttctgctgaagatagaaaccatacacccttctaagtatttgaaaataacagaaaagagagaagatgtcaaaccagcatagtagattgaataatgatttacagacacgataaagcagtaactcttaattatttttagaccataaacggatccggcttgagaagcttattaaactctgcagggatgcagcactcagacatgagtaggttcatggacattttccatgtggttttaggttatttagaagcacatacataaatcctagttggcatctcttgttttatattttatatatgcatgttatacaatgttttgtatgtgtgttttatatgaaatataaaacaagattgttaattaacattcaagtataggcttgggagaaacacacacacatatccacacatgcacatgtatacatatatacacgcagattttacacaa

SEQ ID NO: 52494 - DNA, 1205 bp, Bovine  19866881229674
  misc_feature (1)..(1): n is a, c, g, or t
naaactggctggggaattttataaacccataaaaatcatgaaaacacttacttcatcagccaccatacacctggaaaaaaataaaaataaaaccaaattaatgtcttaattaccaaagtcaaccatttaaaaagttttgattaagcgttgttaagtagcttgccacaaaacagtttacacattatagcactaagccagagagaggtgtttataagtgtgcataagaataagggcctttcctgacttacaagactctccagctgccaacggcatatggttatgtgggactgttagtttcagatacgctgtttcccaatgcccacccatgatgatagctacaatgacccttcaaaaacgtgagcaaaacagcaagtgattgtaccaatgacttccctccttaccagtaagtaaggtttactggtctcccctagagattagacagatgctgtattaaagtgcattaacatgttttacaaaaaattatattaatatatgctatattatacatgctaggccactttcaagctgaattttgtattctactattatttcactaaattttctcctccctattctttcttattaacctacagaagtaaattctatccactggaaattgaggacaggggcataaactaaggtcataattagaagaaaaaagcaaagaacaaaacaaaggatagcagatacggtccagatcacgaggggtcctttagagacagtgagtacatcataaggggaaaaaccaatctcttaaccaaggtgatatccaggaaatttggaaaaaaagaaaaactggaatattataaaaatcagaaaggaaaaagtccctatttgcatttttctccttcctttaatcccaacggccttgacattatactatattacatgctttcttttaacataaaacacaaattaagaatttggtaataaatacattattaagaaataacctacaggtaaaatggaattttgttcttaaaatgaaaaaaagatggtaggttatatattaagtttttatgggaaaataaaatataaatagtctaactgaaatttaaaacatatgcaagagtaacaagtttattacattttttccaaacaggctggaaaagtagaaaactaaaaagcaatactttgaaaaatacgccttatttccaggaagatttacatgtatacctactttttcattttacatccaattcaaa

SEQ ID NO: 52495 - DNA, 1278 bp, Bovine  19866881404407
  misc_feature (1)..(1): n is a, c, g, or t
ntaaaaattcagatactactttccctttttaatgattctttaagacattattttttaaatatttacttatatatttacttggctgtgccagggcttagttgtgacatttgggatcttatttcctcaactaggaatcaaacctgtgatgcctgcagtggaagtgtagagtcttaaccagtgtactgcccaggtaagtagcattaattaattatttgtgatgaaacattaggttaggagagaaaatggtaacaaatgaaaatgcctgaggaaggtgaaaatgcagtcctttggaaaagggaaggtagcagtaccaggtaaattacaaattgatggggagtgaatggatgtcttaaaattctctgaggctgtgactagctttctgcacttaccttgcccagagacaaaaggtctagaaaactggggtatgatggcaaggggtggtccagagggacggacagttttcagggtagacagctgagctggtgctggtgactgagctggtgaaataatgggactactgagttgaggactgtgctgcaattatatcaagaaaacaggtcaacattttagtcagggtttttgaagagctccttttggacagaaatttttattctttctgattacaagtatgtacacattacattataataggtacttgttatttaagaaattaaaacagtacagaaaaatttataattttcaattcccaaggataaacactagtaacactgtttctatgtatatgtatccatatatctgcttcataaaaatggaaacagactatacatcctatttttgaatttcacttttgtacttttaaaatagtattgcagatatttttccattagaaaatatatactatacaccatactggtagaattttactagcttttaaaattgcccatgtacttaactgagagttttttcccctagtatagcttcatattactgtttagtattatactttcatttccctttgcagtggctcctttgaaaatttctggtagagcaggtctcaaattttgtttatctagaaatttttaatttctccctcacttctaaagaacagttttactagatataaaattcttggttgacagtttagcactttgaatatatttattcactttttgcccccaaatgtcttttgactggtattcaagggaagatccccatacattgcatctgattgttagaactcttgagtctttaaatttataatagattcatccttcaattcaaaatgccaactatttgttaaagaaataggcaatttgt

SEQ ID NO: 52496 - DNA, 905 bp, Bovine  19866881492769
  misc_feature (1)..(1): n is a, c, g, or t
nccagtacgtggctgcgcttcttgggccctgaccctcctggtataaagctgtcctctgccctctgtgcaatgtccccagcctacagacttgatggtgtcaaccttcgaggatatgctgcctggtccctgatggacaactttgagtggctgaatggctacacggtcaagtttggactgtaccatgttgattttgatgacgtgaacaagtctcgcacagcaagagcctcagccaggtactacacagaggtcatcaccaacaatggcatgccgctgtccaaagaggatgagttcctatacggacagttccccaaggacttcatctggagtgcagctaccgcctcatatcaggtgaggagttaaccatctacattagatctactatgtgccaggctctgtcagggctgcagagggcagacaggagcagtggattttcacagacctgtgggcaggaggtacaggtactgcagggtggggataaaggggcatctgggaggccctcttcccagacagtctggcttgttcacatccccaaattcaggtggacaagtacagttagaagggccaggctgagataggtgttagcaggccagatggagcaggtggaaccacgcagaaacccttaggcaaagatgtgcaaataagaagattctcagctggatgccttcatttcttacctagtatcttccaagcagacagtttgatcaaaatgactatcatgcggacccgggctttttctgacgtcctaataacatgcctttaccttattcacgctaaatgaatactaatactcactaatactaatactcactaatactcactaatacagaaaatacgagggttcacttttcctcagagaaatgaaagctacaaagtgaagtgtgacttgcctaggcagctaagggtgg

SEQ ID NO: 52497 - DNA, 1192 bp, Bovine  19866881523584
  misc_feature (1)..(1): n is a, c, g, or t
nagattgagcaagcaaccccagcaggacttggagaagcccgggaaggaggcagtgagagccagggtgggtctggatgtcttgctctgacccaagggcccagctgcttggttgggagaggggtttgtgccttgtatccagcctggcacagatacctgcccgcacagcagcccccagcaagggcactgctctgtgcgccccagtgcgatcagcaccctgtcaggtgacacaggatgggctgctgtctcctgagggatgccctgtgctcacagcgtccaggagcccccgtcccatcgctggctggtgatgggtgggagcgtgcgacttttcctttgcctgagcgagtggccttcactgcacatggactctcttgtgtcaagcacttgtcaggaaggtgacctgggctgctgctgggggccagtcagacctgtctaatcagcgatggagacatggatcagaacttttcttaacttcttcagccatttgacagtttgagtaaataatgacttgtcagtgctatttattcccattcctctttttcagccctatttttggcccagaacactctttatttttgtctgtgttacataaggagggaacagcattcttagtaacccactgtcactcctgtgttatcttgcctacacgaaaaaaggaagtatttttagagagtgaatttcccaaacgttctcaactattctggactggagggataacgtcatggtgggagggcggcatggggagaggcctggtcgtcttgtctttggctggggctgacccctgcacctcaggagctggctggacctcccgcctacctgatgctgccctggccaagaggcaggggctcctctctgcaccggtctaacgtgttcagctggttctggagcctaggaatacccttagttgagattcttcattatgaaggttagagggggtacaaaacgagtacaagcagtgaacccctcttcttcagcattcaagtgacaggctggatccccttagtgggatgtcaaaccagggaagccaaagtgctctgaataagtttaaaaggctccttcctggcagccctgggaaggcatatgtagcttaactggctctggtgtcagaggcagcttccatgaaatgggtgtgagccgggcgagcacagtcccaacaggatgggctcggctgaactgcagagtctaaaaattaaac

SEQ ID NO: 52498 - DNA, 1105 bp, Bovine  19866881786888
  misc_feature (1)..(1): n is a, c, g, or t
ncacttacaagcaggtcacatggacccaagaaacattcttctgatctgaatgcaagtccaccaggttattctgaataattaaatgaaaccccccaaaaaggaagcacaaaaccaaaaagagcccatgctcccttcaggggttatgactgatagcaatgtttcagaaattattgcactgcacagtatgtgggaggcagtaaggacagctagactgactcctagcatgacttccaccagagtttcggagggtgtgtggcgtgtgtgggttttgttgctgttgttatatattttaattaacagaagcaaagggctatagtattttgtgctgctactggtcccttctgtgctacagctctgtgtaggaatcctccttcagtcatcagtgtgttgggatatcctgcagtgggcagacgtttttgtagatagggctcttagaaacttacaacctaatgatggaggcagattatgaatataaatatacattgtagaaaaattcaagtataacaaaatatacaaagtataaagtgatataaaagtagaaaggtgaaatgcgagattctagttaggatattttctgtaaaattagataacctcatcatcgttcatcgttcagtcacaagtcatgtctgatctgactctttgcaaccccgtggactgcagcatgccaggctcccctgtccttcactatctcccagagtttgctcaaactcgtgtccattgaatcagtgatgccatccaaccatttcatcctctgcagccccattttcctcctgccctcaatctttcccagcatcagggtcttttccagtgagtcggctcttcacatcaggtggccaaagtataacctattgggataatctattgagaaaacctattgggaggcaaaaaaatcattcattctttacagtaaattataattttaacaattccaagtaatacatattcagagggaaacagacaaaggcagaggaataagtaagtgaacaaataaaagccaccccaaattgtatcacacagaaatattattggttagtattttgatgatgtgtattcttccatgtgaaacacattattgtacagctgttttttttaacaactcaaccaa

SEQ ID NO: 52499 - DNA, 2024 bp, Bovine  19866881229710
  misc_feature (1)..(1): n is a, c, g, or t
ntatactgtacaacccagagcgcaagtatttttgaggcatttacggaaaatgtttctttgtctttggacttataaaaatggatctgagaagaaattctgaatgtattctgagtcagcagcagcgaagggcatctaaacaagacagagtttaaaaagacagcgttaactatgtaccaaagccacgagactaaaggtggccccaggcttccaacatttcccagtcactttcaaactgggcaggtccaaaaatgagacatttggcctgccagttggcttaattagggtcaagttaaaaggggtaaggttagcaagcctcagattccaggagattctggacatctagaggcaccaaggcagggtcagataaggccaaagttccctaaacatcatctgtggtcttctggtgggggttaagggaggggggaatcttttcaggggtctgtgtggtcaaaagtattttcataacaatgctaaaagtttttctgattgtgctgttatgtgaactgacagtgcaaaagcaatgttggataaaactgctggtgcttttgcaaaaaatcaggcctgtggcaccaaactgtacggacagtcactgtatttcaccaccatatacccacaataaaaaaccaataaatttaaaagccagtttcatttaagaatgtccttaataaagcagtaaaataattttataaaatccttgagtaaatctttttaatagttacagaatgagacgtgcttaaagcacttacgctgcacactaagtatgatggttgtctcaagaaaaagcacttgtgcgacggtttaagttttaaactgaaccaatcacttttttcataggacaccatttttactattgcaaactatggtttttcagacttgggtatttagcatacattttcttgaaaatgagtgaacctgcaacttcaaggaaaaacaactgacaagtgataacattttagctttcaagcaaaagttagaatttgggggaaaacttgtatctactgcattgagcttgactgcttgccaaaacttaagatatttctgatcacaggtaatattaacagtgatgatgttttaaccttatacaatgaggtgtgtcaacatttggaagatctgcataactcagtaaaccagtattttccaaatgaccaatataagatatttcagaatcatgtgaaggtaaaaaagatccatcctaaataccaatatacaccaatggatttttacagagtaccaaaatttcattgatatggtttcagattccacattgtgccttatcttttaagaaacctccacctgctgagttctgatgtaatatcaaagaataccatggttatttgaaaaggccattaaagtacctcccttttccaactgcctgtttatgagaggtcagattttctttagatatttacttcagacagcatatctaaacagactgaatggagaagcaagtgagaatccaattaaattctgttaagctagacattcaacttgcaaaatatgtgtgtgtgtatatatatatatatatatatgaaatgatacttgcaacttttattttggaaaattgtttttttcattaaaatgctattcatgttcatgtgtaataagtttattatacttttagtggttttaacttcagatatagtaatactgataaatatagcctatataaacaaaagttctttggagtccttaatcattttttagagtgtaaagttcttcagcactttttcagaaagttgaactgtggagataaagttgtaatgccatctactggcaaggcttgaaatcactgcttctcctgaaatctagctgctaccagtttcctcacccacatccagatacccctgaggtgcttttctgtgagattcggtcatgggagggtgaagagggtagacagctgagggaagacagagttcttctactgaggagtggtaatagtattcagtatttctcagtagcctctctcagagcttaaaccactggttactaatgttggcccctgtggggcaactaatgatgatcta

SEQ ID NO: 52500 - DNA, 2728 bp, Bovine  19866880373205
  misc_feature (1)..(1): n is a, c, g, or t
ntgcccgacattttaaatcttcataaaatataaatgagcaacagcttcctgctaaccacaaattccccttcttgttttgctttgtctaaatgttcttcttgaatgcccaaaggactttctcttcctgcttggcacagtctgaaattagtttgaatcacattattcttacatccagggtacctgcattatgattccaagggtaatttgtgtcctttaaccatagagtgcttatcatcaatgcttcaagggactctaatctggccttgatcttgctcacttcatcaaggctgctcaggggtagatctgttcactggaaaaaatattggtttcattcctatgacaactaagaaatctatttctcaaccaagccagcgatttctaacagcgttctttttttttttaaatcacatttacaagacagtgttggtacagaagtgtgcacccatttttttcaccattaagttcaaagcaagcagttctttttgccatctctccttgaacttcaattctgacctaaatattcagctcttgagtatcaactaaaaatcttgctctgcctctgtgtgagtgtgctattttttaagtgtgtgtatgtatctctgtgtgtgtttcctttccaatgtctcattaaaagattgacacactatcattacactgttattagttgaaataaatgggtagactttgccttgcttactgctcattcatgcttttattaattttataattaactatatatataattataattttaaaactcttccagttagatcatcctaatggcaggtcactttatctgccaaaaagactgattataaacctttgttttgtgaaaaattcccactgtccacagggtgtgtgcagagacactcgagaattcctgagttgccgtaatattataatattttttgtgaatgaattgatctactttaggaaatgtgatctccaagttggattttgtaaccaactatttcccaggtttatttctggccactaacctggtagctattctctccgttcaaagtcattgtcacacgtacgctgaagatagctaacattctcctaaattctttgaaattcttgattaatagcatcttgcctcaagttgaatttgtgtaaacctcgaactacaatgtggaaaaaactgttaaagccttaatttcacatcaggtgtgaaaaaaatgtgctgtgataaattctttttatgggctcaattcagtcaagacagtatcaatgtgacatcagacagaaatgaagagatttaagcccagaatgtgtatatgaccacactactgtcatataagcattgaggtgggggttatcttaaagcactaataatcatagttctcactccagatagttctcattacctcatcaaaaagctcaaatgattgagatccagatcaagtcttgatactctctaactagctggatgataagacaagttagataacctctttgtgcctcagttttctttctgtaaaactggaggactgagccagaacagcaactgacaggtccatctggcatgacttgggtcagagtatgaccaagttccagtcctggcaccagctgcagtagagccaaaagtctagtctacatcgtctaccagaagcccctttagccagtgggaatgagtggcaacagagtgttagtcctcaggtgggccaggggcgatagagaggttgatatctcctggtggagatgatctctaagatatattcaaggatataaattcttccacctaaagtgaatcactgggatacaaaaaaattaacccattttaaaaagagattctgaaaattcaaccttgagctacactgtataaaaaataatactgttttaatcaacaaggatgtactgtatagcacggggaactctactcaacactctgtagttacccatatgggaaaagaatctgaaaagaataaatatatgcatatgtgtaattgaaccactttgctgtacacctgaaactaacagaacattgtaaatcatccattattgttgttcagttgctaagtcgtgtccaactctttgtgaccccatggaccacagcatgccaggtttccctgtccttcactatcttctggagtgtattctaacttatgtccactcagttggtgatgccattcaactttactccaatataaaataaaaatttaaataataataatgcatctttaaagggataagattatgtgaataaaacatgtaagaaatattgtcatgtcgaccactttcactcaaagatagtgaaagaacgggcttccttagtggctaagtggtaaggaatccacctgtcaatacaggagatgtgcgtttgatcccaggatcaggaagagcccctggagaagaaaatggcaactactccagtatttttgcttggaaaatcccagggacagaggaactggtgggctacagtccacagggtcacaaaagaattagacacaacttagtggctaaacagcaaaataagtagaataaaatatcaagactgctttacttttccagaatgcagcctatgactagtgaaacagcgcccgttctttcaaaggaggcagacatattttccaacaattaaaatgcatgtgcttaaagaaaatgtggtacatatatacaagggaattttactaagccagaaaaaagaatgaaataatgccaatttcagtaacatggatggacctagaaatggacctactaagtaagtaggtcagacgaagacaaa

SEQ ID NO: 52501 - DNA, 1647 bp, Bovine  19866880828004
  misc_feature (1)..(1): n is a, c, g, or t
natttctttgtctaaacccctgtactttttctttagagccgtggggcaacatttgtaactgtacacctttcagtatgattatatcgtctgtccccctcactggcctgtaaagctttaggtgatctggaatctcttctgtctatccttcccgttgtatgctcagtacccatatgatgcctggaaactaataaatattctactagtatatcttaaataaaatatttatcaaataattcacagactgtgacttagagtgctattattacaatatttgtctaaagttaaatatatatagtgtaatttcttctctgtggctccatcttgttaaacttcgtgttttatctctaaatttctagagggaaatgtttccctgtcattcgtgtttccattccatgcttcctttatttcttgagctgtacatctttgagaaagcaatgcttgagatcaggtatcttgagtttattgaaatttttcaatttaaagccagttatcttaaatccttccatagacttctaaactgaccttccactaagaaaaagaaagtgcttatctgaaggaaaaaagaaatggcagctttcctattgaagattcttcatccaagcttgacatatagaaacagtctctctccctgaattttacttagtcataagtttttagctcaaatttcaattataagagctgacaaatatttaatattgaaaaaaaaatgaatggctgcttccaaataacacattgttctttgagaaagatcacttaaaatatcaaatttatctcagctccattatcaattgttctgaaagtctcctttgggtcatttatctttgtgatcattgttttaatccatatattggcatttagccaggtaggacagatggacaaaatctaaaaaaatatataccgatgtataaaaatgcacccacaatacccctactaaaatattaatgataaagaaaccaaatgtaatgtgttcttttttataataactttaaagaattcatgtttaattaaaagtgatctataaatcatgctgtttgctagcactattgactgtgtcgttcccattctgccaaacttaatataaaattaattgttaattttcaggccagtagtctgctcttcaccaagacatatgctgattgtttagacatgagtcagtgaaatataaaacttcataattgagggctctctttgtgatgtcttaaagtaattctgaagatttgacactactctcaatatgtaagtttgccccttttatacactgaaatgactgttctgaaatacaactttagacatgctatgcatcaagtctatttcacatgcaattgaatggatattatttctgtaaagtgcacttaactttaagagtagtgtgaccttgtagggtagtaaagaatggcttatcttttgcacaatcacacacacaactgtggaccaatgtaaacttttctcactttataatacttgaagacctctgggttagcctgaccttacataaacaaatgtaacatttcagcagcctttcacatgcttgttcagaacaactcttcaagccaaaatagccaccaactccaaaataagtgatgattaacttagggagtacttggctctgtctttaagaaggttagcagacctcaaatacaaaattat

SEQ ID NO: 52502 - DNA, 1082 bp, Bovine  19866880872554
  misc_feature (1)..(1): n is a, c, g, or t
ncagaaacccaaaaatgaagtgttaattacttctaaggcactatctttaaatatgtataaaatgcattttaaaccgtttttatctgaaattttaactactcttattttcctttcacaattatttagagaaaaaaatgaagtgttttaatattaggcctattttacttcatttcttattttcattctgaaagttctagtaccaacagatttgacagagccaataatctggaatcattcattaacaaaatagccaaatggaggtatacagttaaacatattagatacgtactatatgtttcttataaaatacactggtcaaagatagctactattataaaaccttacattttatgatgctttttaatccatagaacattttaacatgttattccctttgataactcttagatacactagtctatatgtaagtaatcaagttaattgtgagatatttttggtattaaatggcacttgaacatattaaagacaatggaccattgttctattttttggcatgtgtttttgattagttctaatagatttttttatctcatcccatgtgcattgtatcaaaagtaaattcatgtgacctaatgttattaaaatgctatcctctttggtttccctcttctctggaatatactaggcaccatgcagaatattgcaagtttacataatacagaacagcaaatataaattttgagatagtaattctgttgtcttttcaagatatactgcagtaggactaaagactatacatctcagccttagcaagatctaattttcctttctaaaccaaagagccattcccaagatttagactttcattttgcaaaattattccattaaaaatacacaagaaacaccaagacagtaaaataacaaaaatgtgtggctgtatacaaaatcgttgtcttataatgaagtgatgcttctttaatcacttccaaattgtacattctgatttctatataacttctagtataatatattgagtactgaaagttgcacaaggtggttaatttaataattacaataagaagaaaagcttacatttgtaaggacaaattattaataatatt

SEQ ID NO: 52503 - DNA, 748 bp, Bovine  19866880915792
  misc_feature (1)..(1): n is a, c, g, or t
ncccatcttcaaatatatagttcatgcagcaagcagtgatctttgctttctgattgttgatacacaaagcatccagtatcgataatgatgcactagtgacctaaacagaagagccatttccaaactttttcttttcttccttaatgctgagtctgagaggcatgttaaatctggcacttgtgcaactactccagtttttctacaaaagaggaaggaaattcctttcaataggaagcaaaagaaaagtttaaaaatgatatttgcttagttgtgtataacttctgtattgtcatctttcttttacagctggaacacattctttgtttttaatatctaatcatcagtagactgatttttttttttaatttatttggctctgctgggtcttagttgcagaatgtgggatctagttcccttcctagggattgaacctccacctcttgcactgggggtgtggtgtcttaaccactggaccaccagggaagtcccagcaagctgttgttaaggtcttaaagtcttcaaagtcttggtggctggttttcgtgcatttctgactttcaacttggcgagagagtgcctggatgggctctttcatccattattgccatggttttcatccttgtgttcagttttaattaaagtgtactaaactatatcaatcagatctaagtaggaaaataattgtcctaattaaaaaacaaaaacaataaaaattcttatggctggttgatttcaaaatattgagtgc

SEQ ID NO: 52504 - DNA, 1882 bp, Bovine  19866881197720
  misc_feature (1)..(1): n is a, c, g, or t
ntttgcctacttactcccttctaatcttacctttaccttatctctcacctttctgacagtcagctccttgctctactgcttcaagtcttccctctccttcttctacattccacactcttactctatgatcatttacccttccctacagtcttaatctattggcctcaacacaatatccttagagtctttaatttcacaaactaaacttactaacaccatggtataagtgatgcagatttttttgtttaaaaggcaagcttgtgattcctaattctactgtagctggcaataaagtaagtatgatcaaatatgcatctgcacactttgcctaaactgtcagagtttaagcccatactttctgggctcaatagaaattcagctgaatcctgaataaggagagcctccagcagttttttcagttttctgaaagaaaggagaaaagagagcagaggtgcttattatgggaggtacaggcagtccaagggctaccttgctgtgccagctataacagaaggtatgtgacagattaatttaggccagcacacaccttactgggaagtatgcattaatataggaaagtggaattaagtatttaagtctgtcaaaataaaaatgtgaattgtctctgctccctcctcatttcatatatactagtttttcaaaggtggcttttgtctggtgatctaggtagtcagctctgacaactctgactcatttgtaaattcaaaggccttttggaccacagtctaggtactggggaactgatgacttgttttttttagcttagaaataaaaatttaagtgagtatttttgagtgaatagaaaaaaatgagaaaattttgtttgtagaaaagggaggtgagattctgtactggtctgaaaagtccatggtaatggtttaagaggacagggaataatgatatatataaaacaaagaagaaagtctataaaattcaatcaacttttgtaggcttgtttggtacaaaaaccccaggaaagcttggagtagcttggcatttcagcaaacataatgggccttggccttcagcctactccagtgcattcattttctctagggagtttttcttttttcttatccaaggaactggtctaaaaacagttagggttacttaagaagtgatgatttactatttagtcctgaaagggctgtaatgtcttggaagtctaatctctacctgactttatctgaatgaatgcatctctcttgcttgataaacatatttactggacaacaatgcaattatttggctaattatgatgtcagttgacacaggtggtataaagacatcctaaagttggattctggatgaatgtggaagaggagagtgaaaaagctggcttgaaactcaatattcagaaaactaagatcatggcatcctgtctcctcactttatggcaaatagatgggggaaaaatggaaatagttgcagattttattttcttgggctcccaaatcactgtggactgtgattgcagccacgaaatcaaaagacacttgctccttggaagaaaggctatgacaaatctagacagcatattaaaaagcagagacatcactttgctgactaagatctgtatagtcagagctttgatttttcaaatatttaggaatggttgtgagagtttgaccataaagaaggctgagggatggaaagaattgatgcttttcaactgtggtgctggagaagactctttagagtcccttggacagcaagcatatcaaaccagtcactcctaaagcaaatcaaccctgaatagtcattggaaagactgatggtaaagctgaagctccaatactttggccatctgatgcgaagagccgacttattggaaaaggccctgatgctggaaagactgagg

SEQ ID NO: 52505 - DNA, 1388 bp, Bovine  19866881218894
  misc_feature (1)..(1): n is a, c, g, or t
ntatatagaatatataggaaaaaaaacttaagtagtatttaagtattaagcaagtatttgaagaaattctcgatcattttagtattcacagaaacataaactaaataaaaaaggaaaaagtacttgattatcagattggcagtaaggacatagataaaaccaagtgctgatcaggatgtggggaaactagaacccttatgtactatgcgaccccatagacagcagcccaccaggcttccccgtccctgggattctccaggcaagaacagtggagtgggttgccattgccttctcccaatgcaggaaagtgaaaagtgaaagtgaagtcgctcagtcgtgtccgactcctagcgaccccatggactgcagcccaccaggctcctctgtccatgggattttccaggcaagagtactggagtgggctgccattgccttctccgtgtactgcttctagttatgtaaacaggcataaatattctggagaactgtactcactaagtgaaatgacaaggatactcacaaaaatggatatgtgctcactgtgacctagcaaacttctagaagcataccctaaaagttctcctgcaagtccatgagagaagagaagaattgtttgtggatttgtttgtataatcaccacgatgtaaaagatatttcaatttttgtgactataatggaataacatgcaaccttcagaggtagtgaaccaaatgtacatacagcaagatgaatacatcctatttcttaaaaacgttttagaaaaaagtaagaactagaataagatatatcacttatgtaaattaaagcacatgcatgcacataaatgatacaacacactacataaaacttactatgtgcataaaatatctctttctaatttacaaatacctgcatatacaaaaacatataggcattagaataattgtggggctacaaagtagcccaatgcaattctatactttttgtgtatgtttaaattttttcaaaacttttttttttcactttacattaagtacttcatccagtctcatctggatgctgcagaatgaatcttaaagacagactcatagaaacaccacatcttgctgagagaattgcttcagttttgtgcaagatcagaacttggtgtcactatccaactaatatcgttccagttcctgacaatgaattctacagagagataatctgtctgctgctctgttctactgagagtcctggatatcagggccaagaactcaaacttccacataactgatcataaagttcttggaacacctccatctcacatgaacctgatttagtttttactgcattaggatgctgaatcctgaatccacatgttcctaacacaactccatcctcagagggattaggatcaaaatcaaaga

SEQ ID NO: 52506 - DNA, 713 bp, Bovine  19866881256254
  misc_feature (1)..(1): n is a, c, g, or t
natgaatggatcttggcattctaccaaacaataacatatcaacttttagttatccattctactttttcctatctttgcatgtgttccacttcttttttttcttccagttcttttagcaagcatgttaaatagtcagtttctggtttggggcagatcatttgcttctgagcaatcatcttacatctgactgttccgtattcattgttgagtcatgcacacaccccttggctttgttttacatattattacatttagttgttgttgttttcttcagttgctactttgaaacactgtatttcaatacctactactattactatatttgtttctttccttcatattgctcaaatttgggtatagatattggaatgttgaataagtagccagcaatcatctaagtagacttactattcaggtaatacttttggtggcaaaatggtggcaaaacaaacaaacagtgcttcatcataagctgagttcataaacatgaaagaattaagagtaaaaataataaattaaaatgattgaaacatcgccctttaatcattagactcaacctcttcctcataaagcctttttatatgtacaattaacaataacaaatttattggagttttgtctctcctttatgacaatgcccactggagctggtaatgagcaggaaaatgattaagaggcaggtagcagagaagctaaggatatgaatcaaagag

SEQ ID NO: 52507 - DNA, 1415 bp, Bovine  19866881348051
  misc_feature (1)..(1): n is a, c, g, or t
ngttttcaccactttcttcaatttcagtctgaattgggcaataaggagttcatgatctgagccacagtcagctcccagtcttgtttttgctgactgtatagagcttctccatctttggctgcaaagaatataaccaatcttattttggtgtagaccatctggtggtgttcatgtgtagagtcttctcttgtgttgttagaagagggtgtttgctatgaccagtgcattcccttggcagaactgcattagcctttgccctgcttcattctataccccaaggccaaacttgcctgttactccaggtgtttcttgacttcctacttttgcattccagtcccctataatgaaaaggacatctttttggggtgttagttctagaaggtcttgtaggtcttcatagaaccattcaactttagcttcttcggtgttactggtcggggcatagacttggattaccttgatattgaatggtatcatcagagaaaagcaaatcaaaaccacaatgacatatctttactcacctgtaagactggctatcatcgagaagacaagagataatgtgttgccaaagatgtggagaaatgggaactccgtaaactgttgaagggaatataaatcagttcagccattatggagaacagtattgaggttcctccaaaaactaaatataaaactgcctttgatccagcatttcccctcctgggtatatatccaaagaaatgaaagcagagatacctgcactctggtgtgtactacagcattactcatgatagccaagttatggaaaaacttaagtatctgccaacagataaatgagagaataaaaatcttacagtccaaggcacagaatggaagatgtaggttggtaggaggggatgaaggtgtctctgagttttccagttggactcaatgaatgagcagctggaaatacaaatcagtatctgaagacagagatgtgggctagagatctaggttagggtgtgtcttcaaagtacaagtgatagctgcaatcatagcagggaataagagcatatctaaagcaacagaaaaagtacatagtcttttttgcagatgtgtacagggaaaaggctccagtaaaagatggtattaaaaatgcatcttactcaactctttccatcatcatgggataaaggcattaggagttcatacttagagcttccacgtgtttcctctacttttttttttaattttttagattttattggaatgtagtttatttacaatgttgtgctagtttcagctgtacaacaaagtgaatccattatacacatacatatatccattcttttttagattcttttcccatataggtcattacagaggatagagtagggttccctgtgctatataaaatgttctcgtcagccacctactgatgtcactttttctgacat

SEQ ID NO: 52508 - DNA, 757 bp, Bovine  19866881561843
  misc_feature (1)..(1): n is a, c, g, or t
ntgagagtatctgaaataatgggcttatatggggaaacaatacaattcatcatctgttgccagccatatcactgctgctttatgacaaagcaagagccttacctcctgctaacactgtagtttcatggctacagcttcagacttcttcaagttcaggtacaaaaaagcagatgagttgttcaacactgcaagttctaaatcacttcactctccatcaatgcagttagtgggcacaggcagagaatgccttctttagcaaacctttacttctttccatctctactgagtccatctaactcagaagattttgataaaattagcaaaaatgaaccaacacctataaacacctatggatactatgagctcattctattatttccttgaacactataacctcaggcaacagctatcttgcttttaaaagtaaacaagtgagagactaaccaaatatttggctaccagataaaaactaaattctgagccctcactctccaaagcttctactaaattagtgttacttgtaccttccagcatctcatttctggtaccaattactacacaggtcatgcatagttcttggtttcagaaaataagattaaaattttctagtttaaacaaaaatgagtttattataatgtaatagataatttataatggtttttgttggtactcaggaaccactacctttggaggatatataggagaaatataccgctgacattgggggtgatcaaatggaaacaccgtcattatgtca

SEQ ID NO: 52509 - DNA, 1222 bp, Bovine  19866882056349
  misc_feature (1)..(1): n is a, c, g, or t
nccttggactgcaaggagatccaacccgtccttctaaaggagatcagtcctgggatttcttttgaaggagcgatgctaaagctgaaactccagtactttggccacctcatgcgaagagttgactcattggaaaagactctgatgctgggagggattgggggcaggaggagaagggaacaacagaggatgagatggctggatggcatcactgactcgatggacatgagtttgagtgaactccgggagttggtgatggacagggaggcctgacgtgctgcagttcatggggttgcaaagattcggacacgactgagcaactgaactgagctgaactgataacatataataatgtatatgaatatttttatgttttatccaggtaaatcgcaacaatatggaacgttttgggaaaagtgctattacaggctttacaattgtataaaaaatattcatgaattacctgatcttgaaattgtttgaaaggtttgtttgaatgcttcagtatgactctatttggcaaaattgccaggtatgaaggtggtttactatattatatataaataatcactgctacctctctgtgccaaatctctatcccaatgtacgctgtgaaaggatcaaaattgatatgctacttctatcagaagaaccttagtgattttgacatttattcagagtttcttttctatattctcagtcatctttttgctcaattctcatatccaaatttactgaatactttttacaataatagcaaaaggatttattaagctttgcctattttagggcatgattttatgggtcatcaatatacttgctctaagaacatgaggactactgtaatgaaaaaaaaaaacaatgaaaataaactagaaaacattctaatcattaaaaaaaaggggcttttcatgtaaattatttcctgtgccacttacaaatctatctttagtaaggtggttggtcttgagaatcactgttaaagaatacaaaaagtattctctcaagaatggttgaatgtggcttctaggttttgataataaaagcaggactcttcatgcataacagaatcagacttttctattttattttttttaaggcatgccttcctttgttattctggacaggtgtttccatagtgcaatttaaactacaaaaaatggctcataattgccaacacctactttaactttcttaatcaatcataaaacaacctcctctttca

SEQ ID NO: 52510 - DNA, 1343 bp, Bovine  19866880353715
  misc_feature (1)..(1): n is a, c, g, or t
ntgaatattcaggactgatttccttaggatggactggttggatctccttgcagtccaagggactctcaagagtcttctccaacaccacatttcaaaagcatcaattcttcgacactcagctctatggtccaactctcacatccatacatgactactggaaaaaaccatagctttgactagacagatctttgttggcaaagtaacatctctgctttttactatgctgcctaggtttgtcacagcttttcttccaaggagcaagtgtcttttaatttcatggctgcagtcaccatctgcagtgattttggagcccaagaaaatagtctgtcatggtttccattgtttccccatctatttgccatgaagtgatgggactggatcccatgatcttagtttttgatctttttttttttttctcagcctcattttagatattgtgaaaaggaggcccaaagattagaacagcttgtccacgatcaagcggtgggagctgggagcctgcactctttctctgaggtactactgctgttgccacaatctaccttgactgggccagaaggaatgcttacaggaggagagagaggtcactcttcagccacacatcagtcagaacgactggcactaacagagagcttgctgtgcttgcagctctgagagaaggccctgctgccaggtagaggatgtatcgaatcacttagcttttctttgatttgcaggaatgaattcagagcatggacggacatcaagcctgtgaaacccataaaagccaagccccagtacaagcccccagatgataagatggctcatgagaccagctacagtgcccagttcaaaggggaggccaataagccaaccccagctgacaataaggtcattgatcgcagaagaatacgcagcctctacagcgagcccttcaaggaacctccaaaggtgagacagatcttctggggacccatcagcagcctgacatggaggggttaatggtagcagagatgggggcggggctactgccaactctggtccttaaccttaaagtcccttctttccgtcttagcacatagagacagagtggcttcttaccgggaaagtgaaactgaaagttgctcagtcctatctgactctttgcaaccccatgaactatacagtccatgggattctccaggccagaatactgaagtgggtagcccttcccttctccaggggatcttcccaacccagggatcaaacccaggtctcccacattgcaggtggattctttaccagctgagccacaagggaaccccaacctttgctaaatcaaaacggaatttctaaaggaacattacctaaaacaaggattcccg

SEQ ID NO: 52511 - DNA, 2953 bp, Bovine  19866880360267
  misc_feature (1)..(1): n is a, c, g, or t
nctctgtgcgaccccagagacggcagcccaccacgctcccccgtccctgggattctccagccaagaacactggagtgggttgccgtttccttctccaatgcatgaaggtgaaaagtgaaagtgaagtcgctcagtcgtgtccgactcttagcgaccccatggactgcagcctacaggctcctccgtccatgggattttccaggcaagagtactggagtcgggtgccatgtgctaagcatttcacttgcatgttctcatttatctttccaaacccctttcaggcaggtgctcactctccccacgtctgcagctcaggaaacacgctctgagagggtaaccatccccattaggcacagtcaccaaggaacatgacatgagtgggtccctgaaccctgggccagccgtctgcggcttgaaccacacagagcccagattctcatcaccttcccaagaggccaacgtgctggcaaggctgatttccaactcctcccgggtcccagcacccaggcagggctcagtgaatgaacggacatactcctttatcctccatccctccagctgtcatcatgaaccgcagtgcctccggcacggaaaaccaaagaccactttctccgaggcttcccctgggctttccccactttctgggtgggatgtatcctttgcagtcagacttgaggaacagcagtctagttgttaggaatcagcgctgtttccgtggcttcaggacacagtgcgtgtggcgaaatcccacaggcgctgaccgttgcagtaatgctgcggagcataatggttgccactatgacaactgccgagttcagagaggataaaaattttcattgcattaggttcccgggaaatcagttttatcacaagtatttccactagcagttcactactataatacaacacgctcagggagtgaccctccagagatgcttgctgtgccctggagctgggggcagggagcctgcgtgttggggtgggggtcgagaggatgccccccggggctccctcccacttcactgtgagggcagatccccagaaagagcctgacctccaagacaggcaaagtgggagttgcttctgactgccccctcaaagctacatgaccaagcaaacccttatgctctctgagccccgttttcctatgtgtaaaatgaagacgataacatcctgactggactttcacaaggataaacacgaggaaaaagcgaaggggcctcccatagacccaggccacacttgggccctccacgcaccttcatatctcttattcccatgtcttctgggccggcctgtcacagtccataagggttcctacccatttcagccttattactgcttcttattagaacatttgtttccaggctgatgggccagaacgacaaacctccaaaggaaaccttaatcccagacaagaatgaatcttccctgcctggcagggaacgaagatggatcagctgccgttgctgctctcacgagccagaaactcaatttagagcctgtttggttgttggagggctctgggaatgctgctgccactgccagaaaaggcactgtagggagagaaagaggacgagagccctgctggcacagagaaccatgggagcaggcagtagggagtcaggaggaccagagatggcggtcctggctggcgccttgtggggctgggggctgtggaaggcttcagggtgaagacatgactgagttttacgagaccaggctggtggtgcacagatgtggatccagggcccaaggcagggaccctgggggctaaataaccagaagctaggcatcgcttagtgtggggaagcatcttgtgttacaggacacatgtcagatccctttgtccccacagctttctgtcccacaagggttccatcagagctccgctccttactctctctgggagggcagctcccataactcgttagaggctgggactgagagcgcgccttggtgacagggtgcatggagccacccctgcctcccctctggttgctcccgcctgaaggccggggggaaggtggactggctgtcaggctcccgcacagaacccggctcctcagcctcctgccctgtgacctgggcaagtcacccttcgccccagctccaggggagccttgatatcttcacctgtcacacaggatgaaaggtggctgggagggcgggcaaggcctggaatgggacctgctgggcaccgggaggccccgtttgctgagtgtcttccctcgccacaccctgagccctggggctatgtccccagcccagcccacctgtcttctctccaccctcctgtttctcccgtgttcccttcttcgccgggccgcccacctgcctcctcctgcctccatctctcactgtcatctacctgcctctgccctgccaggtcggcctctctcgcatgccccactctccccatccgtgtctcggcccctccctttgtctctccacctctgctctccctcccccacacacgggggacccttgggctgtccaggctctggcgccccctgaccgtctggtggctcttcccctatagatcgggctggtggccatcctggtggccaccggtggtggccatgtcggccgtggcccagctgtgggaggacgagtgggaggtgctcctcatctccctgcaggtgagtgggggtgggggcccactggctggttccccaggaccctcagaacaagacaacacctttaggtcactcccattcctccagactaaagtccagaaggtggagtaagggtccacatcacagagcaactcagagacaggaagaattctagcacccagggtccctggactcccagtgtcctctgaaaaatagagacagctgcctgccccacggatagagataggccggaaggatgccggtgaccagaaggtctgggcacggctgggagccaacagtctctcttgccccttcctgtacccaagggcacagca

SEQ ID NO: 52512 - DNA, 1250 bp, Bovine  19866880434021
  misc_feature (1)..(1): n is a, c, g, or t
ncctgccccaaacatgctgccttttctaagagtttacgccttaccctcacaccctttacaaaactactcatcaaagggcaacaaaaataattttggaaaactttctatgtgcctggtactatactaggctattttttaactttaaaaattttacttcatttagttctcaaagcacctcacaaaataagtgttattcttcctattgtacagatatggaactgaggttcaagaaagggaagaccagaactggctccgggtctatctgattccatctctgttgtgcaataatctctctggaaagtgcacccagcctccagtccccagcccccagtccaagaaaaggacctctctcctctggatctatagccagagatttctctcttggcctagcactgctgccagcttcagtgtgtgattgcctctcaccaaggagaccacctcccagggcagggccaggtgtgactggtttgggtcgccagcacgcagcagtatacagtatacacgctctgtgaggtttagacggaaaggtagaggcaacttgagggatttaggagcccggccctacctacctaattcctactcaaccaccaatcagaggcgggacctcggcatctgtagccaaagcgaagccctgcggaacggaaaaccaaaccccccccgcctgcaccccgccccaggcccgcacgtgccgggcctcccggcccacgttcctgctgccgggctgcaccaaccgccggcgggggagcggctaggggcgggcacagggagcagcaggaataaccaagcagcccctcgcgaggaggaccccgcgccgcgggcggcgcagctgtgaggagcaagagtccccctacagccctcccgcgcccggccgagcccggcgctcagccacccccacggagctgaggctgcagtggttggaacggccggccccgcccctgccgcgtcggccccgcccccttatgaggttacaaattgtcgcgctcggagccgcgggcgcagtggccgtggccgtggccgtggccaaggctccgctttccgccggtgctccggcccgtctggcggcccgtcccttcgcaccctcggccgtagcggtccccgcgctcccctgctcggcgcgaagccctggccccggcggccggggcatgggccaggggcgcggggtctggcggcttcccgcggggccccgacctgtactggcttcgtcatgaagaccctcatagccgccactccggggtcctgcgaggtagcat

SEQ ID NO: 52513 - DNA, 2693 bp, Bovine  19866880492659
  misc_feature (1)..(1): n is a, c, g, or t
ntgagatagtgattttgaaatgtacactctgctatataaggacgtgtgattccgtgcatacgcacatcactttgacgttctctcttctgcaccttgacgacctggcaaattcttaatcatccttcaagtcctagctcagatgtcacctgctctttgtaactctctcagcagccccctgtccacctgggaagaacaaagctgctctctcccccgagttaccctctctttaaccctctgtgggtgccttatgcaaggatggttgttcacagtgggcctcccccactgtttgccggcagtgcattcaccaccggcccctccagttctcaaggccacagtggctgtggtagagcagaggcaggatggtgaaggcgctggggagctgatctcctggagtctggccttggcaaagtccccatgtggcagtccagtccttagaatcgagcagattcccatgagggcctcagtcagattcagggactctgctcaaagcaggtggccattcatctgtgtataagagcccttcactttctgtgatgtacatactcatgcctgctgcccaggacctcctatatgtaatcaggataccaaagggccatgttggccatgacatttctggaagagagtgaaatctgagccaagggagggggagaggctatttaggccctagggagtgtattccataagctcacctaccacactctgggcttccctcataggtcagttggtaaagagtccacctgcaatgcaggagaccccagttcgattcctgggtggggaagatctgctggagaaggagtaggctacccactccagcattcttgggcttcccttgtggcccagctggtaaagaatctgcctgcaatgtgggagacctgggtttgatccctgagttgggaagatcccatggagaaggggaagactacccattccagtattctggcctggagaattccgtggactgtatagtccatgggctcacaaagagttggacactactgagcaactttcactcaccactccaggatccccagcaggctcatatcccagtgcctcaggcccaccagatacatagagagggccggataaatgttgggagatgcggcatggtggttaaaggtgcctccacctcctctctgtcttcctccatctctccagagccctgggcagtcttgttcatcctggaacttctggtgcctctcagtgccctagtcctaccatgtagtgaacttggattatgttccaggcataggcagacatcagctcattcattcccctccacaccctggaggtggtcttacctaggtgaggataggtgaggtgaggagccgtgaagtgccagggtagagatctggaccctgttcccaattactctcccattttcttcaatatttgtgtggtcttcctggggtttgaggaaagatgactagagtctccaggttggggaaggtggagctggtactgagttgtcgctccagacaggttggtggctaaggcctagcactgatcttcccagcaggtttcttgcaccccacccttacccccaaagacatgtgaggagcaggtggaagggggcttaccaaggggagaggctcagaggtgccccagaatgcccctccctgctcgctgtctcaccgagggcagctgctcttggctggcctcactgtgctcacctcgtctgcaagcctgtgtgttcttggaagtcatggaaatgcatttcttaaaaatgctcagcaataccaggctttggtctctgcccagcactctggcctcccagaaactcttcatacccatcacctcctctctgctgcccggacccatacgaggtaacgtgaccctcactgagagccagtgatccagctgaaccctgtccatcagggacccgtccagggcctcccagcgagtctgtttcttgtgggggatagtgatgatggtaagtatcatcaccactgacagagctctaactgtgtgccagggcctcgctgaacactctagatggctgaagcacaggctgatgaggcagcaggcctgcctcaccccagcccacagctcctttatgttgccccttgtttgtgcacagtccctgccctggagcagctcccatcctgggcggcaaactcccactggatcacgcccacacaggaggtgtacgagctagtgccctcagcctggaggcttggtaaagcccccctagaaggaataatgctttttccctacttgagttgtcctcaagattaaacaggaggaatagatcaaatacttagcatatgacaaataaatacatgataaatcttaaaatattgatattgtggttttgggggtttgttttctcaagtttaataaaactactcagttaaaagtttcaaaagaaggttaacttcttcatgattttgagttgacaggtgcacattttacatctgtaatacagctatttcagagaacctcttacataggaactatacctcaggatgaccaataatgaaagtatttggtttggagcacaattaggataaattgtacctttcaacagtatctaattcttttaaaacccagaagtgttgttactatatttttacttcctcatatatcaagtagatggtttgaactgcttatatttcttatttctgctctgtgactttgagaaagtaatttaatttctctgtgtttcatcatatataaagtggggaatgagagta

SEQ ID NO: 52514 - DNA, 1628 bp, Bovine  19866880523311
  misc_feature (1)..(1): n is a, c, g, or t
nttaagcagttgagaaaatgtctatcattaatacgtttttccttagctaaaggaaggtaggatctctgacccatattttaagaatccgttttcccaaaaccttgggaatcataagtggtggggaaatactgatgactgcaaccaaatatgttgccttggctattttgaagcagagggaaataaataccacagcttatcggtgatgttctaaaaaaataaatgtctgaacttatgaattcaatattgatttcatcatctaactgagataagctcatgaaaatatattttaacaaagattgaaatgtatgcgttgacattgctgaagtaaccattcttgtttttaacacaatgcaggcatggattccgtgaaggaacaacacctaaacccaagcgagcggctgttgcagcatccagttcatcttaaggatttcaacgattagtcgcacaataaatgttctggcttttaaaattatctggtgtgctaaggtatttttaataggcttgtatcaagtgatttacataggtttgtgaatgtgacaactaaaaatcaggtttatttgttaagtggctgttttggaacactaccttttaaactgggttgtgatactgcttaataggattgggcctttacaagcagaattctaagattccttaaagatgacattaagaagtaacatctgtgctactgtgagaactgtgttacctctgtggtctttgtggagtggttgtcgtcctgtatgataggctttggatttctggtgagaacacaaaggacaggagttgaaggaattccattttggaaaggtggttttgtggggtttttgtatttgatttacaatgttgcgttagttttttacagcaaagtgattcagctatacgtttttctttttaagattctcaggtgatattaactcttggcgcccagctcataggctgtgtgtgctttttaaggtggtcagctaagtgaacaactaggtatgagtcaataagaacatttgtagggccatgtgcaaatgcagtgtattgagtagaatgcaaaggaaggccaagtataaactcacttgtaggctagtagaatttttttaatcctcacctaggtgatcattgacttttcagggctctgaatttttctgccttgctttctggtgtttctgccagttttttgaagtgaagacaataccaactttgttggactggtgagagaatagaacattaattatacatcacaagtgttggagtaactagcataaaatagcaatgtggccaagctgtgctgtcccaacttgtagcttcccattttttaaagaatttaacaactttaatctgaccttgaaggagttttcatgatcatcactgcctccgcaaccttacctttaaaaactgccctagaatgcattccaagattagttaattgctcccttgcttttttccttagctcctaactctttcaggtctcagcttgcttctacaggagccccagctgatctgaatctatattgggtttcgtcccaatatgtgttatgtaatataatgactctgttctacttttgctgctgttcgctgttgagttgctaagtgtgtctgactctgcaacgccatggactgtatcccaccaggcttcctcagtc

SEQ ID NO: 52515 - DNA, 1237 bp, Bovine  19866880661130
  misc_feature (1)..(1): n is a, c, g, or t
nctgtgccactcctgagcccactggggtctcagaaagagcaggaggcatcagccacatgcattgcacgctatgtgtgccatgaacagtgagccagagagtcaaggctctggaatgtatgatgcctctttgctttgggtccaaccctgcgtggggcactggggacacagagatggaaagtcagttctggtctctgcacggagctcctagactagggagggtcagggtcagggagccagatggaaatggacaatgagacatcaggactgtggccagggagccttaggggactgggggagcctgagaagctttgtgtaggtgggaggaaaaccaaggaagggttcaaaagagagagaaagggaggtaggagcgaaaacataaagcagagaagaggcaggcgtgctgggagagcctgagatgtctcgtgtggcagaagccgagggtgacggtcccaggacagcagttgggagacgtcagcaaggggccaacctgctcagggccttaatgtctggagggagagcttggatcatcctggaagcaatggaagctgtgggaagggctttaaactgggagtcataacactgaatcagagttttaagatgagctcactgaagagaaacagaggatgagattgaagtcagagccagccagagagctggagctgtgacctacgctggttaaccacacggctgtagacctaggagcctggaccctctacttattaagttggaaaccttgggcaagttacttaacctctttgtacctcagttttcccaactgcaaatgggatgataacagcacctatgctgcagggctgctgaggcggtaaatgagtaaatatagtccagtgttagctcccagaacagttagaaccatgatccagggagggaaggtgtgtccgggccctccctctgcggctgtggcctccagcctctcccctcctccctgggtcccttggaggcccccttaccttgtgaagccagtgcaagttcatctgttgccccacggcgatgtggcatagtgccaggacctgaaggagggcccggagggcaagagtcaggcatcacgtgtggcccgggttcctgccagttccccagacaccctgctcccccggctctccaggcccggctcaagcagtcagctaaccagcaaaccattttcatgcccagccctgctcagctctgcccaaacctggccgcctcccagattatttcaggttcctccaggtgccttctcctc

SEQ ID NO: 52516 - DNA, 769 bp, Bovine  19866880676156
  misc_feature (1)..(1): n is a, c, g, or t
ntggatgacctccgaggtcctccagatctggagctggttgtgcctgccttctgccaggggcagaataaatgggggtcccttagcggggttgggccttccaggcctgtcctcaccaccacccagctctgccctaccccatcctcctcactcttctgctttctttcagaatgaaaaaggcaggccttgacctccccctgaggcagtttcaaggtactttagacctcctcaagcgtgtgagaccctttctggtgctcccatccctcccgcaatctgcttcccttccctctacttaaaaaacctggaatccggtctccttccggctatctgtgggcacaggccttggttctgtgattgtgtatttttctttgtgggaccataaatcatctaaccttggcctcagggctgcgatttctctgtggcaacaggggctgggctgtgggaggctggcttgcttgcagtgacttgccttcctccgttcctgccactgggttaacagcccttcacccttgccgcacatctccctgcagagtctgatgttgcaggctcgaagctagggccagaaagtctccatggcaccccaccccctgggacctgaacccaggcctccggcttcccaggctggaagcccccctctgcaggcgggtggagataattcagtttccagcctgccacgtcacccggagccggcagtaggaacaggagcgcagctatgggctgcctgaggaatcccaaactagtcattggagctttcttaaaagcccctcccagc

SEQ ID NO: 52517 - DNA, 2039 bp, Bovine  19866880739085
  misc_feature (1)..(1): n is a, c, g, or t
ngtctgaacttcgagcaatctgtgtggacatctatccatgggtctgtcccctcccagccagaggagggtggccttcaaagcggtcatgttttagctgccagaactgtattcatcacctgggacagtggccacatcctctcacgcgtcttgagcccccatccccacctcgccaagcccttgtgccccatcttcccctttctgctccccatcccgagtcaaatccgaaggccagagctgtgctggcctgtctgggggtcaataggaaaagagggggaatggagaagtgatgcagtgagagggtgagggtgctgcctgtggccctgttggcatggtgatgggggccaatcctgaggccaggggttcgccaccgtgacctggaagaccgctggggccccctggtagaaactggaagaacaaaggggagggggagccaggacaggaagaagacgaacaagcatcctagtgcatgagagtggacctggagctgcccggagggagggcggccccagtctatctgtcgttgagccgcggagagccggtaccatcctcctcttcctccttgtcatccttcatgccttttagtctctggcgggcaaagtcctcaaacacaatgtcgtcatcgctggtgggaaagacaaggaaaacaggcatgtttgcagggcaggaagaggaagcttatccagaggggtcagagggcctgcacagcccggcgggacccagaggctgtcctccaggactggtcttggatagaaaggcctgccaggccagcacatctggatgcccatcaacgacagtgggaccagccagttgcagaaataccagagggaggcatgagtttgctaagggctggaaatcgacccagcttgagaagctggggttcaggcacacatcaaattgtgggtgggggcggggagtgaggcagggttagggccagaggaggaacttattccacaaagaggccaggccgacagcggtctcacagcatattctgagtcccccaagaacgggcccaggaaaccccatccacccccacccgaagaactaccctcaggaagcattcctgttttctgagaaaaccccaaaggccctttctccagggaaatgacagctcacattctaccctgagggatcttggatatacagggcctgtgcgggctggggtgggggctaggcaaagcccaataggggtggggagcagaaaaaatgtgagtggagaaagagggtgcctgagaggggttccagggctaagggctgcctctaagaacagtgagctcccttctactaataaaatatgtctacgtgggcccattctccaggccccagccccacagaattcagccaattgcacagggtatcctccacggggtgacttaagacccgacacatctcctggaggacaaaggaagcatagatttggagctggagtgagaaagctgctcggccctggaggtggttcatgtctgcccagatcctcccctctggccactgtcctgtgaggtgacagcctttgaccacagggccatccatactggtcctcgtgagtcagaaacaacaaagatccccagaaccttcccccaccccacagcctgattccactggctggacaccagccaagcaggagggtcccagcccagggccacaaaccagccctgtgacagccgaccaggtgctgtggatggacgaacggactgacggactgacggacgtgcaaggacgagggaggaagacagaccccaccaaggcaggaggaagaggaacaggcaccgagggtccttcaagtcacatgcaggcaagcgggttgctgaagaggcgagcagaggcggctctcagcagacgggttagaccgctgctcctcggggttaattagcataagtgcaaataaccaggtagccccgcccaccgcccaaggcccgccccgcccatgtctccaggcagggttctgcttacttggtgtcaagttctatgagattggtatctaccggcgtctcgtgctctgaactaaacacagggcagataccgcccacaggttactggcgagt

SEQ ID NO: 52518 - DNA, 1118 bp, Bovine  19866880741503
  misc_feature (1)..(1): n is a, c, g, or t
nttcctgctggttgtcacgtcttctcctcatccctcttatctctgtcccgcctgcagccttctgcattcagaggagaccgtgcgtgcggaaacagcttattagcagccgggcttacagggtcacacagcactgcagccacagatcccagcccatgcaggacgtgtgagcacaggccatgctgctgccgggtgctgcccgccccagactgtgccctgggctagaactctacacacagacactgctgtgggtgcacccctaagggtcccctagcatctggggcacctccaaatagaacctggagcctgaaatctgcatcaggatggcacctgagtgggagccgcctccctgcccttggtaccaccatggacttcagactcacactcagaggcagagctgtctggcaggactcctattccctgcatgtccctcgagacagagactgtgtctgtggcccccaggacaggagcgcccctgctttggctcctacagctccagggatgggtactcctgtccgcatgctgcttggccctcctctgggctgagggttctcccttctgagacagtggccggacaggggcagggcaaagtcctgtaacattgggtgagaatcccagacaggctgcctactaaatggtggccttggagaagacactgctttatcctccccgagcaccgacttcctgttctgtaaaatggggacggcagtgttggacagaagtgcttggcaatggcagggtgtcaggagttgcttttcttgcttccatccctcccgaagtctgctcctcagctgcaatcctgctgccagttctctgataccacccagaacaaatccagccaaagggcaggaacactggggtcaaatgaccagggcacggggcaatataatcaagagctgggttttcattccccgccctcctactgctacctgtgtggccatgggccaacggttcagaacctcattcaatccccagcttcctcctctattcctgaagatgacatcacctctacctcatgggagggctgccaggcctgaatgtgactacagatgtaagcttaagtcgccaaatccacgatcgttcctataattatcatttcgtgtctgacagccctttaatta

SEQ ID NO: 52519 - DNA, 1389 bp, Bovine  19866880761533
  misc_feature (1)..(1): n is a, c, g, or t
nccttgactagacagacctttgttggcaaagtaatgtctctgctttttaatatgctgtctgggttggtcataattttccttccaaggagtaagcatcttttaatttcagggtggtattaattaggcttactaaggaaagagttttctggttcctcctatggcagtgaaaagttacagagccgaacatgcgggcccaacaagtctattatgtcaatagacttcattcaaccatgacattctggagcagagggaagtttcagaaatcatcaatcctctcattttagaaataaatcaacagcacacaagaggaactaaatgctgcagccaaagggcttgccagtcagtgacagacccaataccactactagacactgaacttccctgtggtctgaaacctgctagtcccttattgtgttaataaccattttattgaaataacttcaagaaacagtccaaaaaaaaaaaaaaaccaacagaaatattccataataacttctaagctcaagatataaagtgaactagagaggacaagaaaaagaacaacaacaaaaaaatcactttgttttcattgtatctcttggacaagtttttatatcatggtcatcaaccagtcccatgactactctttagaaactactattatgcctgttaacattacaattccaataataattgctatcatttaccaaatacttaaaatgtactaagttcaatgtcagtaactattatcagaggtaacactggagcaagaacacagaagttctaacaaagacaaccaagaactaattacatggaacctataaaaaatgtaaagtactttggcattgtcatatattgctagtgatgaagccaattagtgagcagcagaccaaatgtaataagatctgcaaaaatacttctaccttagcacagatagtgatcaaactgtttcatttttcttctggacacataagaagacaatattttcccatcccctgttcacctaaaaaggatgatgtaactgatatatggctaagggaatgtcatggaattgatgtagaacacttacatttaaaaatctccctcaaataatccctctcccttgccataccagaagcatcattccaaaagagaagcagcctggatacctgagccaccagtcaaaggagaactgccaggccagcatctgataagtaacacctacacttttgagcaactttgttcagttgctcagttgcgttgactcgttgcgaccccatggattacagcacgccaggctttcctgtccttcaacatctcccagagattgtgcaaacactgaacttagtgtttaagaattttattatgtcaagacactgaacgactcatagcatttgttatagtagctagagttactcgttcagattaata

SEQ ID NO: 52520 - DNA, 1250 bp, Bovine  19866880808931
  misc_feature (1)..(1): n is a, c, g, or t
ntgaatgggtaaagaagttgtggtacacatacacaaaggaatattactcagccatgtaaaggaatgcatttgaatcagtttctaatggggtggatgaacctagagcctattatacagagtgaagtaaatcagaaacagcaagatatagtaatctaatgcatatatacagaatctagcaagacagtactgatgaatttatttgcaggctagcaatggagaaatggaaaaagagaacagacttatggacatggggagaggggaggggagggtgagatgtatggagagagtaacacggaaacttacattaccatgtgtaaaatagatagccaatgggaatttgccgtatgacttaggaaactcaaacaggggctctgtatcaacctagaggggtgggatggggaggaaatgggatggaggttcaagagagagggtatatatgtacaccgaaagctgattcgtgttgatgtttgacagaaaacaacaaaattctgtaaagcaattatccttcaactaaaaaaataaataaattttaaaaaagaaataaaagagagtctcagaaaagcctcagctctagaatttgggactaacatctcataaatgtgggcttttgtcttttcacatcaagtgctgttaagtgagaaggtggagtctgaccagccttagttttgacatcagctccacctgtttttaaccaagagcaagtgcttagcttctcagggcctcagttgcttaccctcaaaatgagagcaacatccccctcttaggagtttcataattaagtgagtgatcgtatgcaaaggttatggtagatagtggagaatcccatggacagaggagcctggtgggctacagtttatggtgtcacaaagagttggacacaattaaagcaacttagcatgcacacacatggacgtgtgttcaataattccttcccctctcccttgcccaacattctccctgatggggacttggcatttacctggatgaacttgaacctacggttgtcatctataggccaagtcaattcagatcattttgaaacctagtctggccatctgacattgtcacactcccacctatagactagatacacattttatttggcctcatccaagtccttcaaaaatacatcagacccacgagtcaacctgggggatggagcctgagcagggctctagtctgccctccaggctgccattgatctgctaatcaattctcctccaccaggtagctaggcagctagggattcc

SEQ ID NO: 52521 - DNA, 1819 bp, Bovine  19866880809543
  misc_feature (1)..(1): n is a, c, g, or t
ncccgggccaggcacctgacacccttgtcccaagggcagcaccgccctccctgcaggagctctgggacagacgtgtgcctcctagagactggcaggggagccggttcctgggctgcagctggcactctgggtggggggcatgtttgctacccttcctggcccctcctcagcacccccttgctcccacagtctatgtgacgctgacctgcgccttccgctacggccgggaggacctggatgtcctgggcctgacctttcgcaaggacctgtttgtggccaacgtgcagtctttcccgccggcccctgaggacaagaagcccctgacgcggctgcaggagcgcctcatcaagaagctgggcgagcatgcctaccctttcacctttgaggtcagggactgccagcccccggggccccattccagaagcatcacttctagcaagccctctgggcaggcacacaggggcagctggggcagcagctccaggccacgcaatttccccagcgtacactggggccagggcactggcacttacgctgcctggtaagtgtctcttctctggccactgccagaggtgtcacccttacccctgcactactacccggaccctcccaagtccaggtcatcgtgggagaaggaggggtcgagggggtgctgcagagaaagaagggagtccttactggcccccgggtcactccaaggctgtctcctccttcatactggctgcccactaaccctgcttcaacccaactcccaaacaagaatggcaagtactggatttccctgctcagctgcctttccactccaggattctggattttcagtttctcagactctgattctgtgattcagtgaaatcccctgactgtgagagtcagagaaggagagaggataaggagccatcctctctgttatagacgtattatggctgctgtaactaaccattgcaaacctagtaataattaaacctgccaattagaatacaaatgtgttattttacagttctgaaggtcggaagtcaagaacagctctcatgggctaaaatcaagtgtcagcagggctgcattctctctggagctctgggagagaaactgcttccttgccttttcctgctgctagaaactgctcacattctttggcccctggcccagcccttttccatcttcaaagccagcaatggccggtccaatctttctcgaatcccatcactgtgatgctgacttttctgctccctgctttcactgttaaagacgctgtgattatggtgggtcgacctggctaatccagggtgatctccccgtctcaggatgcttcaccgaattacactgtaagacccttttgcccttgtaggtaacattatcacaggttttggagattagaatgtgaacatcttcaggggccattattctacctaccgcagtgcacatcatagaaagaccttttcagctcttgttctgtgggggctgtgatgccctgaaatccttggctttattgcaggggcctctagtgtaacatgaagcatagcttagcatgttctgatgacgtaaacatggtctgtcctgtgaattgcctagtctgatggaagggacatggtcagtccttaggggcactggtctgatgaatgtgtgtggggattgggagacctggagaggtcagtggtgaatatgacaggtctctctgtcctcttaacagatccctccgaacctcccatgctctgtgactttgcagccgggacctgaagatacagggaaggtgggtcacccctcagggagcatccctctgggttcaggacactgtgtcctcaggtccccagctctctgt

SEQ ID NO: 52522 - DNA, 863 bp, Bovine  19866880812607
  misc_feature (1)..(1): n is a, c, g, or t
nccagccataaacgttttttttttttgaattctcagactaatagatctttcctgcctccacgcctttgcataagctgattcttttgatctgtctctgttcagcaaactcctattcatccttcaaaaccctgttcaaatgtgactttaagaaatttccttaggctgggtacaagggcctctactctgagcatgcagtttcctgtgacttcatttctctagaatttgattgaatataatttctcccctgggtcattagcttttctaggactggcaaagttgtattcagtagagagttagcaaatggctggatctgcagaagaggatgggtcccctggggatctgctgatcatcccataaagcccaaggccagtgcaagactgcaagaagggaagcagctcagagataacatttaatgggaatcagtgaatgatactaaggttaaatgtcaactggcataacttaggtactcaatttgttgatttttgacaactattgatttgatatttagctaagcatcagctctcatctaaaaccctccaagatttttgctgacagtgagccacagctagtagcatgttttatatgccaggacttactgcagtcttaggttacagtgccagaggacatgtctttggaactgagggtggggggtgacctgttagagacatagttctctaaccttgttagaaacccattactgttttgtcctgcgggactggcagagtattctttgaaggccactgacagatggaaatgcttcaaaagaatttaaccctttctcatgaggaatgactgacaggagggataggaaatttgctgggagaatataaggagactcgagactcttttcactcggtgaaaag

SEQ ID NO: 52523 - DNA, 1127 bp, Bovine  19866880832532
  misc_feature (1)..(1): n is a, c, g, or t
ntgatttttttttttttttttaagagcaggtaggatagagagcaggtagaaagggagaaaaaagatgtgtgactgtcagaaatgtgacagacaagaggcggctctgaggcaagaaacccgtcagacttcctggggttcagtgaccctgtaaaacctgaaatttcctctcaaaaacagaggagagccacaatcaccatctccttgagaaggcatttacttctgcgaccccattcctacccaggcccctcagttctgggatgagaaccagcgagggcccagctggagtccagagggctggggttcagtctgagctcagcatgacttgccatatcatctggttccctggtcagtcagaaacacaggttaggccccactttgtgcttgggtgctgtggattcagcagtgaacacctaagagctggcttttacctacttggtttgctccacccctgaccatggacaccccctgcccttccctggctccaggttccttctgtccagactggggctggacttgtgacctccagaggcactgtctgctctcactgaggtccatctccttcttcattaagtctgcctggcagactcatggccctaatttatgggcatggcctttcccgggctgggagaggtgaccgggggcagttattattcctgtggtaatgcacttggctgccttcagagtccccttcttggctccctcacccctctctcgccgcctctaccctcttccttcagcactgcttcatggtgacttgcccaggggtggccactcctctggagaccacctcagctaacccttctgtgtactgatgggaaagttgaggcccagtgagtgcaggagcccatccaggtcacaccaggtgtcaggagcagagcagatccacagctccggacgccccctggggttttcccttgccctgctctggatctgagtacctggcagggcttcccaaactctggactctgtatctgtgcctctgtggtaattgcctcctgcaaccaggtctgtggtgacctggagataaaaagccaacaaagaaggggtggggagctctctttaacttctatcagcagctttctgcaggcctcagaaaccccctccagccccctaccagcagaaaccct

SEQ ID NO: 52524 - DNA, 1202 bp, Bovine  19866881068489
  misc_feature (1)..(1): n is a, c, g, or t
nagagcaggcacttagtaaaaacaaattccttctcctttctctaatcacctttagatacagagacagcaaagaccataatgaaactgactacaatataacttgcctcaggattcttaaatttattcaaagctgtaaaagatatctgaaacatttagtgaaactgtattacatttaatcaaaagccactatccttctttaacccctaaagaattgttagaaagcagccagttgagattttcttttaggaaaattaatataatatggatttagaaaagatgggtgcagttacaaaatgagttttcacccgaagccacactaaacaacaaacttacacttaaaacatggttctatttacacagagcttttgcctgatatgtgaatgcacacctgcactaacaaaactcacagcatcacgcaaaccctcttaccttatgttcaaatggagcaccataatagccatcattcagcccaaaaattatttcattctggttgcgggcatgaatctaagagaggaggaaaagacattattagttcatctcattccaatcaagttttaatgtgactagaaaatgacgggacctacttcaatgttgaaaaataattggctatgtctaacaagccagcagaaaacaaactgcatatcataggacaaggcaatcaatttagagtttcctgttttagtcacagttctcacaaaatcatcacatgcgatcacaggcaccatcattcacacacattttccacaaacacttcttgaggttgttacagaaagcaaattccttaagcacaggggattaagaggcatactatacattatttaatctcaaagaaaacacaatccaggacttccctgttggtccagtgagttaaaatccacctgcaatgcagaggacatgggttcaattcctcatctggaaaaattccatatgccaatggggcaagtaagcccatgcaccacaactactaaagcccatgcaccctagagtccgtgctctgcaataagaaaagccaccccaacgagaaagctgagcaccataacgtaataaagaggagccccaatcgccgctgcaactagaaaaagcccatgcacagcaaccaagacccaatgcagtcaaaaataaataaaattaaaaaaaaaataacagttcaattagtctgtcaatgctttaagtctgtcgtagaaaaaacataaaagattaat

SEQ ID NO: 52525 - DNA, 1052 bp, Bovine  19866881146173
  misc_feature (1)..(1): n is a, c, g, or t
ntgagcacacatttcctaaaatgaaaacagcttaaaaactgctagatttccagagaactagcttctgattttgagaaactcagaaagaaatggtagaaaatctcacctgagccctaaacccccttgtcttaaaataactgtgcttttgcccctgaagggctagcccagacatgggggcatcctcacctgacttctttcccacccagctcctgcctcatcctctgctccaatcactggacactttctcacctcccgagtccctgaaaatcacctgctctttcttatcctttccctccatccagcagcaatccttagtctgtcagaacacacctgtcacatcagctgcaagaagtgttccaagtaatttgttactatgatgaacagtttgtgaatgagtttcatttctaaggaagatacagtggattcgggtgttttcctatgaagacgattgttgttgttcagtcactaagtcatgcctgagtctttgtgaccccatggtctgtagcacaccaagctttcctgtccatcaccatctcccagagttttgctcaatctcatgtccattgagtcggtgatgccatccaataatgctttgccttatttgtatcccaatgtgcaatcatgagaggggaaaagcctgttggagattctgctgttgaggctggaatcacacatgccataacttattctatgatatcaagccacatggaatcatgaaagtatcagctctcctttctataatagcagaaaaagtctgagaacctatgtaggctttgctctgctttgacctaaagtcttgtagtccagcagagtttcctctttggtccaggactggtttacaggtaagggaattacccaacctggtttgcctggactactccagttataacattaatggttccatattccatgaaagccctcaggcctaggcaagccaggatgatcctatttataggttgacagtgactgagagcccctgaacctcactgagtggatgacccagctggtgaggccccgcatcgtttctgtcccccttttacagatgaagtggg

SEQ ID NO: 52526 - DNA, 1273 bp, Bovine  19866881194720
  misc_feature (1)..(1): n is a, c, g, or t
ncataagccccataaggtgcctgagtgtgaaacagtaaaaggcacccatgctccccttcctcaagacatttttctaccatctgctaggaagagttgataaacacacaattctacaatgtctacaatgggagtggtgtcttcatactgtggtaccctaattcaataccctgccccctccccttctcagagatgatgtcatcagattggtatggattcttcttaccctttatataaatattaatacatacttatttatctacatgtagaaaatgtatcaatcagttttatctggtctttaaaaatataactgacatcacagtgaatggatcactcaggaacttgctgatttcactcatcagagtgtttgtgctccatcttgctgagccatacagatctcatatttccattaagtggatcagtggcaggactccaggtccctacctccactctacttgaaccaagagagtctgttttgttctctacatattttatatcctggagtatggcacaaggggattcccaggtggtgctagtggtaaagcacctgcctgtcaacgcagaagacataagaaacatgggctgggaagagcccctggaggatggcatggcaacccactccagtattcttgcctggagaatccccacagacagaggagcctggcaggctacaggccataaggccacagcgagtcagacacaactgaagcaacttagcgcacacacgcacagcacatgtttacttgcacgaacatggtgcctgccctgcagcgggaaacccaagcctctgctctcccatccccaagactctgggaccagaggtttctccagagacctggatgtggatgcactgaggaggggaagaggggctgtcctcccaatctgcacacctacctgatggtgacgtcagcctggagtccatacagcttctgctccagggccttcctgaaggacatcagcgtgtgctctggggccagctgagggggaaggtggtggtgaggggaaagccaggggctagtaggcctggttctaatccccctccttcaagcagtagctgtggggccctgggcatccacacagcttctctgaagctcagtttccttatctgttaaatcatgcctgtctcacagattttttgggggggtggggggagcaaagagagaaacaggggtggttagtgttgatgaatataaatgtggaggtcagaggatatttttagtcttctgcctctttatagtcttgggctgagctgaatgccgagtttcctcctgtttat

SEQ ID NO: 52527 - DNA, 2871 bp, Bovine  19866881220997
  misc_feature (1)..(1): n is a, c, g, or t
ntgtaatggagaggtgatggccccaagtagaggcagtaactgcttgagtcataaagcaaggctgtggcaggtctgagagacaaccgaggcctcctacttttggtccagtgctctgtcctgtgctccagctcccactcactatgtccctgcaggaagctagtgaccagcttgtgccttcttgcccctccacatgccctctctcttgtctccttctagggcagctctggtgccgatcttctcctttggagagaatgacctgtttgaccagattgagaactttcttggctcctggttgcactggttccaggaacaaattctgaagatcgtgggagcttccattctgcacttttctggccgtggtgttttacagtttttgtcttattccctgctgccggcccatcaacactgtgggtaagccaagaacccaggctgggaggggttgggttacagggcaaaagacttgggcttgggctgaaggggaatggaaatgggccagacacatccttgtcctcctggaattcaggttctatactgggaaatggacatactagcaagtaacccagatgcaaggcatctgagatgagaagagtaacaggggcataaagaccagttgccattactgataactgagcacctactgtgccaggctctgcgctggctacttatatgcagctgctcagttgctccgacaaccttggaagcaaaaactatcatcctcattttattgattgcaaaaggagacctatagaaggtaaatcatttccaaaagatgaccctgcatttgagtaacacaactgagatttgagtcaggatctacttgacttttactatgtcagaggaaggagtttttatttctgagaagacaatcccataaggcttattgcagaagacggatataagggaagtgcactttaggtctgttagaactctgtatagtagcaatcatcaggctacaaaggagagcctgaagaaatttcctataaataatgggcatggactttagtgcgtggatttaacaccatcttttcagttatttggtcatctcatttgctctcctcttggattccaactatcttccaatggcaaagcttataataagaggtctgtttatctccattcacccagttacctttagttgagtccaggaagtcaagagtttccctggatttgggggtagtattttcaggaatgttatagggctgctgcctccagatggctctgaagagaagaagacatgacagctgctttctgagccagatagaaccagaggaaggaagttgataaggcctcctatttcctccttagaatggggggcactgccctctagcatagctggagagagggaagtagggtgcttggggtgtgggccacctcctcccagacatttgggcatgtccagtgatggcatctgagactcccatgtccacatgtccctgagactaagagcacatttgcacggctcacaacctgacaatgattctgcctagctatgagacattaaacaagttacttaagctccctgaggtgagtttaacacctcagctgtcaaacaggaataaagcaagttctatccctgtgggattgctaggaggataaaaagaaatcatgcattaaagtatctaatacattgcctagcaggaggtcatgcagcctgtggcatttgatcatcagagcttggagttgccttaatatctagactaggtcacccaaaatacaactggaagggaggcagtacaggcaccttccagcaggtgtgaccaccggcatggggtcctggcccatgggatactgggactccagtgcttcacccacgtctgtgtcttgccatggggaagcccatcgaggtgcagaagataccgcatccctccaaggaggaggtggacaggctgtaccagcactacatgaaggagctggaaaacctcttcgaagcccataagctcaagtacaacgtcccaagagaccaacacttggagttctgctgagcagagacgctgccccaaagggcagggctggactggggaggatggagggaaggtgttgtgatcccagaagtcttcctggaggtgtctgttgaacacatctccagagccttcactgactcctgcatctccaccccatgccaggccctgggtcacagttggctccatggcagaggaaaccagactggcatgagggatttactctcctgcactgactcctctgtaatgggccctctccttggttctgcccacctgagaaatgggatagatactgggagagaatgatgtctgtgtctctgtcctctgtggtcctgttgctcaatgagcaggacaaagagcagctccaggtagcaggtttatcttcctctgctttgagtgacagctggaagcagccaccagctgcagccctttctcctacaagttccctcatcctgcatcctgcctgtcccatctccttcctccctgagctggagaggagggggaggtcacaatcccctaactcatcctggcacctttgagtttctgagtcctctgagccccgggctggcagccagagggagatccagaagttggggaaacagaactgggctctgtcactggctaaatgactgtgccctaacatcttcatcctccttctgactcttagtttccctgagtgactaagatgaactttgacctcagttctgaggtcacattagctgagaacttcaatggcagttcctactcattcagccctaacagtggcatggaatcggggctccataaatttcaattcaacaattgaaagatgctgggaattccctaggagttccatggttaggactctgtgctttcactgtcagggcccaggttcaaccccggtaggggaactaacatccctcaagccactcag

SEQ ID NO: 52528 - DNA, 1363 bp, Bovine  19866881231292
  misc_feature (1)..(1): n is a, c, g, or t
ntcaagcatggctgctgagaggtgcaggtaagttacctatgtgtgtcacactagatggcccacaagactcccctcaaatcctattcattcatcaatcctcatatcggccctacatctctgcagatggaaaaccatgggcagacagaggctggacactatgtggacttccaggccacatagtggtggaaacctgatttgtctctcccagcccagtaccctactcactgcacacaggatcacacttccccatggggggaagtagtgccacgtgggcactacagtcctggccactacccagatagctccattactcaccgagacagggaaatagtcttttacgtacttccataagatccaggacctgaaggcctggatgtcctgcctccatgccatggcatgtctctgtccaggtaccaccaggtggcatacaggatagtgaagatccagaatcttgtgaacaggaggcctatgaagaccacatagcagataaaggctgggaagggaagcaggagcattagtgggcactaatggccagggtgaaggatgcactctccccatatgcccagcactggcagcactgtcctgtccagccctcaccccggggggaacaggtcagcctccccagtactccaaggaggagaaaatgcagtcgaggatgtgccacactgggaccctggatttgacaccagaactaactccaaactcacttgttcccactgtaccaggctgcctcattcactctggttttcccttccctttccctccctgtctgttaagtctttctttcccaagtgctcagtaaattcccagtagcccagtgactgcataaattgtttctagttatcattctttgggacctcagagaaatggagacattctttctgcccagccctccttctgtacactcgctgtccatctttctgtagataaatcccaccagattcctccctctacttaaacttctcatgactttgagacacagcccaagcaactcagcctgacattcagggtcctcaagaaacttgctccagcctacctcatgcacaggccccctagcttcagctacactaagctgctcagtgctcctccgattgcctgagctccttcaacctcttagcttttgctcatgcagtttcctctgcctgccatgccttttcctactgaaggaaggctgaagaggccaacacctgactggactgtaggttgggggtgcagcagggctaggactgggcctgacgaggaattgccatctgatctttgattctcagtccctaccacaggctaacctggtttcatctcaacagtcaggtgctaagataccagtggagcctaatttccagggaatattgccccttccagaccc

SEQ ID NO: 52529 - DNA, 1501 bp, Bovine  19866881421870
  misc_feature (1)..(1): n is a, c, g, or t
ntgaaacctgaggttgatagcctcaagtgcctgctcaggagttgctgcaggccacgcctccccaccgcatctgccagccctccttatttgccccctctcctccttgcactcacatcttccctccctgtggcccaacagagatcagcgatggcatggaggtctccgatgagctctctgtgtgttcggacaacagttatgactcgtatgccaacagcgccaccaccccggtggccccgcgagggagcggcagccgtgccaagaccctcacagaccggagtgggcgttagctgaagacccgtctgtccagctgtacctcgtgtggagaccagagaagcccacagagctggcagaagcatgctcggggcgctaagtccacaggctcctcgttggctccggtcccttgtcagccatggcctctcttggaggggctcccctctagcctctcagatgcccctgcaggcctggggctcctctttccgggaagtttggggcccagggcccagggcctggtccactccttgaggccttcctttgcatccttacctggaagctttggagggtcactgggctgtgccatgccccctgcagcagcagaggatgtggagcctgcgtgtgcccacgtgtgtctgttctcctgtctgtgctgtgaggaaaccgccttctcggtgattctcctgcctcaaggggctgggctgggcctctgccccagcacctccgctcttccatcagtctcaaagcacaaagaagctcggcccaggaggaatgcctgctccagtggcgggaacacgtgtcttccccaaccagcctcccgctgatgctggccatgtcccccaggagctgctggagatggcaagagcaggctcagggctgctggatccacacccaggagagatccacagactgacatgacctcaggttcccacgtcagtggccaagagcaggggccacctgggaaaagtgttcaggcatggttgatggtgggtttatgaccaaggaggcctgcagtggagggagcctgaggggccttggccaggatgattaaagctgccatcttgacacgtctcatctctgaattatcagtgggagggtggggacagagcctgcagggtttgggattcaggtcccatgactgaggaagaaccattctcggaagtgaatgggagagtggcagagtggtgggccccttccccgcctcacatggcactagggcttccttaagaggcctgggttcggggcgggggggcgggggcagtgccccatcctgtggtgggggagacagtcttggagaggtaaagtgaccgtccctggccacacagcttagtacagcagagctagaaccccaccctggctgtggaccttccgtaaccagctgggaacagtaaggcaggtggggcgggctcctgggcccactataggactgggcagtgggactagcagtcacatgaagggtttcatgagctcctggcctatggaggaacaggcccttaggagacgcctctcc

SEQ ID NO: 52530 - DNA, 664 bp, Bovine  19866880381653
  misc_feature (1)..(1): n is a, c, g, or t
ntgaaaatctctgaagtactttacttcttttaaccatgcaaaaaaagtaatctgtgactacgcttttttttatagaaaaagctttctgtcctcttcatgtctttttagccttcatttgtattcgtttgctcccttttggatgaaaacagtgtcagatcactgtagaatatctggcactcttaagatgacttattggaaatcatctgaattaaaatttcaaagcagtatttcataagaccaaatgaactgaaaatataaatttagtggcaatacacaatagctgtcactctcctgtccattataaaagcctaatgaatgaaaattatgatttaacacagcaaatctcataagaaaatgagctgtgcccccaaaaactatctgtacaggttaactgcagtgtatagaattcctagaaaacaacattaagtatgaattcgtatttcatattaaaaaattgccatctgtgattacaaaatagcctccaatcatcattcattcatttgaacaatgaattacaaattacaaataaggattctaacgaacatcattttcttttctttaggactataagacctacctggattttgttcttgcattagaaaaccgcaaagaaccggcagctctgcagtatatttttaagttacttgacattgagaacaaaggg

SEQ ID NO: 52531 - DNA, 1514 bp, Bovine  19866880428829
  misc_feature (1)..(1): n is a, c, g, or t
ngcttccatgtccttcactcatctcctggagtttgctcaattcatgtccattgagtcagtgatactatcaaaccacctcattctctgccaccctattctcgttttgcctacagtctttcccagcatcagggtcttttccagtgagtcagttctttgcatcgggtggctggagtattagggcttcaacatctctccttgcaatgaatattcagggttgatttcctttaggattgactggtttgatctccttgcagtcaaagagactcaagactcttctcccatcaccacagttcgaaagcatcaattctttgatgctcagtcttctttatggtccaactcccacatccatagatgactactgaaaaaaccataactttgattataatggatctttgtcagcaaagtaatgtctctggtttttaacatgctgtctaggtttgtcatagctttccaaggagcaagcatattttaatttcatggctgcaattatcatctgcagtgattttggagccccccaaaataaaatgtgtcactgcttctgctgctttcccttctatttgccatgaagtggtgggaccagatgccatgatcttagttttttgaatgttgaattttaagccagcttttccactctcctctttgaccttcatcaagaggctctttagttcctcttcactttctatcattagagtggtatcatctgcatatctgaggtggttgatatttcttccggcagtcttgattccaacttctgagtcattcagcccagcatttcacatgatgtactctgtatataagttaaattaaaaagtgaaagtcgctcagttgtgtccgactctttgcgaccccatggactgtaacctaccaggctcctcagtccatgggattttccaggcaggagtactggagtgggttgccattgccttctccaggggatctcctaacccagggatcgaacctgggtctcctgcatttcaagcagatgctttaccgtctgagccaaggagccacctattaagttaaataagcagtgtgacaatatacagccttgttgtactcctttcgcaattttgaaccaatcagttgttccaggtaagttttcttactgttgcttcttgacccacgtacaggtttctcaggaaacaggtaaggtggtctggtattcccatctgtcaagaatttcccacagtttgttgtgatccacacaaagatttttgcatagtcaatgaagcaggagtagagaagtttgggaaatattaaataataccactttggcataaaaaattatgtcaaaattatgtgggtttctttcagcatattgatttctcatatgagttacatgattcttgaagcactttctttaaatgtatattataccactaaagatatctccactctggcaggcacaattacatggtggaaaagcctggcttttgcagtcatgtgttgtcagaatgcccactcttactttctattagattcatgaccataggcaaactattaacctttttggg

SEQ ID NO: 52532 - DNA, 1018 bp, Bovine  19866880766905
  misc_feature (1)..(1): n is a, c, g, or t
nttgttttctttttaaattttaatgtcataagacaataaaggaagcagttccttaacattaatggaaggtaggtttggaataccaaaagtctcttcctttatttggcatttcggatttctccatgattatattaacaataaatcatcaagaacctaagtatttgaaaagtgtttaattcaaagaggataaaggtcatatttacacacccttctaagaagagtgtctcaaaaattatgactgcttacatgaaagaagaaaagtttgaaatttaaccccatttcctatcttgttggcacttttaaatacaactgtgtgaaaaaattcagaattaccaaggattttaacttaaatcttccttaaaaataagacaacatccttgtcaagttacttaatccaaattcacttaagtagttacaagagtgaactctatttgagtaacaaaacaagtccgtacaggagcagagtaagatgtgcactcttatttatttaaaagtattgtgtgctgaaaaacttgtttagatgtaacacgtttacgtgtaactcctgtggagctggagaaaaagacttgcttaaaaataaaagcttaaaggaaacgtctttcctaaccactgctcattccttagacaggtgcagatgcctaaagccctccttccatcaagcccctactcagaaaaggtgcctcctacacacaatttatttggttgctataacactcggtttctaagccacaaaaggattgcttctgagtggagaggataaagcataagaaaaagggagggtccggctgtttcagcgattgatcaattcaggttctcacttggagatcctgcttaaacacagagatctgaaacaccctgttgttaggtgtcacaggacaaggcgatctcttgggatacaccaggcaagggactaaaattttaggggttgcaactacacacgcagcagctccggattcttatcaaaacaatagcgagtggcacatgtcaggcggcccacatgctcaaggggataaagagg

SEQ ID NO: 52533 - DNA, 1559 bp, Bovine  19866880822663
  misc_feature (1)..(1): n is a, c, g, or t
naaatattctaggtaggcacgcctcatcagtttaaaatacatttgtcagtgacctttaggacttaactgcctggatcaatattttaatgaggttttcaatgagtgtctagcaaattcaagaacctttctgtttttacaaacagggccttgaagttattgaatctacaaacttaaaatacttcacgaaagagatgacagctgaattttatgcactgaaggggatgttcttggctcagattaacaagtatgtatgttatataggtggcgggtgagagaaagactcatcagattatttaaataattgtttgtaacttaaaaagcaatgtgaagatgaagctagaaattgacatgagttggcatcagtcatcagacatggtgttcagcttttgtatctaggaaagtagtaacttgcagcaggatcagaaagctggcttgagtgtggtactttttagctatgagttgcttgaccatggaactgccaataatggtttcattgccccattttctcagcgtgctgtcttggaaacagagttgattccttttatggaggtgattcttgctttagaggaggggtcagtcaactggaaaacactgtggtgggtcctcaaaaaactgtaaacgaagaattatgtcctagcaattccactcctaggtatttatggaaaagagttgaaaacaagagctcaaacaggtagtcgttcatgaaggttcacagagttctgtttacagtagcagaatattgaaactactcaaatgactggataagcaaaatgtggtgtgtacaaacagtagaatattataagaatgaagtggtattttcccccatatgttgctgtgcttagtcactcagtcttgtccaactctttgagaccccatggactgtagcccgccaggctcctctgtccatgaggattctccaggcaagaacactggagtgggttgccatgccctcctccaggggatattcccaacccaggtatcgaacccacgtctctggcattgcaggcggattctttatcgtctgagctaccaggaaataagtaacttttatttactagtaagaattaaaagccttttttaacaggaagttaccccttggatgacctgaaaattccatgctccatcatgagcagagggggccaggctttctgtggtgagcagtttgtgtgatgaagaacattgctgaattctcttctgaaatcttttgatccaggaattcaaccatatgtggaattcaggaattcaggcttatatgtggacagacatgagttttataatgaaagctcaagcacagaataataaaaaatacaaccatgatttttaaaactgtaggatattccatttcaaagatgctatggctatggtagtctgatatttttcttatctgttgaaactcttgttatatgaaaattacttaaaataaggctggtaaatctgaattcatatagcagatctatgacattttagtcaataatttatttcatgctttgaaaatattaccttcgttagaagtgtgtttaatattttttctttccacgtttagaattccctattaagtt

SEQ ID NO: 52534 - DNA, 1207 bp, Bovine  19866880881718
  misc_feature (1)..(1): n is a, c, g, or t
nattatttcttgattaatctagctgaaaacattttatgattaatttaccatatgatttctgccctaccgaaacttaaattttggagtctgcgagacaaacatataggatatacataaataaaactgctctagtgagaatcaagccactatcaagatgacgtggtaaagtttatattaataacaccaaaaaagagcaataagttgacagttctgagggaatcaaagtgaaggaaaaaaggttttttaaaggataacatgggcttgaatttgttagcaggtcaaaaaaggagcaactgaggggagatactaaagaaacaagcatgggataagatcttagaggttgaaaaaaatatggtcaaaagcacagctgtagccttggaaagaagacaacagaggaggaaaagagggtgaggtgaaaagaaaatttgggttgagaacaagtcatactgagtggcccagattttgtaaataaatgaggaggcaagatgcagctaagaaaggaagatgaggttggagtcttgagaaaaatgaagaggtttggaaaaactgttgtagcgtggtcagtagagatggctttaaaagacattagcgtgtctatgaggccctacgattagagggcatgtgtttcataataccttccaatgatagatcaggaaaaggcagcagaaagcaaatgctggggctgattcacggtgcgaataccagtgaggaattctggagtgccggtgaggctctagagcatcctgatacttgggtcaagcacctgaagagcagaaagagtatcaagagttttatttatttagtaagtattatttacttttgtatactgatcaactttgcgtgtatgtgtgtgtgtgtgttcagtcgtgtccaactctttgtgaccccatggactgtagcccgccaggcccctctgtccatggaattctccaggcaagaatactggagtggattgccatttcctactccaggggatcttctcgacctaggaatcaaacctggatctcttgcatttcctgcaatgcaggtgagttatttcccactgagcccagtcttcccaatacctggagggcatcactgctttgatattccatgtctaaaatccagtgcttcatcttcttcccaaacctatttctatacctgattgcctcaactttgttaattatgaccttcctagtctcctatgtctgaaatttctgactcatct

SEQ ID NO: 52535 - DNA, 1050 bp, Bovine  19866880977376
  misc_feature (1)..(1): n is a, c, g, or t
ncttgtcattagactgttaaatactattacttttatatacagccctttagacaaatcccattcgaatctagtcttcatttattcattctgtaatatttactgagcacatactattttcaggcaggcttcccaggtggctccgtggcagagaatctgccagcaggaaacgcggatttaatccctgggtcaagaagatcccctggagtaggaaatggtaacctgctccagtatacttgtctagaaaattccaaagacaaaggagctagcaagctgcactccatggggtcacaaagagtgagacacggctgagcacacacacacattattttcagacactattctaagctcggtagattcggctgtgaacaagaaagatttccacctacctctccatctcctcccagtgccatagagctggggccagagctggcattgcagccccaggcactatgacttctggagttacagtgaatgatgaagtcaccaaaggttttaatgataagaaaataaatattctacacaaaagaagatgaaagaaagttctgtttaaatgatgaggaaagacaaataattataatagaggaagcaaaactgatcttaacaaatgacactagtgataccacggaggacccctacacattttgttatgaagttgctacctctgaaggattaccagtttgctatgtatgatgccatataaacaacaaaaaagtctaagaatacctagtattgatctattgatgccatatacacaacaaaaaagactgggcttctaagagtgcaccttttaaaaacaagatgatttatgctagctctaaagaggccattaaaaagaaatctacatatattaaatgtgaagtgaagtgaagtgaagtcgctcaatcatgtccagctctttgcgaccccatggactgtaacccaccaggctcctccatccatgggattctccaggcaagaacactggagtgggttgccatttccttctccaggggatcttcctgactcagggatcgaacccaggtctcctgcattgtaagcagaggctttaac

SEQ ID NO: 52536 - DNA, 996 bp, Bovine  19866881231485
  misc_feature (1)..(1): n is a, c, g, or t
ncccccaggctcctgtgtctatggagctctccaggcaagagagtgcgtagccattcccttctccagcatcttcccaacccaggaatcagacccatgtcttctgtattgcaggcagattctttactgtctgagccaccagggaagctctgatacctatgttttcttctactcgttctgttttttttttttctttttctttttgattttactttttatcccacttagaatgtattttgctgtgtattatctaaggtaaaaagataagtttgtttttccaaagagttaaagtcaactgtcttagccctgtctttaaatttttttctctatcttaaacactattaagtgaatttattatctaagaaatcctgattaggcaagctccgaagatgaatagtatccctgaataggtttctaaaacagaagagtatttacatatcacctttcgtcttttgacagtttccttatttttcttgcctgctatatcctgttttcttctttgtgacaagggagaaaagttagacaaacttgtttaaaattggttatatttcctaacaccacatactatttcagatagtgatttataaatacattaagtcagtttaacatctttcccaaatgaccctgactgttcatgatagaactactgcagatccgttggtcagatcttaagtctgaaccttgactactcaataaaggcacaaccagatgaagtgggcagtgaatttggtgcacatccttgtcacaccaaagccttaataatgttttgaagttttaagtcctcagagacaaaaacttacaatgactcaccagtggtcatagaattcacatcttacacagatttattaattatgaaactttaaaatttttttatcatgttttataaaaaacatatcttctttcattcgtagttcttaattcatttaatttattcatattagccagctttgatcagagaatcagggtcagctttgatttgaattttcacaaatgttcctg

SEQ ID NO: 52537 - DNA, 1704 bp, Bovine  19866881722571
  misc_feature (1)..(1): n is a, c, g, or t
ncaacttacccattttttttcttacacaaagacaagcttgataatttaactcttcctagttggtggttaaggctctagaatgtccttaccttttttaaagatcattttaaaaccaaagcactaatttgacacagtaaaagcacaatacaaagatccaaatttcaaatctggcttttgctagatagagtttaagaataaagaaacattcttccctttcttgataataatttaaaatataaataattgtattaagtcccaagacccattgaatagagaatggtgaaagtttctggtataaaaactacctttagaagtctgatagtcatttcattctacagagggacagagactggattttgtttgctttctgtaattacttcacaatctccctccttttcaacattgagattcacaaatgaactggatgccagcgtttctggttgatcggactgaacaacggaatcagcctacagcttattttgttggtattgtctttctgcttcttctgacattctattttcttcttcttcttcttcttcttcttcctccttcttcatccggtaatactcatcaattgcattctggtattttggggtgctgatgcccaaaacagatgcaatcttctctccaagaaagtcacaaactgagagggtggatgtggcagcacgaagcatgtgaaaccataagtaggggccccaggtaagttttgtcggatcaacaggaggcagaacgtctttcttctccaggctgtccacttcatcttcgtctgtgctgtactcttccattgtttcaccgctaacaaagtggatgactctccttgggactttcttcttttttcctatgactcccagttctacattttcaaagcctctttcattactcatctgctgtgccgattccctgaacgccaaggcgcccacagctcccgaggcattcacggcttctccctcctcacagctcgctggctcccgctccatcgctgccgacgccacaggactgctggcgcggcagggcccgcctagcgccaggccgagaaatgtattgttatttcttacaagtttagtgtcggtttgagtaacttaatgcttttttaaggagggaggtgggagaagggttcaggatgagaaacacgtgtacacccgtggcggattcatgttgatgtatggcaaaaccaatacaatattgtaaagtaattatcctccaattaaaataaataaatttatattaaaaaaaagatcacaaataataattcattttaaaaatttgatatgaaatctccaaatcagaaacaagtggtacagttcattagtataggaaaatgggatggaatagggcctcatactaattccatctcctcatgcaataggcatcagcagatgggaggtatagttgattagacaatcttacaggagaatctagtttatacccttgatttcagtgaaacaaactagagtagtgaacacttataagtggtagataaaaatcatcaataaataaattttggtggataatatgcaaaagtcaaaaggcatgaggcatggtaatcagaccaaagcaggagttgaaaagcaagtgtctccctgttaagatgataaattaaaaatattttggttaatatctctatatagctttggacaataaactccatgatgttagtgattttttgtgtcttgaaaagtgaaagttgctcagtcatgtctgact

SEQ ID NO: 52538 - DNA, 1343 bp, Bovine  19866881879241
  misc_feature (1)..(1): n is a, c, g, or t
ntttccagttatttttgaagcatatctcacccatcacatcatttcatccataaatatttcagtgtgtagctctgaaatacttctggttttggggggtgtttttggtcatgccgtgcgtcttgtgggatcttagttccctgaccagggactgaatccaggccctcagtagtgaaagtgccaaatattaaccactggactgccagggaattccctaaaatccagagtttgaaaacaactcactggcattattacatcttaaaaaaaaaatcagcaataatttcttatcatccaacaactacgttcagacttgattgttcaaatgaggaatataaggcacaatacagtccatacactgcaaatgatggataaatcataaattgctttgatctacaggtcttttccttctccctctctctggttctctttctctctgtctgcaattcatttattgcgaaaaacctgtttgtcttagtttcctagtttggatttggtgactgtattcttgaggtatatatggcccatatatttcctgtatatggaattatatatgcaggattatatataaattagtggttgggccctagaggttgatcaaagtttgatattttcacataccaaatctttaactcttctatttcctatttctggaaaccccaaaggagagaaccacttcaccctttagataacaagtactgctggattctaaggacgtgttatgtgctctgttcaagacttcgtttatactctgtaatgacctatatgggaacagaacccaaaaagagtggacatatgtatatgaataactgattcacttgctgtacagcagaaacaacactgaaaagcaactatattctgataaaaattaattttaaaaaatatataaaggaaaggcagtgaggtagtctaaaaagcttcacactatcaaaaccacagcaatgatttgatgtccttttcttcctttccagactgacaccatgctagacacagattctgtacttttattcacctaaatcacaacttcctcttctaccctgcactgtcttcagggctctaccctcatctctgcccccactaggaaaagatgatcttatctgacttaagacataattaggttgcctggcaacagtcagaacaagaatcatgaagtaactttctcatggttattataaagatgatattaaatgagctaacagttgtaaggtacttatagtagtgattagtgtacagtaagccttatacaaatgtttgctttagaaaaaaaggagttaaaacaaatcaagcagaattcatatctgaaacgatctctcaaacttcttcaagaatacaaatatacttctttatat

SEQ ID NO: 52539 - DNA, 1296 bp, Bovine  19866880130038
  misc_feature (1)..(1): n is a, c, g, or t
ngtcctctagtcaggctatggtttttcctgtggtctgtatggatgtgagagttggactgtgaagaaagctgagcaccaaagaattgatgcttttgaactgtggtgttggagaagactcttgagagtcccttggactgcaaggagatccaaccagtccatcctaaaggagatcagtcctgggtgttctttggaaggactgatgctgaagctgaaactccagtactttggccacctcatgcgaagagttgactcattggaaaagactctgatgctgggagggattgggggcaggaggagaaggggacgacagaggatgagatggctggatggcatcactgactcgatggacatgagtttgagtgaactcccgggagtttggtgatggacagggaggcctggcatgctgcaattcatggggtcgcaaagagtcggacacaactgagtgactgaactgaactgatgctttagacacaatactaggaactgggaatatgtatacacacacacacacacacacacacagagtctctgttcttaaagaatgtctagtccagtcaatgccatatcccagggtgcagagtaaacacaggacaatgctcatatcagtccagcacccagggaagtcttgaagagcaagtgagtttgccaagcagaaaagcatggagaagacattacaggctgagggaagagcatgaaagacaccttcactgcctaattcctcagcaagtctgattttaaagcacattatcgtcattaaccggttagtccatgtcaaatctctaagggttatttctgtgaacagtaaatttagttgattagactttgacattaatgagagccccaagttaattggatagcttgccaaaagaaagtgtacagagaaaccagggtaataaccctaaaagactttaatcctagcccataagggcattctgaaacaggcagtcccaggatttcattcaacagctagtcccaggaatttattcttcactgctcctgagagtcaggtttttgaggatagctttagcaaagttttttttcctgcagcctccccatccacaaacactcacaggcaaaactctcctcatcacccatcaccacccaacatatgcatataacacctaactccagataaaccaaaagaaagaagatcaacttagtcaacataaaacagcttcacttctgaagggaaaaaaccgactcaaaatgatgccccattaatattggtagagcagctttggttatcccttccttccttcatttatttatttaacaaacacctaccaggccctaagg

SEQ ID NO: 52540 - DNA, 882 bp, Bovine  19866880383381
  misc_feature (1)..(1): n is a, c, g, or t
ncgacccccatagacggcagcccaccaggctcccctgtccctgggattctccaggcaagaacactggagtgggtggccatttccttctccaaagcataaaagtgaaaagtaaaagtgaagtcgctcagtcgtgtccgactctagcgaccccatggactgcagcctaccaggctcctccgtccatgggattctctaggcaaaagtactggagtggggtgccattgccttctccaaagctcaatgtgaggtaacttcaattcagcttcaggggctaaactgagctccactgagattaagaggatagagtcccagggtcaaagtgggaagagacgttaggcatatggagaccatccaaagattcaagctgaactacccctaccatggtctgagaatttgttataggtttaccaatgagttgagagcaagcatagttttctaagatgaattaaaaggcagcagtacatgctaggactatggcaaacagcataacaagggcaagaacaggttcattcagagaagcttgagagaggaaagaacatgaggctggtttgatggaacccctcaactccatcttctactgctttacaagatgaggttttgttctaagtgaacctatttttaaagtcaatgtcctatttttattggtcaagaacatgtgcaaaattccactaaaaagacaatggaagagacttcatattaaaatatgcacaaacatgaagacttttaaaaattctgagtatgttcatttttctcctcaggtcaatggtcctatacagcagaaaatttcccagtggcacctttgaacagatcagccatcttgtgaacgaagttgtttccttaacagtaacctgctgtgcggaaggggccgatcctgactgctat

SEQ ID NO: 52541 - DNA, 2979 bp, Bovine  19866880470685
  misc_feature (1)..(1): n is a, c, g, or t
nttacttggagttattgagcttctttgatatttacattcctgtttgtcatcaagtttgggaagtttttggccatattacttcaaatactctctgcctgccccccttcttcttggactcccacaatatactgctccgcttgagagtttcccacaagtcccgtaggcactgttcactttccttcaatgttttttctttctgtgtctaagactcagtgatttctcttgtcctgtctttgagtttgctcattcttccctctacctgctcaaataaacctttgaatccttctggtaaatttttttcatttcagttattcattcagtacatttcagctccagaatttgtctggtttctttccaggttttctatttttttatttatacttctgttttgttcacatgtcattttcttgacgctctccacatctttagtttttcaagcatctttaagaagggtgttttaaagtctttgtcaagtagatatgctatcaggtctctttgggggacattttctgttgattttttttctttgagtcgacaatactttcctatttcttacatgccttgtaattttttacattgaaaactagacatttgtgtctaataatgtagtaatctagaaatcagattctgtctcttccccagggtgtggtaggtttcgtttttgattgttgtaggctatctctgtgccaaagatcaacctgaggtgtaaacttaaggttttctcaggttttttctgagcctgtgcctttccctgggcatgcacggtcacttttaattttccccatacatgcagttgcttttgaatttcctagcctttaatgtctggctctcaaaagaggaaaaagagaaaaatgaagggaaaggggtcaccattcctttaaattccctggaaatcacttcagccagaggaggaggggcttgcaaaatggagggggatgttaaacaagaatgactgtcttcctttttgcacctcgtgatcagaaacagcaatcagtggctaggagcagatgtctaatatattcggaggatgaggttttcgctgcccaccctggttcctgcaagctgtgtgcaggttgctccaggaacatgtgcacagctgcctgccaaagggcttggagtgggggataggtagctgctactgtgctgaaaactaacgttgaccaaaattaaccacttcccaaatgctcccctggaacttggaagccttcagtaaactccagggttctaaagtagttacatcagacaaattctgtcagtgtaatagctgtctaggtgaggagacagagtcctgacatcttcttagaattctcacttcagtttttccttccagttttattgagatataattggtgtacagcattgtggatgtttaaggtatacaacataatgatttgacttacatatatcatgaaatgattaacacaataagtttagtgaacatccatcatctcatacagatataaaactaaaacatagaaaaacattttttttccttataataacaactcagggtttcctctcaatcactttcatatatgatgtatagcagtgttgattatatttatcttattgtatattacatccctagtacatatttatcttataactcaaagtttgtgccttttgaccaccttcatctaatttcccctcccaccacccttcacttctgctgctaagtcgcctcagtcgtgtctgattctgcgcaaccccatagacggcagcccaccaggctcccctgtccctgggattctccaggcaagaacactggagtgggttgccatttccttctccaatgcatgagagtgaaaagtgaaagtgaagtcgctaggtcgtgtccgactcttagccaccccatggactgcaggcccaccagggcttctcccgcccatgggattctccaggcaagagtactggagtggggtgccatttgcctaggttactaggaagctcaaaatattcatatttatttatccaaatcactactaatatatacttctcccttcttgtacaaagtctaactcttctattccaaaagtcttactgtatataacttgtaagctacctcaagattttttttgtttgtttcagagagattatagacaaaaagtgaagatatggtcattacccattcagtgtctacagatattaaaatgtctgtggacaagagaagagagagaagctttattttttaaaggggctttagtcatcattacatattacattctcctagttctactatgaaccaaagtgacagaggtgcgtctcaacaaaagttttttctgggaattacctcaaaccaatttccactagggatgcagcctctgacaatctctacaggttcaaaaagagaagtgttttaaaattccaaactcacacccaagaaggtgacagatgtaaagaaaatcatctgaaaatgaagttcttcatttcattttagaatatttcttctaaagatatcatgagaccggttttcaaaggactttgaaggtgtagcagcccgtggtttcatgcccacatgattgagtccgggaaatattacctgagccttggcagtgaatttaaaatgctgacttgaaatattttcactgaagttgtaccaacattaaatagaactagaaagttatttaagctggttttaacattttcttatatatttcctctgaactgacagcaaactctcaaagttggtgagataaagaattaataggtgttaaaagcctttggggaaatttacccttagaagacaccagaggattctgacagattccaaatcatttttgatgagctggagatttctttgtgatccatcagtcacaaatcaatacgaatctgaaaataaaggatgtgcaatgcatgcatgctccattgtgtctgactctttgcactgagttctcccaattaaatgaagagtgggctaggtatgtatttaatttcatggtaagaaagtgatttatattaaaataatagttagactggcta

SEQ ID NO: 52542 - DNA, 2271 bp, Bovine  19866880584255
  misc_feature (1)..(1): n is a, c, g, or t
naaaaaaaaagctaaagcgaaaaaatccaagtgccaaaatataaatgattcttattgtctctctgataagcactgaatgaatatcgactgaggcagctccaggacgaagcaggatggattcatgattggccactcaaacttatgaattgcctcatgttaaattcataatatggtacaacctggttgccctgtcactaacacaaaccagctgtgacatgttccttccaccagacagattgacttaaagcaccattcaacagaagactgtatctctgccacctttgcatgaggatttcttgtagcaaaaaaagtaacctagaggccacttttcctccagcttcctaattactgaaaatgttaaaaaataccattaaatttcagcagaaataaaaactgtaggttctgtatgagagaagttattgacattttagggatagggatggtaaaatatacatcctggaaagatctttgagaaaagtagaaacaaatatttatttctgactggtttggtacagcttaatgcattcaacaaatatttacagtgtgtctatttgatatttgactggcactttctctgaatactggggacatagcagtgaacaaagtgtgtcctgtgaaaaccacagtggtaaatatttaacaaccagctctccagagggaaatgttctgatctgtaaacttcactgattcctataatgtaaatactccaattgtggttgacttcaatctacttacatgacataaccaaggagctgggaagtgacgcacacagccagctttcagaagccagtaggagcgagttccagcacacctctggaacatagagacaatgggctccctccccgcaaaaagctgaattatgtagaacacatgagttctaaaaaacactgtatctttttattatataggactttcctggtgactcagatggtaaagagcctgcctgcaatgcaggagaacggagtttgatccaagggttggtaagaccccctggagaagggaatggcaatacattccagtattctcacctggagaattccatgggcagaggagcttggcgggctacagtccacggaatcgcagagttgaacacaactgagcaaccagcagattttattatatattctattcttctcttcaaggttctccaaacacattaacccagtaaaagtcccatagtaaagatttacttagaatgacctagccactctttctcaaaacgatataaccatagaactagcttgtcagcctggataagctttaaactacatgatcagcccttgaagtcagtccatctgactgtgaaggacttaaaggtaagaatctcaaaatcctcagactggcaagggcaggcacaccttaatgcagccagaataacttttcccaaagtgatcatgtactccaaagacaggggaagtctgctccagatatgagttggttctcatcaccaagatttgttttagtcaccgtatactttatttctcagtgattcagggaactgtcagattatatcttcatttgtgatgtacacaaatccattttatttccttctcctaaattcttccttgtcatccatttaagactgatacaatttttaaaaaagaaattaaaagtcacactaaaccagtagttttagttgataataacttgacaataaaaacaacagcaaccaaaacttaggcttcaaaactattgattagggttgggaggtgggaaggaggttcaagagtgaggggacatatgtatacctatggctgattcatgttgatgtatgacagaaaccaatacaatattgtaaagcaattatcctccaattaaatatatatatatatatatatattgattaaaagaccatgattggaccaagattgagccaactgtccaacaaacactgataactgaaaaattataataattcagttatacttttgtgacaaaactatggagatatttgaacacatttttttttaattttatatatatgtgtttagaatatgagacccagaacaatgaggtacactagaaaatatctagcagcgattttgtgttgcaaggttagaatatgtacaactctgaaaacccatattctaccaaataatgccattttctatctgaagctttaagaaaattacagaatgttgaaagcttcttggatactaatatttctatctacttatctatctgagttttgctatggcatcaagatgctgaaagatacaatatgtttacatacactcagaaaatatttctagatgtttttaataggatttt

SEQ ID NO: 52543 - DNA, 1235 bp, Bovine  19866880694578
  misc_feature (1)..(1): n is a, c, g, or t
ntcgagtgctaaagacaggtaaatgcaaggaaggttgaaggtcccttctactgtttccagtggaaggaaacgtgcaggagctggggactgtgataacaggatgaaggaagggaatgaaaaggaccaggagtggagtggggcaggtgcaatttaaaataggtggtcagggaagatatccctgagaagattcatttgaacaaatacatgaaagattcaaacatataaggtatcctttcaggaagcaattttacttcatgtcatttcctttctaaaaacatactctctgtggtggttttaaggaagcatattttatagcctttttgatcactttatacagatttaaatatgttagctcaaagatgaccatccctatcattagtatctaatattattctggaggagacaatagctaatgaaattggccaacagaagaaattaggtatcaaaatataaagcaggaggtaaacattataatttgtagatcatctaacaattatttcagcttaaaggaggaacaaaaattaactaaaactaaaagagaaatcagcaattttaatggttacaaaattaatatataactattaattgcctccataagtattaatacaaacaccaatcagttttaaaatataaaggaagattaaattctatttacaataataacagaatattgcaaaatacttaagaacaaacttgacaagaagtgtgcaagaactttgaagaaaattttgaaacactactaaggaatacaaaaaataaccttgaatacatgaaactgaatatcaagttcataattaggaagactcaacatcatgaagacagcaattcttcctaatttaaatctataatttaatatgattccaataaaaataccatcagaatttttgttggaaaaatagtgaggtgtatttaaaaagtgcatatggaaaagaaaaaagccaaaagcctgggaaactctaagaaatttaaaagtaataataagaggtgaacaagcctactaaaattatatttattttgaaactttaccaattaaaatagtgtggtgccactgagtgagtgacagacagatgaataaaacagactagaaggtctagaaacagacgtaagtatctgagggcgtttagtgtgaaggtggcgtataacaccagtgggagatgtattgtcaagtaaatggttttagaacaagtgggatagctatctattaaaattaggtcatatcatttataccactataa

SEQ ID NO: 52544 - DNA, 1070 bp, Bovine  19866880726203
  misc_feature (1)..(1): n is a, c, g, or t
ntttacattacccactgcaataacgtgggaaattcaagttttggtttttttttttacttaaatgtaaagattttgcctacataactatactttgtttttagactaatgttaaaattaactttcagtccctgagcacacagttagcaagaatcagcaaccccaaagtaagctcacaggaaaagagaagccacttttgtattaagaatttgccattgctgttcagcagtttttcacactgtggattatgtatttcaacatagctggcaatttctcattatcatcgtgaaccagccatgaatggtcagtgttggtgactgtttgggaaaggaaaagtccaagaaacttatggtttccaatattctgctgcaaaatacatcaaactggcctttacccaaaccaaaaaagtaacccttaaaggcatttttctatcaagatggacaaaattttaccctgaaaggagtataaagttggagagtggggtgggaggcagagagagaattagagcactgtggggtgcggggttgtgtgccccttatattaatgagaaaaaaagagttgtctttggcaaaaagccagcaatctgttatcattctcattacttgatgtttgctatcccacaattaaaagcgcaggttccatttcctttcctattgactattgtccagtaattgagatgcatgtgtttttcttttgaaaggtcattgattaacttttctcattatctctgcgtgtggtcacctttgctattgctattcagagctgaaaaaagtgaaagtgaagttgctcagttgtcccactctttgcgaccccatggactgtagcccaccaggctcctccatccatggaattttctaggcaagagtactggagtgggttgccatttccttctccagttcagagacaggacaatgaattcggagaccttttttcaccaatcctaaaacacactatgtcccttgattctcacgagcccaaagaaagctttatttgttcatttcatactggtgtgcacacagcttggtgacaagaaaaatgaacagaaaaaatgaatggaattagaaaacaatata

SEQ ID NO: 52545 - DNA, 2068 bp, Bovine  19866880764962
  misc_feature (1)..(1): n is a, c, g, or t
nataaacttcaactagacttcctggaacttagtgctttttactttccctgggtcataagttatggcatgtgataaagcttggtcttcagctctgttctctctctcattagccagcatgtactgttttgaggtacccaaatgtcctaagtagtttttagatttatggctatattttatttctctaagtgagataatgtatgtgaatacatttgttcattattaagaattgaatatatgtgtggtaccatttttattgttaatataaattatcattactgttcatcattgtcctcttccttctccatgtacctgatggcctccaactcacaagataagaattctgactagtactttagtgctgtggtcagtgtgtggagttacagtaagactcttttaagatgttgggaataagaaaaacatgattgcattctgagagttgagttggaaaattaatgcaggatagaccacaactttggccacctcatatgaagagccaacttactggaaaagaccctgacgctgggaaatattgagagcaagaggataagtgggtgacagaggacgagatggttggatggcatcattgactcaatggacatgagttggagcaagctctgggagatagtgaaggacagggaagcctggtgtgttgcagtccatggggtcacatagagtcagacacaactgagtgcctgaacaataacaacaaagtctagaaagtcataatcatcattcagatatatgaattaataaaattatagatacaaaagcccagagagagaacagagcacttaggaaatatattctgcaataggaagacttccaaagacgagatcttccctttaaaaactagattaaattctactcccataatcaactcccatattgtgcctattgaccacagcccaaaatgtaggtttcttctacttatataggaaaattcccaaaggtaacaaataaattgtaatccttgtgagacactatggtttaaattgcagagaggaagagggcaccacagattaatgcataccctcagacttgaaaactctcaaaccagcacaggaaacacttcagagatcatagtcctttaatccatagttccttctatattcacatgagtttatcagtgaatgtgctctggaaacagagttggcttcacatcactgaccatcacaaatagtatacaggtcagaaaggctgcatttctagagattttctagctttattctatgatttattggaacttgtatctaggaagtctttatactgctaactttgaatgctgtaaaatattctttataaccaaagatttcatacattttatttactgagaatataacactgccatggaaattgcttttatgggtaagtatatttgcttgacagacatgttatttaattattggaatatggtgggaaatttttcaaatgaaataagctttcagacaaattctcaaatcataatctaacccatgaaaaaaagacatttcaaaatatgaagttgaatgtatctttgaaagattatgaaattgattttaagttcagggttatatttttgtttattccaaggatctatatcacattaaatctagatgttttctagtaatctatatcccaaacaactaattttaaagttaaaaaagtattttatgagaacttcttatttgaaaattatcattgcttaaaagactagaaatcaatgatacctaaaatactgtaattttattttttcattcaaacctcacttcaaaattgtaaaatataagcttcttataagatcaccacaggacatcaatttagttaagaaaacgatatatgaaaatattctacaaaaattgtataagcctcaagctaaaaaaaagggggttgagaaaaagaattctattatgttcataagtcctgaacagaaagatgacttgtccacctgttctaggaatttacaataatttatcagccatgagataatcaatagtatatggaagcttctgaagctcttcaaagaatcatacaggtacataaatctatgaaagatgactcatatgggaatggctgcagtcagacataaaat

SEQ ID NO: 52546 - DNA, 854 bp, Bovine  19866880777510
  misc_feature (1)..(1): n is a, c, g, or t
nagctttagctttctagtataaaaaatattgagatactaatttccagggttgttgtgaacattacaaaaaataaggcctaaaactgttcaacatatttcatagaccttcaatatttctctgggaatgtacgcaatgtgggaatacctatagcaaaaatgaacactaatgcaaagtcaggattcatgaccaaacataactatttattatttttaaataaacattttcttccttaaaacaaacaaaaaaaactagaaattaaatagttccaatcccatcacatacaaagtctgtatactttatttacatctctcaaaacatattgtagactttctgacattcagtaccctcttatttttttttgccacatcatgtggcttgcaggatcttagttcccccaacccagggatcgaacccaggcccaggcagtgaaagcgccaaggcttaaccacttgactgccagagaattccctcagtatcccctcttaaaacaaaaatgatgaaacagtttaaagtttgatccacagtaactacaatttgagtaatcttggcacaatttacaatacgcgcccatattgcatttcatgttttagacagctcctttaatatagagaaactgtccatctccatgagagcgggctcccgccttactcattctcgacaacacttgcacagtgtgtatgctaccgcttccatttatggctctggtagtatttttctggttttgtcctgtttgatagaaataattttattaaaactttaagtgttcttatatttattgtatttcatgatgctgttcctaggtaattgtaagtaataatgtataggaaacattcaaataaaacaaaagtttttc

SEQ ID NO: 52547 - DNA, 1217 bp, Bovine  19866880805965
  misc_feature (1)..(1): n is a, c, g, or t
ngccaggaatggagaatctgggcttttcattttcagtaccactcccattaaaaactcccacacctatactaggtgtttggttatttgtgagccaagtcatacacacagacacacacatacacgcacacacgtagtcattcagtcaacaaatatttattgagcacctactctgtgccagcccagagttaatgacagtgtggctttctattgcacatgtttcaaatgagtcacgtgccccaggaacagttttatagcatagaacttaggtacttatttatgatgtaaattcattctgtttttgttttcaacatagggagtatggaaaatacagaaaaggataataaaaagatattttgcttaagaccacccaccgaagatgactactacatttacactttcgatttattttctttccatttttttctgtgttgagcttctgttgtagttgtttaacgtagatgtttgtgtactgcacatataattttctatcttgcttgttttgccctcctattgatataacacatggtttttccaagtgcaaaatcctgtggcttggaaaaaaattctaagaagatggagtaggaagcaccaggaacctgtctcctgacctagacaataattgcactgacagaatctgtctgacgtaaccattttggaacttcagagtctgttgaggcttgcgacttccaggagaaggtttggatggtaaattgcggttaatttttgtgcaatttcagcttttcaaacagttgaagctgtctacccctcacttctagccacacggcaggcagcaatatatgtgttcctgtgcacacactttgcacaagtcaggacaggaattaagaaccctctcctcaaaatatcaggggtctgtgcttccatctctgcattctgtgtctaatcactgagatgtagacaaggaaatgggctgcctttgttgtacttcccctctttgtgtcaagcctctccccactggctgaagtgacttcctggagatttaaagagatagtgctcttttgtttcttctcttcatgtctctctttttccccttttgggagccagacattaaagactaagatattcaaaagcaactgcatatatagaaaaattagaaaatgaacatgaaaacccagggaaagatgcaggctcaggaaaaagcctgagaagactaaatatacacctcaggattatcctggcaaaaagacagtatacaacaa

SEQ ID NO: 52548 - DNA, 1233 bp, Bovine  19866880819987
  misc_feature (1)..(1): n is a, c, g, or t
natcagagagaaaaagactccaagatgagttatccttaatgtgtactccacactgacactttgcctctgaacattaaccatctaaacagcctggacactcttaagatgtgtgggacttgagatgggcaatctgcacatcctatggataccgaagggaaagctctgccccctgaccagtgtggacctgagcagaaccagttgggaatgtctctgtctttaggaaatgatggatgcaccacaactgtttcgcacgtcatcccaaggaatttgaaaactctcaatgcccaagctttgtcaatcattcccattcatgatgccttctgtgaaaaacactgaaaaatggctctcctgtcacagctaatttatgacgaagtaaatgagaatagtggtcatccttttgagtcagtcatgtcaggacaggcacatctaagagccttctggggtcctgtaaacattctgtattttgacaggaggtagttaaatgcatgtctacatacttttaaatgtttgcttaaaagttacaaaccactgtatataaattatacctcagtttttaaaaatgaccctgggatttccttctattcagtcacaacgtacttgggcctgggtcacccacatttctctttccccgccataaagggtcaaactcacctgttcagcaaaattctagggccaagtagtacaaatgctaagtcagaaggaaaacagaaacacaaacatattgagctggtgtagagatcaaagagaagtaaataaatgaactgtggcttcatcaaacatttacacaacagtacagggcagaacaaagcagccaataatcaggatatacgttgggattatatttgttttagaacaatttattttcaaatttgtgattggcttttaagtcatttaagtctaacattttattaaaagattataataaaattttggttaattgtagctttaattgtggctatgaattttagtgcttttacaaatactttttgaaattaaaaaaatactctttcctttttgaaatattttgcatttgcattgccctgctgctaagttacttcagtcgtgtccgactctgtgcgaccccatagacggcagcccaccaggctcctccgtccatgggattttccaggtaagagtactggagtggggtgctattgcattgccctacagtccagcaatttatatgtgtcaaagcagctaccagaattttagcaagactaagaaaaatttaaa

SEQ ID NO: 52549 - DNA, 1643 bp, Bovine  19866880876300
  misc_feature (1)..(1): n is a, c, g, or t
nctgctgctgagtttgaattcctattattcccctttcattcactcagttacatcaatcacatggatgacctcctcctctctgctccctaatctttcatcttctctccaattctagatttcaaactcctcaaagagtacttcccttataggactttgtcaccttaatgaactttctctcatatataatctcttctgtttgcctactactcaactagctatgctggaagacacaacaagggctttgtgttttttaagccctgctttttatgaactctccatctccatttaagatggtgctaggatctgactttgttgattccctcctggtttgaatggtccctcccagtttaaattaactctctcttctcataatggataactcagcctggtttatgacttttccaagaaatattgatacttgccagcccagtagtgggcattgggacataatggagacccaagtttatctagagttgggattagtataatggatgctggaaaaggacagaagggtgagggggattagcttacttattaaagagttattgaaaatagtaggtcccggctgggggggaaaggaagtcagactagatgcaactcagaggatagggagaaaaagagggtctgtgggattttaaaaacctagattcaatagcttcaatcttctctactttcaaaatcccaaatatcaattccactgcattaacacttttaatgaactgagattatataaattatcacagaattatcccatgtaaccctagagttcaaaacaaaactgttggcagggaacttaattttgtattatccataatattctatgccacttccataatttattaattatataatctcctgataaatgggaaacaaccattttgaacttaaggctttcacatttatttttcttttagactttgttaaggtcttcataggggtcactgaaggtttcctccttttgggattctttgaaagttttttttgtgaggttgtatttgtgcttatttgagggctgtgttgttgatggtttgaaatagatctaagaaatttgcttaatgaaattgagaatgacatgatctcacagagatattttctaggaagccagtaaaacttttgttatgacctgttattttagtattaacacctatttataaagacatgcttccttctttaacttgagaaaaatggctattgtaccttattgattaacatttctatttccagtttatagagaatatatactggtaatggatgacactgttcttgattgaaagtttgggttgtcttatcagacaatatgccatgaatttagataatatttttcagcagttttagtttctcagttatgtatagcaacaactacagataactttttggtaagagtgttgatatgagttaattatatattttttaaatcatgtccctgtggatcttggaatttatgtttctgtgactgtgttctaactgacctctcatctgatatacatgacatctccccagaaaagaactgttttttcttatataggtatcagattgactattctttacaacgcttaaattgcatctcctcttttaactgctcacttaacacatctgaagtcttcaatcctgcttcaaatcacaataccaggctattaataaat

SEQ ID NO: 52550 - DNA, 1731 bp, Bovine  19866881076424
  misc_feature (1)..(1): n is a, c, g, or t
natagaacagacagaaaatcttttaagaataaactagatgatcatcaggtttaatctaggaaaaacaaggtggaccacagatttcacgtgaagagtgtaaacacagaaactcaaggcatttagaagaatggtgaatggaagcatgtaaaacgctcaccattcattcattcattgagttagatggaggaaaggaagaaaatttgagtgggtagccatttcctcctccaggggatcttcccaaccctcaaactgaatcaagtctcctgcactggcaggtagattctttaccacttacagcttacttgggtctagcaaatatggcagagaggcacatgaaccacagtacaagagcattaataaataggaactgacaaagccacagtatcaggaaaaactgttaagtggtgagggacatatgccatccaaatagcaaacagttgttttacagaaatgcagtgttaccagatcttcagatttttcaagagaagccaaaaatctagatgttaatgggaaatctcaacatctgtaaatgccagtaactaattaaaaattttttttcaaatttgggcaggccaatattgtgtaaatgcaggccatgagtttgcaacttcttccagtgttaagtatcagggaggtgagagagttaagcaggggttaacacaatcatatttgtatacagaaggaaaactctgggaagaatttaaagaaactggagatggggtgacaaattagcaaattatttcaggtgctgagaagattaaaagatgctaggaaggaagtaaatttctaggtatcacacattgcttagctggatttagcaaagggaaggaattgtggtgtagacttaagaggttgttcattcaaatttacttttggaatggctttgttcaactacttcctcctgtttttatatatggtattctgtatcaataagtagctgtgtaaaatcacactagtaaacattcatctgcaaagaagtatcctagctaagaagaaatgagagactgttacatggacttttccaactgttgtctcaacactggagcaaagaaacaaaatgccctccttgaggctgtattcagctttttttattgcttgcaatgctgctaaagcacctgtctaccttgccttgttaaagtacaagtgctttgaacatggtaagaatttttaaaaattgttgtatgcatgaatggccagtacctaacttggaaccaaaaaaaaaaaaagaatcctatcaaaacaggaagcatcaagcataggtttccggaggtaagaaagagagaagaatcggaagttctctcgtatcttgtaaaatgacatctggattaagaacagaaatagtagtggtctttgaatcataacccaatgttcacttggatgttggctggggagtgagtgatccatgttgccaagatcatttaaagactctttccttgtacttgaatgtttacagcaactttattcataatctaaacactggaaaaaaatccaaatgtccacaagtgggagagataaactgtggtatacccatgcaatggaatactaggaactaaccaaaaaaaaaaaaaaaaacaaacacacacacacacacacaaacgcacagatacaagcagcatgaataaatctaaaagcattcgctaaattagagaagacacaaaaggctacacactatgatttcctttacatgacattctaaaaaggcaaaactgtcaggaattgatatcacatcag

SEQ ID NO: 52551 - DNA, 1655 bp, Bovine  19866881143493
  misc_feature (1)..(1): n is a, c, g, or t
nacactcagatcacctttttatattttggttgctttttttttttttaagttaaacacatggatttggtctgctaataaagtatgcttattaactattttgtttttagaaagatatagaatatcttttatgatatttctatctgctgctgctaagtagcttcagtcgtgtccaactctgtgcaaccccatagacggcagccccaccaggctcccccgtccctgggattctccaggcaagaatactggagtgggttcccatttccttctccaatgatatttctatctagaatatcataaaaaaataaatgaaaaaaactttcaaatgatctctcaaagctaacagggcatgcacttttaattatacactgaaatatttaacaggtttaatttttcaaaagtagtactatgtctctttgggttcaatccctgagttgggaagattccctggagaagggagtgacaacccactccagtattctgctctggagaattccacagatagtcatggacagaattccatggacagtccatggggctgcaaagagtcagacacaactgagtgacttccactcactgtctctttagatgccgacccaacaatttctctttgtataaattgtgctacctatctaccaataactcagggaacctcactccataaattaagagacattgttacttattttaatcatctgtggaatctagtggctctctattaatgtaccagttcactgcaatcaaagaaaaaaagggaagacagtccaactgaaagtataaagggaagctgggcagaatctaatttaattatcaaggctgaaattattccaggactccacctgccataaggagagtatcctgggatctttaatgaccaaagtggtcaggatttcagtcttacagctcatccaattaattgccaagcacatcttctgctataccattaggtgacagggcgggatccactctgctaattaagaacttagggcctcctgttagtttcccagatgacttttcagggtatgtgtacctggccatgtaaacatatactcggtaagagatacctctatcatagacagtgaacaggagagacttcagacatttcttctccacactattaggactgtgtaatctctatagcacaagtcagacaagattgaagatgctggactctttggcagttcccaggagccaaccctatctcttcattatggtcaagtctagaatgtacaaattgccttgaatagccctacatgccctctggaggtatgtactctcattctttatagcaggtctcatttcaggacattaatatattcttaaaagtgaaagtggagggtaaaaattctcttactcatacattaaaatgtaactctaactttctcaaatttcctctctttgaaggaagcataaagatacctaccatcgcaaaaaaagtgaagtccggaatatttttctcaagttgaaattaggaaagcctcttcaaataacctagcccagtggttccagacatcgtccattgaccagttgcacctctgagtcacttttgaaatttactaaaactagagatttcaaagtcccactccagagtcactgaatcagactgaccaaccatggaagccaggtacttgagttttcaaccagctagtaagatcaat

SEQ ID NO: 52552 - DNA, 950 bp, Bovine  19866881231807
  misc_feature (1)..(1): n is a, c, g, or t
ncattgtgctgaataggctaatcaccaaaactgttattaaataaaccaacaatttaaaaaaattcttgagtcttatggtgattggatgtttctgctgccacagtgattaaaagactctgtgaattaactgttgtatgctcatatcctgagtggtattggtggaggtcaatgagggctgatagaataaaaataaagtaaaaaatatgatttcagaatgtgagtttatatctagatgaggagactgaataaccgtgtagtgctgacagtaaagtgcagcagttcagggaaaggcaagataaataactgtgtgggccagagctgtccatcagagaggaatgagagattttagaagcatcttttcattttagagaacataaataacagaagataagagtttcagccaaataaaacattcttcattggggaaggagttaggtagaaaatgtaagaaatacattggaatgtaacttgctgcagtttaccaggtacaagtgaatgacttggtttatccaacaattggaatataatgtgacttttaaaattctttgaataatggcagtaaccccccaaatttgatgaaatacaacagggtttcaatgttaaccttttaaaaactttttaaaaattatacttacctgttcagttcagttcagtcactcagtcgtgtctgactctttgtgaccccatgcatcacagcacgccaggccttacctgtagaattagcaaaagtagattatattaattaatcagttgacttgttcacagaccatggtggatgctcatttgatttacaaaattttacttgtgcttttagaaacaccctacagtctttcaactttcaggctgtttggtattatatttgttcttattatggatatatgttcacttctatgtcattaggtctgataaataaatatcactgtaaccttcactttttttttatggtaaag

SEQ ID NO: 52553 - DNA, 1770 bp, Bovine  19866881285879
  misc_feature (1)..(1): n is a, c, g, or t
ngagttggagtagcttccctctgcataagactatttggggtacatattccactttgccaagtgaggatagtatataaaaatggttacttatgatagtgagattcgttaatcagtttatgtcacggaggctgtttgtggagtgtcttacatggaaaattttaagaattgtttatgtatgtttatcatggataaacagattaatccgtgttgctgcagagatgaacttaggtgacctttgtacatccttctcagaattatgatgtaatggttttgaaacaagaatgtccctgaaattttttattcttttgctgtttgccaattaagccaaattcctttttttttaaaaagcagagtgtactcaatacccttaggagttacttttggtaggtggtgttactgtgttccagcaatctgtattaaaattatcctttgtgagttaccaaaattttaacacagaggccacagagaaattacatttaattgattctgcttcatttatgaggaaggaataacttaggtgtaatggaaaatgtgacttctggatgcagatttacaggaaacacgccgactgtatagctggctgtgtttgttcaaaactgaagttgttttcagcaaaaaataggctgatttctgttaccaagtcatgggaatagcaatttctgtaaccagaaattcactgcagatttgtgtagtatccagaatgcatgcatgagcagcttataaaatcctaggtcagttctttgactctgcttttttatttcttgtgaaattgctgaattccccaaatgaacaaaaaccaaggaaacaaacaagcaaaaaagttcagagagatttttggattattttattgatgtccacacccagagatggctaatattctcccttgttcctccaattcttaaatatagattttgaacagaagatactatggttaatgagaactgaaggtagataactggtattccactggccactcatttagatcaaatgctaatcaaagttttctaaagtgcgtgagaagtgtgtggctaaaggaaacttttcctgagttattatttcttgctcaaatcaaacttggaaggtttatagattttttttttcccctatcagattgactggaaaatgtgtatgccacattctctttaagctccttttattctattgttttatgattctttctgacatttgtaaaacacctaagtgatgaatataatgggataaacttcaggatctttgcattgcatattttttgtgtacagtagaagtgacagagaggctttccttgtctggcaggtggggaaaatgttctgtctttaagtgtgaagatggggaattttaatagaaggctcgtactagcttggatgaaaaagagatcaatcaagggcaacgtattagtagaaaaaccaacctgaagcttatatttattttaagtaacaattgattttttaaaatgtcactgaattccacattttggccagtgggggtgggggggcacagaaaaaaagtacatgaataacactgaaggtaaggagataggaaagtgttagccgctcagttgtgtccgattctttgcagtccgtgaaccatagtccaccaggctcctctctgaccatggaattatccagggagtaataccggagtgtgttgccattcccttctccaggggatcttcccaaccccgggattgaaccctggtctcctgcaatgcaggcagattctttgccatctgagccactagggaagcccaaggagagtgaggagagaccagtt

SEQ ID NO: 52554 - DNA, 926 bp, Bovine  19866881295624
  misc_feature (1)..(1): n is a, c, g, or t
ntctgttatttcatgtgtcatgtggctgggaagaggacagtctggactttgaggcagctctggtaaatattggcataatcccggtgacactggaaaatcattttcacatcctgattcctcagcactcaatgtttacaaatgtccttaacggacttgctttttgcagtagcgtgccccttttctatctgtattgcaaaacattttggtaacttgtgcctcattctgggattctgaaaacatttggtttacttctgggaaatctttactgctttatgtatctctcacctcttgcaacacagctgacaatacttgttcatacatgggacagacgtgtcttgaggacttactctgtgccaggcattgggttcagtactaaatatacaataaagagcaaaatagacatgaccttgcccttgtggaacttttactctagtggggatagacgatatgatacttactgtggtgatacaaactttagggtattttgaatgttttaactattggtttaatctttctctaaaaccatattgatcctctagagaagctgtatagcagtagctatggttagagcctaaataatactgaattgaattaaaaaaaaaaaaaaaaaagcaggatgctaagaactgtcttaagttgctattttcctattatgttctggagaatcatgggcttccagagctgttgggcattgacatttttgcagttttatttgtttgacatttttatttccatcctgcactgacagactcatctatgtcagaaaaggtcagtatactcatgctttagacttaaagaataaggtttgtactattcatttggactagtagggctagatattcagagtagtggttttagttgagaaattaaacactgttgggctaatttaggaagttgccctgttaatcaaaactaaaggaaaaaaa

SEQ ID NO: 52555 - DNA, 1156 bp, Bovine  19866881311747
  misc_feature (1)..(1): n is a, c, g, or t
nccccctgggcaagacaaaagagtaactttggatcaggctcctggagaaggaaatggcaacccactccagtattcttgcctggaaaatcccatggacagaggagcctgatgggctacaatccatggggtcgcgaagagtcagacacgactgaatgacttcactttcacttttagatcaaggctaactcacccctcagttagctgtctagtcattatgcagagtgtaactgtgctgcagaggcaataccttcaataacccccgtctcccctacccctgccaggagccagcgtcaggtcatcaccatcctgctgcgggagggtctccccggagctttcacactgtgggtgccaagccccagggctcaggtctgttgtcctttttacttgaaagccagaggagagtggattcaaaaggtctggaaggtcagagccagccagggcagtgcaaagaggagccacttaacaggagcagatgaacccttgactcctcctgataccccagaaccctgaaagagctggagaattttaatgtgcaatacacatgcagtcagacaaaatccacctgtgagccaaacacagagaactgacagtttccattatctctcttgtggtctccatttgcacaactgaatggcaagtagggctggaagagagaaaacaaaggctaatccaatggtcattgataaccggatttgcaattgcagccagagaggcagcttagacagacacataaatgcacacattcacactctcattctaaccacattgtccgtctgcgactctattctggcttcccttttagcactagcctaagccctgctgggcaataggaagagtagacttagtcactatagacagataatccaccatatagtcaatgcactcacagctaatcaggtatcaaacatctaatattagttcacataattccctcctctcacacacctgtacataggtaaatgagatttggatcatgcgggggcgggggagggggagcaggttgggggggttgctaaaacaatgaccaagaaatagagaaagtgctacaaatgactcaaactagcatgctgctgctgctgctaagtcacatcagtcgtgtccgactctgtgtgaccccatagacggcagcccaccaggctcccccatccctggggat

SEQ ID NO: 52556 - DNA, 1971 bp, Bovine  19866881322267
  misc_feature (1)..(1): n is a, c, g, or t
ncttttgtgcatatatataataagcacatattgctatttagtcactcagtcatgtccaactcttttgggaccccatggactgtagcctaccagggtcctttgtccacattctccaggcaagagtactggagtggattcccatttccttctccaggggatcttcctgatccagggatcaaatctgcatctcctgcactggcaggaggattctttaccactgagtcaaatcacatatatacatgtctaaatatgtacacatagacacatttacatatattgatatatataatgtgtatatgtatgtatgaacatacccactatcaatttcctaatcaaacagagaacaaatgaaaatgactcagacctctgaaccatttaccatctatatgatcttgtagaagttacttaaactctcaaactgtttcttcatctataaaatcccttatagtttatactttaaaaattattatgagtattaaataggctaatccatcagaaactattccatagtccaattaattattataatcattattactactatacatgtgccaagtcaaccaagagcatgaaagtcagactgaaccgttatttcaagttaaacctttccaacatgcttgctttgggtgaaccctcatcctattggctctctagcctgagcgggaggagttttccctatgaccacacgggaccccagtgagtcagggagcagcttaccttgtgggcacagggacctcagtcagggcacccagcatgactgcctgctgcagccgaacaaaagcaatgaaaggagaatccaagaagtctacctcgccaacaagcacgttggaagcttctgcatcacgtggcagttttttcatgaacttattcttcagctgcatgggaagagccaagaagacacaacttatttccagagaagggaactcaaagaaatttctttatgagtctacgtgcaccaggcaggccctagctagccattcttctattatgtctaaccattctattatataagtttttctctgtattttggatgcaaaaacattatgtgtacagccatgtggtttacatataaaacaatatttacatacgtatcaattcattaacttattcaactcaataaacatgagtttaagagtctccttggagccaggaactgatctaagccctgatgataagggatgtgtcaactaatgacatggccttcttgagctcatattccagcaggggagaagtaaaatagaatttaaagtagtgataagtgttgagaaaaaaaagtaagacatgtaagaggatacgtctttagacaaggaggtcagggaaggcctctgaagcagcacgtttgacactggggtaaggggacaagccaagaaaagatctgggcaaagaaaattctaggcaaagaaaagagaaagtccaaagcctctgagccaggcaagagctaggcagttacagcaacagcaggtggccaagtgtgtgggagcagatggagcacaggagagaaaacggcagcagatgaagttgcagacgtgaggggggccagcaggtgagggtcttgaaggcacagtaaggagtttcagatgttttaaacagaacttacccactaaagaaaagtccatggaaaggtggagtagaaagacctaaatttaggagatatcaccatgtaatcaggatttaagaccatgtgataggatgatacaacctcgggtgttagtgtagacagaggaaagggctgtccattgacccttaacatctgcccactgaccctaaatcctggggtacctaaccttttataggaatggaagcagatattggcagaggacactgaaaaagagcagcctgtgaggtaggaatagaagcaggccttcaccaaccaggactttaggtgaagaaagggaacaatgaagagaggattatctgcttcagtgtcaaaggatgcttggaagttcaaataagatgaaaagtaataaagga

SEQ ID NO: 52557 - DNA, 1431 bp, Bovine  19866881329357
  misc_feature (1)..(1): n is a, c, g, or t
ntaacacttcttaccctgagaagtcctgaaaaattagtaactctgagaaagaaaggataaaatatagttatctgtgaaacagtagcatattttttgataaatcattcttgaaaattaattaagaatgcttaataaaataccactcataccctttgaaatcgcctaacttttgtcaacccttttatgattatcttgtctaatagactctgattcttttgaccaaacttaacttgattgaacttgcaatgtctcaaaggttagactagaagtaaaagataaatgattttgaatctctacttgataattctcatttttactcatcttggcaataatctatgctttctgtaaagtcatgaagtgttctgtcatgaagtgaattatagatataaatacaaaaacagattaaagttacctgtaatcccaccaccccatatgtaacttttatatagttgagatgatgatttattatatccaactttgacaggtgagtggagaatatgaaataatatgtgcttattgttcaaaattaagtaatatcatggactaccaaggagggaagtaaaactttcttagatcttacttgaaccaacaatacataattttttactttgcttttctttcctataatgtttatgtcaaaggaaattgaaaatgttattaaaagtttactataatttataaagtcagcctaatttattgggtgcatgtaccattatttacttaattaagtgcctaataaatagaatgatagcctatttccttagcactgtgataaccatctttctggttaaatctgtgttttggattatttctttaagataaattttcaaaagtgtaattaagttggcctgtggatacagaatttttaaagtgaatgtagctaaactgctttctagagatgttctattagtttttatttaatgtagtttgaccctgaggcattcatattttttatctaaatacttttcggagggaaaaaacactaaaattacgctcagtttggtaaagatgatacacagtatttttttgatagaacttctaatattttattcttaattgcattcagaaaaccggcagtttcaaaactttggtgcataagatcagaagaaaatatttttgtatgggctctttgattatcctgaagaactagaaaatggtatcctggcttactgttaattttctaattcggtaccatgttaaactaagagccaaaaagtatcatcttcaaagctgtaaatttgtgttacgggttttttatttagttttaatttaacgcatctgtatttttagaacaactaggctgattattatttttttgattaggtgatgaatcaagattgatcctctaaattattttcatatagcagattttggacttgctttgggcaagagagatgacatttattagaaatccaagtaaaagaagacctg

SEQ ID NO: 52558 - DNA, 1588 bp, Bovine  19866881499192
  misc_feature (1)..(1): n is a, c, g, or t
nccagtaataccaagtggctcagcttagttgcgctcagtggcaggagacattctgaggtttcccatgtgttgggagggggcccaagacaaagaggtccttgtaaaactcagctagagacttggccatgggacagagtccttgaagaatctgcattaaccgtgccttgcccaggggcatgcagctgtcgcccctgtactataaaccatcagcatcatggactgagtctgcatctccagatagatatttgaacttctttagcttattgacgttataattatccctgaaccctggagctgcccttgtaacatcacgtgctttttctccagaatcatatcacacttcatcattaaaaactgcttactctgttttctcacatatggcttttttttttttttttttcctgtagaagatggttacttagcctcacatcttactttcatatttgccctgtatgtgtacatattgttgtttagtctctgagtcacatctgactcttctgcgatcccatgaactgtagcccaccagctcctctgtgcatgggatttcccaggcaagagtactggagtaggttgccatttccttctgcaggagatttcctgcacccagggatcgaacccatgtctcctgcatcggcaggtggattctttaccactgaaccactaggggatttcacatgtcacacgtatgaataaaattttaaaatccaccaatacatttgtttcttttgccattgtaaacagagaacatggtatcctagtatttgaaatcagaggactgtgggttcaggttttgcttctgccacttaatagcactctgacctgctgaggctctttttccattaccctttcccatcttggttgggatttgtgagcttcaagtgaggtaatatagttaaaagcattatgtgaactgtaaactgccatgcaaatgttaattattgttattattttaaatttactctgtctagtataatccagcattagtaatgaatgcctcatgagtcctcttaatcccagagaagatataaacttaatataccctactttggtggtcagaagctatattcatttaagagctactgataaggagtgaaagttgcagatacactggggttctgtaagcagccttggctagagaaatggaaagaggctgagaatagagatcagtaatggcttagtttctgtacagcctggtgaaagactacagtttgaaggattaacttcaatgttgaggctgatagtgttttatacttcacattgatactccaaggtagcatttatcagctattaaaacagtaattttgtgaatcactaaatacacacatatggtcagatgtgtattatgctttttcagggaaatgatctagatgttttggtgaaagtaagagtcctttggttacacaatcaacagtataggaaggaagatttcaggatttccgaaggtgagtttcacatcctggaaaatgtgtttccctcagttggactccagagtcatcttcaggttagaaaatgtcaacaggaaacagttctggttcaggaagtgatggattctgtttctcactttgcagaaaggcttctgggggtcagt

SEQ ID NO: 52559 - DNA, 716 bp, Bovine  19866881534723
  misc_feature (1)..(1): n is a, c, g, or t
ncaccctaggatctgcctccccacttcttcaggactttcctcaaatgctgcaattccctctatggccttcccttacagaccatgctatgtaaaatggtattacctagtacctttcgcctgttgcaaaactccctacttctgctttactttgccccacacaatcagattcacatttcgttatctgctcactgtttgtctcccaccactacaaagacccctaaggacagaggttttccattcattcactgctgcagcccaagcacctgtgactaataatacaccataaacctgtgttggctgaccgaacatagaaaccagtaacaaagcactgacagaaagattaaggggaattcagaccagaggggaacctcattatgaacaacagaagaatccataagttaccttccagtgcgctgcaattcctcacaatctgcatgtcctcctcctccatggcctccatcgtggggcgtgtccccattcatctgaacattctctccacctgagtacatattctttctaatcaagacaacagagcccaagagaagattagttttattttattcacctgcctcttagctacatcatgcactaactaatgaagagatggaccaaaaaccctttgggagaaagattatgatttcctgccaccatcctgtgtgtgcttaatagctcattggtgtcgactcgtcgcgacctcgtgggtgtaggttcctctg

SEQ ID NO: 52560 - DNA, 1285 bp, Bovine  19866881586177
  misc_feature (1)..(1): n is a, c, g, or t
naatgctagcaagcccatatgaagttctgcaatctatctgtgtactgagatctgcccagtaaaggcagttctctctcagaggtatcaagttcattagaaagaagctggaattcccaatttgattttgaagccatttgtgggctaatgtggctatttagataatttggttaattaaattttctccatcttaaaataatccatcaatttctaaaagaaaatactggtaccacaattgccaagcccattagtaatgtctagtgattccacaagaggtttaggctctggagtcagaaagcagggattcaaatccccaccctgcaacaactggttgatgcaaccttcagcaatttattacctactctgtgcctgctttctcatcgataaaacaggatatagtccctactccacaggactgctacaagaaataaatgagggagtacatgtaatgcacttaggacaatacttggaacacggccaagcactcaataaatgttagctgttacccagttgattctagaaatccatcattagttaagaacacaggaatgggatttaggagcagtgggccacgggagcacccggcctcttccacagacaagctatgtcaccttgaacaagtcacttcacttctctagtgtcaatacgatcatagcaggaaatagaaggcaacctcagatggaattctgaggaaaacttttaagatgtgaactatttacagaggaatgagtaacaaaaatggcaaggttctcagggactagagatgtcaggaagccatttctaccctcgtcccccgacccccacaacagcttagaaaggctaaggaaagaagagtcaccagagcctgatgagggcagaaccagggtggggtagggggagccaccggatggaacaagccactgccagactgcccgggagagcagtgaccaagcgcggcgggggaagcagacatgccctgacctctctgccttcctgtgctcctgaggctctgctttagccaaacccaacaggaagccagagggcagaggagcctgcatgctggggtccaccggggtcagcctccagaggcacaaagcaggacaatgaggcagagaagaacgggggcggaggagaagcaatgtgacagagggacctccactgcatcaaatgttagcacctgccaggtgacttaatctctgagggcctctcaatctccagatgctaaaatttccaaattccacttaactactattctgtgcaggcttccttggggctcagacagtaaagaatccacctgcaatgcaggaga

SEQ ID NO: 52561 - DNA, 912 bp, Bovine  19866881708374
  misc_feature (1)..(1): n is a, c, g, or t
naacaaaaagttgattctctaaacctagattttttctgaaagctaattctgcctcagggatctttgatgttgaatgttgatgaaaaatcagtcaaatttgtgactgtcagtttcagaaccactgtgctgaataactatatctagattccaaattctgccaaccgtttcttaccattctcttattccctctatgtgttctctgatcctctaatacagtcacacatcccatttcttgattggaaagacattgcaagtgtttttacacaaaaatcctggaactttagttttttttttctcccagagatttaggaaatttcaaagacacttttgttctaattacaaaagtaaaacatattgtatcttatattaatatgtattcaattaccttgttttaatgttctgtaagcacagaacaatttgcagatgtttttcttgtttgctggtttatatactaactttcttattcacttaactaattaattaattagttaatgtttgttttccctccagcatataaattagaatctttttgtcaggttctttgctttatcttcaaagcctgaagcaaaacctatttagagcatagacattactcaataaatattgctgactgaatacatgaatgaattatgcatgtattagaattgatatgaaagtgaaaagaagaaaatagaagccctagaaataaactgaataacgtttaaaagatacatatacaggcagtccttgctttgcattttattgcaggaccataaaaatgactatgcaagatgaaattatataaaacaatcctaatgatcaatgagaaaagttattattggtctttgacatttaaaaaattttccaaatcattaaaatttctcttagtgttgactgtaaaggtagagggaaatgaaagaaataataaaacca

SEQ ID NO: 52562 - DNA, 1100 bp, Bovine  19866881938134
  misc_feature (1)..(1): n is a, c, g, or t
ncagggggcactaaagtttttgagcagagggagtgacatgtttgcatctgtgacttagataggcccttctggcagttgtgaaggatggatttcaaggagtaagaatgaaggctgggaaaagaggaggatattataataattcatgcaagagataatacagatccaaagtagagaagttgtcatggagagttagggaaaggaaggaatgaataggaaggaaaatagcagaaggggatgaaggacaaggagaaggaggagatgacagggacttctggcctgacaagggaaggatgaggggctcctgagacggggggcacagtaagaggaatagagttgggatccaaattaccaggacaatgctaaacaccataagcattcagtttaccacagaaagaaggccattatttctgaagattctgccagtgattttcatcaaagtaaaattctactgcttgatgccaagaagaaatttcattattaactttggaattgatatctgcagctagaatattacatttgcttttcctccagtctctctcattcacatgtggacagacatactaattcaagtagttagatcttcagtggtctccaataattaaattcaggcattgtttggtcgaataaaagtggtttactcttatctgcatgaaacattctccatcagttttgaatgaatccctcctatctcagaagtctcccgtaaaaccacagcctcagcagttatttgggaggccttgaactgataaccccagtcctttctcactatgagaaaagctctcttcctccatctatgagggtgtgcaagaggtgaatacttccttcacactggccttgcatagttttacataactctcagcactgcccaaaaggacacactccaagtcaagcccacaatttctgttacaactgggtgggagtcattggtgctattcaccaaagatttcttaatctccaccctctatgcacatggtaggataacaattctttgaaattaggtgtggacatatgactcactttggttagtgaaatatgagtgaaagtaacacgtcatttcggacacaagttattgaggcaacccagagtcactctaactcttc

SEQ ID NO: 52563 - DNA, 610 bp, Bovine  19866882170533
  misc_feature (1)..(1): n is a, c, g, or t
nagaacaatattcaattatctgtgtaaggacagtctgttaaaaggttaccacacttaacaggtctctttcatttactaatttagcaaccagttcatgtcaaccatcagtgacataactaatgtccatattgtctactgtctccaagctagtgatttgatagctagtatcctaagttctaagcactgtacaacatatcaaaatagtgttgctgagccaagtgaagcataaattgtcttataacattagccaatttcctaatttactcttctaacagagtgattccactgacagtaacagcaaggaaaaaaggcagctttagaagatgccttatctttgactgcatcttattagtttgaacgagggatagcagtaaaagcggtgcatccacacacatatacatctattcagtatcaccaaaataccaccaacatttcgaagtgatgccaactaacattaaaggggctatgtttcagatgatgtgttaatcgaagatcaggtttcacctacgcttgatactgaatcactttctagatcatgatttccttaagtaaaacttccttctgaaaaaacaagcatctggctgagctccatgtatttccacagaataat

SEQ ID NO: 52564 - DNA, 1447 bp, Bovine  19866880265776
  misc_feature (1)..(1): n is a, c, g, or t
ntgcaaagaatataatcaatctgatttcggtgttgaccatctggtgatgtccatgtgtagagtattctcttgtgttgttgcaagagggtgtttgttatgaccagtgcactttcttggcaaaactctattagtctttgccctgcttcattccgtattccaaggccagatttgcctgttactccaggtgtttcttgacttcctacttttgcattccagcccctataatgaaaaggacatctttttttgggtgttagttctaaaaggtcttgtaggtcttcatagaactattcaacttcagcttcttcaacgttactggttggggcatagccttggattactgtgatactgaatggtttgccttggaaatgaacagagatcattctgtcgtttttgagactgcatccaagaactgcattttggactcttttgttgaccatgtgtcaattatatttcaataaaactggaaaaaataaaaggaaaaaagatattatccaggatccttcagctagaggtaagactttattcagctgtttttgtttttttttgtttttttttttttttccctacatatgattatgccagttttagaggaatagatttccctctgggccatcatggttgaattgtatggagtggagtaaatgtcacagaatttttcacactcttcccctgggagccctgtactttcctttaggaacctacaggggccagtgggagagcatgagctggagagccttcaagtgttcccattggtcagggaagatctacttttatctcttttgcacatgaatttctatgaaataatattttagatacaatattcttcagcttaaaaaccactgtcaaaacaagaaaagaaatccagaataaaaaaaacttcctattccaaacctcagataaggtaaataatttcccacaaatcacatagctcacagacacacagaaccagcaaggccataacccagttctcccaagtcatatcccagagctctttctaccatcatgataaatgctactttcctgaagaaaaaagtcatttaaaagctcattacagaaatgataaactgggagccagaaacaaaatcttaagaaaaaaagtaggccaagtgctgtattgaggtctgagaaggccatctttgcctactcaggcactgattcaattgttcattttggcatgatttgagctttcttctttcttatgtccaggtacaactctttttcaggaaaattcactacgggcaattatctacttggggaaacaaatgagactctttttaatggtgttccttgccctgctttgaagaaggataaatcagaacttgttctcaaaagaccttaccaaaaataaaaatatatttcaatattcacaggcagccctgggtaaggaaaaatatacatgataagcaggaaaatgcaaacaatcaaaatgttattaatgatataatgt

SEQ ID NO: 52565 - DNA, 1491 bp, Bovine  19866880367682
  misc_feature (1)..(1): n is a, c, g, or t
nacatcctagctaccatttttattattaactgttggttagatgctaaagagtgaagaaataataataaaaaaccggtctgggaaaaaggctgagaaaaagactctctatagagattttcaaggcaagtaaaacagcattagcctgctgactggttgtgatggggaacagttgaaaagagcttagaatttctgaatggacacaaaagcagtacaggtgtcacttcaatctcatataatcttaaacgaagccccaaatccttgttccttttgtgagtcagaatcaatataggcaagaacgaggccacaggaaggaagcatggtatttgcttattcacaatgaatacttttcctgcaatatgtttataatattggtgcttttgttttagaggtataatacaccctcccaccaccacatacacacattccaagctgaaacatggtaccaagagcatagcatcatcccacacagtttcattattaatagtgttatcatgaatgcaaatgttgacacattatctgcacaactattttctagtaaggaagtccacaaataacacttgacatcttgtttgcatagcagctaccatgtatatttttcaccgttctttgtatcttcactgcatattggagctccgcatcattttggcctagttcaacatctttaaatatgcaaacctgattcaacatcaaaggacaaatcagcttcaaactgattttccgcactaacagtcttgtgcatcaccaccaaatattatcacattgattaccacacagttttaagattcaatggttttgtgttgatttttttctccattaatttatgtggcctttcataatatgcttttgagggcataattttttagttctcattttcttaaatctattcttcattaaatgtgtaattttcagtacaactcagggttttctagcatcatgccgttaatgatacttcaattcttttactctattgtttgcaatgcaattaagcaagacactgaatctttaacattaacaattcttccgtatgactacaaccattaaataactactgcaaacttgctatcaattctgtagggtttacatcagaaacaatcttagaagagctatgtttcaccataagatgcaaacatcttggttcctaagaaaggcatcgtggagagggtttgctaattgatttttctttaagaacaatctgtttctcttccagtttattataggaaacactggtatttgtcatttttccaatatttggaggctgctgccttaataaatgcacatatcagatgatgctcactccctgtctgatgggcgaatggtgttgggcagaagaaggtcacactgatgttaaatttgctgctgagcaaaggatcaaagtgtaaatggaattctgaaagctgggaaagtgtgagtgtgccagtgtaaagtaatctattaattattgacagctaagaggctaaaaattcctatttggtcatgacatcttaattttta

SEQ ID NO: 52566 - DNA, 698 bp, Bovine  19866880596354
  misc_feature (1)..(1): n is a, c, g, or t
nacttttaaaatgatccgcatcaacaaaacacaagttacattctagaatatggtaaaactttagagggagatttatgccattttgaatgaattgtttcaggttgcctgcatttttaatacctctttcttttcacagagaagagaagagaagtttgttatttttggctttcattagcgttctcacttcagagtttgtataggattctgctttcaaagccagcatctctcttctttttagcatctgttacataaacagggtgaacagctacaggattccaaattggtgaaggaagcagctaacccgcttattcctcactagccagtgtaactgacagcacttagctctctccacccctgccacctcagttttgaagggaagcactgttttgctcctttcccaacactgaggttctgacaacaggcagatctgaggcaacgagtgttcctgggaaaagagcagaggagggaagcatggtagtaggagaatgaaggtaataagggaaatgattaatacttctatagtatttttttgcatatttctttcactgattcttataccatccctttgagaacatataattgtgtgtgtgtatgtgctcagtcatgtctgactctttgcaaccccatggactatagcttgcctggatcctctgtctatggaattctccaggcaagaatgctggagtgggttgccattt

SEQ ID NO: 52567 - DNA, 1806 bp, Bovine  19866880608375
  misc_feature (1)..(1): n is a, c, g, or t
naaactacgaactatgcagtttaaaacatcagaaattcattgtctcagagttcatgaggttagaactcttaaatcaaggtgtgggcagggccatcctctctttgaaggctctagaatattgtcgttccttgcctccttctagcttctgatgacagccattcttggccttccttggggaaccaaaactccaacctatgccttcttcttcacatggcttacttctccatatgtgtctgtgttcaaataaccttcctcctataaggatgccacgtgtgatcttaatcttaacataactacattttcaaacaccatatttccaaatataatcacactctgagatttggcaaaccacatcctgaggtggacatgaattttagtggaacacaattcaatccaacactgttggttatgttggaagattagattgtgtgctacaggagatcgaggaccatcaccgactaatctcaatattctcagaacctagtatgaagtattgtaagtatcatgtataagtacatcatatacttataaatgtttaatggagtatatggatgaattagtaataggctagataatgacccttagatatgaaaaactaataaattgcatccgtctctctttcaatcacaccatgagccccaaaataaagcagcagtgttagagaaccagtgaagatctttccagtttaatcagactctcctgatcttctctaaagtacatgaaaataaaacagagcttcttataaaacagcatttccaattaaggaaaaagacagaacagtaagctgtcttcatttcatgtcaggctctcttggttctttatatactgtttttccaggagtctagaaaaatgtgtcagaagttttctcagaattttcttgctttggcagagctatgacagattataaggttagctctgccacttaagagaaagagacatctcctttgtctttattaaatagaaggggtgactagagttagcatcttgtggtatgaggaccccactgtgtgctcatttcccaaagatgtctgagtttagcattgtaataatgggccaaagggctataaaaagaaaatactgtgaatctttgtggtactttgtattcactttgatgaaaaaccctggaaatgaatcacagctttaaaagacaaccacaggacagcaaaacaaagaagatttacaaccgtgctatccccttaaatccttccttgtttctattctttttggttgttgttctggagctaagtggcacactcaccctgacattagggaatagcatctgtcaaaaataaatatctaaaatcacaactgcttatttataaaggtccagactcatgcatccattgataacaatatactgttatttgaggaacagcaatcgcactcattcttcagtaacacttcctcaccaaccttattacagaaattccactgttcagtcatcaggtattgggtaatggtttctcctactatggaaagtgcaaatgttcccagaggtggaccacattaaaggcttcatccataatactttattatgatccagataatatctttacaaattaaaaaataaaactacctccaactattataatagaggttcaatctcgtgtccctggagaaggaaatggcaacccactccaatactcttgcctggaaaatcccatgggtggaggagcctggtgggctacagtccatggggttgcaaggagtcggacacaactgagtgacttcactttcatgcactggagaaagaaatggcaacccactccagtgttcttgcctggagaatcccagggacgggggagc

SEQ ID NO: 52568 - DNA, 2573 bp, Bovine  19866880856111
  misc_feature (1)..(1): n is a, c, g, or t
natttttaaatgaattttactatacctaattcataaaaaccttcattttctagaacttttaggacatattcagtaaatctcttattgataaaaatctcatgaaatcacagatttcatgcctcacaaatttcttcatttcattcaagggagaattgattccatacttttttctttttctttttggtcatgaatgaaactcaattgtaacaatttattgcatgtgcttgtttatctgtttgtctgtctttccagaccatatgctccttgtgcttagcagaatccatggtacacacagtaggtgttgtaagaatgtgttgttttgtttgaaagactggctgagtgagtgaatctaagaggctgtgaaactagaaaagtacagaatatacaagacatatcagagggagactggctggttacacatggagcaaagggatatggcagatgaaagaggtgatgacacatgattaaatattgagtaaaatgaaaggatgatataatgtatgcaactgggcattaagatattgatagagaaggaaagtggggctaggttggaagaagaaaaaatgttttcagggaagtaggtggatagagagggaaaattgggagaccagaattagggcaggggaaactcatctctttcagaggctggtataataacatggacataagttcttctattatggaagactcagatctccttttggtggccaggccagttattaatttttccttcaaaaaaaaagtagggagagggattccctggtggcttagtggtaaagaattggcctgccaatgcaaaagacacaagttgaatccgtaatctgggaagattgcacacaccgcagagcagctaaacccatgcaccgcagctgttgagcctgtgctctagagcccgggaactgcaaccactgagcccatgtgctgcagctactgaagcctgcacaacccataggccatgccctgcaacaagagaagccacttctctgagaagcccatgcactgcaacttgagaaaagcctgcacagcaacaaagaccggcacagccaaataattaattaactattattattttaaaaaggagggagaccatttagggaagaggtcaacaaattttttctattgagtaattattttcagctttgcaggctatacagtctctatagagaattcttaactctggagaaaattctcaattctgctcctgtgaaaacagccagagactatatgtaagtggtccaatttaattttatctagagaatcagatattggctgggttttgcttggaggcataattttctaactcctgacttggagctcacagattatagtcagtgttggtcggtcctctgtttactctgttgtgttttcatggcttgtgcaataaattggcttaatgtgaaattaaggcctctctgctcagaacaaacgaacaacttagcttgcttactaataaactccttaatagtaaacagtctaactgaaaggaaaaaaagcacaatgtgagggttgtgagttaggtttatttggggcaaaatgaagactatagcctgggagacagcatttcagaaagttgtgagaaactgttccaaagaggtaggggagttatatatgtgattttggtgaagagtgagtagtacacgcaattaagggtacatttttgcagaaggttgctgccagtctggtgactgtgattcacaagaagtagacatcactagaaaagattttatttatgagaagatgcaagagttgggctcctaaaatcttctcctgaaagtatctatctggagacctgttctgccagtttttcccagagcagagcagggcctcatttctgatctccactctgaactcctttcagggggttttgaagctacagtggcacataatttaatccttgtagaggtattttgacaagtgccaatttgtaaggaacaaaataaaatcttttatttcctattagctacaaaccattttactattcgaaagttaatacaatatttggaatgcactcttaaaatatacctatcaagcagttgagaatttcaaatgatctattttaatccttttgttgttcaaaggggaagagacaaagaggaaatgattgcttcagacatgtgaactgggggaagtgctggacatgaggtgataggtgaacaggctagctggagaagaaaattaagtttgttctcctcatcgtttgacttaaaatcagtacagtttgtctcaaattaaccataaattatttcttacaggggcatttttgttagcaatgactattaatgttccatggctttgttttgcaagatttctgaaaaaacttttttttttgttttgtttaaatatgattgatcacataaaaaaaggagtctcagtggattccaattgtggtgctcttcattccttaggatactagagaggtagtattctgatcacaatggcactgtaagtttatgtataaaactgtctcttcccaactataaatgtatggcaatagcatctataaataatacatataggatcactgttattcggaaaagaagataaacatcttacgacaaaaaatttaaaagaca

SEQ ID NO: 52569 - DNA, 1436 bp, Bovine  19866880961908
  misc_feature (1)..(1): n is a, c, g, or t
nacttattcttttaattctctgattatttttccatgataaggcttgatgatttaagtaatattgtactaccaaggtatctccattataaatcctagacttaaagtttctttgaacaaaatttccatcatctttgaatattttggtgaagttgtatgattgtttaattgtgtattggcatggtagagatgtattttagaagaaaccattttctatagaaatgaagcatttgtttacctaggctgttgtgtgtagactgatatagcaaatgtattgatgttttatacatgtttcatgaattactagtttttcttgaattagcaacaaagaaaaatgataaactacttagaactataatttgggaacctacgtatctcagaatatgcaggaacaaaatgactgtgagtacatacctaggaattaggaatgtatctttacattggcagcattttaagatagccattgaatgttaaatggaaacaacctatgaagtataacgggatctatggtatttaacatggggaagttagtaataccatagaataaagtggtagatcctaaaaggtgctaaagattacttagtatgtataataatgattagacatgaggagtttctgtgttaaaattagatccttatttctgcatttactttaaaaatgaaattgatgaatagatgaaacaagattggccttgagttagtaattgttaaacagttatgatggatacatggggctcattattctagtctctgtacttgtgtatatgttggaaattttccaaaacaaagagtgaaaaatctaaaaaataaaattgaagaaataataaaaaggggggactcccaaaatattgtattgggggagaaaaacctgtaaactcacccagagcttgaacatatatgagaaacaccattccactgatgaaaggtactcagtaaagatcaaaggaaatctgagggaaaatttttacaagtcaaaaactaaagaggttaagaattgtcaatcctgaagaagcttcagcctgccaataaaaggtcatagtagtttctgtaaagtaaaaacataaacgtggctaaaagagtaagatctgacaccagagttaacagtacatccttataacatgtacaagaaagctgaaaagaagaaataaaacatgaatttatgggacaacagtactaagggccagttctacccaggtatgtcatgaattaattttatgtaggttgaatgtttatctcctttatcatggaaagaaaaaaaaacatgtaatttgttttttttttagtgaactaatatttattaagaaataagttagtatgtaagaatataaggaatgaaaggaatcaaagtttattaattgttgaaaagtagattaaagatgctgagacaaagggaattctgtggaataaatgaagaatcctgaagatgacagagcaatagta

SEQ ID NO: 52570 - DNA, 624 bp, Bovine  19866880978289
  misc_feature (1)..(1): n is a, c, g, or t
ngtttggagtctgatgattttaggtacaacctaaactaagacatgcttgggcatattatttaacactcagcctcagtttattaatctctataatttacagagttgctctgaagatttgaactacttcattgggaggtaaaaaggaaaggcaactgctggcctctggactttcttatccatggagaaatagaacttcagacccttgtatctcctaaacattcctgatccttcagaccatcaagtctcctgaccgtggattagacaggctgctcacagtttccctctcacagccaacccatgatggaaacaacatgactaaataggatagcacccaaaaatttttttatgtcccaactgatctatgaaattattgttttccctcataacatttcaattgatggaataaagtatgctaaaagtatattgcctttcccagtggataaagattaattcaagtagtacttataagaagtagtcaagaggaaaataagatttaaagcttatttctctaattttatggctgtggtcagctcctagtggttcagtgatcctgattgtgtgtatgtgtatacatatatgtatacaaacacacacatgtatatatatatatatatatatatatat

SEQ ID NO: 52571 - DNA, 1382 bp, Bovine  19866881063746
  misc_feature (1)..(1): n is a, c, g, or t
naggaagagattattccctccctacattccatcggacacatgaatatagtagaatagaagatggcagcctggctactctgatgttatatgtgctttggaatgcaaagtgaccaattagggtatattttaagccaaggttttaataatttatgaaatatatctttggaccttttttaatacttgtcaagtgtaggcatatcttctggatctccttcccaaaatctctttaaaaaaaagaaaaaagagaagatttagacactacaataaaaactttaaaagaaaactccacaatattcagatttttgtggcttttataacttcaaagattgaatcagatttatataaagttcatcttccccaaaagaattccttacttacaaacaacacgacttaattgtctgagtgtaagcagaatgaatgttaaaataacattaactataaactatttctaagcaccttcaacaccctcaagtacttcagaactaattaatttacatacaattgatatgataactttggttaatttatgaataattcttatctatttgttcaatcagtcccctaggatttttattagtcagcacattgttagctggaagagtttttgttacttcagacttgacagcaaatgaataagatgaattggtgaaatagttgctgcctttcatctttgtcaagtgaacttggacatttatttccccttttctcagtgactatctcatcttgtttggtacttttttgcttaggacccaatgccattatgtctgttgaaatgtgaaagtgtttgtcactcagtcgtgactgactcttgcaaccccaaggactgtagccctccaggctcctctgttcacagaattctccaggcaagaatactggagtgggtatccactcccttctacaggggatcttcctgacttaggaatcaaaaccgggtctcctgtattccaggtggattctttaccatctgagccaccaagttggatatgtctgctgaaaatacccaccagatattttatcagccagagtggttttttgaagacataattaggtacaaaattaaagtttccatcatatagggtctggactcactaaaataggtaaccttagtacagttaatatcttatttttcgaaaagggcagaagcaggaaggtcactctgacctcccatcaccccccacacccttgttctctgaagaagaagaaaaatatgtgaaagattcactccctgtaccagaacgaaagacaacattcttattaccagagctggggaaatctgcacaaacaaaccttgttaaacacacccttaccttcctagttatttcttcaccacccatacctcaaactgctttggtcaattcttcacaaacttactacttcttttt

SEQ ID NO: 52572 - DNA, 1243 bp, Bovine  19866881150125
  misc_feature (1)..(1): n is a, c, g, or t
nctggcatcttgaggatacaggtaaggaaggcaagactgccagcagctgtagagacatctatgaaacagtgagcagaggtggccctctttggagaagccatgcaagcaggtgctgggagactgtccctggcccccagaggattattcttcttaactacaaatcctttcctcagagtcacactgccgtgcctggctgccatcagataagcatccactccccaccagcccggcgatgagtatcactgggcaaagttgatcccccctgggaaaaatccctttgatcagaaattttgttttatttcagctcatgtagacagatcacagtgaggcttctgagagtcaataaggaaatgttaatagatttactctcgctggggaagcccagaccagtgttttaatcatctcgtggctgtttaattaacatttgttggcattatttctgctactgttagcaaaatgtaaatatttaaatggcatgtatttttcatggagcaggagagctgtgagtagggaacttgaggcaaagatctggcctcatcttaatctcagccctcatcaaacatcctttccagcttttggcaaatgtctcaatctcctaacttttttgtcttgtttttttcacccctactatagacagaaggcaaacacttctaaaaggggtttataaagaatgatcatcaactatacaggaaaattctttgaaggtaaaaatgggcaggtgttgcatttccacttgagagcgagagggcttggcagagagagtacgtggagacctggaatcacactcggaaatgattctttgcgttcactctgttttaattgctcaggaagccatgagtcagggataggctctcataggccatggtgagcaagagaatattcaagagaataagctgtgtgagtgtttagttgctcagtcatatctgactctttgcaaccctatgtagcctgccaggttcctctgtccatgggattttccagacaagaatactggagtgggttgccatttcctcctccaggggatcttcctgacccagggatcaatcctccatctactgtgattgtaggcaaattctttactaactctaaaattaaagttgttcactgagaagctgttgatttcaaaccacagcataccccagttggttttgcttgaacttctagattcaacccatctttgttgtttaatctccaagttgtgtctgactctttgccaccccaggactgggcacaccaggcttcc

SEQ ID NO: 52573 - DNA, 848 bp, Bovine  19866881188312
  misc_feature (1)..(1): n is a, c, g, or t
ntttctaatgatacactggtaaatctagatgttgcacgtattttttttaagttggagctttttttttttttttaaagatgtgtttctttttggctgcactgggtctttgtttcagtgagtgggcttcttactgtggtggcttctcttgttgaggaacacagggtccagggtgtgcggtcttcagtagttgagagtatgtacttagttgccctgggcagggatcttcctggaccagggattgaacctgtgttccctgcaatggcaggcagattgttaaccgctagaccaccagggaagccctgaaaatgtttttaatatgcaatttgatcaccctatttttattgatacttggtgtgtttaatcaactaactcattgtgactactgaattatttaggctcatttatgttacattcttttgtgttttcttttctccatatttcttcctttgtccctttcacttccagcctattatttgataacatttattctcactccctctttttttctctctgccaatttagaattatacttgtatttctattcttttagtgtcaacattaaaatttttaacaatcctattttatttcatatttttctaacaaagtctattttaccctctaaacactagccctctgtttgtcttggatcttgtacttttcattagttttaagagaattggtggttactggcttccctggtggctcagtcagtaaagaatccacctgtgatgtgggagacatgggttcgatccctgggctgggaagatcccctgcaggagggcatggtagttcactccagtattcttgcctagagaatccccataacagggagccggcgggctacagtc

SEQ ID NO: 52574 - DNA, 1369 bp, Bovine  19866881265220
  misc_feature (1)..(1): n is a, c, g, or t
ncagacatgacagcaatttgaggagctctgagctatctccttgatataatattttactaactctccatttcacatctttttaaataagaaataaatgctaaattctaccccagagaaataaaatcttttataatctttgagacagttgttgtcatccctcaggagagctttatgcctgctgctaaatgtctacaaatcaatatttaatattttgaaacatgaagtcttaattatccatctcccctttaagcgtgaaaccctcactgagtgaaaataaaaccatttgttggctgatggattgattgccacttattagcacttttttgatctgcaggtcagattgcagggctccattccaaacacatacgatgacgccttatcatttatgcctggatgtatgagtgagtagaaaagaatttgttaacttggggctgtgtgaagatcttttcacttttgtttgtcagactaacactgatgacttcataatgaaaaaaagcaatgatcaagtcataactattatttatactccagacagacttttttattctttgatacaataacaacacacatcctaatgccctgtgtacaaactgacacatagaaaagagagttgtgtatcaaagaaggaagggaaaattctgattctggtcagttgtgaaatatgacaaaactcccaattataaaatgaaaaaaaacccgcaaacttctgtagatttttaacttgtctatatttgctcagaagattgaacccacagcgaaaggtaatccctaagcaaggagatcttctgccttggggaacaaagagatcagagattggtaacaccctgggttttctctgtatgttcatctagaacacagcaggagcttcctaaaatgaaacatgcgggaaagtggggaaaagatgtgtccatgctcttgaacctgtgaatctgaccttactgaaaaagtgatctttgctgttaaattgaggttctatatgtgaaacagatcatcctggatcatctgctaagctgctaagtcacttcagtcgtgtccgactctgtgcgaccccatagacggcaacccaccaggctcccccgtccctgggattctccaggcaagaacgctggagtgggttgccatttcctcctccaatgtgtgaaagtgaaaagtgaaaatcaagttgctcggtcgtgtccgactcttcgcgaccccacggactgcagcccaccaggctcctccgcccattggattttccaggcaagagtactggagtggggtgccattttggacatgtgtcctagaaaagaaacactgagaaaagacacactgtaaaaaagaagtccatgtgaagaggaggcagagaaggagttatgcagccacgagccaa

SEQ ID NO: 52575 - DNA, 1915 bp, Bovine  19866881382564
  misc_feature (1)..(1): n is a, c, g, or t
nagaaggagatagtatagttggaaataaacagtcatatttgttttaaacatatattttgtaaaacaaagaagcagctgtggtttccataagagaacctttgagaatgcattaaatggaatatttaaagctgtaaagttgaagtgggaattcataccaattatcattgcctctaataatttagatagtatttcctagtatgcaagaaaatctctaaagtatatgatcatgttcagatttatacataggtttcaaagaaaaaaaatctctctctttctgagagcttccaggaaattcttactcaacatacaaatcccttctgattatcaggtgatcaaggaagtatttgtcatttctaaaacactaaacattagattctaaagataattcaccccaaagaggggaaaacctggctcgtttaataatgtatacttcatttacagttccgaggaacttcgttcttctggctatgacatttcccccagtcatggttctgatgtatgcagatctctaagtacattttaaatagaacaacaactgaacgatacactcaacaggattcatgaagaggaaatagacatatttcggcgtgggagaatatttatgcattatttaacagcaataatgtttgaattcatacattatgcaaatgcagttataatcaggaaaatgaaagaacttggactgctgcaacgtccttaaaccaaccattaggtacctatttgtgcataacatttaatactgcacaatgccttacgatactacagtgtatcactcaaagagaaaagttatcagagattaactgggtataaaatgaaaagttgatgaacccctgattgctaccttgatactgacttctataaatttatctttaaacaagtgcaaggatgttaatgataattaacatgatattggaataaaatgcacttgactcaaaggctgcccccaattaaacctttctgctatttagttggatatgaacaacttctttatccagagagccactgcacttaaatgcaggcactattctaagaattttacatgacttatctcatttaatctcataacaattagctcataacaatgttatgaggtagatgctattattattcctatcttacagatgagaaaactgaaacacagagaggatgggtatcctgcctgaagccactgaagtattaagtggtagatccttgactttgaatgcaggaaatctgaatccagagtctacactcttagtctcaatgccatgttgtttatattactatgatagttatttatgttctacttctttcttttaaactgtaagttctctgcattagaaatgataatagttgagtatttattatatcccaggcagcgtgccaggccaggtgaatgtaagatgagcacacatggcccctgctctccaggggctcaccgtccagcaggtagataaacatgaaactagactgcatcgtgggaagcaagagacaggcatgtagaaagagaattagggaagtgattggaagggcatctaacccatctggaactttaggagtaggaactattcaggaatagaaatctaagaaaagctaaaggaagagatacccctaattgggactgcatcctagttactgaggcctttccttatcctctagttcctggcacggaattcttcacagagaaattgattacgtagatcagactaatgtttaattggttgaattaagccattgtttcccaacaccagggacttccatattggcagtcttgggtccaacagggtctagggagagtttggagactacatgtgccctgattttaactgaagaaacatgtgccctggtttctgttgatttgtagagaattttataatatccctgacctcgccccatggggaaaaaatgtacatctctgtggaattctgtgaaattt

SEQ ID NO: 52576 - DNA, 2349 bp, Bovine  19866880358233
  misc_feature (1)..(1): n is a, c, g, or t
nttggaatagtagaggtctctgtttcctctgtaaaatatggtgcgttgtgttttaagagttgtggtaagtacctaatgctctattaccaaccacttctgctcccacggatgacttcacttctcaagagtcagctgcctttgtgcaaacttgtttatgcccattgtctttgttatcataattatataactttattaaatattacataagtatatgggactttaatgcaagaagaaagtgtttctatgaaagctaagcttctttggaaaagatttgataaaacaagtaactaagaagaattgttatcaaattagggatgggcaaaacatctgcaaaagattagaaaatattataaaagtctgggagaattcagcatttagattgttttgtctcatctaaagaaattagatgctgcattatggatgtggtttatgcaagaaagacaataaagaactccaatcaacaggctcaaagtagaagcagcagctttggctctgcatgaatacattgatgaataaatgtgcatctataggtttagctttgaataatatgtttaagaaattttaactgccttttctgattaggccaactgtcagttcccattgtgtttactcctcatgcaacccaagtgtgacctggatattcctgctctatgagaatcacaggaaattgtcccagagctccatactgggtcttggggattttgagttcggggagggctcacatgttcatggtcacctcaggctttgaacttctgcttttctgtattttggatttttcatcatcacctgtcccttatgtgctgtttgttcggtgcctcttagccctgcctatataacttggatttctttaatttctataaaataaacttaaataaaaaatttatatgtatagtgactgaagtggggaaaagggaggacagggcaaggttttacaagttagaatgaaaagaatttcagattggaaatgaggtatcttaaggcaccctactgctgagaacataacaccctacggtgtgctgctgctactgctaagtcacttcagtcgtgtccgactctgtgcgaccccatagacggcagcccaccaggctccccggtccctgggattctccaggcaagcacactggagtgggttgccatttcctgctccaatgagtgaaagtgaaaagtgaaagtgaagtcgctcagtcgtgtccaactcttagtgaccccatggactgcagcctaccaggctcctccaggtccatgggattttccaggcaagagtactggagtggggtaccattgccttctccgagtcagacatgacttagcaactacacaacaatatggagggcactgcagagtggccgtcacagagtaagtgcttagtggacgtcaccatcaggcatctcttcctatcagcacatctgagtgcatgttcccgcctgggcacattcactccccactgttctctctcaaggacaaaacataacttgaggtacatcttactcattctgtgcccattgtctttttctctgtttcctcagcatttttcatttccagcgcacccttaagaaactccatgaatttttctaccatccagatgaatcatgtcttcctttcaaaattggagaacttcctttgggaattctggtacatttcaaaacactttctgtcgcagtatatttgatcaacagtgctgtgttagtttccggcatacaccaaagtgattcagttatccatacacaagtgtctattctttttcaaaatgtttgtcccatttaggctattattgagcagagttccctgtgctatacagtaggtccttgttggttgtttattttaaatatagcggtgtatacgtgtcaatctaaccttctgcttttaacctgattatgtaaaattgttgtcctgatcctgtagaaagatcgtatgtcccttacaaggaaagatggatttatattcattcttcaaacccccacagtgcctactcagcatagaaaccttcacaaagcaggcaagcaacttatgtttgtccatgtgaaccattttagcgattctgtttttttatccttcttacaattgaggatgtatttatagctgtctgtttggaccacttagcacaagttaatcgtgcgccggtttaaattcctataacccattcaggtgagtttattgtccatgtgagtgaggatattcagtatgtgtaagcaaatagtgaccaaccctgctaatggatatttttcatctcttcctgctccattgatccaatattcaaaccgtcactgctcacatgaagctgggctgccagaccgtggcccgggcctcagccacagacctgccactttcgtttaatttaagaacaggaga

SEQ ID NO: 52577 - DNA, 1900 bp, Bovine  19866880457233
  misc_feature (1)..(1): n is a, c, g, or t
nttgacagagcaattgatttattataacagaacttattataaagcataaatttataaggtatgcaattattggtctctttagtttttaacatttaaacatattctgttagtcatttctagacccatgactcttcaaatgacaccaaaaataatttgctgattcaatgcaaataaatcaaactaatcattttcttatatatccaaaataactacctgaagacttttctttaactttacaaccaactgggatggcattgcatggataaggtatggatgatctatgatcattgagtccagagaaattcccaatgtatttccatctggacaacatgaaaagtaccaggagccactcacatttacttctgcttatagttgcaacaatgcaacatggctttaaaaatctttatttgtggaattttcaattgctataaagttagaatctctctctgaaattctttcttctactctgtgtctatgtacaataatctccagccacaccagcgtatctggaactttcattctccatgtatgagtctgactctatgtaattctcttgctcagatgacctactccattgcctgattcttgtctctccacattcaattttcttctcatcccctgtttatctttctgttttctatcctgctgctgtccaataaaactttctgtagtgttgaaaatgttctatatacgcactttccaatacagcacccctagtgacaggtagcattaaatgagaggagcattacaatgtggataatgcaactgaagaagtaatttttttaaatttttcattcaaatttaattttaaatagttatatctaggtagcagttaccatactgaacagtgcataattccaatacattgaagtaatactggagttcatattttctatcactatagtatatgtgtatataatcttcatctcttagaaataagaaattaaatttatgtggctctcaaatgatttctccctttcaacaaaaccatggtccctgatcatttatttaactccctcagcttgaaatctctaaggagttcaagggagaaaaaggaatagtgaagccaggaagcaagaaacagaaataatttttttttcaggctataaacttgagcagcaatgtaaatccaggaagccattccctcgagtcggctttggccctgcctatcaatagaacattaatggctgattaacaaatactgaatatttgtggatttggcatgaggagatctgtgcctgggccctttgatgagacctcccagtgcagagatttcacagggctgccgcactctgccgggccagaatcggatgtcagccaggaaaactgctcgcgccttgaacctgcgggtgattcaatctagagcaaaagctccgcctacaggccgcataagttaatgcagtctggctaacagggtcttcattcatcctgacaagaagcctatacagtagaaaatctcatctccaaatcctgccacaaaatcacacgttcatgggggtgtgaggagatggataaagtgaagcatttgtcaattccatctcaccaaaacactacctccctgattccaccagagcgaagcacttcatttcagaacaaatagcagttcatcaccgacctccttcctaggcatagtttaactggacaccagggtcttaagtccttgtcacagatcccaattctctgctgaatgtatgtgccactatacacctccttctttcatttggagaatgaacaatgtaaatgatttcactgacaatgaagtacttattaaggaattcagagatagaattagttcctcctactttctcttcatttaatgacaatggaataatctattgttacattaaatgcattagagacgagcataataaccctgctatttttagcacttgccaccacc

SEQ ID NO: 52578 - DNA, 1068 bp, Bovine  19866880472079
  misc_feature (1)..(1): n is a, c, g, or t
natgtgggatatctcttcatggctgctccagcaaggcatagccactgctcccttaccttggacatggggttgctcctcttggccgccacccctgacctcaggcatggggtagctctggtaaagtgtttgcctgcaatgcaggagacccaggttcaatccctgggtcaggaagatcccctggagaaggaaacagcaacccactccagtactcttgcctagaaaattccgtggaggagcctggtgggctacagcccatggggtcacaaagagttggacacaactgagtgacttcactttccttctttgcttgcctaaaggaaataaaattacatgaagcagctcaaaaatagtctgcttatgaatgagctaggtccccacaatgcctctcaaaaagaagaaagtagagaggagagagatgaaagattaggaagaaagggaggagaaagacaaggttaatttcacgacttgtccaagatcatatagctaatggggtactggattgaaacacaaacccaggcggtttcattacaaaacctattccttttctactctgccacactgatgagaccaatctgaatgaagacattttgtccatttgaatagtgtctagttaggaagaactgcccctagtcctaatcatcttgtctttatgagcacaccttcattcatccccaaccactcttctcctcacccagtttgcttcttcacccttgctaatcccagaagttagaagcaggtgtcacgattttggccaaagagaatgaatatcactatgaattttaatagaccagggcagatgggaccaacaccagaatgccatcaacatatactttgcatctgaaaatttgccctgtctccactgaagaaattatctaattatgccttcaacctattacacaatgtattaataataggtgtcaagtgctttattggaacctacaattgtgctcacagtttcatgatctgagaacaggaagaaatttgccagtgatactgataatactggatgggaaaacactgcacatgatgaaaacttagaaatggaaaacaaaaccctaaggctttaaa

SEQ ID NO: 52579 - DNA, 1256 bp, Bovine  19866880517688
  misc_feature (1)..(1): n is a, c, g, or t
nttttttttttggacaaaaatatacataaatggtaagtatgtttgcagccctaagagtctctgctctgtaataaccatgttaatgttctcataaaaagatatggggcaagagcaaagtgacagaaaggctgattagcattttatgacagaattaagctgcatgacaaataactcactggtttacagcccaacaaattctactttcaaatgccggaggtgctagaatgtttttgttcatttatttgtttttttatttaaccatgaaggtgtccacagctatttgaataaagatggaatacaattgtaatagtagtaaatataattagtgctaatatttattaagaatccttttgctccaaaatgtctaaaaaattaatacggtcaacaacaggatttttcagacttccagatttagaactggaagaaaaagttcagattactactcctcggtgtcgtaattcgtaatgggttttacaaaactgaacaattctcctattagttctccccaactttgaggaaatctcattgaggccattattctgtgggtgttaaagggaaaataacttccacttgttcaaggtaccaacttctagattaaggactcctctatacttgtagttttatttgttacagataaagaatggaaatgtgtagaaaaagacaggacagacatcatgtttaattctacaatggaaatgtgtattaataaaggatcagatattgttgctaagaaatgattcaacagctagttttcttatctatagatataggagtcaccccaggtttccttaattgctggtggtaggtgaggatattagttctcatttacttcattaaaatattaatgtctgaattacaacattaaaaaagaataaaagacacgtccataattttccccttctaagatgatatagaacatcatatatttcaatgcagagggtgccaaaattcacctctttctttgtaatcaacgatctgatctgatctgaacacattaggtgtttgttgggggtatgccttgtgtcttgtaccatgacaggcagctagtaatgcacagagacaatctaatgcctgccctccaagaatgtcagtccattggaaagccaggatgattgagtgaagcaattcacgagcaatgcagggtcataaggtaaagtgctataggatgtggatagaaattatgcagttattgtagtctgattgcatctgtaatttagattgataacactttatacattctaactgctaacaaatat

SEQ ID NO: 52580 - DNA, 932 bp, Bovine  19866880546750
  misc_feature (1)..(1): n is a, c, g, or t
nggagagattcatagattattcatgtggggacaatctaatcatatgagccaagagtcagtcagagaaatgtggtgaaaaagcaataggagagctttgaagtaggagatagacttaaccccaccattgctgaaaatggaggaagacagcctccagcatctgaggaggtcctcaggcaacagccagcagggaaatgggacctcagtcctacaaccattagaaagtgaattctgccaacaatcctaaggatcaggtaaacagattaacccttaaaacctccagaaaagaatgtagtcctgtgacatcttgattttagacaggtgagaaccttgccaggatggtgatttatagaactgaagataattttctttaaccactaagccattaagcttgtggtaacttgttatagcagcaatagagaatagaaacatccccttctttctgaaagtttctccttggttttcataataatgccttttgtggttctgtcccctctcctggaactcctcttgtgttcttctttactcccattctccctatacacaggtaattatatttttgttttcattcctgttctcctcctggcaatattataaaatttcataatctcaacaaccacttccactcatatggaaccaaaagctaaactcctgcctctgacatttcccccaactgtctgctggtcatcatcatctaaataatccaccactcaaacatttagtatgtcccaaactattagtattagtcccaaacatttagtatgtcccaaaagatgaattcatcatctttttttccagggattgcttaccctcattattgttctatctttttactcacattaccattctcagttgccctaattcagaaaccccaagtgaccgtggaaatctattgacattctaaaatacccacttctaccattcttttcaaaatc

SEQ ID NO: 52581 - DNA, 1390 bp, Bovine  19866880560286
  misc_feature (1)..(1): n is a, c, g, or t
ncccttctcctcctgccctcaatctttcccagcatcagggtcttttcaaatgagtcagctcttcacatcaggtgaccaaagtattggagtttcaacttcaacatcagttcttccaatgaacacccaggcctgatctcctttaggatggactggttagatctccttgcagtccaagggactctcaagagtcttctccaacaccaaatggctgtctgaggaggccttacaaatagctgtgaaaagaagagaagcaaaaagcaaaggagaaaaggaaagatatacccatttgaatgcagagttccaaagaatagccaggagagataagaaagcctttctcagcaatcaatgcaaagaaatagaggataacaatagagtggaaaagactagagatctcttcaagaaaattggagataccaagggaacatttcacgcaaagatgggctcaataaaggacataaatggtatggacctaacagaagcagaagatattaagaagaggtggcaagaatacacagaagaactgtacaaaaaagatcttcacgacccacccagataatcacaatggtgtgatcactcacactcacctagagccagacatcctggaatgtgaagtcaagtgggccttaggaagcatcactatgaacaaagctagttgaggtgatggaattctagttgagctatttcaaaaattatctctttaaaaatatagtatcttaggggatagagtatactgaacattgaacaggtgaagaataatgaaacaggatccataaaaactgttttccaggtctggctttaccacttactagtcacatagttttggacaaagtacttcatctttctgagcttcaaactctctatattgaaaataccagcataattctaagctgttccccatattattatatggatgaaatgccttgcaatgaaaatcaaataaaattatgaaggaacaactcatcaaatctgaagcactaaatgaattaaatggctactaaagtatttatattttcttacaagcccttaaagatgttagtctcacattaggaatcagtctcattctccccagctgtataaattaagtttaaagtggttgacatccaatcagtacctgctttaaagcatcaggttcctgaaagctaagtggaaatcaacactacctcaggtcaggagccaactaaacttaaaatcctactgtgcccatggtaacatagtacatgttaattggtattatgttagcagttatttgagccaagaatgaaaatgtaagaaagctatgtctaatatctacttaaaatcagctgacaaacaaaagcaatctgactttgccatccaggctattaaccacatttttttgtatatacatatatatatatatttttttaacctg

SEQ ID NO: 52582 - DNA, 1848 bp, Bovine  19866880778500
  misc_feature (1)..(1): n is a, c, g, or t
naactgtatataaactaagatatactcatcttaggaaaaattattccaaagcacaaatattcattgagaataaaaaaatatataggctgaaagcaactagggagtgacaggtaagaatgaatgttggtgataaatatgaataagatgaaatttcaatgtgctattccaacaaagaggtccactgcttctatttttttcccttagattatataagaaaagggcctgcgtcccagaaaaaaacaaatgatcatttatctttaaacagctgattaaactgtacctagaatactgaatactgcatttgtagcagtttcagaataagaaataataagagaatgcaggttgttctgagtaggatggtcaggacagcaaatggggaggcgacttgaagccaactaacaccttctcaggatccactgtggtccagctctgtcttgggtcaaaagttataaagagtttccaatttactttggttttcagtctagtttggtttcagtcttgactgaaatcaaaagaaagcgtatacattaactctactacttttacccctgaacaggagtgaaaagcttgtgaagaaacataaaccacacacacataattctgattcacttttaatctcaggagttggttaactccagcacacgagccacatctgtaacagtgtccttcatctccgctgcctttgtcaagaggactcagaaatataaactgagtgattagaaagagagcccctttactgttagaatcaacagtgtggtgtgtttggatggctgcctaacagctctccccccagtctctctgctgttgttagaatttgctctttcaaatcaaagtgctcctccaccaaggcctgcttcttcttcttgaatgctacagggaaaggtaaaaagtttcattatgcctctaaccaatagcacagcaccatttatagtggaaattttcttcgcagcctctacccaaagtgcaacatgggatatcagccactactattcacaaactaaggcgatgaagggaagcacccgttggggcctaatgaaatctccatacaaatgagtgggtagatctgggaatgcaaagagaaaaaaatatgtccagatacaagatggagaagtgactctgtgtacaaatgagtgaaaaagttagtctagaaatcagtgaggatcacaatgtgaccaagaaataaccacatgccactcaagcccaaacagttctggaacatggggtcagttctaagcttaacaatatagaagagttaatacagctaatagtttttacacagcatgctcggtacttgtgatgcaaatattaattcacttaatttttagactaattggagtatccttgttcccagtttagagatgaagaaatgtcactgagaaagataaacaaagtagtgtatgatcacagggctagaatttctgtaggagtgagatttgaactcatgcagggtcgctaagagtcagacatgactgagcaacttcactttcacttttccctttcatgcattggagatggaaatggcaacccactccagtgttcttgcttggagaatcccacggatgggggatcctggtggtctgccatctatggggtcacacagagtcggacacgactgacacgacttagcaacagcagcagcagcagcagcagtctgaccaaggaaacatgcatgaacattgcatcacgcagcctgcagcacttgtaagtacaacatgagggccaaaaaaagagccacaaagacaaaggaaagaacatttttatagcaagtcatgaggttaattttttttaagtcagtctatttatgtgaaaataaaaaggaaggagactcccggaggagtaagagaagga

SEQ ID NO: 52583 - DNA, 1432 bp, Bovine  19866880786352
  misc_feature (1)..(1): n is a, c, g, or t
ntccaaggagcttagtaaatggagctgaagttttttaagtttctataggatttacacctgattttcctgaagacttaatagcttgccaatacaaagcacagggaacaacagtcatgccctgctccctccagtggctgcatcctggtcagcctgcagacattccatgggctgctcctactgatctcctttcagtgggatgcacctggctcagaagaaaaacaatcatccctgtcatggtaaaaaaatcactcccatttctaactgaataatcttattgtgtgatgggcttcgacatacactcaaccctcagtgaagtcccttaaaagaagctctgctgtaccaaaagccagacagatcagttccaggagactctcagtaagaagcgtaacatttagtggtaatgactaaacgcatgtattcagtgtacattaggactctcttcccctggaaagggcaaagagctaaatctcagaagtggtcagagaaaagcaaattttctcctaatcagaaaagcacaatcatggtgaagtggagcaggtaaatggagctggtgtatataattaggatcttttctcttttcctctaaaccatgaaaaaggaaaggtgggcatgtgaggagaaggaagtttaaaatgtctggaagctgactttagttaattgtagagataggttaagctttgataactgtctttattaaagaagaactgaaaatacctaaagctcaagaaagtgcatgaatttacagggatttcagatgtcagaaattctaaagtgacagcatcctttttttaagttatagattttttaaaggattgacattaagtactatataagcatttaataagcaagattactaaaatacctaggttttatgtctcttacattttaacctatatatatatatatattcttcattaatatagcatttaataaatacacatgggtagtttagtacaaagggtggttgtttttataaaaaaggtaaaattgagtaaaagaaatgtacgtactattgagggcttaccaggtggcgcagaggtaaagaatctgcctgccagtgcaggagatgtgggttcaattcctgggtcgggaagatcccctagagtaggaaatggcaactcactccagtattcttgcctggagaatcccatggacagagaagcctggcaggctacagtccacggggtcgcagagttcacagagtcggacatgactgagcatgcacacacacacacatgtaccattgtctctggaactctgtctcacctatgggtcacctagaaatccacaaccaaggaagtttaattaatcagatctagaaccacagggaaaccagacagcaaactgaaaataagaactgttttcttaagaaaacaagaattggcaactggcagaggcaggatctgtaaaaagtgataaagttaattggatg

SEQ ID NO: 52584 - DNA, 1038 bp, Bovine  19866880827645
  misc_feature (1)..(1): n is a, c, g, or t
nctacttcactctttatcatttaatcccatttctgatatgaaatgtaggcagaggaagtactctgggtacagccatccagagctagtggaggaaaaggaaacagcaatccttgaggatgaactttttaggatcacactgtgggagagagtacattgcaaagaacttgccacttgccatctttgcagtgatgacaggagttgaagaagtaggcttggaaaactcagagatctgcagcccaattaatggctgtggttgctcattatggtgggaaacctgtacccacactgcagcagaagctgcccacatttgagtggcttcattaactaccttctttctcctggatgagaccacagagggacatggtgttgtcatctaacaagagatcaccagcaaagtcagctccaatcttgcagccattatgagaatattgtgaccaacttgtagtgcctcagaatcacacaatgagcagaatgtatagctggaagtcaagcaccaaaatataattgcacaagattgaaaaaaaatgcctatgaggaaaagttacagcaattagcttatttaatgtggaaaaggaaaatacaggggaatttactgcattaaaggctttgagtccatgaagggtaattctagaggatggtgaatttatggttgtatatattaaagaatctttcctgttgtcttcttttcgtttcttccttgacttctcttctgtgatatgtaatgaaagataatgacgtggtaacttctgaagacatatgagaattaatacttggggagtttgcagcatctttgcactgtcttacaactacctcccaccctgccccctccaaaaagaaaaacacagaaaggagtgagtataccatttgcaagagctcttttctcttttacagccatcctgttgccatctgctaaaatcctcagcccacctgtgtagtgaacaacatcaattgtcttctagaaaagcacaaggaccacagtctcccccaagattgagggtaggaatatggagacattttacagcactttcaaatgagctt

SEQ ID NO: 52585 - DNA, 1348 bp, Bovine  19866880855346
  misc_feature (1)..(1): n is a, c, g, or t
nctatcctcagtctctattattaattgagattggattgttaacagaagagtaagagttttcctgtcaaacaaatccataggaaggtattacacatgaaagggaacagtacctgcaatggcttgaattagtgaatgatacttacatatttgggaaactggagcaaaggatggactgaatagctaggctgggaatataaagggccatgatgcacaaataaaatgtatagattttatcctgtgggcaatgttcagagccaatagaagttagcaagtcacagaatgatataattagatctcttttgtagtgtgaagggcagattggaatagagaagagattgtagcctagaaatcagttagaggtaacagggctcttgcactgggcagcagagtgggagtagagagaaagaatctggtttaagagacagaaccctttcgatgtggccatggggcagagggagagttatgaatgctaggatgctgcagactgatactaagaatttgcagcagacagagtgaatttggttggtgagagtcagggttgggaattatagatagtgcttaatataaggacttagaaatacttctgtttgaggttgatttgattatctgacatggagcagggtgaggtctgatgcgcaattgctatttgaagtgaaaacaaaaagcaatactgctctgccatcagcttgaccgtccccatctactcctctaatgaaaactgcagaagcatgcatttgtggtacagaattgtgctaagtggacaggggcagggacgagcactgcagaggatgtgttctgataagactggctaaaccttgttcctagacactgttgggcttcccaggtggcactagtggtaaagtactcacctgccaatgtaggagacataagagatcaggttcaatccctgggttgggaagatcccctgaaggagggcatggcaacccactccagtattcttgcctgggaaatcccttggatagaggagccttggcagtctacagtccaaaggatcacaaagagtcagacaccactgaagtgacttagcacacatgaacttcattcctagagactgataggatgtggaaacagtttactcatacagaaacttgttgacagaacttgaatcaaagcagggaaaaaagtgttagactaacacatttttaaaatatgataataatacctgccatttattgttccaggcatttgactcacattaattttattgaaacctcacaataacacagtgaaggaaatattttcattcttgcagagaagaaactgagactcagagatactaagtaactgacccaagggaatattgctaagtggcagagtaattacaaaa

SEQ ID NO: 52586 - DNA, 1669 bp, Bovine  19866880937823
  misc_feature (1)..(1): n is a, c, g, or t
nagtgaagtttccctataggacagaaaatatggctgaatcaatactacctgtcagcacagccaagcagaattccagctctgtgagaaggaggtccctctcccaggcctcccgtaagcaaacaccagctccaggctgcagcaaacactctaagtgtctgcaaacatagggtcccatgaccaaatccacgaggaactcaaacatatgtgaaatggttttaggctcactgccttctttcccaagctggcctggcctgcccccaaaagagaatcagaaatcactcagctgtagaaatgtgtttgaaagcacctcaggggagcccccatccttcccacaaaagctgagtgtttcaggaaaaaactaaattcactaagacctcctagatttcatcctatattttatcatctctgaaattggcatgtgtgttatatagccaatgtgtatccttactgcaacaagtattccacttttttgctcctgtttttgtatttaaattgatattttacagttaatggtattttggaaagggaggaaattagttatacaattcctttcttgttttaggacttccccaggtggcacagtggtaaagaatccgccatgccagtgcaggagacacaagggattcaggttccagccctgggtctagaaaatcccctggagaagggaatggcttacccactccagtattcttgcctggaaaattccatggacaaaggagtctggtggtctacagttcctgaggtcacaaacagtcaaatgcaactgagcatacagtcttgttttagggaagtatacgtcaagaaaacaaacgaaggccctggtcgggacatttgacagatttcaataacagtaagacctcatatttgttgacatcttgccatgtggcagctatgtaacagcttcacctatattaactcatttaaaccttataatgatcttctatggttggtgatcattttacagattaggtaaatgaggcatagaaaggttaattttttttttccccaagatcatacagctagaaagctttgcagccaaggttcaaactgatggttcaaaccactgttgattgcagacttcccaatgaaattacctaatcaatttactgataaagcaaagttgaagttcattacttagtatactaaggaagcatactcccttgacaagactcttattttcaaagagggatatttatgaggtttggggtctagtttaaggcaagtagaggttggattcagattggctcaactgtctgacacagttattgaggcttggttgacacatcaaggaaatggttgcaagagtcctaaagcatcaacagcaacttgatgagtttggtaaagtgatttatattgtcctaaaagggggttatttactccactgagagatacttgaattatctttttttttttcatataaatggatttttcagaaagcttcttaaccaaatcataattatttgcaatttcctgttcctgggcaagagtctcctgaaataaggtcattttaatatagacagtaatctgagtggcttgcagatggtttgtgttctcaccaggtggttgccacacagtgtggactgaaatgagtcccctccaaatccatatgttgaagcccctaatccccccccaccccaccctactccccaaagtgactatatctggagaa

SEQ ID NO: 52587 - DNA, 1793 bp, Bovine  19866880968346
  misc_feature (1)..(1): n is a, c, g, or t
ntgttgaaagacccatgtactctactctgcataagtactgggttccactttcatggcatgagtgtcagagtctacctgagtatggagggcctgtcgctgtgggcacacctgttatgctcctccttggaaacatagtcacaaatgggttggggccctttcatgaatgaaggtcagggaggaagctctcattttagaagttgttgttgcttagtagccaagtcgtgtctgactcttcagtggccccatggactgtagcctgtcagactcctctgtccatgggatttcccaagcaagaatatgggagtgggttgccatttccttcttcaggggatcttcctgacccaaggatcaaacctccatctcctgcattggcaggtggattctttactgctgagccacctgggaagcccccattttagaagcaactccacttaaatatttatgataagtttcaagtcactgagaatattagttcttaatgagaacatcgataggcccatagcttgaatgaggtgaaagccactactagtcttgtaatgcatcagcttaaatagtcccactgacacaagcccgcacttgactttctttgttatgcattaccaaggagaagaaataaatctcagcatgaggtttgctggaacaaaataattcacctcaatggtatctctgttatcctaaatttcattctttccctgatagctacatcaacacgcattgatcatcttcgactacacagtcaagacttgaatggatttaacttttttcgtggaaaacttctcaagtggaaactttttgtgccaaacgctttacctcaaacgttaaagacattccttagcagtgttatgatcatgtgtgaattcaaaggcaatttaagataggttgccttcagttgataagatttcttagaatcttgtccattatttttactttgcatcatgactttgaagctgactctggcctttgtaccctgacactgaattaattctaggaaatagagttttggatgaagtagaaaagaatagctttattgctttgccaggcagggggtgcacagagagctaatgccctcaaaactatgtattccaacctagaggggttagtgaaaaggtttatagtaatggttcaaagagggcatgatccgcttgtggacattcttctgactggttgatggtgaaataagtgggagtcagcatcatcaacctttgggttccaaccagtctggggtctttgtacttgtggacagcatatcgttaatttttctcaaacctggttggcatttctgtatctgcaaaacagttcaaagatattgttatgtgtatcgcttggggggatccaagaccttgcccccaagactgcactactgtttctcttgactgttcctccattgtctctgcatctcctcccttccctaattagtatctgtttgaacttgcccttggaactcagagaagttctaggaggctgaatgaagcctgtgtcctgtattcaagaaatggggtatacctgtggctgattcatgttgataattggcagaaaacaacaaaattctgtaaagcaattatccttcaaataaaaaataaattaaatttaaaaattatatcatatgaagaaaaaaagatacataggggacacagagaagcttttgtgtcaggaacctgtgagccttttgtgcacaaggtcctgcttggaatcatcttatgattgatttcatttaaagaagactgtacaattaatgcttcttaaaaataaggacattgtactttcctcctcttctgacatttttgaaagcatct

SEQ ID NO: 52588 - DNA, 676 bp, Bovine  19866881017187
  misc_feature (1)..(1): n is a, c, g, or t
nttaattcccttctctgctgggagctctcactggctccatgcagcgtgaatgttaaacagctactcaaggctccaggaatacagcagagtcattaggtggtggctgtttcaaaccactcagagcaagtctctgaaatggagggcctcgttgtcccttctgaatctttattgagctgataaccaacagaagaaaaagcagacctaaagatctcaaaaggacctgatttagttgaaaaatccaccttccctgtctcactccctctgtgtgaataaagggagagagaagagtttttgaacacacttcactccaccagctacaacatgagaccactagacacaagggttagtaccttacaattccctgccaagagcctttctccatcactcccctctttatcctggtccagaagctgatatcatatcagaaagtgtaagtacactgcagtgctagaagaaagccaacagattgcatgtgctgagttgctcaggcgtgtctgactctttgcaaccccattagactgtaggtcaccagactcctctgcccatgggattttttcaggcaagaatgctggagtgggttgccatttccttttccagaggatcttccctacccagggaatcaaacctgcaactcctgtgtctcctgcattgacaggtggattctttacctgctgag

SEQ ID NO: 52589 - DNA, 1497 bp, Bovine  19866881035949
  misc_feature (1)..(1): n is a, c, g, or t
nttgccttggaataaaaatggatataataatagtatctcccctgacaatgttcttttgatggctaaatgacttaatgcctataaaagccctgagggcagtgtcagccacaaaataatcattcagtacatattagtttttactacagttcccacaaagtccaaaaaccagcagttatgtctattttcacccaatcctatggtagaaactctaagcagtgtcatgagattaactgtcatttgtactgtgaaattttaaatactcagaccatctcacctggttctatctggtgcttaattttctcatatccacagttacacatgtaagtaacagcaatgggggaaaggcatatagtcaactttctgtccattcaatttgtttctaagcagttcactatgtatctattgactatacagaatgctaggtttggtatattagaggatagaaagatttataatagggactgtcttctaggagcatatgtggaataataacataatatggttaaaactatgtatcataaaagatttaagtaatatttcatagggaaaacagaaaagacagttaaaggtaatattggattgctgaaatataattgaaaaactgagtcacaagatttctattgaaaccattcctgaattatttaaataaatcttttaataccagggatggatttgccatgaaattaatgcaactttagaattcagggacttttatttacatggggctcctaccaagccctatgagaggttctacagatacgttcacgtggttacatttatataaaatttggaaaagtaaggtgttttaaaaactatttaaagtctgacttttgtggcagatagcgctggagtgactatgagcattttgggacctctacaaaagagaatttcagtggagaatctacttcatttgggtttggtgggataaaaactatgtggctcacaataagttctggtacgggaagagattccaaaatacttgtacctctcgatgcatgaacccactcagtgtggtggtgcaagcagtgagtatcagagggcctgtttatggtatgaacatgccctacaggtttcaatacacaaagtatcaggataacgggaaaaaaggtttgaaatgtgtgcagccaggaggcagcctgtggatatttcttccagtcaccagtggtatacaattaaaagctgtgcattcagttttcatggagtctagtcaaaacaatgccacctgtcaggcatgtactcagtaagacagcaaacaccgttaccaacatatcacatttttttaaaagaaaattgtgcctaaaattgaattaccggaattattttgcttatagggaacacacctgttcttccagaagccaggacaccagaatgggaagctacgtgttgatgcatctcaaggtattgggccgtatcttagcacatccgatgcatctgccctgatgtagtctggcatgcccagacaaatcagtgagcaaagactgccagtaaggccacaaa

SEQ ID NO: 52590 - DNA, 870 bp, Bovine  19866881046277
  misc_feature (1)..(1): n is a, c, g, or t
naccgattctacctttgtgcaccccaaacctttgtacatctctacctgagaactctgcctctgaactgcagtgtgagctctgcaaaaacaggaaaactgtattcatcaagagtttctcttaatgtctagaaagaataggaattaagaaattctgaatgaatgcaaagctgccaaaacaaaaaacaaaacaacaacaacaaaaaacttcctcaaaagaaatttattccacaagttgatttggagatgtactagcaaatgagtttataatgctcccctaaatgtcacgaggaggtagccaacctaaactgtaattaattaaaagtaatctgtaaacttgtcgaacgtaaatggttacaaaaggatgctaaatgagaaagggaaagactcatgtaacaacaaaggcaggtgacggtggtcatcagagaggagagctaaagccagggggtcatctgtctcctgctatgctcagcaggagggtgttcagactggaaatgttctggctcttccaacagaaacctctcctgggacgagagacacaattcatcaagctaccaagacttggcaggaccatccctcgaggacaccagctttgattctgtattcaccaagaaaccttctgaactgtcatgtgtttttcagagtgaactcacagtctcaggccaggattttccccagcttcaggttaataaagctgcattctaacttacatgtcagaattggggtggaagaaggtattgtcctgagccaattatccagtgcctaattgtgccaggaaaaaactaaataggattaaattgttggtgctataaaactatggactggacttacagctaataaggtccaggcctgctaactttacctgtcacatca

SEQ ID NO: 52591 - DNA, 862 bp, Bovine  19866881132329
  misc_feature (1)..(1): n is a, c, g, or t
ntttcatctgtccctcttgcctccacttgcctggccatgatattagtttgaagtacattttatttgtgatgtctattgattaaagttttatgttccttgttcttaattaacttatcactcattctgtgcccatatactgctgttgtatattataaacaatagatatattgctgataaagctatttgtaaatcaatgttctgtaaacagaattatatttcaaatgtgctagaagaacttgccagataaaagaatcctttgatgaaaaattcaacaattctcaataatgcattttctggtaaatcctaggcttcagataatgaccatgtgaaataaaacgaacttactttaatgccatcatccattatcatcctgtcccagtttggatggatctcctcaagacagatattagatctcaaaaaagtctgtagaaaggaactaaataatctccccagtagtttcttttttatgaaaatggaaacactggaagatgaaggatgagtaacaacatgttcaaagtctgcaaatttataaaatgtaaaaatacgaagagcattcattcatgatacacacacaagtatggttactactatattctaggcactcaggtaggtactgaggataaaaaacttgattaagacacagtatttgccctcaaggactcacatctaataggatacagagacatataaataagtaatttcaaaacaatgtgtaagtattataaataatggtagcatgcatttattaaattaaaaaaaaaaaaggctcagcagtggcaccagatggggaaaaaaggtcacaagagcagacactgggtactgtttttgtttgctgttttatcatcagtgctcgcacagaacc

SEQ ID NO: 52592 - DNA, 1037 bp, Bovine  19866881162715
  misc_feature (1)..(1): n is a, c, g, or t
nagaggctggtaaatatattcttagcatttctaggtttttgtatccaataacatcatgctatgaagtttggaatgacatttagaaagctgcaatttgctatcctgtataaattatgtttattatgtttaactctcttgtctaaatatttgggagatattctatatacaaaatcataccactcagaaataaatatatctttcttatttcttatttcttttaattcttttcttattaaaaggctaagacctcccaataaatcctgactataataaaaatggctctaatgtaaatattttgaccacctgatgtgaagaactgactcattagaaaagaccctgatgctgggcaagattgaaggcaggaggagaagggaacagaggatgagatggttggatggcatcaccaattcaatggacatgagtctgagcaagcatcgggatttggtgatggacagggaagccatgcatgctgcaatccatcgggtcgcaaagagtcagacaagactgagcgcctgaactgaactgaactgaatgtaaaaccataaaatagtctgttcgctacaggcgttttgtaaattctctttatcaagttaagaatgtttacttctatccgctttactatgaggctgctttttttgttttaaaaacaggaataagaattgaattttacataataatttgctgaagtagtcaacatgattgaaaatttttctcaatctatgaatgcagtgaattaatagtttttgcaagggtgaacaatctttacatttcatgagtatcctgtttttatgatgcctcctatctgtcctttccatgctccacttgcccctgtgttagttcatatccccattatctttcacctgcactactgtaatagcctcctaattggtttttctgtcaaagatatttggcttctgcaatgcagtcttcacatttaaaccagaattatcttcctctttggaagatttcactctgatcctcaaatccctttagtgcctcttcataaactagaaaggaagattaaaaccaggcctttt

SEQ ID NO: 52593 - DNA, 1058 bp, Bovine  19866881206813
  misc_feature (1)..(1): n is a, c, g, or t
nacttacagattccagcaccattggacaaggcatcctgaatgatacaaaacagcaagacactcattttcgatttgggggataaataaaatcctcactaaccttacagcaaacagtcattaaagttataataactcctctagaaaggttaaaaaagacagaggacattccaaaggaagtgtccagcttccccgagagctgcttggggagattcataagggagccctgtaaacaccaggagcatcttgctggctgcacaggtggctttgcatggtcaaacacattcaaagacccgacagggaagcgaggtgaatgggaaaagcctttcacattttttaatcttctgtgttgatttatcttcccctgtgctgagagtggaagtaaggcattctcctcgcctcctcccaatttcacctccttcccaacttgtacatgtgcgcatgcacgcatgcatacacacacacacacacaatcaatttaaatttataattcattggtgttcctcttcattcaggtttcagtgactcaattttagggaatgcaaatccatgttcttatgccacctgccctggctcagtgatcacttgtcagtaaactgactttaaatgaatatacatgaaattaaaggacatttgaaaaggcctgcagttctaagaatagacattagagagtataaaaagtaatgaatccatatttggacaccaagtaaacttctcttcctgttatttctttggctcatgtatatctgataatgcacttgtgcctctaaagttaggtatattaggtcagggattcaatttcgattttcttttcacatacctaacatgatctattgctacagttccataaaaatattaaattgatgctaatcacatatatatgtgcaaatatatatgaataaacacacacacagtcctcacccagagataaactgcgtctgttcaccctctccttccattggtatctaagtttttactgttaccaaggaaagaagatattaatgttttgctctagtagtcagaagattggaagcagtaaaacagatgcaccacagtcatgt

SEQ ID NO: 52594 - DNA, 603 bp, Bovine  19866881249522
  misc_feature (1)..(1): n is a, c, g, or t
nacctgtaaccccttcctccctccggcctcctcctcactctggcccgtggtgttgctgatgggtagtaatggtgcagctggaaatgcatttatgttccattttcccccagtattattaaaactgctccatcaccgcctataatgggggtgtccgtattttctctcgcctgtatctctgacatgacataacgcttgccctcaccagcatgctataaaacagtggtaattgaaacataactcaccctaaattacagtctctgtgcacgcagggccccactgagcttcccaaggctcattacaagtataagctaaatatttccttaaagggggctgcgggggacccagaaaggagggaagggtgttgtgggggtttggggtggggggaatgcaagagcctcctaaaagcaaatgaggctgaggcaggttgctaaaaagggagatttacccccaacagttttaggtgagccccctgtttggcaggatctgtagcaacctgtcatcattattagctgaacggctatttcctggactacttgaaattataggtttccattcatttcctaggagacacaagtccacctaattgtatttcctggcccagag

SEQ ID NO: 52595 - DNA, 769 bp, Bovine  19866881432072
  misc_feature (1)..(1): n is a, c, g, or t
nattttggagtgaccaaattctttcctttattttgttattataggtaaaatagagatatttcaaagaagatagaaacaaatgcagtgcttgttttttttagcatatctttgtatatctaaagcaattttgttaatttagaagcataataattggtttgttcataaaatgttcatgttttctatattaaattttaaagtatagcttactcagaccattacaaatttgctaggagaatgccttaaaacatagtaaattaaaccacaagatgctaaactctaagaaatatattctcaatcccacaactgtataagaaataggcaaaattttgaggatagaagaaaacattgataatatagtaaaatgaaattatttcattttctttaatcagtctcttccaatacaatgtcaagaacttacagaaagcactggttttcagaagaactttagaataaaagaaaaatgtacactgaatattttttccaaatgagaatttatctaattatcaccagtctctgaggcatctctcagcagtgtttgcatcatctgatgctttgatttgaaaactgaagacactccctttgcagaaaaacaactggtcttagggccaagtctctgagttccagaacagtgtgacctagaacaagtcacttcatttctgtgggaataaaacagctctctcaagttctttccagcattatgaataactgtggaatggaaccataaagacgcctgcctcaaccagccccatgcacctctgtgggaaaggtg

SEQ ID NO: 52596 - DNA, 2294 bp, Bovine  19866881642768
  misc_feature (1)..(1): n is a, c, g, or t
nagaagctcctttaattgaaaacagggtcctaaaagttctctgagataggtatttctacaacatttagtataaagctgtcctcctctgctatcaataattgtcctctgctttccccaaactttcagcacaagttgcctgtgcttaataaccttgtatgtgtggtctttggatagataaaatagcagtaaaggtggggctgagtagctaagggtgatatttttaggttctgagagctaagggtactaccagcaaaaaatttcaaagcatctctcagtgtagaataagtcagaagagaataaatgccccctacctaataaatacacacacacacacacacagatttctgtcaaggcttgatgaacctccacagaccatggagttgggggctcaatattgaaagagagagaataccagagcctggaagacttggaaacatccagcctgaagacctttgagctgcataatatcgaatcatatgaaatggcctcttcttggtccacatagtgacatacctattcttcacaatagtacctcaatgtcacctttatagagagaccttccataatcctccaggatgggatttgtccatcccttctccatagtaacaaggtatatgatacatttctcttctgttgcccattgcccatgatgagctatttgagaccatatcttatgttctgtcttacctcaagtgcccagcacagagttaaaaccccaaaaaaaaaacctttaaagaactgaactgagtcatgagttttatgataaaacaactggcgtggtaggaaccttaaaggcaatcttcatgaatctttactttgcaaataaagaaattaaggacttgagagcctaactgcatttccaaaagttgcacagctaagaagaggaagaaggaggactagggcccacgtctttagatcccgaatcacccaccgtggccatcatgttatgttcacaaatgatagggtggtgaaacactcaggaaaacctggggaaatagacaattaagatcaattccaaattgagtgctattttctatatgccaaatgaagctgcttctatttgcttcaacttttggaaaaggaaagcatgagatgcatgcttcctgtttctagggttccttgtaagtaagtgctaaatatgaataatgatgaaacagattcagcaacatacagaagagtactaaatacatcagtcctcccggggctcaaaagttgcagcgaaaggtacacttttcaaactcaatattgttatatggggctgacagaaaccaaaacacacacacatatacacacacaaaataaggggaaatggaagaatttgaataaggaatcaggcagggtggtacacccattcttgttattttcagccccatgcacagaatcacactagagcagttctcccagctcttcatattcaccacaacaccttattttatctcccttattttttctcctttcctgaatccactcaatcatttcgtgcttccaggactctagtgtgcttctagagtgctttactatctcccacttttcaaagataaacacctcacacctgggaaacagatgcctctaattagctttaaacctgaagtttatgcctgcctttgatgttttctaggatgcattttggtgaataataatattctcaattcagaacgtttcaacacttaatcaaaagtcagtctgtgtgtgtgtgtgcatgcatgcacacatgcgtgcactcagtcgtgtcaaattctttgcaactccatggactgtagttcaccaggctcctctgtccatggcacttttcaggcaagaatgctggagcaggttgccatttcctcctccagggggatcttcctgaccaaggaatcgaaccctagtctcctgtgtctcctgcactgcaggcagattctttacctgctgagccatcagggaagctctaaccaaaaatcagtttagcaaagatattctggcagtcacccaccatcgtgctccagacctaagcctgtctgttaagggaagtgaaaaaactggattcggaaattagaaagtttctttttcacaaaccacacttttctgggctgattttatgggagaagtggggaccccaattttataaaatctgaataggaatcaaagactgtaatacaataatagtaggggatttaaatactccactttaagcaatggacagattatccagaggaaaaaaatcaacaagaaatcagcagatttgaacttcattgtaggcccaaatcgatcaaaccaatatatgcaaagcatcatacaatagcagcagaatatatatt

SEQ ID NO: 52597 - DNA, 850 bp, Bovine  19866881848004
  misc_feature (1)..(1): n is a, c, g, or t
nttgttggtttgtgtgtggacagattcttgcttttttctgctgctcttcagtcaagggaactttttatctgtgtttgtgtatgtgtgtgtgtgtgtatctgtatatatttaaactacacttttagccaaggacccagggtgtctaccaaactgggatcaatttaaatcaaatttcctcagtgttttttcagataacatgaatttagaccaaaaaaacccatgtggctggcttgttacagatattccggtatatttcttcacctctgtccggtgccagaaccgagagtggtgataatctttgctgtctggcagggttagtttctcatccatcctctctctagggaggtgcttttgggggcatgaggttttatcctatgttccccattcccactgctcatgtggtagatgatgcagaagcttagggtctttaggtttcaagcaaaaaggcttcaaggaaaaatccagtcctggtgcttacttattttccaggattcctgatgtcacttcagttttggggctctgtgaattctttttgtcactttagcggtatgcttgaaaatgtatttctgtgtactttttaatccagtgttttagttgcttctatcaatagcagttattcagagtatttaatttgcagtattgccagtaatgtatgtcttcatcctttttctgctccttactccccctctgtcccttctctccttcccttcccctcctccttcctttcctcccttccttccttagcttgcctataattgttcagcaaaccagcttcatcctagaaagaggaggcctaaagaataaaagccttttgtatgagtgatgggctttcatatccagcaccaatttt

SEQ ID NO: 52598 - DNA, 1093 bp, Bovine  19866881954209
  misc_feature (1)..(1): n is a, c, g, or t
ntggggacagcctgacaggaagctagagaaactctgagctccccttttcaggggagcactctgagtgttccctgtatctcctgtgagtggctgtgagatgtctaggcaatcagaagtcaactgtcatcaaaaagaaaattcctgtcaagagtcatttaaattgtgtcaggcaggatgaaaaatcaataccaacagtctcactgacattaccgatttggaaaagtctcccatcccctccccactcacactaagcagctatgttactgcacttacttaggcagcaaaagaaaatggaaaatgaagtcccaccactgagcaagcaacaccttcaccctaaagcctagtggctcttcactcactctctgacatccaggaaatgttttagcatactaagtctgaatgaattttaccatttctctgttttatggaagtgaattctcttctgtcctctcttcactagctcactctccaaatataaaccaaattccctttctttacaaggctttcttttcataaacactcattaaggactgacaaaaagtgatgccttgcagatgggagctagtattctttcctagttctgaccctcattcagtagagagtgaatagtatcagtaatgataatgggcctcagatgtaggccggatggtctgataagtacctaagtaaacagacttgatctaggagaaggagttattacgtgctgctacattttttcatgaagaatgacttccttgtagatcaaggtttgcaaatttgactccttctcaaattactcagcctttccatgcatatgggaaagaagattgttttttttaactttttggtagtaggtcttctgtctgtggattaactcttgaaaaagctccaaagagatagtatatctaagactatcctttagatatggcagaaacacagtctggaatggatagtcattctgctcaatcctgatagctcagatgaaaatgcgcagaaggaagcaggattcaatacaagaaaatgataatgcatttcatagcttgtaaaagaagcactgagagtttgcctcagcttctgttgaaccttgctgtcaatcaacaaaatgaaccaaaca

SEQ ID NO: 52599 - DNA, 739 bp, Bovine  19866882169195
  misc_feature (1)..(1): n is a, c, g, or t
naattttggaaacttttaccatagcttttaataaatatataagaattcagactttggatgatctattactttcctaaggtcttaacttgaaagaatctcttattatcgaaatatagaggttttgtgacacatggaaggaaaaaatgaaatgaaaatagattctaacacttccagcagatatttttcaacgcctagttcccttaaaatcatgcctatatatttacatatttgtttcttccctggatattcttctccctggtctcaatcagagccatgagtcatcctcaaagtaaaacttctgaaagcctgcttatcactctcataagtatgcaacaaacaggagagatttagggtctttcctccaccattttcccccttctgttatgaggaaatcaagccctgccagtgctgcctcacttctcccttgtctcaggcaggatacagtcaggcaatgcattttcatcaaggctcaggctccattatgctctagagaattggggtttaatgtaatttatgggtagccacttccaagggagatcatggaacctccagtttaattgaggtgatctagacggttcagcatctgtcaatgagcaaggagagaatgctgcctgaatagaaatagaaatcactttgcacaccctccttattctatatactttttcttggaagcacccagctgtggtttctcttactgattttctgctactcttactctcctttttcatcttttcatact

SEQ ID NO: 52600 - DNA, 1669 bp, Bovine  19866880513959
  misc_feature (1)..(1): n is a, c, g, or t
ngcttctcttcttttacagctatttgtaaggcctccccagacagccattttgcttttttgcatttcttttcctggggatgttcttgatccctgtctcctgtacaatgtcacgaacctcattccatagttcatcaggtactctatctatcagatctagtcccttaaatctatttctcactttccctgtattatcataagggatttgatttaggtcatacctgaatggtctagtggttttccctactttcttcaatttaaatctgaatttggcaataaggagttcatgatctgagccacagtcagctcctggccttgtttttgctgactgtatagagtttctccatctttggctgcaaagaatataatcaatctgatttcggtgttgaccatactctattcaataatcagataattatgaatatttacattttaaatataaaaatagccacaaaattatacacttgtttttattttaaagttatagatgatctggttagctttgcacacttgacagaaacctactgccaattaccaagttttatgaattagtgaacaagccagcaaatgtgacttaaagtgatcaagaccacatcacaaaatttgctttgttcatttagcttcacaaatgtagcttggtatcaattcttgagaatgctttagggtagactagcaaatttcttccaacacattttgtgaaaattgtttagtatgagagataatgaggtctcactctcattctcagctgatttgctagtgagacctgaaggcctgccaggtagcagggttttgaagtgatgggatttgtaagctgtagaagggacacttgacaaggtcacttaatggggaatcattttatctttttggagaagtatgtgatttcatgcctgtttgtaattttaaaaggctgtggtgagggtactctttctgcccccttctgatgcctatgtcagaagctttctctatatcctttatactttaataaaactttattacacaaaagctctcagcgatcaagcctcgtctctggccccggattgaattcttctcctccgggggccaagaatccccggtgtcttcacgtgattcaacaacaacctttcaacaatagctttagaggtgcagttgtgcttccaagtataaagaccatcagtggttccttggcattccaaatctcttcatgtcccagctccttccacgttcttacacagtctggagactcactgaactccttacagtttagaggtcttttgcaattaaaggtcatggccctggggccagtgtacatgctgttgcctgtcttcctcatcactcactgggcaactgtcacctcgttggctcttaggactcaacacagtaggtacctcttcttggaaccctttctcaactgcctttatctgccttttctcactctccactcccacccaggctgaagttgaagcctgtgtatgacttttcatggtacatatcacattatattgaaatcactcaagggtttgatcttttttcctcactgaacttgagttcttggaggcaaggcaaatttttatctttggtgcttaattcagtgcctggaagctggtcaaaaattaagtattgaaaaaaaaattaagtattgaatggatgaaggaattcaacacaaaatatctattgattgaatgtcaactctgtt

SEQ ID NO: 52601 - DNA, 1214 bp, Bovine  19866880973856
  misc_feature (1)..(1): n is a, c, g, or t
ncctagacagcatattaaaaagcagagacgtcactttaccaattaaggtctgtatagtcagagctatggtttttccagtagtcatgtatggatgtgtttgttggatcataaagaaggctgagagccaaagaattgttgcttttgaactgtggtactgtagaagactcttgagagtcctttcagcaacaaggaaatcaaagcagtcattcctaaaggaaatcactccagagtattcattggaaggacagaactgaaactccaaaaccttggccacttgatgcagtgagctggctcattggaaaagatcctgaaaaaagactgggaaagattgagggcaagaggagaaaagggtgacagagtatgaaatggttggatagcaccattgacacaatgaatatgaatttgagcaagctccaggtgatggtgaaggacagggaagcctcattgcttcagaccataggttctcaaagagtcagacgtgattcagtgactgaacaagaaccatttttaagaaaatggcattatgccacaactcgtagaagtagtaatctgaaagactattttggaaggattgatactttccaatttagttgactgacaatatactatattcatttttggttaatttctgtgcctggtcctagaacagaaagacaggaaaatttaaaggcctaacacagtagagatagactattccctggtagttcagcaacaaagaatctgcctaaaatgcaagagactctcaggttcagtctctgggtgaggtagatcccctggagaagggcatggcaacccactttaatgttctcttgcctggagaatcccatggacagaggagcctggcagtctacaatccatagggttgcaaagagttggacaggactgatgcaactgaactaaaagcaaagatagtagcctaggaaactatttgggaacaggaattttgttgatagtaaactacatgaactataattcacctatatacactgaaaccttgtgtttaagatgaagacattatatatataaatatttataatttacatttgtcatagtattataaatgaagtggacatgataattttattatgtatgaaatatgttgtatttcaaagaaatcaaacactgtttcactgctaaagacaggcattattttgctaatatgtgaaaatcactaatgtaattacattcatgcattattaggatccataaacata

SEQ ID NO: 52602 - DNA, 1957 bp, Bovine  19866881380040
  misc_feature (1)..(1): n is a, c, g, or t
nctatagggtttattatgcctttccgataattctaaaactgggcatcatattctggtgcatgagcataggaccagtgttctcaactgtgatatatatatactgctttgaaatacaaagactgacaatgagctctgtgcttctttctgaacacagggtaccagacaataaacttcattaagcaatgacaactaggaaacttcagcaatgctgacaaacccttaatatattttgtatgtcaaatactttgtattcagcattgggaatattatttatattggaaaataaagctaaacaaaggatatatgaggatgaagtgttgctagatatatagaatataatttgacaaagaagaaaagagcaaacattttgttttaataggaaaaaaagtagagaaaatgataaaaaataaagtatcccacgttattacctcctaggtaatagatgtaagataaacatatcacttaaagttgataaatcaaataatagaatcttaagtacatataagttgataaatcaaataatagaatcttaagtacatataagaaaaacactacaatattgtaaagtttaaaaataaaataaaattttttaaaaaagaagaaaaacactaagtaaaataacttgactaaataaaatcaagtaaaacaataaaagggtaacaagtttattttgctttgctcacacgaggaaatactgaaagaaataaacaaaatacactatatgctagtataaatgtaatttctagaacaaaagtatgaaccttattaaatatcagagctacatcataatgaaaaacaagctgcatatgttattttaaaataagtcaaagtaatatttacatatgtactgattatatcaataatgtaaataagaatggctcacctattagaatcatttccagattgtctttcaaagcaaaaaccaactctatgctatagacataaacctaagcaagttgattaagaaaagttaaaaacaaataaaaaagcaacaagcatgtagactactgcaagcaaaaagaaagtggaatttttttgctattagacaagctagttttgagtgcaaaaacattgaataaaaaataaaccattattcactgccactcacaatgtttataaacagtgtagcatatatgtatgctccaaatatcataaatgatccaaatatcatgaatttttttgtgaccatccctcacttccctctttaaagagtaaatgatctcagatatttcaaatattgaaaaacataaaaagaaaagaaacattaagtggtttctatgaaatgagtatcacagttgataccagaactttaaaaatattgtaattaattattattttggtgattacattgcagagatgagtcgttttctctcagaattacgccttcaataatttggtgatggtgactagaattttatgttgagaaggattctgagtgcatctgagtgcagtgaatgtcttagtcagatactgttctcatcaggataaaagtaagctatcattgatcagataattatgactccttacttagggcaaaaaacaaaatcttgtagagttattgtacaaatgatttttattttacatctgtgtgtatgtgtgcatatacatctaagtttattattgtgatctattttccacaaactatatcacaatgataaatttagttactcaaggtaggtttcccaagagtaattttgctgaattccagtcctgagttaggaagtggcagtttataaataagcaagtcatatggatgatatgcttcccttgtggctcagctggtaaagaatccacctgtaatgcaagagacctgggttggatccctgggttgggaagatcccatggagaagggaacggctacccactccagttttgtggcctggagaattccatggactgtgtagtccatggggtcacaaacagtcagacacaactgagcccctttcacttttcatgt

SEQ ID NO: 52603 - DNA, 736 bp, Bovine  19866880445577
  misc_feature (1)..(1): n is a, c, g, or t
ncccttcaccctgggagcttggagtcttagccactggactaacagcgaagttccttgcagggagaattctaatgtgtggaagtgttaaagttaaggacatatgggtgggtatcactagcatctgctgtactttccctagctcaaagcagacagtattgtctccataaatatctgtcaaatgaatgacctataggatgaatgcaccctctagcactgtgtggttccttctctggttgcacattcaaatcagatgggaagcttttaaataccgttacatccaagccctaatgcagaccatttaaatcaaagtcagaatgtttaatagccaggacagagaaccactgctcttgctcaactaatgtatgaattatttctaccaaattcctgacagatggccatataacctctttttgaaatccttcttgggagggactttgctattctcaaaaacaaagcattccctttctcgacagcactaattattccaatgttttgtccttatattgagccaaaatttgcctctgtaccttccatcagtcatccaccctctgcacttctagaataaagcaaaatgagtctattccattttctacatgactgcccgttagatattcaaaggcagtcataatgccctaacttgaccttcatttttcacactccaaacacacttagctctttcaacactggctattcaacctgctctaatcatatttgagtatgccaattcacttttatc

SEQ ID NO: 52604 - DNA, 1810 bp, Bovine  19866880521282
  misc_feature (1)..(1): n is a, c, g, or t
ntcctccaattcttttctattctgcacacaagaaaatcctcaggcatttggttttaatgttgcaaacattatttaaaaaatcaagcatgtccattcggctttatagaaaaaaagtgcattacattattttcaaatgcagttacctgtggtttcgacacttacaatcatatttcctttctaaacctgtcaaagatgcacatatttcataagattttaatttattcttaggcttgcatttggggaaatcagtcttcattgttggtaaaagctaaggtgtaggaatatgcctaactggggaaaaataatgacttggttggtaacatcagaaacagctgaatgggtttctgattaaattttcaaacttccgttttgtgtggatgaggcagaagagatttttagcctaataggtaaatcttctatacacaccaaaatgttaaagaacaaagcaccattaacatattttcttctatgatggtttgatgtgatttagaacatcagaaataacccattcaccccaaatagctccacgctagatggcacatattgttaaaatgttaaaagagaatcattttttcaaatgtatatgatatctttagttaaaatgcaaacactcagcctgaggaaatacatttatgctcaagctaattattaacacattgatattaattagttttcaaatgctgtctaggtagggttgagtataattttgtctggtagagaaaaggagacagggttgggaatatggaatactgatcatggagcagacatcatgggccgtctacataacacagagaccagcattgggccaaataatatctcaagaatagaggaaaataagagagacagagcagggacatatgaaggggagtttgggcaagacataaaatacgattgttttgcttctgaatttttctatgtctggatcatgaccgggtaagcactgtatttcattttcagtaccttcagaggagttttagaaaaatcctaacccttgatcttgtttctatctagaaaccaaaggtaatggtgacttagaatcataatcagagataaacaagatgtcagagcttgatgagaccacagtgcccatttgccgagccatatgcaacatttggtgtgacctcctcctctttgaaaatccagatttactttatctgaggtaggtcctggaaattggtaaatgtgacaaatagctcatgtgatttccataaaggcaagattgaaagtgaaagttactcagtcatgtgccgacactttgcgacgccacgtactatacagttcatggacttctccaggccagaacactggagaaggtagccctttcccttctccaggggatctttccaacccaggaataaaacccagggtctccctcattgcaggcagattctttaccagctgagccacaaggtaaatccaagaataccggagtgggtagcctagcccttctccaggggattcttcctgacccgggaattgaaccggggttctcctgcattgcagttggcttctttaccaactgagctatcagggaagtccaagtttggaaaaccacaattatttgacacatagcaaaactgagtccaactttaggcaagtttggaaagcaataattatttaacacgtagtgaaacggagcccaagaaagaggaaggaatttgccctcagaaatctactgatgagagtcttgctgagttaaaaatctgaaagtcttgtatacaagtgtagaagacaaatttatagtgatcagggggtaagtcgggaagagacaagtgggaagcttgggactacatatgcacattactatata

SEQ ID NO: 52605 - DNA, 1508 bp, Bovine  19866880525142
  misc_feature (1)..(1): n is a, c, g, or t
nctgggtgttcattggaaagactatgttgaagctgaaactctaatactttggtcatctgatgcaaagagctgactcattttaaaagaccctggtgctgggaaggattgagggcaggaggagaagatgatgacagaggatgagatggttgaatggcattactgactcaacggacatgagtttgggtagactctggaagttggtgatggacagggaggcctggcattctgcagttcatggggtaacaaagagttggacacaactgagtaactgaactgactgaactgaatgccaaaaggattttttgcttcttttgtccattttcaacctctttttgtttttttttttttaacttatctgaaatctctgtcatgtgtttataacatcaaagtcctttcctcaatgactaaagtgctgtaacaaatagaagattacaaatttgggaccaagtgaagcagcaagaaaagataagctctaaagaaataaaaatcttatttttagagtaatttgccatgcaatgtctaacaaagcaagaggagggcagagtatatgattcagccatgttttacatccctcagaaaatattgtctcaaacagattgatagtatatgctgtcagacatttttaagcaccacttaaactctcaacaaaaagcctctcactagaattttccttgtttggaggtcaaataatttctggtggctgaaataaacagttaagaaaaaatattgcatatttttattcatatatgatgaaaattttggtgaaatctaataatttagcttattctttacatttaacacattgtacataaatacttcatttgcctgactttcattctccacagatttacaaatcattttagcatggatatattgttttatataaactgaaaccccaattgtaaatattggcctataatagtcacttactatatttgttagcatgaacttaatttagtctattagtttttattaaatatattttattgaaatgattcaattcatttaagatttttttgtaatgaagtaattccaaatagtgacagatttctttttaaaaaattgaacccataattataaatagtacaaatggaatattaaatgaataaaatacatatggctacagacttttgacgctctggaactaagtcattttaatttttcagttcacattgttatttttcttttccagggagagtgaatttctgatatatttacctcacaataaaaatgttttgaaatagggaaatatttataaaatggaattttcttactgaatttcttttcacaaaggtgctaaaaatatccaattttaataaacatacatcaaagttaaaaaacaaatgttagggcttctaaggcaccaagacaaacagtaatttagacaagttaattagctatgtgattcaatcaatgaaaaaagtcaaatcagctaatccacaatatttggactgttgattgattgagtgcatgtgtctgtgtgtggtttaaggaaaacttaaaaggaa

SEQ ID NO: 52606 - DNA, 733 bp, Bovine  19866880547823
  misc_feature (1)..(1): n is a, c, g, or t
naaaagaaacctatcttggaatgacatgattgggtctgatgaaaccactctacttcatcttaaacatttaatcactcaggaaagacgcagtatcatcctcttgagccttgtttgttcaaaatttcttctaatttgcagaaaacattgaagtcagtgcctgtctagggctttgttttgattgtggactgataaggaaacacacgattggccatatggggtattaagacatggtaatttccatataaagttgactatcatgaataattagacagaggtaaatgttttctaagatctgtttggattttctctgtaggagtaaaggccttatatttttaactgaattaccacattttcccagtaattcttttaaaataatttgtgattccttcagtgggaattaattaaatgagcagaatctgcttatagattattataaacttgttattttcaaagtctatcttaaaatatagcattgggtctactaggcctaatgatcttggatattttgagcaaatcaatgatcttgttatcttgcctaactcagggactggcttcctctgtgtttgtaaaacatgccatctaagtcctaaaagttccttcaactttcttagcgttaattacatttatgctccaaatattcattagagaatgaactgacactgagagcttaacacaacaagaatgatgttccattggctgaaccatagggtcactggcaggaaggtaacaacat

SEQ ID NO: 52607 - DNA, 2082 bp, Bovine  19866880562323
  misc_feature (1)..(1): n is a, c, g, or t
ntatacatatgtatgtgtacatatgtgtatatacctaacaaacatacatatatatatatatatgtacatatatatccacaatttgccacttctaacttaaataatagggtaacattctaacaatagcagacttttcactcatatctttacatttcaataaaggtagtctgtaagatttcaagtttctagaaaaaatgatttacaaagtagtcttattgattttgcaaatatctcaaaaagttcctgcaactagacagttatttttaaaacctaccatgttataagaaagaagattttgcattttctattatgagtatttgacttatcattatacaaaattgacaaagccatttactgagttgtcatttagctgttttaggagttattcactcattggcagtccatgtcagaaagagaagtccagcacataatgcagaataaggaaaggtacatataaaggaagcattaacaacagattaggatccccaccaaagaaggagacactggactccaggccatgctgggcagctgcctctctcctaggggtgcctcagagataaagtaacttgggcccagccaagcagagcaatttttcctcaccatgagccccctcgaatgcacctgcagatgccacatacacgatggtagccatggtgtttctggacaggagcaccagagggcaactggcttgatggaatggggaccaaaggatagatcctcaggtgaagtgtggctgacaagcacaagatcttccccaaatattttgttattcaagtagtttaggtgcccctcccaagctatggcgtggtacatgcacatcccttcttaaattctcacatactcaaagcactcatataaacacagtgtctgaaacacaatacctacagacttatgcaccaggtaggagggataccaggatatagaaattttaggcagaaagtcacccccactcagaagcagacccacagacatagaaagcaagctcatgtttatgaaaggggagatgggggttagggatagattagggaaattacaattaacatatacacactactatatataaaataatcaaccaaagaccccctgtacagcacagggaaccccactcaatattttttaataaccgataagggaggaaaatataaaaaaaatcatgtatatgtatatatacagtatatacctgaatcactttgctggatatctgaaactaacacagcattgtatataaactatatttcaatacaaaataaataaaacaaaagagtggattttgtcatggatccctacagtactcagggctcttcattttctcacctatacttagagactttcatatccacagatgttatgacacacaggcaggtgagctgatcagaatatggcactaacttgtccaggcttatcttcttagccttcctcaattcctcctactttgtttcagagtcctttaatgagattctggccctcagatattgcactgggtcacaaatggggacaaataggacacaatgatgaatgaacagctgctagatcaaaagagttaatgtgaaaaacattcatagcacttgttttattgacaagtcagaaacttcatgctctcatctctatgcccatctgcacataccctttcactatgtacctttccatgtatttatctcacctttgactaaggatatctacattcttactcttgaagtctccttaatttattctatgcagaatgcagctaacagatgcttgatatcctaaattacaatcagataagacaggatgctagaggtccatgattctctggtacagattttttttttttaaactgctatttgcaactatatttccctgccacacaacaaagcacctgtgatgttcaggtcaaaataatttcaacccgatttttctgagtccctctctctccttccagtacttaaacaaaacagaaaagctctgttccctttttctatggacttgagatttcatttccaagtaattctggagtccttaaattagacaattattgtcaaggttaatgtctagacaaatttagtgctatcaatcagcttatctctggaatttagagagcca

SEQ ID NO: 52608 - DNA, 1743 bp, Bovine  19866880563678
  misc_feature (1)..(1): n is a, c, g, or t
ntggaaaatgaactgtagatgatgctgtcatacattctgtttccatccagctcaagttgtccactccacatcatcccccttatggttgtttttggagttatgctagacctgtgtctgaagtctgcttttcttattctagaaatggctggtacccaaagtgctttttattgagaactaattggaggtgaggtgaggtgatgtggtcagctcctggagctagagaaaaggaaaatgtctagagaacctatttttaactgccttggcgcctaaattggacgctcagtgggggagctgctcacagtgttcaataaacatatccctaatgtattacacctgaaacctaatccatgctggctaggatgcaccttattatataaagggtacctttcccagcatcttacagttctgctgcctttacaaacctgtaatcccatgtttattgaaaactatagcacattagaacaaataaaccacttcaaggtagaacactcttgaacgagatggatcccttttagatacaaaagttattacttaaaaataattacttagaattgtcatcaattgaggatagtattttctcttctatttcaataggaattcatttattaatttatttttggtccagtgaatcttattcttttcatttatttttaatttttattggagtatagttgattaacaatgttgtgttagtttcacatgtacaacagagtgttcagttatacatatccatgtatctatttttttttaaattattttcctgtttaggttgttacagaatattgggcagagttccctgtgctatgcagtaaatccttgtctactgtattttaaatacagtagtgtatacatttcaatcccaaactcatataagttaatatatcattgcctggcagatactgtcagattgcgattgcatgttccttgaagatctactcctgtcctcaagggcctccctgtttatttctataatcccagtcagaaatcaatataaaatatggtacaaagaagaaacatatacatgtttaagtgaaatattgcatcaagaattaaaatggaattcaaaatgctacttaaaatggataaatataaattcctcagaaattcttaatagtgggcttattctcacctccatcatgtaaccttcctaacatcatcccataatgattaccttgttctcaaaatttcatgagaagttaatgtctctcacatttattcaactttgagtgtatctttggttctatagttgcttatggagaaggcaatggcaccccactctagtactcctgcctggaaaatcccatggatggaggagcctggtgggctacagtccatggggtcgctaagagtcggacacgactgagcgactcactttcacttttcacttgcatgcattggagaaggaaatggcaacccactccaagtgttcttgcctggagaatcccaggggcgggggagcctggtgggctgccgtctatggggtcgcacagagtcagacacgactgaagcgacttagcagcagcagcagcagcatagttacttatgtgttatgaacacaaactatatgccaaatcctgtatgattaataagggaaattttagatgaataaaatgtacccaccttctaaaaaagcaagagtctatgcacatttacactaaaataaaaaaataatttagatacaatgtcttgtttttcaaaaagaaggcatcctagggaagcacttgaatagaaacatttaaccca

SEQ ID NO: 52609 - DNA, 1723 bp, Bovine  19866880618061
  misc_feature (1)..(1): n is a, c, g, or t
ncttttattaacattgaagtaacaaccaatatttaacaggaaatagaaacttgcgggtttctatgttatgcttttccccttagtatcaaccactgtcattaaaataataaacttaatgaagcttactttcctttggactttttaaaaaacacttgagagactcttagcctccttgaggtccccactggcctggaatctttccatctggctagagccaagcaggcacttggggcttcagactttggactagagccctattcttgaggagtcagtaactcccctaggctactttctagctcttctgtctgcgaacagaactctcagctaattgtctttaatgggactgggtgggtaactatctttgccagtaatcacaaggagatcgcaccttcttcactgagtactcagtttatttaaaaaaaaaaaaatctggcgtattaaaacttgcttccattttagatgcaaaattcaaaagaaagaaacctgagagatgcggtcctctgggtatcgtcaccaggtatttcacttgtacctacatttggtagggatagcaattttatcacttatttgcttttttcaaacttgaaaatttttattttgtatcagggtatggcaggttaacaatgtcatgatagtttcaggctcacttgatttttttagataagcaatttttactgaagtatagttgatttattttaccagactattactttcaggtgtacaacatcgtgactcagtatttttacaagttatactccattgcaagttattgcaaggtaatggccataattccttgtgctgtacaatatatccttgtttatctattttcttttttttctgttctttttttaaattgaagtatagttgatatacaatgttgtgttagtttcaggtatagagcaaagtgattgtaaaccttataggcatttatccatttatagtgtacacactagttctcaaagtgagatccccttatcagctgtgccagtatcacctttataacttcaggttataaatggaagttttcagccccacctcagatctattggatcagaagctccccaagaatggcccagcaacctgtgtcttaataagcctgtggggcattctgatacacattcatttttgagaatccctcctttacagatatagtgtactcattatgtccacttaacagaggaggaaactgaggtttcctaaggttttagctatttatcaaagtcatagaatctttaggtattagacttaaaacctaagataatctatgtaaaaagaaaaagaaaaaaaatcatggtagttgaacactaaataaataaaggatagttgagttcttttttgtagttattatatctagctagcataatttattaacataagaaaatttaaatctttgctacatgttaaagctgagatactaactctaatttcttctgatctaaggagggtagttcaaaaactgaactggtgtataaatattggaaatacaattataagtcaagtttcctgtgaaccactaagtaccttagtgataagattaatctaaaaacagtagatttagaagaattaattttaagcagatcatcctccttgctttgatataagctgctggatcctttcccattacaaatgcaaccagtttgtagagactgcaaacatctgctcccccctagaaagtgtctgtatgaatattaatcccaaagactacatgtgactctctgtccat

SEQ ID NO: 52610 - DNA, 1287 bp, Bovine  19866880645194
  misc_feature (1)..(1): n is a, c, g, or t
ncacttgttgaatgagtgacaagaaaactataaatgttttcctgcccagtcattctattccctattttttgtaagtggtttttcatagtaattagcatgctcattaatacttaaggccaaagcagatggcaagtctctgctcttgggattttcaggctattaatatgataaatggcaaaagaaaaaaaaaatgtatacaaacaaatcacttcaacttgacaccaagaaaatgaagaggtctcataagttccctgtgaaatgtatcaaagacagtttcttgttcggatttagcttcctggagacatgaagaagagttaaactccatacttggatattcaaaataggtacccagggacctccctggtggtccagtggttaagaatacaccttgcaatgcaggggaggtgggtttgatccctggtcaaggaactaacattccatatgctgcagagcaacaaagcccacccactgcaactactgagtccacttgctctagagtccatgtgccacaacagaagattctgcatgctgcaactaagaactgtcacagtcaaataagtaaataaaaagataggtaaccaatctcatatttcagttcaaatttgcatatacatgacacttgtctgtattttggtaagatgtttgtttgtttgggctatgtttctatttgtgtgtatgtatgttaacattactttgccaacaaaggtccatctagccaaggctatggtttttcctgtggtcatgtatggatgtgagagttggactgtgaagaaagctgagtgccaaagaattgatgcttttgaacggtggtgttggagcagactcttgtgggtcctttggactgcaaggagatccaatcagtccattctgaaggagatcagccctgggatttctttggagggaatgatgctgaggctgaaactccagtactttggccacctcatgcgaagagttgactcattggaaaagactctgatgctgggagggattgggagcaggacgagaaggggacgacagaggatgagatggctggatggcatcactgactctatggacatgagtctgagtgaactccaggagctggtgatggacagggaggcctggtatgctgcgattcatgggtctcaaagagctggacatgactgagcgactgaactgaactgaactgaactgatgttgacatagacttctttaaaagaatgcacagtcatttttcttctttcactttactcatctcacacccatatttttcttctcctttccatattcattctctaaattgacatt

SEQ ID NO: 52611 - DNA, 1029 bp, Bovine  19866880651873
  misc_feature (1)..(1): n is a, c, g, or t
ntaggatggactggttggatttccttacagtccaagggactctcaggattcttctctagcaccacagttcaaaagcatcaattcttcagcactcagctttctttatagtccaactctcaatccatacatggctactggtaaaaccatagctttgactagatggatatttattggcaaagtaaggggtgacactatttttaaatagcaaagactcaaattcagctttgcctaaatccaaggttcatgttctaaatctattcgcaaagaagtattttattaaatacttttaaatgaaaagagattcaagtgaaataatataatcctgatacaatttgaatcaaaaatcctccttctccatcatcttcttatctaaatccatggagtacaaccccagggtgctgacagcactatatctagtgttagataaacgaaagtacttgcaagtggaaaacaattcacagtccacttgccttattattattactctgtcttccaaaagtctgataagtagtgttcaattagttccaaaatgcattcatttattttctttggcttcttttttcctgttttgaacaagtaaatcacccaagtcatagaatgacagaacaacacactcaataaaactttaatatgttccttcatcaggggtcatcctgagtagaaaaagcaaatgatcatgccagtctcaaagaatggtgatagctacttttaaaggaaagcagctggcacatctgtatgccagcaggaggggagtgcttttgctgattagagatgagtcctgtaatgggaaggacatgcattttggactcagatggtgccttttaaaatctcagtcctgctattcacttggagtagggtttgtgattaactccacaaatcctgttgtctcacctttaagtggaaatgacctctcttctgcagagtttataaaagcagtcagcacaaatggggctcatagtagacatcctacatgttgctagtaccattgtttctggtatgcctaaaaggtagatacaggaaaaattatat

SEQ ID NO: 52612 - DNA, 1320 bp, Bovine  19866880687411
  misc_feature (1)..(1): n is a, c, g, or t
ngttccctatgaatcagaaggctttctttcatatctacagattcagggaccaatagagttagtagaagaattgtttgcagacagatgggtgggggtattggattcagtgggctttcccaagtgcagtgggtggtagatctctgtcaggactgctcctagaataggctttgatgggagatttcacatttggtgaccgtgcctacatatttagcaaggcagcatcagaatgcaacagatgtttttctcccctcttttcacatcttaacataatcagggaaaagccaatggtattacccaaaatacgcagccgcatgacagagaggagtggggaagagaggaagggtggcagagaagaagggacataatgtatatattcagcaaacagtggcctagactaacacctacaagcatctgtctgttaggcaaatctctttagacagctatttgcctcggaatgtcttcagaaggatgtatctgcttccaaaggtggatagttaaaaataatatacaccacaagggatgttttggcattttccttcactttctttctatcttcaacattgatgttgtcatcctttaaaactcaatcagttcagctgatccaaggaacagatggcattaatcaaccccccagaatatccacaaaagcaattagaaacgtagagatgtggaatttatgccagcaaatcaattaccaatgatggcaaatcaacctggcacacccagcttccccggtttctccttccccagagcagccacttatagcagttatgatccctggtttacctccctgccagagggggatgagaaggtgggggattgaggtttaattgctccttccttaatgactagttctcactctgctgacaaaaaccagcataatttacagactataagatgcatcaggatgatggatacagacagcatgtgctatatggtgtcatgcaaatatgaaatacaccgcactcagaatatggtcgcttggtattccccgagaagaacttcatttcagagaactgagcaccttttctagtacctacagttctcatttgtcaaaaacaatggaagctgcaataaaatacattttaaccacaaatctgtgccttctgtgagtttactagctcatagattccttggttttgaaattacttggctcatgattttctttctgattctttatgacctttgcaggttctgaaactttccttcttaggcccttattaattatcacctgtgttattgtaataagctcttcactggttttcttatgactagccttcattcattttaatttttccttcatacagtatattttaaaca

SEQ ID NO: 52613 - DNA, 1474 bp, Bovine  19866880779870
  misc_feature (1)..(1): n is a, c, g, or t
ntaaggaaaagtagaacattttgaagcatttttgcctgaaacagcttttatttttagcctgttccccaaaaatcattatctagaggcctgaaatgtctcaaaaaatcattatatttgagtgcctggtgggtcatctcacagagtcctgtaagatcatatttgctaacaaatgggaaggatctctggaccacagaaacatttggtgaaataaatttatgtggtgaaactttccccttcctctgtcttctgatgagcaaatattctctagagtttgatccagtaaattatatccaggatttttactgagttctataaaaggtagcatttccaaaattgaaatctgataatctgaggatctcagaataattaatatttatatgcatgcattaaattgccttctctctagagccttggctgggatcaattttgtttgagtaagagcatacacaagaatgcccaggaaaaaagggccagatttgggacttagccctgaactatgcctagttccctccctttagtgagaaaagtatttttataagagggaaaaacataaagccaagccattcatctcaatttcagagaaatagctggtcagatggggccacccataccatttattggtcatgtcagcctagttgccatcccccacatatgaaaaccagacaaagagaggcctactgataaattaagggggatggtaattgggaactgaaagtattttcatttctcaatttcagaattcaaatttgtgtactctcaaaatgtaatttccttactcaaaaatctttagggatagtcatcataataatgttatagttaatatataagtaaatgcagatcattagtacattttgcctcattaattgagccgttcttatgtgtcaaacactgatttttttcttggtgtctcataatattcctaatttgtcacatctcccctttgaggaatagacgctatcagttccatttccaaggaggaagctgttgcacagaaaagggaatggatttgcctggattcaccaagttggtccttaggatgacagactatacaagcagcatgctcggacccagagctggacccttttcattctgcttcacactccacatctgtcagagcttgaaccctcagtgggcttacacatcagccccccaccccccaccacctccatgggttaatgtttatcctcaacactctcagagccttggtttattttacctgtgaataacagggggttttgaggttagaccaggtaatttgccttcccagctaatacctctgtgatgctgataactgtgccctcatttgtcatacagtcacccttaagactgacctacctacctgaagtgtttttcccccaagatcaaataaagtcagtatttggaaatcatgcacatattaaaaatagcaatgatgattcatcaagattcgttttaagcactcacaactcacagtctttatttttaattttttaat

SEQ ID NO: 52614 - DNA, 954 bp, Bovine  19866880784015
  misc_feature (1)..(1): n is a, c, g, or t
ntggatgttggatgctcctagtcctatttgcaatgatgtagccctacactcacagactgagatggtgtttaaaccgaaggaacctctgaaataaggaattcaatcccttcaattacaaacgaagacctcagggtgtaggagatgacaggcctgcttaggactggtcagttaattaatggactggcccgggtagaaattcaagtttgctcaaccccagatggtgaccactaggtcagaattatgccacctgtgcataagtctggtaaccattagttatatcattctccataggatttgttttaacaaatgatttattttctgctaaaggaagggtatagtttcatttcctggataacagaaaaactttgaaaaatagtgcataattttcataagaatttgcattccttctcatttattcttgccttctttacttctttgacactccaccaaaagaggggaggaaagtccacaaagggagaataagtgaaagaaatgtatctgtttccttattaatatttgtaggaatattcatgggaagcattttttttggaataagtagggatagttttcccctcaatatacatgcgtgagtaaatattaaaggtcttctttgacattaattaaaaggtaaagacacagaagagaattctgaataaatatgatatttacacagcttctgagaaattatcattgactctttaagctggttctactttaagtaacgtttttgtttgccaatgtatatttttattcattattattaaaataccaatagagttacagatggtaacatgaagttaaattgtgagcatcgccttgattaccagagtaaattgtctgtatatgggggatttggagcttaagggattcactgtatttataggtgagataaaattcctcttagcattacgcacttaatggcccactttgtttaaaaggcataaagcaggcatt

SEQ ID NO: 52615 - DNA, 1663 bp, Bovine  19866880930505
  misc_feature (1)..(1): n is a, c, g, or t
ntgagcacttaaatgcaaaacagagcaaaggattagatcaaccatgctttattattattattttaatttttgctattattaattttccttaagagcaaatgcagtaagtctcctacatacaaatcttcaagttgtgaactttcacagatgtgaacatgggttcacatgtccaatcacataaattagttcacttgtctcatgttcattgtcacgtgtgtgtattcttcacaggtagttatgtttttatgcactttattgtacagagtactatatacagtacagtagttcagtatctttacttcaagcccaggatgtccagaagcaggttcaaaagcagaagtgatatagctgatacagttctactcagacatcactggattgtttttacaagagggtagattgaatccagtaagcaaccagagtctgtgccatcagagtcaggtgtgagggaaattgcagcttgccctccgtctcctatcgctgatgattcttcagctctaccatctctcacctcccttccctcttccagtcagtaattcttcttgcctgttcacctgatgccagcccctgtatgccagctgttgtataccataccactgttcttttcaaggtactgcactgtaagatttaagacattttctttattcttttgtgtttgtttttaatgtgtatgaaaagtactagaaacctattacagtactgtactatatagctgattctgttagttgggtacctaggctaactttgttggacttatgaacaaatcggacttatgaaagcactctcggaatagaactcattccaatataggagacttgttgtagtctacttcagcaaaagttttccctgaagcagtcacctattgtgggtgtcatctctgaaataagtcccaaaagagatcagagacaaaataaaaaagtcaggatcatcactctaggcctgataacttactgtgagcaaggacgggatggtaaatggtgttcaaatagaaaatcctgagaataaggcttgaggatgctcccaatgagtgggatatgagtgggtgtgatggtcactttcaccaggcagtgtgtgggtatgccaggcagaaccaaaggtagtaagccaagctaagtggtataacctaataaggcaattattattatgcaataagaaaagatctttttttccaaaataatatgaataaaacttaattataggaggagagccaatgataccacactatacataaatctttcattaatgatttcctttcaaatatccaggatctatatgaagagaggataaagactagaaatcaagtgtgacagatgagggcaaaatgaacagagcaatgttagtacacaaattgcaaaaggcatgagagtttaagagggtgatcgattctgtactttatttagcaaacataggctgtctggattttggagattacatagtgcttctgcaaagaaaataaagattcagagactatcaattgcaagtgttacctagtccatcatcagggcaaaagagctcatggttgtggtaattacaaactgatgtccttgtgagacaagcaaagcctaatcacacgattgctaaatcacaacctggagaagaaacaagtgtgcccttagataatgcaaccttttccagagaaaatgcaattttttcttttattttt

SEQ ID NO: 52616 - DNA, 1992 bp, Bovine  19866880934112
  misc_feature (1)..(1): n is a, c, g, or t
nttggtaagcttttgtatcatctcagttgatctcaatttacccttccagtgtcaaaccaaaacccttggagttctctcaactaccctctttctcctacatgccccatgctctatgttagataatcacattgactctctcttcaaaatgcatccagagtcttgcctcttctcaccagccccttggctgtcattttgtttcaagccattacagtcgtaccttgcatgatcttcttgaactgaacatggccactgcccacgtacaacaggttatgtaactgccttaaaatataaagtagatcatgttatccctcacaacctcccaccactggcttccatattactcaaagtaaaattccaggcccttagtgaccaacaagctctcacaatctggccagtgatttcatggacctcacaccccatgttcttcactctcacttggcttgtcccaacagctacagtttgctgggcttttgtccatccgttcctgtacctgcatgttcttcccttagatattatctgggctaccatcctcgactctggtcagatgttatgatcataagaagtcctattcaatccacctgatttaatatcctgtctcatctctcacttccccctaatatgccaccctctccttgtgtggttctcttttttctttgtttcctagcttttatcattttcaaacatgcattgtatactagttccctagggctgccataacaaattaccaaaaactggttggcttaaaataacagaactttattgtctcacagttccagaggataaaagtccaaaatcaaggtgtaagcagctgtgctccctctgaaatatctaggggagaagcctccctaccacttccggcttgtggcagcaccagatcttccttggctgtggatcaaaactccaatctttttctttgtcttcacgtggttgtcttctgggtgtctatgagcctctatgtctccacatgacattgtccctgtgtgtcagtgtatgtgtgtcaaaatttacctctttttataagaataccagttatagtggattaaagctcaccctccatgtgcttctcttaatttaaataaatcaaatttgcaacgactctatttcagaatgtcgtgtactcagttcctgaggggtccacatatctttctcttttattggtgggctaggtgaggagacacgattcaacctccaccccatggtttaccctatattttattatgtccattatttattgtctgtctccactggccaagagttaggatttttcaggccaggaatctttgtctcttttgttcactgatgtatcccaagcattcaaggctgtatgggcccacaacaggttctcaatagaaatttgttcaataaaggaaaagtttgaagtataggacataatgatatttcactcagccagcacggggggaaaaatttgtctgtgaagctctggtcctgattggactcgtggaatccacattctaccctaatagtttcttttccctgttctatagcttgtttatgaaatttgaagctcttgtttttaaaccaatccctattaaatattctcagtttcagacctagagtttcactctccagcacatggttgatctgtaccttggaaaggaagggagagtggggagggaggagactgggatggagggagacatgcgaggttgctaaacctccgccctgagcagacctcagcaaagaacagaagtgaagcccagcaggaccatgtgtggaactggccttcaccagctccaggtcataagtggcctaatcaaccttggccccgaatctctctggctatagctttgtgcctgttcactgcacatggccccacctctctcttgcccagtgcctgcgagtgcatccaggtctctttatgatttccaggacacagctgctgtaacatcatttccaattgcctccaatccccccaccatttttgttctctttgggttactgagcctttccaacacatggttcatgaacaca

SEQ ID NO: 52617 - DNA, 641 bp, Bovine  19866880935277
  misc_feature (1)..(1): n is a, c, g, or t
natagtaccttagtctcttgcattggcagatggattctttaccactgggcgacctatttcacagatgaggaaataagctcagagaactttggtaatttgatcatcagcacacagctaatgactggcaaagaagaatttgtattaaaatgtatttaattcactaactcccttcttttctatgagacaataaagttagagttatattttgactgtaaatgataatgttttaatataccgtttttctttttcttttctaaactcctctgaagaggtgaagggtaggtcagatgatttctgaaaagttcttagttttcagattgcctttctgtaagcacattctataaaaatgcctgatgtgtatatgcgacagccagttcttattaaagaccatttcaatccactttcataacatatttaaaagtaaagtttattgctagagaaagtacctacttcataagccaaagcaatccatcttatcctaacataagaaaataaatgaaaactaaatgtccagaataagaactgggaaaactaaaaatatcttagaaataagctccttctctgttttaatttttgatgacagctatctcaaatatggagggacaataaaaataagtctatgtcatagacacacacacaat

SEQ ID NO: 52618 - DNA, 1408 bp, Bovine  19866880980656
  misc_feature (1)..(1): n is a, c, g, or t
ncctattatatttgtcatgtgctaaacaaactgagacttgaaatgcagagacacacggttttaaacatgcctaagatgcaagtacctcagcttgtttattcattgtgtgcagccattaattcccttacccaataaaagttataactacaagccaggggctctgctggtaacttgcaaatggccattgataaggataataggaacatataatctagagatgctgggttagagacttggggtatttattgctcaggatccccacccctgttctgaagggctctcagttatttttattgacacacccaaatctgtacagttattttaagagtatgcctcaggatttccctgttggttcagtggttaagattccacacacccagtgcagagggaccaggttcaatccctgatcgggagttagatctagcattctgcaaataaaagaccctgcacactgcaatgaagatcacacatcctgcagttaagacttggcacagccaaatagctaaatttaagggaaattaataataaaaagggtgtgcccatttaatacctactccttgcccatgcattaagctttgtgctaggaatgcacatgtaataaactcagaatgtgggaagtgtctcgagggcaggcggcacacgaggagtcctaagttaagggccaatttagtgtaggatgtgatgctgtacctaagatcccatactgcggcagagaaaagagggttctaggatgtagagagagcacatgaccagagcccatgggagagacagcctgccatggaaaaaaattcaagatagctagatcattgaatacacagggagagcagttcattacagggagtgaattggtctggagtttgtgataagaagacttggggctggtattaggaatttgggctgtctcataaaagcaatcccacgccatggaagatttgtaaacagaggacagacagaaacacattctctcccgtgtccttcagattcatcctgctctgcctgcaggatgactgttccttctctgaccatccgcttgagctttctttcaggacttggtggtaatgctaaccttgcgagaaggacttgggcgtgtgatgaaccacatttaaaaatctactctgccacttgctagatgtgagattttagacatcgccttgcaaagatgttcttccttaattgggcctcctaatgggctactaattaagtctatgtttcaacactttaaaaatgttctcctctgttgtcgttgtcatatgaatttcaattaaatgtcttaactcactggccttgggcacttaagtggattgccaagatgaagtcatttaaacatatatatctatttcaagaccgcttatgtgaaagataacaaaggaactagctctgtgaagttttcccatggaaatgataatga

SEQ ID NO: 52619 - DNA, 1018 bp, Bovine  19866880987242
  misc_feature (1)..(1): n is a, c, g, or t
naagttagatgacagcttctgtgacctaaggtgttcgggtgaaaacagcacagagtgtctgaagatggcttctgggaaaagcccaaagtaggtcaaatacacatgacctgatattcctggggaatatggggccttctgctttgtatatgttttatatatgacaggtccttagcttccatgccgcctttgtgtcagtctgagttggtgtccttttgaacttatacagataatgttccttacgtcacttctgatgccctcttctgtttttattatattttgttttctgagcacctctttttgtttttttgttaaagcaagatctctttctgggctttataattctcctatcactatgctgggttacatttattatacccattacacaggggggcaaactaagatacaggaaagttaagggatttatttgggtcaacatcctctagagtaaagctagtcatgaaactatggagaaacctgaaggcttgaagagactacagccatccgctcatccacgactgaataaaccttagaatggaacagatagtaaatattttaggttttgtcagccagatactgtctcccttgcctattctcccccttctccatctcctcattcctcctctttaataattctttgaaagcttaaaaatcactgttagcttgcaggttgtatagaccggccatgaatcaaatttgtcaacttcgaaccaatttaattctttcactttctagatgaggtgagaaacagatgggtttagtgagatgcccagggtgacccagcaggagagtgatggagctgtttagacctcagattttttcaccaacatttccctcctcaccatagctcaaaatcttgaaccatagccaattgtggaagtagttcttacctacttaaatttccaataggaccacttgaagggccatggctatgagggaaccaggttttgtctctcgacctctgtgcttgttcttgtcactcactttttaaaaaatatcattgtgcattgccttagtccaa

SEQ ID NO: 52620 - DNA, 1753 bp, Bovine  19866881002769
  misc_feature (1)..(1): n is a, c, g, or t
nattggcttttgtatgttcgtttttcctccttggctcttttgtaagtcttcaactggaggttccatatcagctaattcataatggaaggagaggtgatgctaaatagctgtatatttattaaaggtgggattacttggtgggtctgattcatggcttattatctacaataggcgtgtttcttctgccaccattttatccttgaaaatcctccctcatccctgcaaggggaaccatgccagagctccatccagctatatttagacagccagaagtgaactaactgtaacatgatttataatcttaagtccagggaagtgatattactaattaaatcgtgaaacattaggcaggctgtcaagcacagatatatttaaagtcataacagcccttgcttatttgtaaagtgtttgcatattgaatgattctagtgaaattgtttctatttatcagaccaagtataaagtgttcatcaccaaggcatctgcaaacaagacagaccatctaagataaacccaagcccaagagagcaatttctccttcatttcacattttccgtttctctacagcccttctgtgaatctgagcttcacccaattttggagtcagcaatttcaaaacttggcaacttctagcagcgaaagtgcatgataacgtgaggcagaaggaagagatagaagcagcagagcctagaacctatctcgtgccaggttcttaaaacactgatcctgcctgtcccattccacagatgagaaaaccaaaacaaagatgtgaaaagaaaaaattattctcatttatggcctggctaacaaggggcagaccatgtggaactgaggactctctaatgctgatgttagtggtcctttgaggccaatttcactttttgggaggaaactttccctcccaggctctctacctttatacctattgaaatactcaagtttgataagaaagggcttcccaggtggtgctcatggtaaagaacctgcctgccgatgcaggaaacataacaggtgcaggttcaatcccttggttgggaagatcccctggagaagagccgggcaacccactccaggaatcttgtctggaaaatggcatggacagagaagcctggtgggctatggtccatagggttgcagagtcagacacagctgaagcaatttagcaggcgtgtagcacaacgataagaaaactaagaaaaatgagtagatgaaggtgtcagtgctcttcagcgatggtcacattcacaagttaaattcttgtaagggataaatttctaaattcaagagtgatgagaactctttgggtttgggggtctaacagatcttttgtcccgctgccagggcacacagagaactcctctgctctaggtatcctcatcttgaaagtgggataatgatacctatatcaacagattttaagaagattaaacggagataatttttagatatctacaagaaggcaaaggaaaggccacagcaggagaaagtaggacttttctacatttcccaaatcatattcatgtgtttgcttgttctctgcttgaagatggcctcaagtattgcatattctacaaattttggcaaacatgataggcacatcctgcttcagcacaaagtattatattgagcataataaaattgtggtttaagatgaaagacttgaaaatcaagttaaatagaatactgaagccttaattgaagtaccaaaatgattgctttaaaatctctttatcttgctttggtactttgctat

SEQ ID NO: 52621 - DNA, 745 bp, Bovine  19866881049773
  misc_feature (1)..(1): n is a, c, g, or t
nagtcagacatgactgagaaacgttcattttcactttcatggacatattttaagcaaagtgattccatgcatagttttgtatcacagaggaacactctacaaacaaagtgaaaaaggttttaaagaccctttgagagaatctctataacttgtacctggttcaactgtgctgactgcagttgagttgatatttttagagtataaaaatatttatgtatactactttttactggcacagttgctgcataaaatgaggtatatgtgtacactcacaaatatgaaagagttttccaataggtaatacaagcccacaaccatttaaataaaattctgaaatccataaacctcagaagaaaaaaaaattggtaatagaataaactcaccttatttggactcatttgagacaaagttgaatagatatgaaatattattttaaattttcccacttaggtaatctttatatttttgctaatttcctttttaatatagggtgagtatacaataaaatatatatcatatgcatgctgtatatgatatataacatacccacactgcattaccattctagaatgttatatatataatgaattctaaaatgcagtatatatatatatatatatatatgaaattcaaaatatttctggttcctagaactttagataaaagattatgtctctgtgatatataattataacaaactaatagcatgattatccaaatcagagcaagaaaaaagtcaaaatat

SEQ ID NO: 52622 - DNA, 3049 bp, Bovine  19866881085361
  misc_feature (1)..(1): n is a, c, g, or t
ncagttcttaggctatagtcgatactgaggaagaatgattactttcttaatttgaaatttctgagattttattaaaaaaaaatttttccccactggagtatagttgcttacaatgctgtattagtttctgctgtacagcaaagtaaatcagctacatgtatacattttggatttccttcccatttaggtcaccaagagcactgagttccttgagttacacagttgtttctcattagttatctattttataaatagttgtgtttgtatgtccactctaatctcccattccctcccacaacttagatgcccactgacaaatgaatggataaagaagatatggtacatgcatacaatggagtatcacttagccataaaaaggaacagcattgtgtcatttgtagagatgcggaaggacctagagtctgtcacacagactgaaataagtcagaaacagaaaaacaaatatcatatattaatgcatatatatggaatctagaaagatggaatagatacacaaacatagagaacaaatataaggacaccaagggggaaaagggaggtggggtgtgggatgagaaagaatgacttgaacaaactcattcttcaggatttttgaattttcagcatcaaataaacctcttactttggagctcttaaagcattccagtattaacctaaaaaaattatatgtgtgcccatggttgcatcatccttctcagcccatcatcaagctcatttcctgtgcatgaagcacaggtttacttatgtgacataaaatgcttttgcctctgtgacatcctttttcatcgacatcctttttcatctctctctgtagagaatccccttagcattaacaaccccaattgtctgggtttttgtatgaaatatactgcatccctttaacttgatctgataggggtgattagttaattgctgtgggcacctgacatttgcaaggaaaaatggatacctcaagccctctttcttccaatgcaatggaaaatgattaaggtttgctggtttctcagtgggggactgctgttttcaggtggatattcagagacttgcaaattctagatattaagctgttcttgtctgtctttttctcttttgtgaagggatcgctggggaggggtcaggaaggacaaggggacaagctatgaatagcttttttaaaaaacctattctttgtaataaaactgttcatccatattaattccagcttcttcgcaatgtgcatacctggccactggcaaaaattgtgaaatctctaaagtttcccttccctgtccttgtctgttatattctacatggccttgttcctttgaaggacacattttgctcctctctgtcccccagaactcatggccatggtgtcaggaatgagaaggaacatgcagttagtacacatttaggtaaaaatcaccatcactggtatgtagaataagaccttcccctcctcccctccctgaggacctacaggatgatgaggctcacagtgtcttttccttatcatcttttctgggtcatttggaaatcttttctgagtgttttggaaatcatatgacatgaaaggtttttatccaagaaaaatgcacagctgctcatacaacacatagtaatttgtgcagcatttcaggggatatgaagcacctaatgcaacatggagatccttaagagtcctaagcagagttcaggcaagacttccttcctgtgagaaggtagggataggtgggaaaaataagcagaagaacagggcttctgtcaatatcactgtattctacattctttcccaagacataaaacctagagtggagatatgtctaaaaattcatattagaataagaataaggtgaatattaatattatcaatgtacttacagtgcttttttatcagaggatgctgagagatgacacacagtactataccatcattctgtgttgtaacacaacctagtaactctgtgttaagggaaaaagaacaaaacaacccgaacaaaacaaagaaacacaatatttggagaaagacatttttaattggaggccaagctgaaaggttacagtaggcccatggaaattgatttagggatactctttacaatttgttttttccctaaggagtccctaagtcagagaagagtgagtctgtaactgttaatttctggatacacattttgaagccagagacatatgtgaaacttcaggttttgtctgaacactccatgagacttgaaattctactccagaatatatctgcatttttcttaatataaaataatgtgcacttcttaacctttgagtgaagttggtgccctaggaaaatgggtttttaaaaattgaggtgtgggtgtgtgtgcacatgtgtacgtgtttcctcattgtcatggcttacttctgcaggatggatggtgctaaagttacatttgaaaagcttggattcagagctgaggttaccctgagtgatagatgtctccaaacacgctgtgatcatttcacagcatccatcatcatgacagttgaggggatatgaaaagccaagggttttataaaaagaatttaagcaagagtaaaagcatagagcagaactactaactagaggtcaatataaatcatcatctccacaaggaggccttagggaggtagatccccaggctggtgggaagctctggtctgtgtttcactttggtctatatttagatattgaacatgttttttcaccaaaggttaaaagcagtccttagtttggaacaggtgctcaaaaaatattgtgaaatgatgtgatttcctcgaatcaactagaatgatgctagactgagaaactattaggagcttagctcctttccagggtctaccatgctgttctctatggaaaaaacacagtactttggaatcagaaaccagggttggatctcaggtcagtcacttcataggtgtaaattagcctatataaatctcagtttcttaagaaatattaatcatatagattatggagtagattagcagtgatataagtgaatgataagatctggtacacagtgaacagtcaata

SEQ ID NO: 52623 - DNA, 1091 bp, Bovine  19866881105887
  misc_feature (1)..(1): n is a, c, g, or t
ntttgagcctgaaagcatccttttaaatccacatgaaagtaactccatagcacaaaaggaccaagatgaaattgcatggaacatctgtggcctgtgactgtagatggccccaatttggggagtttacagcatgcaggggttgcaagaaagaagactcgtaaagcagaatgaaatcagctttgagtgagggccttgaatgtcaagctgaggatctcagaatccctgtttgcctggattcaaatgtggtcaacactgaagtcagaccaagtgtagaatcatcaagtgggatattctgaaaatcactacttaaattggggagcaaagcaaagtatgaacagggcctgagtgtctcctgctgcagggaggtacacataatttatccagccctaatcctctgcatttgatatagagcatgcagacctccctactgtttatgcgcaagagcaactggaaggatgattgatgtgagccacggaagctgctgctgcaaactgctgggaaagaggaatcaacgaatagttttaggggaactggtctgggataaaagaagctttaatgaatgattcctttcctatggattattatctccatttaatggataaagaaaccaagatactgaaagatgatatgaatggcctttggctacacatggagccagaataggtggtaaaggtcaagggtcccttcctgcaaagccctgcatcgtgcagcctagggtccagcaacgcttctcaaggaggatcagggataagaagcagagtgaagaatggaaaccttatctattttccaccttctgggtgctacagtctgtgcagagtactagagagaaaatgaatgaaggcagagatcctcatgatgagtgctatctggaggcagagaccaccttaaatgcatccattctgacctttgtgctggtgtgctgctgagacagaagagacagtagcagtaaataaagagtgtcaccagcttaaacaaagaggttgaaaagaacacagtgaaggaggtgcttaaaagaggcatttgctggtgtgcttgagggaacctctggtagtctgatatggtggaaggagggctggggcagagaggagacg

SEQ ID NO: 52624 - DNA, 754 bp, Bovine  19866881113057
  misc_feature (1)..(1): n is a, c, g, or t
ncacttcctgcccttttttctgctctggtagtcttttcaccaatcagagttgccctttgccataggggtgggtatccacatgtggagagatggccacagctccccgtggcccatggcaacaccatgactgtgaccctgctctgtggccacttgctctcacccagcagctcctcagcctggaagtttgtcccagacactctgtggaaagctcccacagtttacccagaggaggacatccagaagtggccacctttcaaagtggcagaggacactgctgtgtgtttaaacagcacatctctacccaggtcccagggcatcattcatttgagaagcatctgcacacaatgctaatattggcaagatatctgtaaagctaactcaggtactcagtcatgtcaaatggccaagtcagatccttgggatttctcccagagtaatgcacggagagaaaaggaaaggttatgtcagtgactgaaatgaagtcaacccaatgccctttcagaaaaaaaaataaataaaaagttaggcagatgaagtattatagtgggtttttgttattgctcttcagtcgctaagtcatgtctgactttttgggaccccatggattgcagcacgctaggtatccctgccttcactgtctcccaaagtttgctcaaactcatgtccattgggttgaagatgtcatgcaaccatttcatcctctgtcacccccttcttctcctgccctcaatctttcccaacatcagggtctttt

SEQ ID NO: 52625 - DNA, 1150 bp, Bovine  19866881194480
  misc_feature (1)..(1): n is a, c, g, or t
ntgggagtcaaagtgttctgatctcactagtttcctggtctctacccttctgagctgatttttaacaggaaatgggaagggctgattctggggattggggccccatctgcacaaaggccttcctggcagcctttctttcaagaagtgtttctggaaagattatcattgacccgtgtggaaaacaggaattcagagggcaggaaaaacaatggtaaagagattcatgaaatcagctaaatcagtgtttcagtgatgcttggagaagtttaaaaatcatatccccttacaagttgtagagtgattcttaaaattaagcaaattcattgaaatatctatttataaaagagagagaggactacttcagcactagccagaattaaagagtggcatctgtcacattttggacattctgctgtcatgaagaatgaacttaattgtgacctaagggattttacatctggatgccttaaatcttgcctaaatgattgaacccaagaccatgtataatgtaatttcagtattttgaagattaagcctttcatgaattcttcaatgtttccttccatcagtcaaactgaaattaaccaaaatgtttaggaaatacatactccaatcaagtgcattctctagaaaaattacagattgtcatttttaattcctgtcatttatgcaaaaaatattcaatggacacctgggtcaggcattcttttaggtaccagacatacagcaataaacaaaacagaaatttctgacctgttaagtttacattctagtggagggaagtacaataaatcagtacagtgtgtgatattctgagtattttgcatgtttaaaattttcataaggtctcctgggctttgttattcaggtggccccaggagtcattgctaactctgtgagaagtagaagccatatcaaacacctactctgaaatttcctggtcccttgaccctggacatgtcactgaacaaaccagagcctacagctccagtattatggttatcatgtttaccttgaatgttattaagagtttggtagaagattatctatatataaaacagtatgaaggaactaataataaggatcttcacaacctttctggataatcttctttatcatactcttatccacatgataaactcatgataaa

SEQ ID NO: 52626 - DNA, 710 bp, Bovine  19866881207148
  misc_feature (1)..(1): n is a, c, g, or t
ntggggaaaaggacatatattcttgtcctttgcatatcaagtgtcagtattaagagtggggctaagaagtgtgtgcaaaattcagtagctccagagacagtaggtcataccatagagtgtctcccatagcatcttcagagacatgatagtatctttcctgttgagacagtgctatcacagggaggaatccaccaagcaaacttgatgaaaggagtggaaaattgacaggaatttctttataaagagtacatgctattctttgacatggaaggcgacaatagtgagaaagcatgtaagtctcattagactccgtgcccaacagggtaattaatcccgctactgccccactcaacgtcctgtgttcctggccctttgcatatatcctgggttgctgaatcagctctccactttccagattccagaggagtggtacctaaatgtaaacacaacatatcaaagacaattatccatcctttgttttaggaataggcattaaattttagagttgtctcattttaaaaggatgaataaagatggataaaaaataatatcaaactcaagaaaatctgctgttatgtcagaaacaagacataacaataaaaggcagaaaggcatttttttcccaacagattcactgtagggaaaaggaataaactttaaatagcatccattgttatcttagtcaaatttatggagcatgattccatata

SEQ ID NO: 52627 - DNA, 1185 bp, Bovine  19866881207989
  misc_feature (1)..(1): n is a, c, g, or t
ntgagttttattggcatttttaataaggtggaatgaatgttagactagagccagcagggggtgtgttgactagtaggaactagtagggaaaaaaaaaattgaagcagcagcatgaaagtctgtaggttgttcaataattgttcctttggaagaaggtgaagagcagatccaagaggaggcaacaaaacaggaacttatttaaaataagtataagacttatttcaaatgtttccttttaactctaatattatctattaagaaatcatgcatagccaaaaataataaactttataatcccacatattgaataaattattttattaaacataaatatgccactaaagcttccagaggaaaaattagagttttttttaatgacttgaagctgtaaaatttagaaaaataatttagggtagataaatatgcatactgtatgatgattccacttatatgtggaatctaaaaaaagaatgcagatgaatgtatatgcaaaatgaaacagattcacagatataaaaaaatctactgattggaaaagaaagggaggagttgtaaattagggctataagggatacaaatactactacatataaaacagtaagtgacaagaatgcatgtatagcacttatagtcattgtcttgtaataacttttaatggagtatgatctgaaaaaattctgaattacagtgctgtacacctgaaactagtaaacagatataatattgttagtttataattcagatttaaaaagaagaaataaatacataagtatgtaaatacagccatgctaatttgtttatgtgttatccatggctacctttgcattagaattgcagtgttgagaagtttccatgtaaatataggatctgcaaagccgaaattatttgctaaattactctttactcacccctgtctcctgagtgcaacactaggacagagtacaatgtacagaagtactataccatagatgatacaatatgattcactcatcagttcagaatgctttttatcaaggtattttgccatacaagatgccatgggataagtcaattaacaaaacaatctcacaagttttagaaaatatcagctagatatgcagatttattggttcttattagagttgtttaatgttaactcaactctgttcaattagttggttcagaacttcacattattatcttttt

SEQ ID NO: 52628 - DNA, 2998 bp, Bovine  19866881240287
  misc_feature (1)..(1): n is a, c, g, or t
ntttaaaatatgaagttttaggaccatttttcaggcctctttaattcagctacagctctggggccacatgggcttcccaggtggcactagtggtaaggatctcacctccccaatgcaggtagatgtaacagactcaggttcaatccctgtgtcaggaagatcccctggagaaggcacggtagcccactccagtattcttgccttgagaatccgcatggacagaagagactggcaggctacaatccatagcatcacaaagagttggacatgattgaagtgacttaacacacacactcactagggctacatatgatggaatagccgtggccccatccttgagagcctcagatgattacaagatgaaaaaaatgggaactatatttaattgaaaatggggcatcacaatctttaagtgtaaagaccgcatgtcctagatgatttgggtgacacaatttcaaactccacatcttttgttagttcatatagatttagggttcgttattgccacagtaatacattatgcaggagttcaagaattgcatgatgaataaagatcagggctgccaataagcctacctgaaggaggttgtggatgtcctagctttagaggatgaaataggaataaatgaagtttatgcagcaaagagcaactttcattacaagaccaggccagaatcacagtctgtgtaaacacactagaaatgaaacaaaacagaaaaatgaacacaacatccctaggtctccacacctaatttttggtggagagaataatggtaatagggatgaagatgtggttagaggcgtagatctccatgtacatgttggtgatagtaggtatagaggaaggagtagaagtggaaacagctagatggtgagacacacttaaagtcagctctgggggaaatagtatttgctgtttcaaaaggaaatagatatcactttgataaatagaagttcttcctgtgaccatttgaggtgttcattaagtttttcttctctctcttcaagtccatccttcctcacccagtatagacatgtataatattagctattccattagtcacgtatggatgtgagagttgggccataaagaagacagagcactgaagaactggtgtttttgaactgtggagaagactcttgagagttccttggatagcaaggagatcaaacaagtcaatcctaaaggaaatcaactatgaatattcactggaaggactgatgctgaaactccaatactttggccatgtgatgcaaagagatgactcattgaaaaagaccctgatgctgggaatactgagggcaggaggagaaggtagcaacagaggatgagatggtcagatggtcactgacttaatggacatgagtttaagcaaattctgggagatagcaaaggacagggaagcttggtgtgctgcagtccatggggtcccagagttggatatgacttagtaactgaacaacaatacttaggttggccgaaaatgtcattcaggtcttctgtagcatcttacagaaaaccccaataaacattttaacccacccaatagaagcataggggagatgaggcaagcttacatcctccatgtacaactaaggtccaaagaagtccaggttttccagggctcttctttttcctataactgagctttggtgggatgctgagttgtcagctaccaatgctcctgttgccttctggatacacacttagcctcaattcaagctgatatgggaaacaccctctctccagccagaacgagggcttccctggtggctcagatggtaaagaagctgcctgcaatgcaggagacccagcttcaatccctgggtcagaaagatcccctgaagaagggaatggctacccactccagtattcttgcctggagaattccatggacagaggagcctggtgggctgcagtccacggggtcacaaagagtcagatatgacccaatgactaacacttttactttccagccagaatgaattctcagaagatgttgcagttataaggctacagaagacctaaaaagtctggccatttgttacttatacagagaataattatatccttttagagttttttagggtctcttagtttcttacttttggtccctgtttgctttctcttgaggatctcagtgcttctttgcccagtgtagcggaacgaatagagaactgtgctagttatgttggcatgcactgtccctttcaatttatttcaattgtctcaataatctgtagagtagatattcttatcccaattatacaaataaggaaactgaaatgctagtgtaaaagctcaggtcacacacccaggaagaactagactggcaatttgaagcttagtgtaactgatcataaagttcagtgatctttctgaaaaataatgcctcttctcagagaatagagttctggggtggggtcaggtcttggggagtactgaggaataatgtatgctgagattaggaaagagtgctgataaatgcaactatatttaaaaagccaaaagggagggatcatcagggctattgactacagccaattatttgtatttctgtgtctttcatttcaattatctacaatttctgggccccaggatcatgcacaattgagttttattagatagtgagttttattgactagaagtagacaatatggattttatgagatagaaatagcattgtaccagaccccttgctgggcgtattttattaacagctagctttctgaagaagagagtgccatataaaagaacccattgttgtgttgtttccaaactaatatttattagtagattgcatagtttctgtctggaactcaagttcattaatgtaaatgtcagtcaaggcttactgatattttttgtagttgttcttttccataggctaattagtctgggaaatatttcttaattatctcacccttctttccctttaatggagacagtcaccctgtccttggagttttttttttcccttttactccaggaacagaa

SEQ ID NO: 52629 - DNA, 872 bp, Bovine  19866881402005
  misc_feature (1)..(1): n is a, c, g, or t
nctgacgtttggaaagacactcaactgtccaagcgtgttcaattgtgtctgctctgagcacaggaaaagggggaaaatgctgattggtgtgtttctatagctctaaccatcccaaaagttagcagagctcgaaggagccagcccctctggattttctgcccttcttcccgaatcggaaagttcgggggagaagggaagattttcttgcctcagcctcccgccagctccgcgttctctacctgcctgatcttagcagagcttctcccgggaagggtccccgattctggctgtaggaatgggggctgatcttccagacacagagatgctcccagccactgcactcggtgacagcggttcctttctgaatgcggctgcctcgctccgatttgcagtatgccctgtgcctccttatccatggctttcagctctcccctaggcagaaggctctagttgggataccttgcaaccaatggtcatctgtttaatagggttgggagttttggcctaaaagtcatgggccgatgtagtcaaacgacaagatcaatggctgcccctgttataggagaaagagctttgatgcacactccacccccaaaatctttgtgccaaagaacacataatgagtatgcactaagtgtacactgccatccaagctctaacctcggcaagtgcggggcatttaatttaataggcaggaaagctggacacctggggatccgccacctgcactgtgtatttaaagaacccagttcgtcaaacttgaataaattgctggagccatcataggtgcaagttcaattgctcaactgcttctctaggcagagaaagggaagttcccccacctctggaaactcctaaatgaaggaagaatg

SEQ ID NO: 52630 - DNA, 2437 bp, Bovine  19866881552797
  misc_feature (1)..(1): n is a, c, g, or t
ntccattttataggtagtgaaactgaggcacttaaatttctaaattatgaactcaactgggttgaaactaagtcacattatcttctgactttaagcccacatggagagacttacttgacaaaggatacctcaagatcactttatctccttaaactacaaatttaaattacttggataaactttaatacattttagcacaatttcttctggaagaagaaaagagatataaaaatatatttgaagaaatgaaaacatatagatgatttatattttatgtatatatatgttatgtatatatatgtttatatgataggaatatgactagagatctcttcaagaaaattagagaaaccaagggaacatttcatgcaaagatgggcccaataaaaggcagaaatggtatggacctaacagaagcagaagatattaagaagtggtagcaagaatacacagaactatacaaaaaagatctgcatgacccagataatcacaatgatctgatcacgcacctagagccagacattctggaatgcgaagtcaagtgggtcttaggaagcatcactatgaacaaagtggaggtgatggaattccagttgagctatttcaaatcctaaaagatgatgctgtgaaagtgctgtagtcaatatgcaagtgaatttggaaaactcagcagtggccaaagggctggaaaagttcagttttcattccaataccaaagaaaggcaatgccaaagaatgttcaaactatggcacaattgcactcatctcacacactactaaagtaatgctcaaaattctccaagccaggcttcaacagtacatgaactgtgaacttccagatgttcaagctggatttagaaaagacagaggaaccagagatcaaaatgccaacatctgttggatcatagaaaaagcaagagagttccagaaaaacatttacttctgctttattgactatgccaaagcctttgactgtgtggatcaccacaaactctggaaaattcttggagatgggaataacagaccacctgacctgcctcctgagaaatctgtatgcaggtcaggaagcaacagttagaaccggacatggaacaacagactgtttccaaacagggaaaagagtatgtcaaggttgtatattgtcaccctgcttatttaacttatatgtagagtacctcatgtgaaatgccagtctggatgaagcacaagctggaaacaagattgccaggagaaatatcaataatctcagatatgcagataacaccacccttatggcagaaagcaaagaaaaatgaaagagcctcttgatgaaagtgaaagatgagagtgaaaaagttgggttaaaactcaacattcggaaaactaagatcatggcatcattgcctcatcacatcatggcaactatatgggtaatcaatggcaacaatgacagactattttggggggctctaaactcactgcagatggtgagtgcagtgatgaaattataagatgcttgctcctggaagaaaagttatgaccaacttagacagcatattaaaaagcagagacaatactttggcgacaaaggtccatctaatcaaggctatggtttttccagtggtcatgtatggatggatgtgagagttggactataaagaaagctgagaactgaagaattgaagttttttaactgtggtattggaaagactcttgagagtcccttggactgcaaggagatccaaccagtccatcctaaaggaaaacagttctgaatattcattggaaggactgatgctgaagcccaaactccaattctttggccacctgatgggaagaactgactcatttgaaaagaccctgatgctgggaaggattgaaggagggaggagaaagggatgacagaggatgagatggttggatggcatcaccgactcaatggacatgagtttgagtaaactctgggagtttgtgatgtacagggatgcctggtgtgctgcagtccatggggtcgcagactcggacacagctgagcgactgaactgaactgaactgaactgaaccagtataaaaggaaagtagaaacattatagattcacaaaagggtttgaatcaaagacaatgaagttctttgactttatgtcatggaaggttttgttatagttccaacgatttgaaagcatttgttttctaaaatatgttaactatgttggaatatgtattttcatcctctccgttgtgggatgggcaggcagacttctaagaaacagtttcctctcagtcctgttttcctctattaatgtgacccaaataaaaactcagtggaaaccaggacaacatcatagcaagctcattatcagctgtgtggaggtgggggatttgctgtcattactatgggaaggatagatgctaaaattctgtcttttctaaagaggaattatacagcaaatgtgaacaa

SEQ ID NO: 52631 - DNA, 904 bp, Bovine  19866881818754
  misc_feature (1)..(1): n is a, c, g, or t
ngaagtgggagatggtagagctaaaagattgtcagcaatacgagacagaagggcaaactgcaatttcactcactcctgaagttgatggcacaggttctggttccttcttgaaatcagaggcacatttgcaactggaaggtttgtatgcagagggctcactatacataaaatgcatatctgtgtatcttcacttcatgcagctgtaaggcactgattggcctgattctagttgacctctctcaactcaactctccttcctggctgtgcaggtagccttgcatttaatgttctaattgtcctgaattcttgacagttccctgctcactttgctttctcattctttggtaccttctttttgtttatgcattttcctctacttaacccagcatcaatctcgtgctcagttccagttatcctttagaatgacttcagatgtcctccagaaaaccttacttgactctccctccccgagtctgggctagatttccctgctctgtaggtccatattctcctcttcatttcttgaccgctgaaccaatgccactattctaaaaccatctgtttgttctcattttttattcatcggcaaatgcccaataaatgtttgagaattgaccataactgaggtagctctcatggccctgttgagaggcactcaagaatggtcctgcatactaataagcaaaaaaccaaaatccattgtgcaaatgtagttgtgaggcaaagcaaaaccgaaagtcatcagattcacccatcagttgaacaagaaacatataattaaggcagtctctggatatagtcccaatggcccagatggtaaagaatctgcctgcagtgctggagactggatttttatccctgggtttggaagatcccctgaagaagggaatggctactcactcca

SEQ ID NO: 52632 - DNA, 751 bp, Bovine  19866881992693
  misc_feature (1)..(1): n is a, c, g, or t
naatggaagtaagaatttcttgagaagggagcaggaagtatccgcctgaaattttctaaagtgtattactgaactctattatttaaagaagcgcctatctttactccacgttcatagtgaatgtgaaaattgaggtaactttaaagaagaaaggagagaggaagagagggagagggggagacagctagcagaatttcttatccagaataatctataaattgcttcattctgttttatttgggtttctcataactggctttaccaagagaaaacttctgcaagaagcaaaaattaacaattccaacagagcagtgaaactttaagaagtatagctaatggagaagccatacaaaaataatgagctatgagtttcaatcattataagactaatgccacatccttatgacagaaacactaatcaagtttagaacatccggtttgtttctgatttttttcttaagtaaccaaattagtcacccatacaatattaaatctcctgttcattatccataaaatgttttgctttatttggggagagaagttcctgaaattaaacagagaatgacacataaagttataactagttttccagtaaatgaatgtcttcgagtagcatattttttccttccttaagcacagttggcctcatacacatcataattcctgcagcaaattcaattttgatactcaaaacagaaacattcttacaagttttattggcctatattatctagtgcaattttctatcttc

SEQ ID NO: 52633 - DNA, 1007 bp, Bovine  19866880410653
  misc_feature (1)..(1): n is a, c, g, or t
natggaggagcctggtgggctgcagtccatggggtcgctaagagttggacacgactgagcaacttcactttcacttttcactttcatgcattggagaaggaaatggcaacccactccagtgttcttgcctggagaatcccagggatgggggagcctggtgagctgccgtctatggggtcgcacagagtcggacacgactggagcgacagcagcagcagcagcagcattcccatccattttagttcactgattcctaagatgctgatgttcaatcttgccatctcctgtttgaccacatccaacttacctcgatttatggatctaatattccaagttcctatgcaatattgttctttataacattgggctttacttctaccaccagacatatccacaactgagtgtcatttcagctttggcctagtaattagtaattgccctcctctatttccccagtagcatgttagacaccttccaacctgagggactcatattccggtgtcacattttttgccttttcttactgtctgtgtaattcgctaggcaagaatactgaaatgagttgctgtttcctcctccagtgggccatttttgtcaggactcttcactaagacccatcagtcttgggagtccctactcagcatggctcatagcttcattgtgttatgcaagcccctttgccaagaaaaaactgtgatacatgaagggaatgggggggattacttattagctaatcctgatagctaaaacacaattgcactagattctgagtatataaaatatattaagaaattcagcagatatttaattttgatacataatttgcccttatatctgatgaaagtgaaagtgaagtccttcagtcgtgtccgactctttgtgccccatggactgtagcccaccaagctcctctgtcaatgggattctccaggcaagaatactggactgggttgccatttccttctccaaaggcattatatctgatagaacagtccatttcaaatgtt

SEQ ID NO: 52634 - DNA, 3030 bp, Bovine  19866880567542
  misc_feature (1)..(1): n is a, c, g, or t
ncatggaaagctgcctgtattacttttgattcttctcttttgatttttaaatcctagagtcaaatcatactagagacagatgcttgctattagtagcaggcagctatttggttcgttcatttatatccaattgtcagtcatcttctggttataatggatcgggttttattctaattgaaataagtttgtctgtaacagaatagagaatatcctgatactgctgctgctgctgctaagtcacttcagtcgtgtccgactctgtgcgaccccatagacggcagcccaccaggctcccccgtccctgggattctccaggcaagaacactggagtgggatgccatttccttctccagtgcatgaaagtgaaaagtgaaaaggaagttgcttgtcgagtctgactcttagctaccctatggactgcagcctaccaggctcctccatccatgggattttccaggcaagagtactggagtggggggcattgccttctccaatcctgacaataccatatccttattagtgtttttattctagctgatgataccctgtttcccattatatgctgtactattattatattctgataacagatttgtttatcttgctccttatagcttactgtgaaacaattcagttaaattattaataattataatatttcaaacacaaaaagattagagaagataatctatatacttaaaatatattatatatatacatataatttcagagtaagcataaggacaaaaaatattaacagagaagaaatcatagccaggatttttgccctgcatatgatagctagagaatattgccctctgctgttaaaaatttgagactttccagtagaactgattgaactctagtagagtttttaagaattcttatctttaatattcagaaattcttctcataaatggttttattcagagtaggaaagtattaccaacaatgataaaaagtcagataatgtgtattttcgcatttttaaacttacagagatcatgctctatctctttatgtacgaggtttcattgtactctagtatacatttctaatcattttggtgaagtacaacaaaggttaatattatttcaaaatcctattagtgtgttgaaccaaactcaaatatattccaaaaaagctttagtgttggcctttttaagaagaatcttagcaagctatgagtcaagtgggtaaaagaccttaagctgaatatgtgtagcatccaagttgttaagttttctctcttccattttactaaagaactatgtaattgcttgatgttttgagatatgatattgccaaacatttatacgcaaaattactgagaaatcagaaaatgatagctgaacacgtgggaacaaatctttctgcttctgtgctgttactgaatttgaggttgttcaagcttgcttggtaatgtggcagtaggggaagtgaaaatgggatctcagttccaacagcaatttaccagaatgattacaaaagtctaaatgatggcacattagagttgacatgtttttgactacaatttaacacagaattgcaaagagtttgtcctgtattgactccaaacttgaataaaagcttccggaatagtcagagacaaacatctgctcatttagcaatcttcaggatcaatgtaaattcattggtcataccaagtatgtcatacatcaaatgtgaaaacatccataattatgttactttgcattacatacatctggatctataatgaattcatttcttaagaattagaagaaatagacaaggtttctttcccacctctatattttgtagatgcatttttaagcccatttatttcctatttttactacctaaaaaagggatatttccaaagatgtcgaggacactgatttgcctttaggaagattctatgtggtctgcttcacactataatagtaagaaatctttactgtcaagatacttcctgattgcattttaatctaagacatgtctgatgaattacatgtatgattcatttattttagttaaggaaacaaggtgaacagtgaatttgttaaggtcacagaaaataagcggtagtgacaggacttaaactcacgtttcttgtttcatagtgttctttattctgagagtttctccatagcttaaatgtaaaatttgctagaaagaaataaatactttctcgaccagagttttatttcaaaatttagctcccactagggcttttagggaggcctggcttgctgtaattcatggggttgcaaaggtcggacacaactgagtgactgaactgaactgagagcttttatctgaatatatatatatatttttagtttgggtctactttcagttctttatttcttcaatgttggtaaatatgagctgcattcactctagaaataaagtcaatatttgttataattttgcagtaatctatggaatacatattttatattatcagagttataaactacaatttgaaagaaattctattcccaacaaagcttacaatttcactgtggcaacagagcataatagagaaaaatggatatgataaccactaaaagagacttgcatatgaatatatgttaaaagaaaaagtagtgctttctatgtttgcttgatattaaaaaatcacttttgataatgatgcctttccttatacatatttaattgacaaaacatttttgtaaatggtttaaatttctgtttatgtgtggtgatgcttcaatcgctaagttgtgtccaaattttttgtgaccccatggactgtagccagccaggcttctctgtccatgggatttcccaggcaagaatactggagtgggttgccatttccttctccattgtatcatcccaacccagggatcaaacccatgtctcttgcattgcaggcagattctttaccactgagccatcagagaagtccttcataaataaaatttaactttttatttgttatgacaaaaagtaaatttttattacaattgcttttaaaagtaagattgatcaaaaacacttaattagaaattttcaagt

SEQ ID NO: 52635 - DNA, 1615 bp, Bovine  19866880804432
  misc_feature (1)..(1): n is a, c, g, or t
nagcctcttgatgaaggtaaaagaggaccatgaaaaagctggcttaaaactcaacattcaaaaagctaagatcactgtatctgttcccatcatttcatggcacatagagatgggaagggaatggaaacagtgacagacttcttgggctccaaaatcactgaagatggtgactgtagccatgaaattcaaagatgcttgctctttgaaagaaagttatgacaaacctagacacatattaaaaagcagagacatcactttgccaacaaaggtctgtatagtcaaagctatgattttctcagttgtcctgtacggatgtgagagttggaccattaagaaggctgagcaccaaagaactgatgcttacaaattgtggtgctggagaagacttttgaaagtcccctgggcatcaaggatatcaaaccagtcaatcctaaaggaaatcaaccctgactattcattggaaggactgatgctgaagctgaagcttcaatactttggccacctgaggtgaagagctgactcatttgaaaagaccctgctactgggaaagattgagggcgtgagaataagggggtaacagaggatgagatagttgtatggcataaccaactccatggacataaatttgagcaaattctgggagacagtgaaggacagggaagcctggcatgctgcagtccatggggtcacaaagagtcagacaggactgagctactaagcaacagtaaagctaagccaaagtagctgacaaatttcttaaagagtccgtaggagcatttttgttttctggtcttggagaaataaattgcttgtattttttattttgacctcaatctctcttttttaagcaaaacctccattctggataacatctcaaagagcactgagcagtgagaccaagcaatgagaattcccattgctaatagttttgattgttcaccattgttatttttggaaaggacttatcttcagtcaaagtcaatattaatgtcaggagaacatggaaatgtccttttctaatgtatgtagtcatgtatgacaaagggaaggaccccaagttagacattgtctctgggacaattttaatgaatcactccactgatgaataccacattatgaagacacaaagcaaattcctgtaaggaaactggagtcaatattgatctcttcctgactgtcctcaatgtcacaccacgctgacatttgaaaggattgtacagcatagttttgaatgacagaggcaacccagccatgtcagggaatgccctgtgtaaattggaggtttttcataccacattctctgttaatatttgatttcaggcaatagtaagctggccattagttaggtttatgaaaagctgactgcacagtagtcttgagagcttgccttaacttattacttgtattgtcacaattcttctgccattgactgctttacaataagcctgaactatattttaaattcttctgatttcagacttatggtctaagaactaaacctaatgaattcttgcagcaagcacaatttccttttactatttggaatgcacattgaatcattcagggattctgccttctaaacaaaagagaaaatagagattgtaaatagggaaat

SEQ ID NO: 52636 - DNA, 1420 bp, Bovine  19866880978593
  misc_feature (1)..(1): n is a, c, g, or t
nagcctctgtacttctctctggcacaggctttgtgtgtcctgggcacttagtgaatacttgtcaatgatgctattctgatctgtccatcacccttcagacaaatttcacttcccagcatctctctcacatccaagaaaatcattatgtttacaatttggtattataaaatgattgatccaaagcactttaccaattaaaacacaatttgatgcaggaaaaggacattaaagaatgagtttctgaggtaaaaccactctcaaattacctacacttagattatcaatggtgagaatctgactgaatatcaattgaacttttgctttttccagcagagagactaacataatttctaaaatacatttataatctgtcataacacagcactcaactttcttgagccatataaaatacctgctaatacacaatcccaaataaatgttatttttagaactgaaatttttgcaaggtttggaagcagattattttggtgttcagccacacagagtgataattaccatttataactaatgctattttcaaggcctttaaaagaagaagaaaatgtatcaacatagtctgctcttaatactcatcttcatctaaaatgcatataatattttcttcataccgttttctgtttcttaggcaagtagcctgaaatcacttggcccgcttgtagatatttaacaattaaaaagacctatttaaaataaaattatatcttcacttccaacttctttgtgactagagataaatttggaatgcaactaaagatggctccttaagactggcatatgtttatgcaagtttaggataatttttaaaatgattttagctaaataagcgacagaattttttacaaacttctattaatttatgaatcacgaaaataactctttagcttggtgcttaaagatggtttttatctttacaattccaatggaaaaatccaaataagttaagtctgaggaatttgcagtatcttaagagagtatcagaaagcacattgagtgagtaatcatttaatcattaacaaaacacaacagtattgttttgttgaaattgattgaattagttgttttaaactaacaggaagagaaatccagttgttatgaaatatgcaaacagtaaaactgagtaagcatatctttaacttttcattcacagtaaccagaatttatttatttactatatattacacaagccataggttaggatatagcaatggcacttcactccagtactcttgcctgggaaatcccatggacggaggagcctggtaggctacagtccatgaggtcactaagagtcggacacaactgagtgacttcactttcactttcatgcattggagaaggaaatggcaactcactccatgttcttacctggagaatcccagggacaaaggagccctggtgg

SEQ ID NO: 52637 - DNA, 1384 bp, Bovine  19866881938315
  misc_feature (1)..(1): n is a, c, g, or t
naatctgggagggaaaactgaatagtaaatctttctctttctattcaggaataaaactcaaggtttttcttgacctttttctagttttcctttttctttttctaagaatatattgaatatcagtgtggaggtcgatgggatttttctttacccataaactgagagattaggccattgtgattctagttccatgaagatcattttctactagactcctctatagcttctatcctatgggctgcagagctatgaaaatcaaagttaacgcttcttggaattgaagaatgcccacagggcaaatgcagcttcactgctctacttatatttctggattctaactttcacttagtatttgacctctgagaattgcttcttttctttctagttaaaggatgtattttaaaatagactgaagagtacatccaacatttttagttgttttaatcaggagggacattcaatatatcctatctcctaaactattagtgacataagtctaatgctctactatttgaatactaatttactttcaattataaatactactaaatcttggtgcacatctttaaatagacttataagaatagcacaataagtgaaatgattgggcaaatagcatgcatatatttaaggctcttgattttgtactgataaattgaccataaataagttttgccaattacacagagccagcaacacaggataagaaactaaataaaattattattccaccattttacttttgaaatacagaaaactaatatgatcttaatactggaaatcttattttgggaagttctttggtgtcttggtggttaggactccaggcttttactaccatggccagggttcagttcctggtcggggaactgagaccccacaagccatgcagtgtgaccaaatgtgtgtgtgtgtgtgtgtgggtgggggggctttcctggtagctcagcaggtaaaggatccaccagcaatgcaggagactctggtttgattcctgggtcaggaagatccctagaagaagacatatgctccccactccagtattcttgggcttccctggtggctcagatgttaaagaagctgcctgcaatgtgggaaacctgggttcaattcctgggttgggaagatcccctggaggatggcgtggaaacccacgacaatattcttgtctggaggatcaccatggacagaggagcctggcaggctacagtctatggagtcaaaaagagttggagatgactgagcgactaagcacaacacaatatatatatatatgggcttcccttgtggctcagctgtaaagaatccagctgcaatgcaggagacctgggtttgacccctgggtatacatatgtatatatacataatacataaatatgtatgt

SEQ ID NO: 52638 - DNA, 1757 bp, Bovine  19866880352371
  misc_feature (1)..(1): n is a, c, g, or t
ncccagtaaagggatattcttcccctgctggtcttcttcttgtctcatgccttctagtttctggtcaagtcctatattcagaactatttttaagactccaggctagatcctctacctgactttgagactgtaccttttatgaggtcatctctgtctttcttccggaaagtgcttcttggaggagccagaaggtcatgttgtttggtagacgatggtgaggtaatgctatagatccagaatgctcttgtgttgcttccccgttctctgctgtgaagtattcagctggcttggtttcatttctattttcctggcctgattcagctcttctgaagcaagcataaaaattgctatttctttcttagaccatcactcagcttatgcttgccttttatcccttttttcttcttaagtgctagaaaattttgcttcaaatatgaagtcaatataacatgacctgtatgcataaaagctgtaattaaatcactaatttaatatttattgagtgctgacagtgctcttgggttagtatgaagtataggaaaacagacaaaatctgtttgaggtcacagcgagtgagttttcttccatgttacctttggaaggctcatcagagagaaactcagcagtgaaacaagttttgaaacattaaagttggatgctggatctttaatatggattttattatcactgacccaccaggtggatagtttacagagctgagtgcatgctagtcacaaactatcatgagcaaacctctgtgccagctgataagaggatcagttcagttcagttccgttgctcagtcatgttagactctgcgaccccatgaattgcagcacgccaggcctccctgtccatcaccaactcccagagttcactcaaactcacgtccatcgagttggtgatgccatccagccatctcatcctctgttgtccccttctcctcctgcccccagataggaggatacagagatgtaaaagttgtaagcctaaggagaggttgcaaatgtgggcctgcaggctagagtcagctgacagatatttttattctggtctgcagtattgtttcttttttctttttttgatgagctaatattttaaatcttggagctttacatttaaaaaatatggatctcttatttttcctgacatattgtaaggcccatattcccacgccggagaaaatggcaggagctgaggatactgccctctttcggtaaaatattcattcaccaattcttcacactctgctacaagcttcccttgtcagcacagagcaggaaatgtaattgcacattggagacaccatgacttctgttggggttgtgaggtagagatcaatagaaatgcaaagacaggatgaattaagaaacatttgagccaaatattgaataaaaatcaaaatttaaaaagattgagatggaagaacgcattctcggtggacggactgatggaaggcagggcccagcagctagcaagtatggacagtgcagatagagatgcagaatctaaatggtgctgctttagcgaagaagagaatgatgagaatgtgtttctgatcttctggacttcctgactggcaatatgagtccagaaagtaccttgcttgaagcaaaggagaacctgagatgggcagaagagatgcttttaagaatcctttcaggaatgaaagagaaaagatgtccatttctgctactaaagaatttttttttcctgaactttaaaaataatgccagttcattgttaaaaagtctgta

SEQ ID NO: 52639 - DNA, 1534 bp, Bovine  19866880408595
  misc_feature (1)..(1): n is a, c, g, or t
nctcctggaacatttatgtctctcaattgcttttactttctctctgctctgaggcttagatttagaatgtagactgggtttcagtgacagatggcagaggataatctttcatttcgtcataaagttacccggagaggggcttgaaaaaaaagacctttctcttggaaaagtggtggcttcatatttccttgcttttgatgaagtagaaaatgcatctcttttctgattttcaagatagagaacatgcctttccttttaagctaacccaccctgcaaaattctaagttgaggctgccttctccaccctgttttatttatgctttctgtgagtgccttgcacattttaattaatgatgatttgactgcactagagccctaaaaataaataagaaaatggggctattaaagataatccaataaacaaacccaagaaaagctatcttccactgttatttgttgatatttttacaggggacagaagatcaaataaaatgcagtgctgaaattaattttcaaggttgataaacaaagacaaaacatgtgatttttaagatgtcttttaaatcttatactggctaagaaatcaatgggctataatcagatgaagcatttgttttattctttgagcaagtttagccaaagacggttgtgatttaatgaacaaagaatatgcgtactaggtgttagaacaaggctaagagaatgtcactgagaaccagtagcttctgactttaatcactagaagacaaagaagccccaaaacacattatatactggacaagatcctgggtattttatgattacctaataaaaatgagagttaagatggttccaaatatgaaaggaggcagatggttagttcagattgaagggaatgttgaagaataaaaatcttaacctgggctgatgcctggacatccaagtcacaacatgttcaggtaaaactcttcacatttgggcttcagggaaaagtaaaagggcacaagatcatatgaagaagaatgggcctctatgtggctttgaataatagtgatgcatattctccttcaggtagcttcacatgatggtaatgattggagaatacatgtatgatatatgaagggaaacctggatttcattagactccagatcagggacaaactattattgcatacgttaacaatctctcctaaactgccctcctgcattgaaagtctaactccagagaagctgatgagcaagaataacctctgtcaactgaaaaaaaaaaaaaatacataagctaaaagttgagaattatgttttatttcggatccttactgaggactatagcccagagaatcagccttccatacctctaagccactgttctaaagaggtaagggaagagccaggatatatgggagttttagatgggaaaaaagctgtagtcaaataaaaaaatatccctgctatcaataattatgggcttcccagatggctcagtggtaaagaatctgcctgccaatgctggagatgcaggtttgatcctgggtcagggaagatcccctagaga

SEQ ID NO: 52640 - DNA, 1571 bp, Bovine  19866880475137
  misc_feature (1)..(1): n is a, c, g, or t
ncagctgtggatctgttgtgctcttatcacagatgatgacttgaacttggtcccaaggacagtaccatggccatcgtctagaggcagtgaccaacatgcaatgttcgggacatggtaaaggttgaaactcttacactgatagggaaaaatagaagccagaagcaaagatttttttccccagagtcaatgagaaacccttgaggaatttatgcatggatgaactctggtatatagaaagtgaaatctgaaagcagatgacatgtgtctccattctattttgcttctacttctcaagctgttgactcctctgtctaaactctgcattcttgcccctcaaggcatgggtcttatttcttctgataatactgcaacctgaatccagggcctttcctaaatcctaaagagcccttcaggtatatcactgttttcaaataggtttgctaggtgtaatatcttgagattagttgattgggaagaagataaggaaagaatggtgacaggacaagaagacatgactgctgccatgaactgacagtgtcgagagtagtattatccttgagttttgctgagttttcatcctccaataagtagtcttttcatgtagcaaaataattaacctctttatatcttacatgacagaaattaaaatcttgataagagctagacaactaaagaccagaaaaatcttttccagttagaccatattctttttaagatatgtgttcagataaaaattctgaaggcttttaatctcttcactccctgacctatttaatatcaccctctcttactttaataatattaacaaagagagtagccctgccagtcacaggttctggagtcagaactcattatatattagcaatatcatcttgagtaaattacccttttatttctgctattctatcatcaactgtaaaagtggctagcagtaatatagggttgcattgtgcactaaattttttttaattagtattaaaaattatcaccacaaaagttagctttttttgttatattattagctaaaaagaaacaacacaatttgtgattcaactttaatcctttaaaattcagttttttaggtactgattaatgctaattcaatgattgttaatgcaatgacttggcaatgtattgttactaaagtcctgtattaaaaatttttttttagtttccttttgtcacttaagaaaaatgttttatataaataaaggatttctccactttttaaacctatgaccactcacttcatacgcagtctgttcatacagtaaatatagatactatttaaattgaaaaacaagcaaggaaaataatatgaaaagaaactccacacccagaagaacaggctcatcattattaggtgactattgagtaccctttatgtaccaatatttccccagatgccctggaaaccatattttcatgacatgactatttgaaggtggaataggggttaggcactcagaatggtgagaaacaaagaaacctggcataaaatgcaaatagtgttacaaaactcaccttatctccttcttccacctcacagagtttctcctcagttgcaggat

SEQ ID NO: 52641 - DNA, 926 bp, Bovine  19866880546116
  misc_feature (1)..(1): n is a, c, g, or t
nccctcctcctctctttataataccattgaaaggctgtatgtagcccattgttagctccattctactcataaattaaatccttaaaacctcttggctcattatctaaagagtcagttccagaatattaggtttactgtgaccctgtaatttactagatttgtaccttcactaagcaacgttagaagttaccatacatttgtcggcaaacttgtgagaacagcaataattatttaaaaacaaaagctggtagattatttcagaaaagaatatgatgacaagagcactggatcttaagcaaacagttgcttgctatggacagtttataccgtaaacaatctaacttgagagataagtattcagccaactccattagcacagtgacctgatttgaagctttgttggacgttaatgaatgtttttaatctacatttgcacagacagttcttctcttggacaagcagcagtaaccgtcaataagcagagagcaaatggataataggtatttctaaagcttcaggtgtgatcatcagctttccctcactccactttagaagagggtaaatctcaccaacgatgccaagtcctcagatgacctgacaagatttcacctggaattccaggcacagatttgttttactgaggaagctcattccagaagctaggggcaaagtgagaggtccaaggccccagagctaaagaattaagaaatgttttttctttcgctaacgcaaactgcaaacggttctgcggtatccctcctgagaggccgggacacctctggagagaaagagtacgcaaccatcaggggctcaactctgccctcagcttgcctgttattgcttttcccatctcttcagggttgtcagagccactcaagtaactaggatatttgaggtcatgtaatgcctggagaatcccagggacg

SEQ ID NO: 52642 - DNA, 784 bp, Bovine  19866880569114
  misc_feature (1)..(1): n is a, c, g, or t
natgttggcagctgaacacctgaaaattgtgatctcaaggtatcacacttttagatccatttgcattaataaaaaatttttttttcaagctcaactccttaaaaaacttcttagccaccaagcactgtcttcaatcaatatggaaatttatggcaaagtccttaaaatctgcttcctaaacattgtcccttgtcatgcacaaatagaatctaagctgggtttttttcttttaatcatctagcaagtccctctatttgcttttcactaagtctaatagttatgcaataattgaaaataattttaaagcagtccatctctaatgaacgaaagcacaatgacaataattaaagtttattaggtttgtaaagagcttaacagattatcttgtctaaaagcactttaaaaatgtttgtttcctgtaacatatggggcagggagaagcagctccccctatagccacatagcaagtccatagtgagtctagtcttttctttactttgtgcaaaggttctcatacaatcttacttgcaaaattttgtatcttttttctttcattttatctaaccacagggagaactgtctgggaattgaacgttcctttgccctgctgtatcctgagtgcttggtctgtacaaagtaggtaacatcttgatgacactttaaagaacaggtggtttttatctctcagtcctgtttcccttttataatcttaactttcagttgagttcctgtttttaaattttccattctcaggcaacattcacactttatgaaaatagccatg

SEQ ID NO: 52643 - DNA, 976 bp, Bovine  19866880782235
  misc_feature (1)..(1): n is a, c, g, or t
nctgttatatagatgaataatttctgaggacctaatgtacagcataatgactacagttaataatattgtgtactttaaagttgctaaaagagttgatcttaaatgctctcaccacaaaaaagaaacggccattatatgatgtgatggaagtgttagctaacactgcaatagtcattttgtagtatattcatgtatcaaatgaatgtcatataacttaaatttacacaatgttatatgttaattctattttaataaagctagaaaaaatggggggatgtttctattcttaggtacagtaatttgaggtcactgcttttgtgtggagaaatatttagatcagatttaacaatagttttcatcagactatatatatggtgagaaaattaattaaaataccatctaattattatttgttacccttaattaaatgttaattgagcacaaagtaaaataagatagaaaaggataactctttttctttgctaaaaactcttaaagggtttcaaaatcccaaaattatgtacagggcttacaaatcatttttaaatggcttaaaatttttaatatggtttgaaacagtatttttcaaatgacaaatcaaataataagtcaaattaattgtccaactgaaatgtaaatgatatcaatttagtgggtttaaaatgagcatttttactactgagtccaagctcatatagcctcacaataggccaataaattgggaaatgaggtgttggggcaaggaacagaggcttattcagaaagtcagcagactgaaaagatgatggattagtgtcccaaagaaccatcaaaactgagttagaattcatgcttcttttatgctaaaaggggaggggatgtggctggttgtagcaaactacttgttggccagaccccctgggactaattgaatcctttgttctcacagctgtccacttaggtccagtcatgatgttcctctaaacttttaacaaga

SEQ ID NO: 52644 - DNA, 1351 bp, Bovine  19866880826885
  misc_feature (1)..(1): n is a, c, g, or t
nttggtcatgactttccttccaaggagtaagcgtcttttaatttcatggctgcaatcaccctctgcagtgattttggagctcaaaaaaataaagtctgacactgtttccccatctatttgccatgaagtgataggaccagatgccatgatcttagttttgtaaatgttgagctttaggccaactttttcactctcctctttcactttcatcaagaggctttttagttcctcttcactttctgccataagggtggtgtcatctgcatatctgaggttattgatatttctcccggcaatcttgattccagcttgcgcttattccagcccggcgtttctcatgatgtactctgcatgtagtcaaatggaatatgttgatttttcaaagtgaacatggtagagcaaagtataaaggaaaggggaaaattccagaagccctgcatcctcaaacgggagtccccaattcggtctactctcctcagatcaattccagtgctgaaaagtggaaaactatctaccgaccaataggaactatgatgggttagttttctattctccgatgccttgctcattccgttcctttcgtatgccctggggcaccgctaaagtgtttctcagaatggtaggcttagaaaaaaactgcaggtgatgtggtttcaatgataaatatgaaaaatgacatgtcctattaactcattcttgactatacccagagcacatgagtatattttatacttcaagaaagttccctcattggaaatccttatttctatctcctgggagcacaagcaggaaacactgccctgtggcaaagtctgccacaccctctgcttgccccacagccaagatctggaactgaaagctgcactgtctaaatgcaaagttgttcagactccaaaacacttcttgtttgaaagaaaacttctcttggctttcagagtcaccgcctgcaaaaagggagggataagaacatcacctgtttgtcgattgcctttcgtcactggagagattaataagcagatatacatttaataacatgaacacacctgcacaggattctctaccccctcgtagagagatacacacacatacaacagatacgcactttcacaataagaactggggagagagaaatccttagtgttaaagaaaaaaatgacataaagttcttgagaaagaaaataaaagtacaagaagtgaagatgaaaacagcctgctggctgggtgtaggtccataatgcatttggcttgttttccagcaagctaatactcccctcccttgaaactccagcttgtaaatatatttatagccactcagacataatacgccagatactaaaaaaatccacttagt

SEQ ID NO: 52645 - DNA, 1120 bp, Bovine  19866880852437
  misc_feature (1)..(1): n is a, c, g, or t
nccgctccgaaattgacatgaatgacatcaaagcatgctatcagaagttgtatggcatctctctctgtcaagccatcctggtatgttgtaattctcataatgttacccccacaaaatgataatttttttgcaacttcttcataaaagaagggctgacttactgtatccataaattacatatataagattcatttgttatattaagatacagagaattttcttgtggtctagtggttaagactatatactttaactgcaagggacatgagtttgatccctggttgctgaactaagatcccacttgctgcacagtatgaccaaaaaataaaaatttttaaaaagatacataatttaaagtaaattgaactttcactggtaaaatctactagtgagttctatgtagaaagactgcagatttttcaatagtcatggaaacagtttaccatacatacatttagcaatcaaaatactttggtagagatatataatgatttatgttgcaataaatattgatcagaggattagaaactttttactctaaaattttccttaactttgtcatatgtagaagatatagaatgcatgttcaagttagaaagtaaaaaagaaagacaagtcaaggagttttgaacttaatgaaagatgactatttaaattcaatttgaaaataaataaataaataaataaattcagtttgacatttatattggataacaaaaatctaacatgaaaattgagactatcgtggacttgtaaccttcactctggtgtagcaagtcagaggtgatatgaaattatattttgctatatttattctgtgttatatttcattcttggaaaataatggctttaatgtagagtaatcgagagaagtttgcaatctgaattttgaaagctattgctttcatataatcaattaaaaataccagttatctgctatataaattttattaattaaataagtgatattcttatccaagatcctaaaaaattgatatactgtgatgtatgttaagcctaatacaataattagtctacaatttaaaaatattttctattgattgtggtctcaggtagcattaagtatacttattttatcaacaggataaaccaaaggaga

SEQ ID NO: 52646 - DNA, 1906 bp, Bovine  19866880869147
  misc_feature (1)..(1): n is a, c, g, or t
nataagaatgtctgggacttccctggtggtccagtggcaaagactctgaactcccaatgcaaggggcctgggtttgattcctggtcagggaactagatcccgaatgctgcaactaagaccctgtgcagccaagtaaatttaaaaaataaaaataaatattttaaaagtatgttgcttattgctcttggaagcttattatgctggcctgcaccagacgatgtctgcattactcattgctaaaaatgttgtgtagaacaaaactgcactaggattaatttatttacaagaagaaattaaaactctacgtttggttttcacatacagcagctctttggagtaacatgcatctgaattttaagttgcaaaggtatctgaatagttaatttttcatgtgcatattttgttgaatgttttggttcaagaaagaatgtttaaagcttttttaaagacttcagttcttaatgtaactgtacccttctgcatggaaaatcataaccaacatggctgcagtagacttcttagtggtatccagcaccacttgcagagggctgctttatattaattgtacttgggtgtaggactctagtgttcttgggtgtattgcatgggctgcattatctacagcattgtacaataacaactagaagaggcagtatacttcactgatgcttgtctggtaatatcacttctgtgttataatggaaggttttttgtgatgtatgaaacttgtgttttttatatataaatgagtatagttagattagtgtcgtggtaatgcctgttttcatctgtaaatagttttaagtatgtacacgaggcactacttctgatttattgcagtgttcagtcttagtttttacttttattcttaaagcattcagttttgctttcaattttatgtaccttagttctaaagttagatctgcagatgtgtacagatagtacatatttatgtattgcacataatcatgctattcagcattgatgctatattgtattatgtaaataataaaagccatgtacagagggagactttccacttgtttattgggtttttaagccatagttagatatcctaaagggggataattagggaaatgtttgatattgaactttagtcgtatttatagactttgcatggctatattataaattttttttcatttccatccctaaacattcacatgagaaccatgagatgagtgtcaaacatctcttatggtacataataggcagtttaatcttgaagacatgaataggcacttttaggatcaaaacagtgttagaatttaggtcagttattccatctatctcccttttctttctttttttttttttttttgctttataaatggcactttaggcattacaattggtttatagcaactggcatagttttatttggggtttgattctaatgttgagatggtcccatgggcttggtctttgcaggtgtcatgtgagataacaaagaacaagagctaacagtggcatgttgacttggccaatgcaataatagctgaagccaaaaagcagaaccattacatctcagtgatggagttggaaatggaaatattcagtacttactatgatgattcgctgccacctgtcacagttctctgctgctacttttgcttcaggtgaggggatatgtatactattgaagtatgagacaaggatagtgtctcgaattatgaaggatactgaatcatagttgagctaaaaattgtggtgttcgaaggcaaacaatttttattcaaagtttaagactttgttttccttcagtgctacctctgtaaacatttgcttggtaagtttttaaatcttcaggttttgaaatccaagaggggtatattggggacaaagaagacttagatggaaagatgacggacccttaggcttcact

SEQ ID NO: 52647 - DNA, 1386 bp, Bovine  19866880904034
  misc_feature (1)..(1): n is a, c, g, or t
ntaatcctacatagtggtgctatcataatcccagttttactgatgaggaaactttcagcccaatcgagcaaattacttaagatcacattttcagcaggtaacagaagcaggattcacatccagtgcaaatcctatttaatatgcaaatctggtttgatggaaattatatgctccatgtagcgagggcttgatgtttccagcaaactgataaagactgcattcttttctctttttttggtttccttggctataccacatggcttgccagatcttagttcccctactgagggtccaacctgggccccagcagcaaaagcacctagtcctaaccattggaccaacagggaattcccaagactgcattcttatacactcagctagccatatgtacagtactctgtatagcttctccctctttatccaagacctcatctgactgatggcttagatgctaggcttttagggagggaaattattatcctgtgctcctaacagcaccttcacgatctctgtaaccagcaaaatggtgggatacactgtatagtctgtcccactggaaagcttattgtcagagagattgatacatctcttctccacctagtgattacgctggataaacctaaacatttttaaacctactgtaaaaagaaatacagtcagtgtaaactgaatgggtatttattttctgttagtacaaccctaagtatctcaagtgttctagtatcctaagaacttgtgattatattgactattgagtaatgagcaaacaagctcagttaacacagggtgctaataaagaaatactctttgtaagaaggcacttgtttaagttaaatgagtatgtaattcaagacttgatattatggggaaattattcaaaaggtcacaagttcaagcacgcactgaacaatggaaaatatgaaaagtgattgtatgttgaagcagtggggagaggtcatctgttgtatctatccaacccagtaaactattggtgagcaggacactgtcgcagtgttatcagctcttttagttataaacaaaaacttggaaatggagattttcttgtggaatcttctgatttttaaatgttagcagcaatgaattacttttaaaatattatgagagcaaaacgaagtttgttggaggactgaatatcatttgtaatcctccaggtctatgacctccggtgcagagaaaacaaatttttctcctaggaagagggtgacatctatagacaaagagacccagttcttcatgaagtcaggtgagtctctgatgtatggctaaggatggaggtaacacactctcagttgtggatgagcctgatgcagtgcttgtaacaaaaggggaaggaggagagagaaccaaatgtgggcaaccccctca

SEQ ID NO: 52648 - DNA, 1349 bp, Bovine  19866880910705
  misc_feature (1)..(1): n is a, c, g, or t
nagtgataaattgtttctttgttttttaattatttaggttccagctttgagctttggaacttttgatgtcagatattagcaataaataaattgcaagcttggcttttttgtggcattgtggttattacatgcttagattaatttggtaaatatatcagtgtacagcacttacatggcatgaatatatgcttgcatatacatatatttttatcataaataaaagacatggcactttaaaagatcaacattaattggctaatgtagtccatagattgtaaagaaatgaagctttcattaactgtttacatttacgattcaattggtgcagagaggttttcatttctgacctagatacttcaagtggcttgcttctgggaaaaataatagatagttagacaccaacagcaaaaacccatgtcctacttagaatccctaaaatgttttattttcatatgcattgttttgaaattgtatcagtaggttaagaatatagttttctaggttaaatcagaatttaattgctagtttagaaatgtcctgatatacatgtaatgcgtttcacctcaaaatattttaggttctattgcaatcctaataaattggggaccccaaggtttcagtctctgaagagtatggagtttcagaaaaactgttcactaagcaacctcataggctgccgtccatggggtcgcacagagtcggacgcgactgaagcgacttagcagcagcagcagcaagcctttgaaaacaaactcagagaaacagagagcactttcagcatataagtgcatgaaagcatatacaactgttgcttttaaaaaccatcatgtattaactatcactgtcaatatttaataaataagagccatggtttttgagttatcgttgcatgcagctgcttattagccaaagtggaacacacacacacataaacacacacacactcagctaaacatttaaacaatgcgcctaagtattttatgggcttcgtaggtagctcagtgataaagaagcagccggagacacagattcgattcctgggtcaagaagatcctctggagaagaaaatggcaacccactccagttttcttgcctgggacagcccatggccagaggagcctggcaggctaaaattcatggggtcacaaagagttgtacacaacttagcaattgagcatgcacacacctaagtgttttataaaactcctgctgctgttgctaagtcgcttcagtcgtgtccaactctgtgcgaccccatagacggcagcccaccaggctcctctgtccctgagattctccaggcaagaacactggagtgggtcgccattgccttctccaatgcatgaaag

SEQ ID NO: 52649 - DNA, 1564 bp, Bovine  19866880938011
  misc_feature (1)..(1): n is a, c, g, or t
naatttcttcttgtaaataaattaatcctagtgcagttttgttctacacaacatttttagcaatgagtaatgcagacatcgtctggtgcaggccagcataataagcttcaaagacagctcaagaccctgttggcttgatgcattttactctttaaccagttaaacaatgtgtacctttcacagagtgtcttatttgacagtttttagaacaccaattaaccaggcttacatatggcaccgaacactggtttcatagaaaggtctgattctttttatagctttcttcctgcttccaaggaacatgtggaaattaacagggtgaagtttaactatggtagaagtagactgccagtccttttctggtgtaccatttctttaaaaaaatacaggcacataacactagccaaagattataccttgattacattcccaaaggcagatatgctgcaaacatgcagataggtatttcagttattttgtttggcacgaaggaactaaattttgtccttattatctgtgtatttcaatttgctgtgcagattttcatccaattttattcaggggagggcatatacattttgtagggctgtatctatccaattctgcctgtaacaaacacccaaacatcctaaaatatcaattataagacagacaaagtgtaaagtaaaactctggagaacatcaaaaggaaaatggccatgcatctgctctttaatgttttcctacggtatattaaaataaaaacaaattatcagtctcttcacaagtagtaatttatattctctgaattttttcagccacaacaactggattctcttttctgatttttgctgcagcttctgctttgtaatcatatggacagttgtgcttgtcagagtaacggtgaagtccacaaaacaaatttccacatctggcagtcaaaccctgtacatataaaaggaagcagagtcatttaggaacttatagcaattagaagaaacaaagtcaatatagaaaaggaaccagattttcatgattctctgtaacattaaaccaattgtcattttaaattgtcaaagtgttttcaacctcttttgacatggcgagaaatacaagtaactatcttccataaactctggtagatatcaaatacagtagaaaaatcacaaagctctggagtcagactgaactggatttaaattctagtcctgctgctgctgctaagtcgcttcagtcgtgtccgactctgtgcgaccccatagacagccgcccatcaggctccaccatccctgggattctccaggcaagggtactggaaaggggtagccatttccttctccaatgtatgaaagtgaagtcgctcagtcgtgcccgactcttagcgaccccatggactgcagcctaccaggctcctccgtccatgggactttccaggccagagtactggagtggggtgccattgccttcctactatacactgactaataatgtttccacacattgtagaaggaaatgtgttgtagaagacaaccacatacagttctgagatttaaaaggaaataattaaaaagtatctagaagattt

SEQ ID NO: 52650 - DNA, 2108 bp, Bovine  19866880981745
  misc_feature (1)..(1): n is a, c, g, or t
ntcaatgtttgtaatgcaatatacttacagatgattatgcttgccttctcaaagtcaggcttagccacgtgatttattttggccagtaaattagagataaaaatgaagtgtctcactactggatgaaaactttaataatgctctgggtttttgttctcttctttctctactgctctgaccagtgatgctccagaaggatcctgttctgtcccgatctatgagtctataatgagagtaacttacaggagcagagtcctttactaactcacatttcacatggaataaacaagaaataaacttttccttttctaagtcactaagatttggggattgtatgtcattggtacacaacttagtctaccctaagatacagttttgcacataattcagggtgcaaacttgcgtaatttcacatacatgtgtatctatacgtaggcatgtgtcatttatctgtatgcacacatgtacactcatatacgtaagtgcatatataagtaaataaatttaagaatttaaaaataaatatcacacaggcatttcaaacaaatgactcaagaacattaatctagaaagagagatgccagcacagtgatatctgaatcttaaagctcattccatctttgcctgctactcactaatcagctcagctcactaagtcccttactcagacctgatcccatcatctgtcagttgaagatcactctaataccttagccttataaaatgcttttcttccaagaagatcaaagcaaatgaaagcttcttttatttagctctccttattattctagtgacatggtacagtgtcagataaattactcacatttgatcaagtgagaaaacaagatagcaaactgtgacaagactggcaggaagatacaggagacggtgttggaacaatgtccaaacccatcttctttttcactgtgtgttctctgcatactactatatcctgctctgatagagacatgatcttattccatcatttaaaaatatgattacaaaatctgtgctgtctgttttaaaaatatgtgtgtaatatagttttactgatcagttcatttcagtcgctcagttctgtccaattcattgcgaccccatggactgcagcatgccaggcttccctgtctatcaccaactcccgaagcttgctcaaactcatgtccgtcgaatcagtgataccatccaaccatttcatcctatatcgtcccattctcctgccttcaatcttgcccagaatcagggtcttttctaatgagtcagttcttcgcatcaggtggccaaaatattggagtttcagcttcagcatcagacctccagtgaatatgaaggactaaattcctttatgattgactggtttgatctccttgaagtccaaaggactctcaagagtcttctccaacaccacagttcaaaagcatcaattctttggcactcagctttctttatagtccaattctcacatccatacatgactactagaaaaaccatagcttggactagacagacccttgttggcaaagtaatgtctctgctttttaatatgctgtctaggttgctcatagcttttcttccaaggagctgatactgatcatattagctaattcgtaacaaaatggattttacctatgatggacaattttttatatctgtgtaaatagcttacactactcagaaactcctaaagcagttattgaatgtctccagtcacaaaccagtaacattgaacacaaaatctccataatatttcaattgtttctgtagaaaatggccaaattcgggtatcagatccttatgcctcataaaatagtgtgagtacaagggggcctactaaacttggactacacactccccacaccatatccctaccccctcaccaatgttctgggaaggaggaaaagaccgtttgtacaaagggttgacccaaaagtgaatgatacttttttgctttagaactctgggaagcatgtaaatgtcttatacactcaaaaaacagaatcactttctaaagtcctcttcaaactaaccagaagcaagattcatctgaagggtgaatatagataaagtgagagtataatggtactgcaaagattctgatgatgggtttg

SEQ ID NO: 52651 - DNA, 1023 bp, Bovine  19866881079957
  misc_feature (1)..(1): n is a, c, g, or t
nttggaacttagctttagcatcagtctttccatgactattcagagttgattttctttcgaattgactggtttgatctccttgcagttcaaaggactctcaagagtcttctccaactttataattcaagagtataaattctttggtattcagcctttatggtccaactctcacatccatacatgactactggaaaacccacagctttgactacatggttctttgtgggcaaagtgatgtctctgttctttaattcaattttgtgaaaccaagctaaaataaatgaagttcccccaatgcaaggactgaaattagaagatgaagatgtgaacaacagcatacatttaataactcagtgatttaaatcagtcactttaaaggaattcatggataatttaggtgataattatactactgttggaattgatgtttatgatacagaaagatggctaatatttacacagtaaggaaaatcttcattcaaccctgggctgcatttaccctattcttaaattgttcaaattctggatgagccaagttatcacatgccccccatcttagatgtttgactatatggaacaattgttttttcaagttttccccctttatgtcacatctacatttgtgagattacgtgacaaacacaaaaacaaatatcagtcttttccactaacctcgatggaaccacagtcacattgttcaggtggctccagaactccattgccgcaaatggattgtcttccttggggaaccacttttggaactgttcgattctgaagacattcaaatttaggctgtgaagttgtatgtttaaattcatctatgctgcaactgctaaaaaactttatgccatgggaacgtctaaaattaaattgtatttcttagttaaaaggaatgaaatcactatcaaagtaacactcttcaataacatgctgtgaattatttacttcttcattagagatagccaagaaaggagagtgctttatttttaattcaattagtaataaaagaataagctcatttct

SEQ ID NO: 52652 - DNA, 860 bp, Bovine  19866881085779
  misc_feature (1)..(1): n is a, c, g, or t
nattacctcgtggtggataaatcttctgtctagatatattaatacaatttattggatgtacagaaaagtgaaataggtttactcacaggtgtaatcatgaacattgacactgatctatgatgtgcacctggtgtgatattcacagtcctctccttctgggatgacaaatcataagtttatcctataatttacaacaagtcaattactcccagtcctgtcagtaccattagctcagtgtatgataggctgcacacactgtacactgacaatcagccttctgagcacaagggatctgtgaaacatacctagtaaacggagttgatcttaagattctttcaggctataacaggcttccctcgtagttcagtcagtaaagaatctgcccgaactgcagaagacccggatttgatccctgggtcaggaagatcccctggagaaggaaatggcaacccactccagtgttcttgcctggagaatcccatggacacaggagcctggcagactacagtccatggggtcgcaaaagtcaggctcgacttagcaactaaaccatcaccaacctatagcctgcactctatccctttttcattaagtatttaactttttcacaagaaaatctatgtctatattctcaactaaggccaaagctgactatccatgtctcactactctcttcactataatgaactaaatagaaacaatctgtactgtctcccctcccagctcagtctttgttggtggaagagttgtaaccacctgctctgacttaaaaggaatgaaaatgtttttccttcagcactctgttctacagtaattctgcactttcacagcacatgttcaacaagacattagcacctcta

SEQ ID NO: 52653 - DNA, 914 bp, Bovine  19866881099017
  misc_feature (1)..(1): n is a, c, g, or t
naaacggaggacagattttaagggataaaggaaaggtgaggtaggagagacatgtatgaaaatagaagaacaccataagggatccacaaggtgacaaaaatatctcttatcttgggctgtaatggcatcagtgttctggttgtgatattgcattataattttgtgacatcttcctcttggggaaaaggtgtgatctctttctactattccttacaactaaacatgaatctacaattatttaaagatttaattgacaaaaattttaatgaatttacattcactttaagattttcctttgtctgttacatttttatgacaagttggaattcaaggtttacatgatcttgtcccaaactgcctgtccagctttacctcccaaacaagccgaaccttcactgttcaccttataaaacttggacttttccgttttacttctatttgtggccagaacacctttcctgcttcatcttgttcagatcctcctccatgccaaacgactgcagattttttttctgtatcaatcttgatatattttgtacattctatcttttatttctatgattttgtatacatttctcattttttctattagatgtaagcattgagagagcaggagctttcatttttatgagaagcaaataacctctgtaaatcactagaattgtgttttcacagaacaagacctgaatacctgttatttcttttgcattctttggctgcagtccatggggtctctaagagttggacacgactgggcaacttcactttcacttttcactttcatgcactggagaagaaaatggctacctactccagtgttcttgcctggagaatcccagggacaagggagcctggtgggctgccgtctatggggttgcacagagtcagacacgactgaagtgacttagcatcag

SEQ ID NO: 52654 - DNA, 751 bp, Bovine  19866881172024
  misc_feature (1)..(1): n is a, c, g, or t
ngtagggatgggagagaggaaaagaatgagggatggcttatgaagcttatttatagactttatagattgggctcattgcagtatgaattaatatatgtcaataaatgattaccactgctctgataagttgaaggcatttgttaagtagcaactcatcttcctggaaaatttcctatacctcatacaggtgaatcatttacttccagaaaatagtacacttactatagactcaatttagtcctagtaattaaattcagttaaccaagtagggtagagattttacagtatcatgacaggagggagcatacaactctgaaaggattttgaaaatgttttaaacaccatatatgtgtgtttggttgctcagttctgactcttattgatcccatgaattgggatgatttcccagtaagaatactgaagtgggttgcttcagtatactgaagattccctcttccaggaaatcttccctaccagggactgaaactgcatctcctgtgtctcctgcactgcaggcaaatattttgccactaagtcatgaaggaagcccttaaataccatatccagtggtttttcatagtcttcatccccctaaactccagagcaccacttgacaggaataagtttccctttattattttcttctccatcaccttctgtgatgtgattcccaaagccctcctcttactgctccgaactggcttgtcagggagtcagcgtagcatcaactgaagtgctgaggttgtggggt

SEQ ID NO: 52655 - DNA, 1535 bp, Bovine  19866881208917
  misc_feature (1)..(1): n is a, c, g, or t
ncctgaatcgcagcacgccaggcatacctaaataaatatttatttaggtgtggataaacacatactgtagatttatatgttttactatagacttttgtaaatacatataagcatgtatcttattgactagttacttgcatttttcacctaatggtgatctttcctctacgttattaactggtcttttataatttttaaatgactgtgtattattctacatatgaatttactataattagctattttttatttgttgtcagttaattgtacctaatggtttattattataataaacactgtgatcacatttatttatatccatgcagataaatatctccatagataaatcatagtggtatgcacaaattatttccttatgagaaatttctctaaattgaattgaccactcatagagaagatatttttgaaaaagtacattcacattttctacagctaacctctataaaatgtaaactctgcagactccagcattagactcagagatccataaaatgttaaggttaggtgaaattttgacaaaataaatcataatgcttttattttacccataaaaaaaatcaagagtctgtgaattgaagtgagttgcttaagttatttagtcagaggataaataatgacaatgaagtgttcttttcttttttgaaagttattatgtttagtataccgaattacatactgtttaaatctgagtaaattggatttaaagtgaccttatatatttttccagttgtaaattcacggccaaagtatcatcacaacaaacctaagaggatgaattgaggtaggaaaattactggctaggagcagactattagaccatgtaatgtaagttaatctttctgtaaggtttctctgagcatagcagatggttctcaatgtttctaaagagttcactggctcgtggaagtggaatgctttgctcacagaaagaattttaaccaccctgattcagcaaaatcaccctgaggcctcttgtaaactctggattttataatggctcgacactactctcactttaatttatgttgacaccatccttgccatttgtcaatgaagtaagtaaagagcatccaggaagacatggactgaatacatggcatgaggtaagagtatattcaatcaaattaaaacctcagtgttttgttttaaattacatttttaaggtgctgctgctgctaagtcgcttcaatcatgtccggctctgtgcgacccgatagatggcagcccaccaggctcccccatcatttttaaggtggtcctcactaaattccactttatgtaagtggaaaatatggaagatttccctgagatctgatgaaaggagtactagattacctataaataagaggcatatgattcacagaccatcagaggatattcctagttatattacactgtattatatttttctgtagtgcttactatgtgttagaacatctacaaaatacctatgttattctgtataatcatgccagcaaccctatgaagtagatattttcctcctttacagtaag

SEQ ID NO: 52656 - DNA, 1674 bp, Bovine  19866881215520
  misc_feature (1)..(1): n is a, c, g, or t
ngtatagaaatcttgaagaagatagagaacagaagggtctgtgctgacatctgggttttattaataatactgttgctactgttattattctccactaggaagccaaatagaacacacacaacacacctcccaataacatccaaggcatgatagcccctatatctaggtcagggacttgtgagaggcctattatcaactctctacatgcctctaataagcactgacttttattcctactcagggtcatgtggtgaacaacttggaaaatgtagccatgtcctggagctgacatgtgggtagccaggatcacctcaggccaagttgctacgaacagctactatcgttcttcaatcttaagctaatagagggtgaacagcaggtgccctcaaggtggccattcctttcccagaaactgaaatctgtcagggagcactgagtgcacagagttgagtaaatctgagccaatctgcactattgtgaggcatgctgtccccgtggtgtcctgctgacctgcttggcaagagcacgagctagaactttggtcctaaacaaatgtaaaatgtgcttctttaaagagacagcattagaaagtttttgctaataaacttttctttttaggaatgccacatcttgtcatctgagaagtctcccacgtggcggttttgcgatagtggccacagcttctgaacagtagcagcaaagccctcagctggtggtatctcactttgtgaaattcaaatccacagatacataccagggacactagcgatcaatgtgccttctaccgtgtcacaacatgaagtgagggcacaaggacctttcggcacctacttcacacacttcttttcagagacctcagtgggtttttctttgttgctttttcctgctttttagatgtgcatttcttttgttagttgtgtattttcctcaacgtagagtgaaagtttttaatatttgaattccacaaaaggacctaatgataatacaactcaactactttaagctgccctaagctactgtgatcaacacacagtatgctgagtttccagagcgggcagtgcacacagctccttatcaggtgtgctttggtgtacatttacaccatgtgcctgtgactgtctttcgtcttggtagagtccttgctgcttgtgagaaggtgcactactactttcaataaagacagcctttattgttagggtcacttattgtgtaagcttggaagagtaacaaggtttgtgtctcacttttctctttcacacaattgctgctgctaagtcgcttcagtcgtgtccgactctgtgcgactccatagacggcagcccaccaggctcccccgtccctgggattctccaggcaagaacactggagtgggttgccatttccttctccaatgcatgaaagtgaaaagtgaaagtgaagtcgctcagtcgtatctgaccctcagcgactccatggactgcagcctaacaggctcctccgcccatgggattttccaggcaagagtactggagtgggatgccattgccttctctgttcacacaattaggttgttgtatgatcttctgtctagcaagctccctcatgaatcaccatggcatacaaagaagaatcagttagtgaaccatacctccagtaccaaacttcagtgtacccggcacatgaaagcaaaataat

SEQ ID NO: 52657 - DNA, 1659 bp, Bovine  19866881243634
  misc_feature (1)..(1): n is a, c, g, or t
nctaatcccatcaccataaaacccaagactgcgaagccatgtagcagagcagttctcctgggttcccttaccctactgctctccacccaggtgctttttcccaataaaatctcttgctttgtcagcacatgtgtctcctcagacaattcatttcctagtgttagacaagagcccagtttcaggccctggaaggggtccgccttcctgcaacagcatgacttgggtccagttctgtttagaagttagtgggagagataattggtactctgaggctatagctgcttaatgtgcagtaaggaaattcttatgcatccatgctggtttttcccttacaaaccagcatttttaagtcagagagtaagggtcaatttgagccaggctacatgcaaccaattccattattatcaatactcataattaaactggaaagaaaatttcagtaaaaatctttttaaataaattaaaaataataaaactaatttaactaataaaactaattttaaaaatggaaagaacactggaaatgtaacatctcaaaagcattatgcaactgggtagagtaaaaggtaagaagggttccttgggaaacttaagaagtgctggactggacttctctggtggtccagtggttaagacacggtgcttccactgcaggagccatggttagggaactaagatcccacatgccacaaggagcagctaaaaaaaaaagtcctagatttttctaccatttctggtgtgtaaatatagtactaggaagaagaaatatgaacacataagatattctagtcctggtttattgatataacaggttgacctctacaaaaatgctcattaggaatgtcataataataatcatggacataataattgtttacaattataattacaagttggacgaatgcaactttcaggcaaacaaagattttggagcagcatgatcctctccacaagctgatagaatacgtatttgtgtgtgttcaattgtttaaatggtttgggaaccttgttttcaaaaggcaatttcaagacctaaaactgttttactccattaaaaaaaatatatacgtttgagagactagctagagagttacccactaattcatgtagcaagtatttctctaagcatttactgagtgcctggtactgtgacaagcattggaacacagaaatggaaaaacaaacatggtttgatgactataccagttcacataaaaatattaattaatataacacattacctatggtggataaataacatactgtcaaaagtaattttctataaaaaacaaaaaaatgattttctgcctctggtttagcagaaggtgctaaaccacaaaaatttacaattctgtgtgcaaatgaaaattcacaatttcttcaatatgagtgtggaaatatacatatattttggcctttgagagagagaagtgtcatcataatttttaactactgtttattgagtactattattggacctgtgtttaatattaactctggatcttcaaaacaaccctgaaagtaggtattatttacattttatggatgatttatgttgagaatcccctcccaaataagcccatgatattttgaacaatttgcagttccagggcagcagctgcagctcatttaaaaagatgaaacaatagtgaccactta

SEQ ID NO: 52658 - DNA, 1248 bp, Bovine  19866881254743
  misc_feature (1)..(1): n is a, c, g, or t
ntaaatgatagtaatctttccttttgttagcaaaaagacatattacaagcttgaaaatattttaagccaatgaagcttgcatggaaattgaccaatatttgcaacttacttcagacaacagtactaatttagttaacaccatctctttaaatagtaagtggaatttagctgactcattttggagcagggtagtgtaaacatttcaacattacttacgaagtttattgataaacactttcagttgagtttttaatattttgagtataacgtgcaaaaaaaaaatgcattgtgcatttatttgcatgctcaccatgcaaaatatgtgaatctttgccctatgcaaaaaggacggccactcctggaagtcctcttaagaattatgctttagcttacctgctatatttttaacttttgctatcatttgacaagtggcttaaagagtaaactggcctaaaagtcaacttacattaatattaacctgattcttaaaatcttttgtttatataaatgtgggtggggatcttaaccaatgatttcacatgcaaagtattccaacttttttcaggaaacacatctaccttcaacttaccataaatagcctccaaactgagacacagaagataacaggacattagtcttatacatggcttctcatcttgtagacttttctccccctagaaaggcagcttttaaatgccatcacaagtgcacagcttgccttaatatttctcagaagcttagatcacatgggcgggcgcttcagcctgtcacaaggctgcaatgtgacaggctgagctggatggaggctctcacataaagcctagtcaacaggggcctctgaaatcagcttctatttatatctcagagcctgccaactcctacacaaccccaagaactaaagatgcagcacttgtatacctaatataataagcaaacacaacaaaaagatgccattaaggttgttagttttttctgaggtagggaaggagaacaatctcaaatcagaaaggcaagtatcaccaatcactcaaagacgaaacggtcagagttgtttgtaaaatccaagcacaacgaagagagcacaaaggtagaaacaaccctcctgtttagtggcaattttgaggtgggtgtggggaataagttgccatttccctatttgtattttagaaaaaaatacaataccgttattacttagcatctttaataaagttgttagaaactgagcattcattgtgtcagctctatcaa

SEQ ID NO: 52659 - DNA, 1258 bp, Bovine  19866881300720
  misc_feature (1)..(1): n is a, c, g, or t
naaaaatctgttaaactgtcctaaagttacaaagcctagataagtccaacgcagacacaatttcttcctaatttggaatagtttgctgttttctccggcttccttcatagctcagttggtgttttctcagttgaactctcaagaaactgttatgcatttaggagccataaaatatattcttaatttcataccttaaatattagcatcaccttaagtgtggtaagataccctcagacatgttgcactaagaccagctggagaaacagcaagttgtgcatttgtcatctcccttctgtcgggatcacacgttcactgaatgaaatggccagaggaaaggacaccaactacttaaataatttctttcattttttttttctagcaggtgtagttgaatttacatatattaaatatttaattatgatgggactccattatatcctaagttcatcctgattatattatcaagtaaaatgccacaattatttcctaattggggagttagcagaaaacaatcaaacattcctctgtatctttaagagctgcattattggtttgaggcaatcaaccatttagagcacactaccttattatacattctacagacatgacatgatttctcattttaccaaacctttctgtaaaatgcttttgctacaacttaagcatacgtgattagttcacaaaataaaagatgctatgcttagtcgctcagtcatgtccaactctttgtaacctcatggactgtagccccgccagactcctctatcagagttctccaggcaagaatactggaatgggttgccatgccctcctccagaggatcttcccaactcaggtatcaaacccaggtctcctgcattgcagacagactctttaccatctgaacaaccagggaagccccaaataaagataacaatagccagttgctataatgttaaatctcctgcattcataaaattaaaatgcaaagaaaactttcttctggttgtttaggatctactaatgaaacaaactatttcctctttttaagacccttgtaaccatttcaaataaacagataagaatttataggcatatgtgaaataacatggcacactttagataaatttggaaaaattttcatagaatagggttgtaaggtggttgagcaattctgaatattagttgtttggggttttgagggggttatgatttttcttagaaataccactttttctattgatcagagtatataagaatgtttttacattcttaacat

SEQ ID NO: 52660 - DNA, 578 bp, Bovine  19866881320414
  misc_feature (1)..(1): n is a, c, g, or t
ntcccaaggcccttcatggcagcacggagctcttcggcatcaaactgggctggagttttcaatagagccaaaacaacttcctcaaggggaccgaggagggctttcttcagaacttcatccaggggctttcctttctcctgcagataggccgctttgatctgctgacgctgtgcattgtttctcttagtcagaatttcaatgatggttgcttcatccacacctttaactgtgattgctttgtgcaaggcctcaacatccgaggatggattgagcataggataggggctcactgctgacccaggaccacctttggatcctttcaccgttttaatgtattcctgctcttcattttcaataaaccaggcctgcttgaggaattcagatcccattgccatttttgaaggatctttttgtttttttcacctccgtacaaagaactaaagagagattcttctctgaacggtttgtgctgccagaatgtaatttttagctttaaaactccagggggtcagtatcttctattgttttcatgacatagtttaaaaagcaaccctaataatttctaaaatcttcttcct

SEQ ID NO: 52661 - DNA, 919 bp, Bovine  19866881325196
  misc_feature (1)..(1): n is a, c, g, or t
nataacagtaactttataaatatctctccagatcttattaagctctatatcaaggattttttgttttatttttgtttttgtcttgttttaatgaatcaatgagcatgcaattagcagcactaaaatctgaaagtaggggtggcattacatgggctgcagagttctgggccatatccctaagacatctaggtatatcccagtatattgctattgctttgactttagggcagaaatgagatttaggaagaccaagtccttaaagacacaaatgaatcttaaaatcaagaggttaagagtaataagaaaagtgaaatataaaatctcatcttgactaatcttaaccccaaagattttcaaaatggcagagtatcctctccctaccttcattgtgggaaaattatactcacaattaggtagaaatagcactgaaaatgtagattgctacacatagatgtaagaaagacctatctgaaattctgatcaacaaggaaatttatttctataattttttattctcctttttactcattttttctaagtattcattgagtgtgttttatgtttttagcagacttaagtggttcaaaaaactaaagaaacatggagattccttcctgaagcttaaaccctattaagaaaaaatgagatataggcccacagaactgttatacaacagtactagacagccttgaagtgaaaagggagaggttagtggaggcttgagagcttgttgaagacattgtagatgagataagaactaaacaagacattaaagggctgatagacttgagtaggcagagaaagacatttcaggcataaatttgcagaaatttcctcaacaaaggagacatttccaccatgaatatcaagtacaatctcatattcttagatacactaacatccagggatggcagacaga

SEQ ID NO: 52662 - DNA, 1057 bp, Bovine  19866881397479
  misc_feature (1)..(1): n is a, c, g, or t
ngctccggccgactgacgcgttctctccgccccgcgatggaaagagggagggggcggggcctgtgcgtcagcgaaaaccccgacggcggcggcggcggcggggagcgccttgacgtcacgtgcccgacgccgcgcctctgtcttcagtcacccggccggggaggcggggccgagcctgaccgcgctgctgttgcgcggagcctatttactggcccggctgccggctccagggtggagctggaaagaaatagtcctgtggaggatgcgtttctatttttagctcgattgtccgccctcagcctttctccttccgattttctcagtcaagcccgcttttcgccctctaagttctcacgctttgtctagagtctttggcagacatttcccttccctcctcattctccctcctcacccacccatccagaacgagttagaaggatttgcttcgagaagagaaaatgaaccgctctttgcttctgggtcttctccccggtttatgaagctcccaagtccagttccctcacacccttttcgattctaaagtccaacctgagcattgccctgatgctaccgggaaggagcggggcaaggcggcgctcactcgcttcctcgctcgcccaaggtcacgggtggttgtgcagagtcaggaaaggctcgccggactggctgccagccctcggccttggcgtcacggttctgaacaaactgttttggccagcatgtaaaatccctggaaatcatctattccagcaaagcctcgtgaactgggaaagcaccaaatgttctactctagaaatgaagctaagggacaaacaagccagacctgagggagagatcaataaggagacgctgtaagaggaagttcaagagggtgcaattcagaaatgaggcacctgctccgactagtttgaaagggtgagttaactaaaaacactgagaaccttttcaaagcaccaacaaaaaaataccccgtttgcagctggcctctccaggtgacttgttcaactcaaaaaacaaacttagtaagacagaaaggacttatgaaatttcctggtaa

SEQ ID NO: 52663 - DNA, 1612 bp, Bovine  19866881400359
  misc_feature (1)..(1): n is a, c, g, or t
nctgcagtttcatcagttcccccaatgaaattctttcccatgctctaataaatcctcttccaagataaaatatgattacacagttgatcatgatgatctcgttgagggccatttgtttgcactgtcttacacagctgaaatttttcggatgagtgattattctgcttttttgtggggtttttgtgttgttttttaatgaacagagaacaacagattctgcctattgagctgatcctgcaagtcacaaacctctctgcacactaaaagaggggtcagcagctgttttcctgtcttgtttgcaacactgacttacaccttaaaatacaaaagagcacaattttaaaatatgcttaaccacagaataggtacacaaccatcactctgacccagtgatatgatcaaaggcttgcccttattttcaatccttttgcgtgggaaatgtaatagtctaacattagtacaggtattaaaaccacattttatcttttatatactctgcattctctagacatgaagcagaaaaaaaaaaatacaattcccagattaactttcccatttgattccagcaatcattgcttgcttcccaggagatcaatgaaacttacgctttaaggacaaccagaaaactgtatccaatgcacatgatccccacgagaaaataggagagtggcagtctgaaattcatccatccaattgttcgtttattgtcgtaatagccataaaagaggacggaatattgagccaagccctaaaatccaaaaacaaagccgtttaacagatgctgtgaagagcaactcaaagaaaaaagatcgacttctaagaagaataacaaaatgacattaattctcaaacttgggagatggctctgacatgagccctattgttttgtttcatggagtgactgtttcagctgccacatggactgacagcctcttggtttacttgaaattcagggacttctaaatagatcagatttttaaccaaatataggcttgctcagctgtggagccattaccgtgaaatgcccattgattgaaacatcaaaacacacttcatggtgtcattagatttacaattttaagagcttgcttaatattggggggaaatctgaaatgtgcttcctcaaagtttcatggcaggtttccactttcagtcacctaagccacagtcagatttgttctccataaggtacagaggccatgtctcagctcatacttagaaaaaacaaggagcagatgagatgacattggaaccaatatatacaaccttctattcatcaagattattatccccaaatgagcatgtttattcatacaactacatgctctttcccaaaaagtatctgccagggttggcatcactgtcttccaaagccaattaggtaactgctctctgtacatagaacatggcatattttggatgctgtttcccttataatattcttcctctttctctcctctcattcactgtgttcttcactcttagtttggaggcattggtttctgtattactatgcatctacttcccccttttctcttcaatttcatctctttggcaataatttaaaacttctatgctttgtgaagtgagaggataattgcagtaataatat

SEQ ID NO: 52664 - DNA, 1611 bp, Bovine  19866881424552
  misc_feature (1)..(1): n is a, c, g, or t
naaatagatagatctttccttacatacaaagtgacaactctcaacagctttatgttcagaaaagaacaagaaggctggatgtatttcttaagactataaggaaatattatgttttaactagaatatttttttacacttcaacagaagtggacatgttctttgtgatgcatgtgaataaatattgaatttatatggctaaatatggcattaggcattgatgaaaaacattttccagtaggaacaccaaaatacgaaaaagatttagttaattcataaatttgcaaagatgtagtttccttctatatgctggaactcaaattccacagtaactatttatattaaaataaaaatatgtaaaatagtatggttttctatacgctaactgttgtattactgattacaacctgcgttatacacaatacaatgtccgtgtaaaaactgtcaggtgtattaacagactatctgcaatgagatttgtcttgtaaaagctagtttcctttaaagagatgaggctgcatgcttttcttatttgtgcatcattctctgcatagaacactgctttatcactgcaattcatcgcctcttcatggagttactagaagattcagcatatttatagtagcatgaattacattgctgaaataaatcttacaatgcttccctactcagaggacttcatgaagaggaacataacaagacaattgctttctctgaaataaattccatgagcactctttttaattttcagtagaaggaagaacaatttgtgaacctagaaccaggttgtgtcatttaccagtaaaagtcatttgagttcataccaagtcaagtccagatacaaagttgtttatacaactgaatagattttgcaaactgaaaagattcagtaaaggataaaattttaatgattaattgctcccaatattttggacactttctcactgactggttttgggtggtatatccatataaaacaatgaagtgttgctgtatgatctttttagtatgtaattttaagacaatgtaaccatttttgaggaaaatgattttatgcaattgtctattataaaatttccatctttttcatcttatcaaaatatcatacacaaaaaaattaattcaagatgtttttagaaaccgaggtatacatattttcaataaatagaattatggaaaatgaaaatatttaatttctgaaatgtttatcaagtgttcacatatattacacatatatactttacaatggacataatgaaaacttccaaggtcagttaagcagaaacatataaaaagtcggaacggtatttggtcatttacttggagaggggaaggttattacattcaaatttgctttcctgtagagaacatctattcagaattttcatctcattacttgatagtgactacagttgtacagaataatagaatagaataaatcctcaagaatcttttctccatcaaaataataaagcttatctctaaaaagtggacattctctagaacatatactactactactactactaagtcacttcagttgtgtccgactctgtgaccccatagacggcagcccaccagcttcccgctgtccctggggattctccaggcaag

SEQ ID NO: 52665 - DNA, 2488 bp, Bovine  19866881681681
  misc_feature (1)..(1): n is a, c, g, or t
nctaagtgaaataagccagtcacagaagaaagcagtgaactctctccctcagttaaagaggtgcttgctctcccagtcatagtattctactttagattcaaattgcacgggggaagtctgtttaacttaatcacgagttctccctaggctaaccaaccatggccaggggtgttctattctgtttgtaaacagactttgaagataggattcatgtctatttcgttcttgaattttctgaagtacttgctctagtgccttgcacatagcacatatacaaatattggttgaatgaataacagaatgaaacaccaactcttcagggcttatcttgacctttgtctcttattttgtaattatagcatgtggttgtgttgtttctgtggtagatttaacctaagaattatgtggaaaagccttttttaaaaagttaaagttcaggttcagaaatatgctattattaaactaattttcagaggtttcctctttatagtaaaaaatgaactgagagtgttcagaaggaaccagactataatttaaacccagatatacatagtgcattaagtaaatcaacaaagaaatgaataaaattcatagtttatcagtttgggctcactaatatacttttattcaacctagtaaatattctcagttttcttgaattacagcaaaccacagcccacaggttaaagctggcccactgcttgttttgcaaataacatttcattggaacacaacaatgctcttctccttactgctttgtcatagctgctttggtgctacgatggcagagctgagtacttaacaacagcaatcctgtggccggcagcgctaaaatgtttactatctagctttttacagaaatatttgctgactcctgatttggactctacaagtctctttattggcaatgtacactaaccttaacaaaaaagctcaaaagcctaccccttaccctcttttctcactccaagaggagaggattgtgaactgaatcaaagacaggtgaagggcactcagattatagtggggctttgttgggaggtgaaaggagccaaattcttttcctattcatgatttatgctgtcctgtctcatagtgtctttggagatagattgcagaaacaaagtggaaccacggtgggtactgggaaagcatcctgcagttgttgagagcagatttaggtttacatttccagagagaaaagtcaaagcagggtgtatgaagctgacccagacaggcattggagcagggctgggaatagtgagcctaaactcagcgaaaccatcctgtcattctttagctctgttccattatgggaaatgttaaaatattacaaagcttccttctcacagtgaacagaaattctcttcactggtattgatccattcttctagaactttctttgtgttgtgggctgaactatcaccccacctccccaaattcacatgttgaagtcctaatcttcaggacctcagaacatggtatcttccttgaaaacagggtctttaaagaggtaattaaattaaaatgaggttattagagtgaccctaatccaatctgtctgatgtccttagaagaggaaactggaacacagacacacacagaggaaaggctataggaacacacaataccatccataagtccaggagagagccttcagttagccctgctaactccctgatcttgaacttttatccttggaaactgtgagaaattaaatttatatcatttaagccacctgatctgtggtactagcacatgaatatgccatgtatcggccttcatatatgagtagacagctatcatctcttctgttcatctgttaaatatctcttctctcacatagtttagtttactgactggataccatctccagtatatattatcttttaaatatatatttctccaaaggtttctatccattggttcaacagttctacctccaggaatcttccattttaaggaaatcattctacagtagtgcaacgctttatgcacaaagatttgcaccccagtgctgcattttattttcaacttagaaaaatggtctatatatctatactactttatttattttacaaacaaaaattaaccccaagtgcatgtctggtgaagttttcaaaaatatgaaaatttgtaagtaaaaatttcctcttgcactctccagagataactataaacttcacatatgattataaacaatatactcatacatatttttaaacagaaatggggagacttgtacataatattaaaattttttcccttatgatagcagggagatctccctacagttattgaattcctcattgttccttccatcactgctttcataactcctgcccagctttaaagattctggttgtcatcttcgtcttcttccctagtggtaagtgtcctttctctaggctctaaaccatagttaagaataatgggggaaaaaaaaaaaagaataatggctctagagtcaaactgcctgggtttgaac

SEQ ID NO: 52666 - DNA, 968 bp, Bovine  19866881691214
  misc_feature (1)..(1): n is a, c, g, or t
naatgagtgaatgaataaatgaatgaataaaccgtcctcagtgaacaatagggatattgtacagtaaattcctaccagtctcagacttaccacatttccccctgagtcttgcttggggcctttcggttaatataggaaacctttccaagaggaaaaaagatacggagcaaagtcacaggaaggaggaggcacaggccatggagggaatagataagagctgtgccccaagagatgagggctgcttctttaggctctttcctaactttcttagagaagatcctgttttccttaactacatcactcatacctctcaacatcaaagcacttttaaatgtagctattgtaaatttttctccttgaaatttttgatatttaatttcctgccttctcactatagcatttgttcagtctggcagctctgctcctcacgtaaccccagcctcctccacacaaatgaaacataactgcagggggatggagaggaacatggctcggaactgcaggccatgttcccacttctgcacagttatacagatcattcctcttcacagagaaagcaaatgtcactttctcacgagtgggatacattttcttcctagtggtcagtgctgataagctcacagacatctggtgccctcacctatagacaagagaagtttaaagagaagcagaaagctacacagattttttttagataaaacaaatgattgaaggtctattagattaatctcaaagtctataagctaaggcagcatcatggtgccaaaggtaatattcaggtctgctgacccacagcctgagtcaccagctgccagacttgttccacccaacccctcccagatcactggaatgcagtgttaaagcacccttgatgtgatattctatgtgtgaatatctttgcaccaccttctacagcaacttatctaaataagtctccaagtctaaaaatagacctatttccttaattt

SEQ ID NO: 52667 - DNA, 1762 bp, Bovine  19866880612923
  misc_feature (1)..(1): n is a, c, g, or t
nccgggtgttggtgagggacagggaggcctggtgtgctgcgattcatggggtcgcaaagagtcggacaggactgagtgactgatctgatattaaaattaataaaaggattcttaaaatataacaaaaacaaatcctatgaaatattgtttctacttagctatcatttaaaaaataaacaagtattttgtaagaagtttttaaattagtgatagcatcagtttgtctatattcttatgacttgtttaggctgtaagtaatatattttaccagcatatggaagaaatcaaggtaatgattatttcctgcctttgctgatgggaatatattgttctgtgtatactgccctgcagccatttaccatgttatatggaaaatatcacaatataaaattattaaacttagcacccaactatccattgaatgttttaacatggtgaaattcaaaatatatttagtgtttttaaagtaaatttaaatctttgtaaataaaaagagttcaaagcagtgcttactaaggtattatttcaagcaagctttacaaaattataatagaatagtcatttggaaattcagcatggaacttacttcctattgaggagtctaattaccagacactttttgctcacattgtcagaaggttatgattagaacacattaaaaaacaagcagattcagatctaagtgaacaacaaggtacataaggtaaggaaaggtctcccatgaaagcacaaggccacagccattaagtatcttctgtgagagtaaaatcatttagaaatcaatgcacaatcttttagagtccatgttcagtaaaatacaaataaaactgcccggaagaatgagagcttctgaattttgcatgaactagaaattacatggagagtcatagggaggaaaaagacttgagtatgtagattcataacaaatattagctgttttaatgctttatagttgttattgagcattgctgcaaacactattatattacttctaatattatcatttcaatttttatgttataaaaatagtaatggatatacctactaaactggcagaaactactacaattactttatttgcatattgaaaacagaatacttttaattttatagatagtatagataggattaatctatagaaatgaatagataaatagaaaagttagagtccagaaatagacataaacatatgaaaaaatgtttttgacaaaacatttgtgaaggagctcagtggaaaaagggtagtgttttcaacaatcagtgctggaatagctggacatccacacaaataaaatttagtaacacaccctgcactacacacagatattaattttaagtggatcatagatacaaatgtaaaacctaaaggtataaactttcagaagaaaacatgaagacaaccatttggccttgtcttgaccaaataactcttagctatattaccaaaaacatgatctgtacaagaaaatttgataatttgacttcatgaaaattaaaaatactgctcttcaaattaaagattggggaattactatttagaataattatctaccttatcaggtaaattattcatcttatcagaacttatatttaaaatatacagaacatccaaaactcagtaagaagagctacaatgaaagtggtcaaaatatttgaactgttaatttatgaaagagcatttgcatatgacaaattcataaaaatgtgttcaatattattagccattaagaaaatgtaaaaattaaagttacaatgattaaca

SEQ ID NO: 52668 - DNA, 1515 bp, Bovine  19866881209407
  misc_feature (1)..(1): n is a, c, g, or t
naacttgtagtaagtagtataaataagaatgtaacagacctggaatttggaaacatgcctgagacattgaaactcacacaaccatctacttgttcaaagttccttatctgtgttaaaacaaaaatatctcagagacaggaaagctgactgttccatatcacatcaaaaaagtgctcagctacctcagctgtcactaatgatgagatctatgaaatcagttgaaatttcagaaggtaattttctttcctgtcatttctcctcaccaccatctggtgaaggtataaagagaaatcctcacaaatgtttgggggtttttataggcatacatatggaattgtttcaagtttgctttccaccaactttgatttatactcagctttaaaacatattaagtcttattctcctctcactagcagaagggagctgctgccataaatccttgatagtgccacttactttgtgtaaggactgttctggattgcatgacagatgtaatcccagctcaggggcaggaaaaatgtgatgggagaattctctagtgtcctctaggcaaagaaatgtatggaataggcctttcattaccaaggagaaattaagctaattcatttgtagtgctaaaattgtacaatggagaaacatttttttcaaagatctagccataaacaaaacaaatagaacattttttaaaccaataggatccaagtaaaatcaattacagctgctcagaaataattatatttgcaatcatattctacatattatgatgcatatcagtttttctcatttatatcaaagacataaggagtctgcattttccaaaacattaaataaattaaaaaaaaaaaaaactaaaggtctgatgaacatgacttagatcatgtttaaaatttcaatatgatttatttagtaaatacagaatacatagtttatcacaaagtactacacagtttttaggtgcatctaattattattaatattattattatttagactcattggaaaagactctatgatggaaaaattgaaggcaaaaggagacaaggacagcagaggatgagatggttagacatcatcaatgactcaatgggcatgaacttgaaaaaactctggggaaatagtgaagaacagggaagtctggcatgctgcagtccatgtagttgcaaagagtcagacatgatgtagtgactgaacaacagaaaaattgttatttagtccctgagaggtagtaaagatcatatgtatgccaatgtaattttgggtctgcgtagttggcaggactttgtggtcatgagaaataaattttattttagatagaaacatgttaagattattttataaaaaatgcacagattgtttcagatataataagatgtcctagaaaatatgcttataaaaatattccataatattcactggtttatatttgtagaaactattttttgttttatttatttatttttattattttttattactttataatattgtattgtgtacacccaaggcggactcatg

SEQ ID NO: 52669 - DNA, 1760 bp, Bovine  19866881234215
  misc_feature (1)..(1): n is a, c, g, or t
naaccctacactgagcatccgaaaagatcacagacatttgaaataaagttcacgtcaaaacgaactcttaaaaaaaaaaaaaaaagaactcatcatcctctttccctgacacaatgcttctgtctcttctaggaacagctaggtgcctagtttaagcctacattaaacctagtttctcaaaattttcttgacacttctcactttgtcatctacttaattaaatcattacttttgcagatttcatttctaaaatatctttctaatcttcctgtaaattggatctccactgtcattgttatagtgtctatttttctttctgtttggccctttctatttattcctcatgctacagccagagtgatctttcacaaaacaaatattattctctgcataaaaccctttagtgaccatgcagtagcaacaaaataatgtatcccatatcatttttttacttcatgttgtcaaagaggatgcacagagaaaaaggggcacatccataaatatctaataattagaaaacaagcaaccacctaattactctctaggtctagatcaggaaatcaccacacatacagaagctcctggactctttttaaccaaataaaccctcttcctactcccaaagatgattgttagcttgacttttaatgttatctaaatcaaaactctaaataataaaaatctagctttgcctaattttgaacctagatcctatacctaccatggtgttaattattcatacatcattttccctccttggacctaagtgagtaccctctctgaatcacagaagttgtacaaaactagtatctatgatgattattaaacaaaggaatgtttttctgtgagcagttgttccttgaattatggtgtttactatttgcactacctgatatacaactctaacattaaattgtcatatatagattagttttctctgaaatctctcactactagagtttaactgattctgaatacagaacaccaaccaagcagtgagcctatttactgaataaatgaagatgtctcctcacagagcaaaatcttcagtatttaatgttcattcagccacaggaatggtttaactttgattttttatcccaatcctaatattagttttgcctggaaggaagtgtttttctatcaagggacaattccataaatattacagtccagagtaggcactccaattatgccccaggtatttggtttcatagaacactcagggaactagtcctcaaaagtaagtactttgcatgataaaattttttaaaacctccatcccaacatatatgttcaacacttcaaaaatatgttgagcctgtccatctgctaccaggtcttatataagcatgaaaaaaagtgaaagttgctcaggcatgtccagctctttatgaccctatgaactatagcccaccaggctcctctgtccatggaattctctaggcaagaatactggagtaggttgctatttccatctccagggatcttccccacccagagatgaaacctgagtctcccaaactgcaagcagattctttaccatctgagacaccagggaagcccaataggaaatggatattaaatttcaatcatctctattacagtagatttgtgtttgatgaatcttcctgccacttaatatttactgataaggtttaaaaaattataaccaaatatatagctaattctttactgaatactgtatctacttcatataaaatcatctcaaaatgtttactaatagctttctgccaaaa

SEQ ID NO: 52670 - DNA, 1826 bp, Bovine  19866880347107
  misc_feature (1)..(1): n is a, c, g, or t
ncattggagcggagagagtgctgccatgacggccccctgctcagccccaagaaaaatcgtggcccctacggtgtcccagatcaacgcagagttcgtgacccaggtgggctagggcgagtctggtgtgtatgaagggatgaggactctgaggccagggggtggaattttcttcgggaagggagcacccaggaggcatttgttcatcgattcattaactcaagtctttttactgaagtgtatgtgctgtgtgccagccaccgcactagctcttggggaaaccatggttaaagagactctgccctgaggagttcacattccgggggatacagatacatgaaaagaaagcttttatgttagagtttgtcgctcgagcgatgaagtcgcagaaggaacaccccagtctacctgagactggcaagatttcgtagcagaggtgatgttgaactgagtgttgaaggaggaataggcttattcttatccttagagtaacctcgatctttgagcggagcgatgagagtcagacaagagacttgctccaaataaatgcgtttaggaagagcagtctccgacgctaatgcgtgagtgctcctctagaacccgttactgtgttttattgtgaaccgcggttggctttgaacagggaaatacaatccccggtagctcttagcaacattcctatccttatcagtgcaagtaactcaaggtagaacttgctactcaccaacttcttctctgtgccctgtctcagcagatttgccaaggcagaagcataggagtcactttgagtccttcttttcctagcctgcactttgctacattctaaatgtctcttaaatctgtgtgctttctgtgccctaagccaaatttccatggttttcttcctgaacctaggtatcctaacctgtgttcctgtctttccacttgctttcctcaagctcatttttcatattgttgtcagagtgattacccaagtacaaatctgatctcctcacttatcttcttacaatttctaatgagttctaattgcccttaggataatgactggaatcatccaacgcattttatagtctagcctgtgcttatatccaagttttgtctgttatttccccttttctaattgtgttttagccatactgaactgcacttaattgtgctgtgctatctttcacctcctggcctttcaacattgttccctctacttagattcctaatcctctctgctcctcccacccttttcttatatggttaattcgttgtcatcaatctacattaatttggagaggtttttgcagataacttaagactagattgttatggttgttcagtcgctaagttctgtccaactctttgcaaccccatgaactgcagcacaccaggctttcctgtccttcactctctccctttgcttgaactcatgtccagtgagtcactgatgccatccaaccatctcatcctctgtcatccccttctccccgtgccttcagtctttgccagcattagagtcttccagtgagtaggcccctcacatcaggtggccagagtattggagtttcagctttagcatcagtccttctagtgaatattcaagattgatttcctttaggattgactggttggatctccttgctgtccaagggatctcaagagtcttctccaggaccgcagttcaaaagcaacagttcttaggctctcagcgttctttatggtccaactctcacttctatacatgactgctggaaaaaccatagctttgactatacggacctttgtcagcaaagtgatgtctctgctttttaatgtgctgtttaggtttgtcatagctccag

SEQ ID NO: 52671 - DNA, 2448 bp, Bovine  19866880347406
  misc_feature (1)..(1): n is a, c, g, or t
ngaatctaaaaagagtgaatgtatgtgcctgtataactgattcactttgctggatagccaaaactaacacaacattgtaaatcaaccctactccgataaaactttggtttaaaaaaatcctaatatctgatttgctgtaggttagaattaagaataataaaaatggggggcagatgcagccccaaattctgttgatgctgccatcacagggggaaaggaggccttcagcagtcgcaggaactaagccaaagaaagggcttgatggccatggagactgaagagaggaacgaataacttagcttttcctcctaccttgctattttttttcaatatagagaagagtatcactaattgtgaattgcaaaattctcatcagaaaattctgagtggcataaatcctcaggagttcctgctaattgtatgggtctatatatttacagtgatgtagagaggttttttttttccattaaaatgattgacttcctttgattagttccttaatgtttctttagtattgggattgcagttttaagttcttccctgtagaagtagaccaagtatatgagatagacttaacaatttattcactgtgtgtactttattctcacctaaataaaacatttgtacacgttctgaaatgtttgctgtagtgtttacattccaaagctttttggtacctctaagaaggtatgtggacttatttattatttttaatagtgtctgtttcggccttcttgctctcatgtttgcacagtttgttaatttaagtgtctcctttcagctcttggacatgcttaagttctatactggttttgagattaacgaccagactggaaacgctctgacagagaatgagatgacaactattcactatgatagaatcacttctctccaggtaagtgaaatgcattatagcctttgcatctgttccatgaagttgtgtcataaataatttaggttttatatagtacaaatggagaaggcaatggcaccccactccagtactcttgcctggaaaaccccatggacggaggaggctggttggctgcaatccatgcggtctcgaagagtcagacacgactgagcgacttcactttcacttttcactttcatgcactggagaaggaaatggcaacccactccagtgttcttgcctggagaatcccagggacagaggagcctggtgggctgcagtctgtggggtcacacagaatcggacacgactgaagtgacttagctttttagctttatagtgcaaataggaaaggtacttatttaatagtatgctcatcttgaatttttaaaatattgctaattctgatggatttatgaaaaagaaagttttcttttatagtcctcagtcttgagaatcagtatattgatatttgacagtcaaaaaatattagttattgggcaaacttggtacatttaaatatcaactttattttatgaaagagtatttcaacttgacaaagtagatgtgcatacttcatacattttaaagataaaggcatgtaatggtactgaaatttaccaatgcagctcagatatgccctaaaagtacctttgtttttattactgagctcattttgctcttgaactccatttcctctggtggcagaaagagacttttatttctcaatttaaagtaattgagatcctaaccttttaaagagtcttttgcggggaggagagcagggaacctgtacagacacagccaaacttaagttcagattatctttcaccatcaggtccactgtctctcaaggtcattgctcttcctgcacacagtcccaactcagatatcttttcctgcttttctcagagggttagtgtttttgttcctctgcctctgccctagaagtgaccatggctggtgtggtgtgtgctgttctcttggcaccggcaaggctcaatgattggtctcttagaggctggttgtcagcctactgacagggtcccagtgcttgatcttgatggtgccggagtcctcctgggagctgactgcttcatcttctagcttggggaacttacttgcaggcttggtgcagggtcattttgccattgtctatggtaatctcatggcaggccgttatccataaccttggcaagcttttgtgcaatcctctacaggggacttaaaaacttgtggaacttttaccttggcattaaggaggactagagatgttacctctcacacacttaatcaaatcagcataatgctgctctttctgttttcttgcagcttaccccatgttgattggaagtgttaccctgggagggcctctctttcctgagttccaaagtcaagcagggtgcatgcacactaagctgtaggcccctccctcagatacctcttcagtgggagttgcgcttgagacttccttttagttttgttaagccagttctttattttatttatttttttaagccagttcttaataatga

SEQ ID NO: 52672 - DNA, 888 bp, Bovine  19866880364307
  misc_feature (1)..(1): n is a, c, g, or t
ncacccacaccaccctggagcactctgattgtgccttcatggtagacaatgaggccatctatgacatctgtcgtagaaacctcgacgttgagcgcctgacatatactaacttgaataggttgataggtcaaattgtgtcctccaccactgcttccctgaggtttgatggcaccctgaatgtggatctgacagagttccagaccaacctggtgccctatccccgcatccacttccctctggccacatacgcccccgtcatctctgctgagaaagcctaccatgaacagctttctgtagcagagatcaccaatgcttgctttgagccagccaaccagatggtgaaatgtgaccctcgccatggtaaatacatggcctgctgcctgttgtaccgtggtgacgtggttcccaaagatgtcagtgctgccattgccaccatcaagaccaagcgtaccgtccagtttgtggactggtgccccactggcttcaaggttggcattaactaccagcctcccactgtggtacctggtggagacctggccaaagtacagcgagctgtgtgcatgctaagcaacaccacagccatcactgaggcctgggctcgcctggaccacaagttggacctgatgtatgccaagcgtgcctttgttcactggtacgtgggtgagggcatggaggaaggagagttttctgaggcccgtgaagacatggttgcccttgagaaggattatgaggaggttggtgtggattctgtggaaagagaaggagaggaagaaggagaggaatactaaagttaaaatgtcacaaaggtgctgcttttacagggaagcttattctgtttcaaacattgaaaagttgtggtctgatcagttaatttgtatgttgcagtgt

SEQ ID NO: 52673 - DNA, 2945 bp, Bovine  19866880450898
  misc_feature (1)..(1): n is a, c, g, or t
ntattttgatagaattcctattggaggtatttaaagatttaaagataatgtctaaaataatattgagctggccaaaaaatttatttgggtttcatgtacgatgttatagaaagcttgaacaaacattttggccaacccaatacttaaacttcagtctcgttgcaaattgctcagtccttcctggcagctctttctcagggaacagtaaatagtggagctggctccagatcctctttttatgagattctatgtatgtgtgatggtaaattttatgtgtcaacttgattgggccacagggtgatatctaatttaaaaattaccctagatatttctgtgagggtgtttctgaatgagattaatattggaattggtaggatgactaaaccagattgccctctcctctgcaggtggacctcatcctatcttctagaggcctgaatgaaataaaaaatggtcaataagagagaattcatgctttctctgtctgcctgtttttgagctggaacatcagcttttcctgctttcagatttggactaaactgtggctcagctggtaaagaatccacctgcaatgtgggagatctgggttcaatccctggattgggaagatttcctggaggagggcatggcaatccacgccagtattcttgcctggggaattccatggacagaagagcctggcgggctacagtccacggggtcacaaagagtcagacacgactgcatgactaagcacacgcacacacactatcagctctcctgggtctctgatttgggacttctcagcctccataatcctgtgaaacaactcagagtaaatctcttgtatacctatacattctatcggttctgcttctctggtgaaccttgagttctccggagaacttctgtgggttgatcatgatgaagcaatgaatcagggagttcaactatcttctcactccctagtcatacagctccttagggtatgagtccagagcgaggagtgggctctcctgccctctcaaatctctaggtctgatctggaatgggaggaattcctataaatctggatcaataagatctggaggccaaggattggatgtgagtgatattcctatgactgaagacttagtagtctcccccagacttttaagagaaaatttattcaaacagcatgactttgggtaacaaataaaacaataaagggaaaaacagactatccaagaaaggcatgggagtcttgtcaccagacttgggcttggaatgttacattcataagcctacctggtatcactctgaaaatcatcggcaagtacagacaagcaatcccaaaatagaaaaatgaccaagcttcagttcttcagctaagtagggcttgttccactgagtcagactctgaggttaactctgttccagccagaatatggacttctttgtccagagtaagctttgccacatgaaacacttagaccaacaaaccaacaaacttggagctggggctcttcctccagtattaagatttaattatttgagcgacaatttaacacaaataaattttcagtactctagtaattctaaaatgcaactgggattaagaagcactggtctagaccactctacagtaatattccatataggaccaagacataagattagcctacaaattctgaagacaattagattcctgtaattctcttatatgtaattttgccagaataagacagcacacatcagtcctgtcctactttccctgttttgcagcaattcgggagtcttttagggggccgctcgcccatctctttcctccatatttgtttgatccctatcaccctcttcttagactaagcctctgctttttaaagtatggtcctcagacaagccccagtgccattacctggatagaaatagggcttcctttggtaaagaaaggtggtaaaggatctgctcagatggtaaagaatctgcttgcagtgcaggagacccaggtttaatccctgggtcaggaagatcccctggagaagcaaatggcaacccactccagtattcttgcttggaaaatcccatggacagagaagcctggtgggctacagtctatgtggttgcaagagtcagatatgacttagttaataaaccacctaaggtaagaaagctgagcctctaaatagagttgctccaagtgatccatagctgtgatttcaggaaggcctgtagctgtttcctcactgcagatatgagtgatcacagaaactgccaccccacaggaggctacagctgagctgggggctgggcaagctgttcttcacttgccccacccccatccattcatcagggttctgtgtccttcctgcatcctgggaagctggcctttccagattccatacagattgcatttccaggtttctctttcctgctgttttcatcttaggcttggccaatgggaaacctttagcaagacactgagaggagaaagatatttcttctctacgtcctgtttggtcctatgggctggctgtagtggcatcctttcaggctgtcactccctccaggatgccctcttcatgcctccacctttaactgggcttctgtggaaatgctgctccttttcttgtctctctgtttctactggtagtactgtcttctcactgttgctagtctcaccgttcattacctcgccatcttgtttgttcctttactctgtctgcatgttggtaaatagccccttcattaaaatctcttcagttgaaccacctgggataaattctgtttccttttgggaccctgactgataacggagactgatagcacacccatatgaaaataggtcatagataatttgcaaagcaattttaaaaactctaaattaggatcactagcatgtacaaaagcacagataagaaaatgagtatttcatacagggcctggcaggtttctttctttttgtttctttctaaactaatgtagaa

SEQ ID NO: 52674 - DNA, 1451 bp, Bovine  19866880539722
  misc_feature (1)..(1): n is a, c, g, or t
nttactcaagaataatcctttcaactgcctatttatactgcagatggaaacctatagattgaaataaacagattttcattctaaaattggcatccacactgtcatagttaaaggatgcaacaatcgtgtttgaaaagcaatcatccaagaaatttcacgttgctttgcaatattcagatgaagggcgtattggaattagaaggtgaatagcatttaagagctgaggaagagcattagtttacggaactaaggggaccattaacgtagacagaaaatgccaaacacgaacaaatatgtgtatatctataactgaatcactttgctgtatacctgaaactatcacaaacactgtttatcaactattctgcaatataaaataaaaaggtgtttttaaaaaaaaaaaactaaaaaagaaagaaaatgtcaaatatgttagtaaaatgtgttgctaaaaagtaatatcttaggacacataagcaaaggattaatctcttttggaataacccagtaagaagtgcttgattaaaagtctataattgtgctttatgatacagtagcaactaaccctatatggttatttaaattaattaaaattaaataaaattagaatttcagttattcaattgtcctagccacattttaagagctcaatagtcattgtcatattaagcagcaaagacaacagaagtttctgtcactacaccaagttgtattgaacaatgctggtctagaaggttctgtttgactactggattagcatcatttaaacatcaggtctcaaatagatgagcacagggagcatggcctgctgccaaatgtgacagctgagagcaggaaagtatggtaaaatgggaaaaataattccactcctggaataaactaatatgttgcagcattgacattttattacaagaaatatccttagacaagcagagaaatcttggactaaaatggaaaggagttagtaaacaccactatttgaatacctcatcacagtcttctaaactttcacaaaatgtaccagtcttgtctcatctgttagtgactagacattatcagtcatcccccaagtactattcaaccatccatcacttcctgccctcacggttccgatttttaaatatgtgacaaaacatttttgaacatatatttagataaatagaatccaaatcaaaacataaaattgcagactcttcccattaaaaaaaaaaggcaagaactttattttaaacatatcctcagttgtgtattacatcacgtctgttacctaaaccaaaaatcataatgataatgcaaaggaaacggagggcttcataaaagcacatttatccaaatattactcttggccaatgctttaactaaataaacagtggatatgaaaggtacagtatggcacttaaataaataagagcaaagagaaggaaacaattcacagtccaaagcaacaggtt

SEQ ID NO: 52675 - DNA, 842 bp, Bovine  19866880589453
  misc_feature (1)..(1): n is a, c, g, or t
nattaaattgcacgtgtgtaaacaaactgtccaatgattgatgagagatgagggagggtggttcagaagactccaaaaagcatcataccatcatcctgaatgtaatgtagactaagagagaaggcaccttagaagcacttgcggtggacgatggaggggcctgcctcatcatactcttgcttgctgatccacatctgctggaaggtggacagggaggccaggatggagcccccaatccagacagagtacttacgctcagggggagcaataatctgcagaaggaaatcgaaaactgccagtgaactctgaggttccaagcaacagagaaagcaacatggtggggagattcacggaaaatacactggtgatcaagttgctgtaatgtgatacaaatgaataagctcagtaatcctacaaatgaatatggttgactcacgatgaatgcatttttctctatttcatcaattccatgatcaaagactctgtaaaatagaagttccccacttctctgaaccagagaatatgtggcaataagctataggcatggtgaagcctagtttgaaagttggggtcttttaaaatgtgttcaaagatttagatttttttttcctcaaagatttatttttatccactgcttcaaagtgttttaaaatctcctatctggggaaaagtgccagaaaagtcagaaaaggtgctataaaagcaaaaggtttctgtgagaacaggaagctatttgtgtgaggggaaaggagttaggaattctgcttggtatatggagacctgccttggttccccctaccccaccacagaagttctttaccttaattttcatggtgctggga

SEQ ID NO: 52676 - DNA, 804 bp, Bovine  19866880598027
  misc_feature (1)..(1): n is a, c, g, or t
ntttctaactttcggtctctgtgaatctgactgctgcagactgaagcgacttagcagcagcagcagcagatacctcgtataactggtgtccttcagtatccatacttttgtgaagttacaagcacttcacgccgtttaacttgtttaattatcatgctagctccataaggtaagattttgcttcccaagtggcacagtggtaaagaatctgcctgccaatgcaggccactgcagccttgatccctgggtcaggaagatcccctggaggaggaaatggctccctgctctagttttgttgcctggaaaattccatggacagaggagcctgatgggctacagtccctggggttgcagagtctgacacaactgagcaattgaccgaatgtatgtatgtatgtatataaggtaggattactaacccattttatagatgaggacattgaaacacaaataggttaagtgagaagtagaaagtaaatgttctgagagaaaggaaagatcttccttaatttggttctctggacgcagggatccacgaggcagacaatcctcttgttggaggcgcctctgagcacctgccagccccagctttccacataagttacggtctgggcaactggacaggcactcccgcaggagagaagagggaatgtgttgaacgagttaagtgcccccctgttcccaccccaccaccctcccagcacgcgtcgcaggctgagctggtgacccgggcaggatcggagccaaaggactaatccatcacaaaatagacgttctatttcgggcaggcggcaggagcagatg

SEQ ID NO: 52677 - DNA, 1504 bp, Bovine  19866880671936
  misc_feature (1)..(1): n is a, c, g, or t
ntctcagtcactacactgtgtaaaactggtgtgttaaaaatagtatgacatatttgcatatttatctgtattaaaagccccgtgaaacagttattgcagatacacagctgttgctttttacgtattttttaaaggaaccatatctcctcttctatgtaaattacatacattctcaaatatatcatctgagccaagggagtttcaaagcttttaactggaaaacttactctcataggagaagaatgttaaaggagaggaattgtagatttttagtcattgtgtccaaatgataaatttttaacctaaaatgataaacttgttcctttgccaagtaaaatatcatacattgtaagcagaaagtaattctggatgcttttacaaactatggccttatttcaacatggagactgtttacctcgtctacagagcacataagagatgctgctctatatcgatcaagttacagaagtctctgctttgtgacttaaaagtgacaaattctgttgtgaagaatttttctttaaattgcattctcatatcttcacaaaagctaatagtagcatttttctttttagttaaaaatgaaattatgcccctggaatgctagctactatcatcttgtatttcccagaaaagagatccaattgaaaaacagttctggcaattttccttattttctctataattgtaatatggacactttcaattttaagaaaacatgtgtattttcaactctgaccatattaagttgattaatatatagttcagatgcacatgatgtgttctcattttagtatctgaactatagttttatttttaaaggcttttaaatataaatagttgaatcaaagatatatttcatagttcaattttaccatgttagctaaataagagggtattaaaagaaaggattatcatatattaaattaaaagtttgtcactttgcagctctaatccatttgaaaaaaaaagatgatttcgatacaatttaatcagttagaggtctttattgccttaagtattaattgattaggttctcacctaaggtcaaaagtacacttggctgcctggagacggccaattagcaaattgtcaactgtgcttatttacattgaccgaacataatagtagttatttgacagtcaagtcagaaggtcaccaaatcttttgtacactttgccctccaaaagggcaacagtcatttagacaccagaaagcattcataacaaagatttagtttattacttattgacttaaatcactcttagaaacaggtgtttcattctctttggacaactgatatatcacttctttgtgaaatacttgcagtacagttgaaatcctgtggttgattgtatctgaagatttttgttcagcaagcagcttgctcttgaaactctaaataccttttttaagagcaaaccaatgcaataactataatcctttgcaatatagacttttctcctgctaaggatcgcaggagtggaacaagtggacacaggtg

SEQ ID NO: 52678 - DNA, 1371 bp, Bovine  19866880691278
  misc_feature (1)..(1): n is a, c, g, or t
nggagattctgacagggaaactggtggagcatgggaactgatatcgcaatatacaaattattgtctgaatctgtgccatctctagtaaggataggtgaatgcataaaatcaacaacagattgtacctgacaattaaaagctcaacaaatattatctgaattagtggttgaagaattaatgttcaccagtgtattttaaactgttaatgaaacttatctctccgtctctctttgcatttgcttctgaatgtcctaagtcccattccttaagccttcttaactgattttaatttcttatagataacactgtaagttattttattgtgggaggctcttgaagtaaaagatttcaaaaatgcttaattgcatgaaaagttaaaatgtgttgatttagttgatttgaaagagctgttctgcagttcattgaagtgataagctacatggaaataagtcttcttggaaaataaaagcatcagattaggctttctctggtttgtaaacccagaagctaaccaggttttaaactgaatttctactttccctcataatctctcttccttacaccaatgtaaacaatgacccagaaatattcgtaagactattgtttacccctaaattatgtgtgagttggagacatgtttctggtttaatagactcttgaattatatgatggattcttttataaattgtcgatttttttcctgatgggcatgttcatatttaaaccacattaatgatgtgtaccattatccacctctccccaaaagtgtactgactttgctctaaatttcttatgagtatcagatttcttcacgatgttactacctgtcagtggcagttgagaaatcatagaatattgtagctagatggaactttcagagccatttagttcagtcctcacattttacacataagcaagctgatctccaagaagcttaatttaccttcccaagttcataggtaatgataggaccctaactagaattttggtctcctgatccccattgtagccctggtgtatatagctgactcaacccaagtgtatagtagaagtctagctttactccctcatcacacgctatcttctttcctaattccaaagttgttttaaatttgtgattaatcagagtaaaagaaaccctgaaggagctattcttctggatgtatgttgagatcagttcttttacttcagatcagcctgccttataagccttataaccttataagcattagcttttcatcttttcacctgcttagaaattgaaagacattgataatggatgcataaatgcatcatgggatgaataaattgtgtgagttagagaagagaaaatgaatgtgttcgtgaaagagcgagcacatcaatcagtgg

SEQ ID NO: 52679 - DNA, 1164 bp, Bovine  19866880731975
  misc_feature (1)..(1): n is a, c, g, or t
nctaaagattgcagagctgtactatgaattacagtattaacatcccctatattttagaggactgtgcgcacaagaattattacacctgggtccaggaatttttccttttggcctttgaaaagtccaatgcaatttaatctttagtagtaactaggttatgaatgtattgtacaattacaaaaaaatttaaaagtacaaaaacaatggataattgattcaagaattccaaagaaatgtttggcttacaggaggtacccagttgaaaatggtaaaacttttaagtaataaccgactcacataaatatagattcttaggactttcttagctacaatgctataaattcaggagcatcctgaatggatacttccactgccagtgctgtctctaccctagcttgctggtgatgtagggaaaaggcaaggacacaaataactcagcaaacctcttttcaacacgttgtcaagtcccttataaagcaagcgcaaacatggcagaaagccatcaccagattccagagttgaagaaagcataaattgttacaagcttatgctatagatcaactacccagatttggggaggtttctgctaataccttactctcaaccatccttgtcatttctttttcccctggcctacgtgggctttactgcccacttactcctccaaaacaataggccaggtgacaactcgttccagctaatatttcagctgatgtgatcactggaactttactgaatttcagaacttcaccctttttattaaccttagaatctctaccaaggactcccctatcacttaagtaaatgattaatattgattcaaaaaatgacaaattgaaaaagctttagggatttttgtctcttccctacaagtagcagagttcctgaacaacagttttcacttgtgataattttgttttatgatcgatttagcacagcacagtactcttgttaatcttttgagaaatgtttatacagtcttactttaaattgttttcttttatttaatctttgttttttaattagtggaaaattgctttacaatcttccatacatcaacacaaattaatcattattttatatatatatatatatatatatatatatatatatcccttccctcctgagcctccctccctttcccccattaaatttcttttttaa

SEQ ID NO: 52680 - DNA, 952 bp, Bovine  19866880742391
  misc_feature (1)..(1): n is a, c, g, or t
nataatacatgattaaatgcttaggtgtcaggatttatggtaaatttttctctactttggagaaaattttgttaataactttaacttatttatgtatttattaatttattaatattgggtttccctgatagctcagttggtaaagaatccgcctgcaatgcaggagaccccagttcgattcctgggttgggaagatcccatggagaagggaaaggctactcactccagtattctggcctagaaaattccatggactgtatagtccatgggatcacaaagagttggacatgactgagtgaatttcattttcactttcattattaatattaatacttttgatgtttgcatttatataaatgttattaaatattactgtctcgatgattataaaggttttcataaaggaactagaaacactgaaacacattccacaactgacggattcaggaggtaaattgaacagactgttagggttttggtgaagcacagtttatgtcctttcatgacccagccttcgctagagaagagacacctaaattgaatgaaactgaaaaagaaacatttttttcaaaaactaggataaattgaagcttttagataaagttgaattgcattgaaaaagccggtgaaccattgtggctttttcataggcttttcacagtccctcaaaagttctaacgttgtataaaataaaatgcgaatgatgacattacaaagattaggatagagatttcaaattatactgaaattgtattgggtctagatactagcatttattcaaagtaagagaagattatgactttggactggctacacttaccagttaaatgcttactgcttaaaaattgaaaatagaatgaatatataagatggatcttaaaattactgaggtattgttatatattcatatattctaaaaggttctatatagtgagtcattgagagcaaatat

SEQ ID NO: 52681 - DNA, 861 bp, Bovine  19866880759253
  misc_feature (1)..(1): n is a, c, g, or t
ntgtgtgtatatatacacatgtactcatacacgtatgtagagaagtctatcttctctttaatagctttgagattcttatattggattaaaacatatgctttaaaaccattgttcaaaatctgctagtggacaagccaggttatatgtcaggaatacctaaaggcagttacctattatcagtagcatcgctctcagtcctgtacctgaatgtctctcaccaagcagcatgctactggataaaacatcgaaaaaggaaacagaaaacaccatcatgaaagccaagaggtcctttgggagctgacagatggctatgtcatcttctattcttgtttatcttttctcatttaccttatagttttctcctgtggttaggagccatgtttaacctcccccacaaatgtcacatctaacctctttattgagttttagaaagtgattggtcctaaataattggaattataaaaatcaagataaaaaataatctatttccctttgtgatatgatttaaatgtctctgaacacaatgaaaatcaatgttgggatcaccactgctgtttatacttagccatgttcacatgtgatgtttagaagttattcatctaatttgggaatttcctgactgcagtaaatttaaactaagcatgatatcatcacactgaaattctcattttcactgtaatatctaaagaagggagaatggcacccgacctatgaaaactgcctcacgtatgtgagaagtgtgcttctcctgatggcatgtgttaatcaggacgtgaggttgaaatagatttactgtgatgttgggaggttttcccacacagataatgatgatggtgtgtgtgtttgagagatatgttttta

SEQ ID NO: 52682 - DNA, 813 bp, Bovine  19866880773955
  misc_feature (1)..(1): n is a, c, g, or t
ncctcctctgcagcaatgatatgataaaggatgacacaccggcttcatcttgaaacaaggaatgagatagagtagtaacggaataatccatatctgcaaggaagagatgatgactcaagagtgctgacttattctggtagattccatcaccaagtagttagaccttacttctgagtcactcattactaagtgtgataacaatcctacttatagtaataactggacactcacgtgtcactgaacatctttcctaagcagggatttccaagaggaagcttgccagtatcttattttagtccataaataagaatggcattcatttcacatgaatgtgtgtctcatgcttttctattacatctccataggtctgatgggtacagtgcgtgttccctccaaacaggtgctaaaagcagttgtttgtgtcttggcagtctgttgtagattactctcagcacttttaagacatctgttccacaaaactctgcagtgtatcttatagaggaacatatgtttcagagacaaatggtgacagtttaccaacacagagaagtcttgttctcttccctccaccctggccccatggcctgaatgcactgtgacttttttaaacttgctcataggtatggaatctgccggcatccatgaaacgacttacaacagcatcatgaaatgtgacattgatattcgcaaggacctgtatgccaacaatgtctttatcccggaggtaccaccatgtaccctggtatttgctgatcgcatgcaaaaggaaatcactgccctggctcccagcaccatgaaaattaaggtaaagaa

SEQ ID NO: 52683 - DNA, 1299 bp, Bovine  19866880939123
  misc_feature (1)..(1): n is a, c, g, or t
nactcacatcttgtacatctcctgcattggcaggcaggttctttactactagaaccacctagtattcagaatagtacttgatgtacaggtgtacagtatgtgcctaatatttattgagtaaataaatgaaggaatggttaacaaataatcatacatctaagtgattagtctcattcttctgtctggtcccagattgggcctttaggaaattctgggatgtccacttcaaaagctgcgtgcaatagcaaacctctgttcccactgagtgaatgtggcaggaaagcttttctgtttttccgtttgcaggggtagggcgatgaggtgatagtggtggtagtgacaacagaggtagggtatcccattcagcacataccccagcctgacttctgggaattctctgtctctccttccacttaacccaagtctgctaattccaactgggttcacaacttgggtaaaacactatcatgtctatagcttaaaattacataagttcagaatacagccaatccagttaacagttagaataagagaccagtggctatttgttcatttctttcctagcgtgtacttcttcttcctttctaatattatttttaatgtccagactatgacatttgaatgatattgactcagcttacagactgaagctcaatttaggaatggacatgtaacactggcttaagtcgatgaatctattacatttctgtggccttatcaattggaacagaattgagtatgtgatctaaactagatcaatgaaagtaattcagtatttttgatgtgaaaattaagctatggattccttcatttctacctgtgctttcggtatggagatataaagtctgtaactgcaatggcaataagaagagagataggagctgctaaaagaccatatcaggatgtagtaaacccaggggaagtagactaagagatggaacccaaatatattgtgtggatacaggatcaagctgtatctgaagtgagatctattcaatttctatatcctgaagtcaaatactcttaatgaacatcaagacatagatcctaagttggacactatttccatctctggtatttggggtataacctgttgcagacaatgtcagtgctctgcccagaaacccttttcctctgtgtactcaccctttgatgtaatagccatattctcttgggctaccagagtcaattagcccacaagtagcagagactgtgtagtccagagatagggaagtccatttccttgccccaactgagacagctctatggcacaatgtgtattccagagttctcctgagg

SEQ ID NO: 52684 - DNA, 1084 bp, Bovine  19866880975157
  misc_feature (1)..(1): n is a, c, g, or t
ntgacaataagaatcgtacgtaaaacactcatacatcgtcttgccagattcacctgttgttgatattttgccccatttcctctatcggatgaatgtgcactctccttctctctttgcatatgtgtatatgcatagacatgtatatattatgaatatatttgtatgtgtgtgtttatatgcacacatatgcattttttctaaaccttttaaatattagttgcatggtcttttattcatacacttcaacgtgtattttttctacaaataagaatattgtcttacatacaagtagatttaagatagacttttttcccgctaatcttccatctgtattccagttgtgttagttgacccagtgatattcattacaaggtatccaggtcttacttttggagtcaggttgcatgtgttgtatgcgataccagtagtgggctatgttgagaaagttatagggccctggaaaccttagtggcccaaacgtttgctgaaagaagtaacttatttagaggaaaaatccaaatatagtcaggaatgaaagcaaaaagttgaagccagaaattcagttctaggcctcagaatgagaggtcatacaaggccccaaagggacaatcaatcatgagattggaaacgtgatacaatatgtgttaaggcaagagatttagaattaatgccctgagattgatggaggtctgtcttcatgtgaaaacatccctatagtaaggaaataagcttgatagcctgaaagagacagagcctgccttgcttgggctttgcctgatagaagactgtgactcagttagtggcatggcttacttgggtgagatgagcttcccttggtgacgctctggagcagaacctgaaatgtccttcagagatagaggagttcaagaccttctgtacttgttgcctctgatcatgagggaaaaggtagagagccatccaaataagagtaaaaacagtaagaagtaacaggggaaaggagtaaaagatgggtagggaaatgatttctgattttcagagtggacctaggaaacatgcttcgggtttgtccaatggacgcacagttccagagggaagagagtca

SEQ ID NO: 52685 - DNA, 2134 bp, Bovine  19866881103902
  misc_feature (1)..(1): n is a, c, g, or t
ncttactcaaactcaagtccattgagtcagtgatgccatccaaccatctcatcctctgtcattcccttctcctccggccttcaatctttttcagcatcagggtcttttcaaatgagtcagttcttcccatcaggtggccaaagtgttggagtttgagcttcagtatcagtccttgcaatgaatattcaggagtgatttcctttaggatggactgattggatctccttgtagtccaaggggctctccagagtcttctccaacaccacagttcaaaagcatcaattcttcggtgctcagctttctttatagtccaactctcgcatccatatataactactggaaaaaccatagctttgactacatggacctttgttggtaatgtccctgctttttaatatgctatctagattggtcatagcttttcttccaaggagcaagtgtcttttaatttcatggctgcagtcaccatctgcagtgattttggagcccccaaaaataaactctcactgtttccattgtatccccatctatttgtgatgaagtgatgggaccggataccatgatcttagttttctgaatgttgaattttaagccagcttcttcactctcctctttcactttcattaagaggctctttagttcctcttcggtttctgccataagggtggtatcatctgcatatctgaggttattgttatttctcccggcaatcttgattccagcttgtacttcatgcagcctggcatttcacatgatgtactctgcatataggttaaataagcagggtgtcaatatacagccttaacgtactcctttcccaatttggaaccagtctgctccatgtacagttctaatctgtatgcagatttcttaggaggcagctaagatgatctgttattctcatctcttgaagaattttccacagtttgttgtgatccacacagccaaaggctttggcatcgtcaataaagcagaagtagtactcttgcctggaaaatcccgtggacggaggagcctggtaggctgcagtccatggggttgctaagagtcggatatgactgagcaacttcactttcactttcatgcaatggagaaggaaatggcaacccactccagtgttcttgcctggagaatcccagggacaggggagcctggtgggctgccatctatggagtcacacagagttggacacgactgaagtgacttagcagcagcagcaggtgtttttctgggactcttttgcttttgtgaggactatttaaaggagccatatatttaggctgaagtgaaggcagcaggttactgggccaaggagaatggcaatttttatagcagtccataatatttgagggcttccctggtggctcagatggtaaagcatctgtctgcaatgctggagacccgggtttgatccctgggtcgggaagatcccctggagaaggaaatggcaacccactcctttactcttgcctggaaaatcccatgaacagaggagcctggtaggctacagtccatggggtcacaaagagttggacacaactgaacgactttacttatagtatttgaaagtctactgatactttctgtggcttcagagaacaattctaagagaaagtggaagccgtatagtgaagcaaatcttggtttggtatcagaactttttgacatttggagctgtcaagtagtggcattaggaggttgccataggcccttgtgtgactttcttcaacttctacttcatgcccttgctcttccttatgtaaacctgtcccgtcatgctgaaacagaagtaatctgaggttgtagaactgagctgactaaggttgcttctgggaggaaattccatccttccccaaagactgtattcatggctctattcatgaagggtagaggtttgcccccattaggtaactttagaacaatatgccacttgctctgagggcagttctatagagagaattttggaaatggattgattaaaggcgaatatgtatttctactggaaaaagcatatatactgtgcaaaggtggccactgtgaaggtgacagccctcatttaaatacataaaaatcagtctaattatgacttcttagttttcattaaaatctgaagcttacatggaacatgatgaga

SEQ ID NO: 52686 - DNA, 771 bp, Bovine  19866881144587
  misc_feature (1)..(1): n is a, c, g, or t
nctggtcctaaccagaatgaatatatccccttctagagaaatttaatagatgaatcaccaactcctgttcagtctacaagacatttagcttaagtccagccagtcctccatgtctgggtctctgttgtgagacaagatcttttgcagactgatacgagagtattggatacctgtttttctccctgaactgttagcactaatgtgataatagaactgattcagctggtgataggaactagttttcattatttttttcaggctcctagtcttcatgacacagaaacagatctgaagggccaaaaattaatagcacaaagctaggagtgacactattcagattttgctgaaataacaatgactttatatttattcatttgtataataaaacatttcaaatccatcaaaagaaaattctgggaagcctcctatttaagaaatacagttttttgaagtgagcaaattttttgagatggcctttgatactgtgttcagtttctccttctttgtttgaaaacctggcatttgtcatctgtcataatgtgtttactttgagtataatgttttaaaggtattattttgtcttctgaaaactcctagaaggtttgttttccttacaagcataattatatctagtttcttccatcagagcttcatattttaataatatgttgccatgtgggtacagctataaccataataatgaacatggggttcaaagatcactagatatatagatggcatgaaccattagcaagaaatattctacaccat

SEQ ID NO: 52687 - DNA, 1377 bp, Bovine  19866881144712
  misc_feature (1)..(1): n is a, c, g, or t
nttgttgatgctgcgggaagcatcaagatgagagtctaaatgacacccaccatagactggtaaagttaagtaaacactagttactcaaaaatatcagggacttgactttctgggtttaatgtcctgacaaattcatcattccttcgaaatgttaagaccagagaagcatttcactggcactgtgctaattcttgcttaattcttcaaaactttgttggacatggtcaggcctcaaggtagatgcactggaggagaactttggggaaatgtgccccttagccactccagcagatgtggaaagcgggaagagagccagtgggcaatctcaccctccccacatatacatattcatctcttctctggtcaccatgcccagggaccttgtcagtagaggttcattgtcagaaaacataagtcacactcactgtaaattctatcatcacagaatcactgttctacctctggctcatgtgaggacagcacagtaatctcagtacagtgcttctcaaactacaaagtgcagatgaatcaccaagggactttgtggtaatgtggactgagatttagtagacctgggctacagcccaaacttctgcatttctaacaaatttcagcgcaacactgatgctgctgatttgcaaaccacacttgagtagcaaggtcctagtacagttgctttcccaaatctgaagcacattttaccttgaggtctccttgtagttggctatctatcaggagaactaaccaagacagaaaacttagaacctctgtgttgggagaaatccatcatgaatacaggaattaaataagttcactgattttcactgcctggaccctggacctttgctcctgcccagatggatttgccagattcttcttgtttagctgaatgacgaattttggctcagtcttcaccagactaatccaatgccattcagtcagcaattcaaatgttaatggtgtagcacctgtaaacataaaaatgcaggctcctgggctctaaccctgagactctgattcattagttctggagcagcctcaagaataaatagacattctaggtgactctaacacactctgaggtctgggggaaggaaatgcatgtcctcttcgatggactggagtaatctatatcctgtggtgttaatgcctttccatcaaggaagacagcaaagaaatgaaggacagaaagacacatgacctgatcatctcacactatgatagaagaaatgatttcctccccaagttggacacttgcttaattaaggtcatttatggttaattccagtacattttatccttttttttagagaagttcactaaaaatgtgaactattattccatacaaaattcttctaatgtcggtatgattacaga

SEQ ID NO: 52688 - DNA, 825 bp, Bovine  19866881146589
  misc_feature (1)..(1): n is a, c, g, or t
ntgatgtacatgttttatttaatggtggattcttgttatgacatttcccttcaggaatgaaagaggaagagataagttattgtcgatgcagccacaagcaaattcaaccatcttcctcggcactgaagagaaatgtcaaaaaagattaatcatgcattaaagatgcatggacatgttagccctcttatatattgaaggactgggttgtgtttaaacacttatagtccatcatgagatagtcagggacttggcagccttgaaaaaatatttatatcagtagctctatgacctcaactgtctcaatacaaagatagaagaaaatatttcattgatagttcatctgaattatggttgttaaattttaaggctattgagatttgtaaaagagtatcttcacatagttgaatttatttcttcatcattttatgtttttagaacatcacatttgaagaaggccttgtgtgtttaggtcaatttctcttccaggatgacagttaagaagtcacaaaatgattcctaaaacaggaagggaaggaaaacatatccaatctaaacagaagttcagttcagttcagttgctcagtcgtgtccagctctttgcgatcccatggattgcagcacaccaggcttccctgtccatcgccaaatcccggagcttgctcaaactcatgtccaccgagtccgtggtgccatccaaccatctcatcctctgtcatccccttctcctcccaccttcaatctttcccagcacatatcaagaattgagtacccaaaaacattatgctaaggaaataagccagttgcaaaaggacaaatattgcattt

SEQ ID NO: 52689 - DNA, 1703 bp, Bovine  19866881170211
  misc_feature (1)..(1): n is a, c, g, or t
ntcatttcccttggctcctccagatcttttccacctgctctgtgcctagaaaactaacctatctgggcttcaggcccataccccattgccccgggattctagccaatggggagccctgcaggttatctggaaacctggggttttccttctcctgaagcacagtctcctggaggcagctgttcttgaggcagtcttattcccgtgactcttccttctggcctccaagatccactctctcctctcgtctcctaggatgtgtgtcttggtattatcacagctctgctatcccactatcacattcccatctcttgtaccagcactccacccacacctttgagggagtctccttattaaaccctctttcaatgatcccaatctgagaataccatctgtttcctgatggatctctgacaaatgctacacaccaatgcattcagattgaggcaggttttcctgcctatggattaagaaaaggctttcagcttttaaaactttctggacctaataatataagatattgtaaacccatccattttactgtttcttcggtttaatatatactgctacttctacctggaatgcccttttctccttgtccaactagctaacttcaatttagtccttatacgccatgtgaacttccagtgaacttcaagggtgaactagccattgaccaatgccctgtagacaacacctcatccaatagtcctggacacttgtaaagtccctggaatagccttggaaaacttatgtgagttggggcttgaagggaaaaccccactgaaggaggtgctggacttacaagtactgttactgttacatacattaaacacatgatgaacaaaagacttaacatttcttaatattattgcatgattctaaaaacactgggtgagcgcagtcataaacagttaaaatttgctgattttaaatttcccattattcaccctcttgtgccaaagactcatggacaaaacacaaatttttttaaaaatactcgcccttagcatgtgcaatgtactctgacattttctagcctattgtagtcaatatcactttttaagaatattgatcacaccctagaaacatgtcatacaatgcacagtgtgaaagacaccaaacaaaacaatatgcactgacaaatgcttccaaactttgtcaaacaaccaaaaaatgttaactaaaattgtaaccacactttagttttttgccatttctacttccaggttgttgcccccatcttcagagtcccttggactgcaaggagatccaaccagtccatcctaaaggaaatcagtcctgaatattcactggaaggaccaatgctgaagcttcaatactttggccacctgatgccaagaactgattcatgggaaaagaccatgatgctgagaaagattgaggcgggaggataaggggacaacagaggataagatggttggatggcatcaccgacttaatggacatgagtttgagcaagctctgggagttggtgatggacagggaagcctggcatgctgcagcccatggggtcacaaagagtcagacatgactgagcgactgagctaaactgactcccatttttagtgatttgctctcctgaacagagcccaggaattcctgtcctaaagttggatgacatctggctagaccacatgaacgtgtgctgagacagaaaccagagcagcaggcaatcagggagt

SEQ ID NO: 52690 - DNA, 1285 bp, Bovine  19866881209942
  misc_feature (1)..(1): n is a, c, g, or t
nccctgaaaccttcccctccctgcccccgtctgtggaaaaactgtcttccatgaactggtccctgatgctaaaaaggttgaggactgctgtcttaagagtatacagattcttctcttccttcctactaacagaacttgacataaatgcttgctaccagacttttatccaattgataatcattactattaaaacaacctgcaaccctcatctgcttccttactcgttatatactttatttatctttctccttagcatgaaccactggataatataccataaaatccatctgttattagctgctttccccaactagaatgtaaactccacaagagcaggaattactttctattttgttctatgccatttctcctacacctacaatagtacccaataaaataataaacacttaaatttattgaatgaatgaagcgtataaagtgtagtgcgtaagtcattgttaagagtgggggaataggaaaaagaaagaaacttggactgacagcctaaagactgtggagaaaattgagacccatccatgatgaacaaactatgatggacaacaggcaaagggaagaccactgataacacttgcgacgggggcagagataagggaaaggagaaatgaggatgtgtggcatctccactgaaactgtataaaaaatatttctatgacggtctaagcaaaagcacttcttaatcgtttaattggttcagcactatgtaaagggaagaacaaaacaagtcagcagcatctaagactcacaactcagtataacaaaccaacatggaacaaagctctggcaacatactgttctcttgcttctggatccatcttttcatcattctttttaatcaagttccagaattttcttagcttaggtgtcttttttaattctaattccaatcgtgcctgaaagaatgatgtggcattaaatcagccataaccccaatgtaagactataatatagagcaatgggataaaaccagatagaaacgtgacaaaagctggaacctaagaaactaatacccatactttaaaaaactagttcaattccattatctgtcaatagaaaaaaaaaaacaagacaaaagaaatttctcgttaagattttaagctcagtaataaattttctttcttatttctaaattttctttcttatttttaaaattcaggacttcagtttgaaaaatatgggcattaacatttaaagttcaaaagtcagtctgaaacaatgcatataaaacagctatcataataaggaaaggtccataccaccactcttt

SEQ ID NO: 52691 - DNA, 1523 bp, Bovine  19866881273683
  misc_feature (1)..(1): n is a, c, g, or t
nttcatcggcaggcagattctttaccactgagccccagggaagcccctggaacttttaaaatgttaattgtattatgaatcattctcattttatactgactcaaaagcattaattaaacatcatttggtatattccactctgatgtgagcataaaaatattgacatatgtatatagcttctaccttcgaggagtttaaaagctggaaagtgttttctcctcaaaactttcatcactgtactgaattataatccaatactgctgtttctcttgaacattaaacatacaaacattcattggaaacatttcagttttatgggtcatttgttcaataattgttggttaggtgtaagatactacttcagctactgccttgaagtagcttacattggtaaggcaaaaaaaagtagtatgtgaataattatgatgcaaaatagaagcaattaaatgacataattgtttaagcaacattgtctaattctcaaatttccaagaagatgaagagagccacccaaaatataaaaagtttcttcaagataatctattattgaattgcagatctgggaatttccttcccaaggagctcagttctcagtagtattatacttgctcctaaaggtgatgtaccatttgcatagctaattaaagcaggaaacatactgaaatgtcttaataaaatgctacccattagtggagaagggcagctactgtcaataaagtgattttgtgaacagtaagtaattcttgccacacaatcctgacataatggcttcatttactgcttgcaatcactccttctgtgctggcttttcaagttagaaactggtagatattcaatataaggattatcatcaaagtgtaattgctgaggaaaacccaagcagtcaaacaataatgaagtgtatccattcaaaaccaaggaaaccaatattaatcataaatacaatatgaaaactatagcatctgaaacagtgtgtagtgtttagtatagaacttgaaagcataaacttggggattggacagacagagttttaattctgcctcttccattcattttctttttattttaagaaagttgttttggctgtgctgggtctttattgctccacaggcttttctctagttgtggtgaatgggggctactctttagctgtggtgcacgggcttctgactgcagtggcttctcttgttgcacagcacgggctctagaacacaagctgaatagttgcggcacacgggcttagttgccttgtggcatgtgggatcttccccaaccagtgattgaacccgtgtctcctgcactgacaggcagattctttaccactgagccatttgttagctgcatagccaaagatttccctctctcatctgtattaacatcacaataaaagatggtagcaaatgctcttttctttcatattccccctttatgactcctaaaacagagaataactgtttctttaaaaacatgagtatttatcttgctttgtcttatagataggtgctttaggcttatctattgcc

SEQ ID NO: 52692 - DNA, 1240 bp, Bovine  19866881467189
  misc_feature (1)..(1): n is a, c, g, or t
ntggtgggctacagtccatggggatgcaaagagttgaacatggctgactgactaataatttcattttcccttcatcaacagataggagtatggaggatgtgttcctcctcagtatctgatgtccctacagccattaacattgccccttcccccaaaactgagaaatccctccctccttgccgtgccttagtgctgacatacagagtttacattgagacttggcacagaggaaaatttaccatgaagatcattgtgaaggtgaagtgtcagagtccctcatgttcacagcatcttccaagctcttgggagggtccctaacatgtgtagcaatatcatgtacttctgcaaactttttaaaaatgtatgtccctattctcttacttaaaaaggatccctccacacaaatataagcttcccatcccattagaatttccagatttagcaaataaaacttcaagatcacagttaagtttgaattgaagataagctattgataatttttgattattccaaatattgcatggaacagagttatactaaaacactatttgttgttcatctgaaattttgcctagcagccagttttgtctatcagctgcccttcctccctcaaaactttgatcctctgctgtttggaccaaaaatgataagacaaaccttgcttttcccaaatcggataaagaattgtttagtttatgttgtaaactcttctccaactataatttgagactttgaaagtcagtcctgaccaatcttatgcaaccttattttttggcacatttttttgctacagaaacacagattaaaataatttcccaactttgtgggaaaatgagaaactctcctgttgtctggcgagagacaagagaactgtgaaatgtcactgttgggctttgagttgggatccagagtggagcatgtgtttttggaaaggaagctctgtaaatggctgcagaaagcagtagctagtgggggaggagagaatcctggctcaagaagatttgggtcacaataaaaagtactaggggctttcctggcggctcagcaataaagaatccacttgccaatgcagggaatgcaggttggatccctgggtcgggaagatcacctggagaggaagtggcaacccactccagtactcttgcctcggaaaccctgtggacagaggagcccggcaggctaaaatccttggggccacaaaagagtcagacaaaacttagcaactaaacgacaaggaagt

SEQ ID NO: 52693 - DNA, 874 bp, Bovine  19866881547994
  misc_feature (1)..(1): n is a, c, g, or t
nacccctgatgctgggaaagattgagggcaggaggagaaggggatgacagaggatgagatggttggacagcattcatcatgatggacataagtttgagtaagctctgggagttggcgatggacagggatgcttggcgtgctgcagtccatggggttgcaaagagtcagacacgactgggcgactgaactgaactgagaggcatggaagagtctatgtattcaatcactcagttgtatccaacttactggggctccatggactgtgtagcctgccaggttcttctgtccatggaatttataatacaactttataaaatgaagcaaatttgttcagagcaagcatctaagtattgttctattatccattcatttcaaatatgtaataaaaaacagctatagttaaaataacctgaaatatttgttagcaaagaacaagtaaggtagatgccattcagaattctagacaatagaccatttatgacctgattgaccatcaataaagaagttagagatatatgagattccttttcaaaattcaattaatggttgagaatactcagcagagttgatcaggaatctcaaagctggtatgatttctgaataaatctggtgtatatcaattgagtagaaactatcaatatccactgcacaatggagattacattgtccagtgatacatgttccatcaatgccaataggagattaggccaaatgatgatacaatattttagaaagtcattactattgttttaaaaaatttcaaccgaattatctgttttaaccaaactagctagagaagtagctggtataaatagtcagctgcaatttttgttttcttaaaattctgctgtgtgtatagttcatcggaaaggaa

SEQ ID NO: 52694 - DNA, 830 bp, Bovine  19866881937190
  misc_feature (1)..(1): n is a, c, g, or t
ncttgcattggcaggcagattctttacccactgaacccaccaggaagccctagtttaccatgtactgccagttaattagcaggcagatctagacactattggctttttttaaaaatcacaattgcactctgttagtcccgatgatccattatgaaatcttactatttctcacaagcatcggatttctctttcatgttttttaaatcctgcaatattcttttaaggtaagaaatatttgatacttttattccaaaaggactaaccaccttaaatcaaatattgagaaaaaattattattttagaacaaagatctgataagaacttttgatacaaaagttacattcacattgagaataaaaattgtcccaaacctggtctaaggcagaactttcttacatgatataattcacagcctcctctgggatgtaacaggtattgctgttaaaatgcttgagcaattttctgatagagctaaataagattaaggacctctgggaagccagggttacccacccagctgactggctagcctaataatctttaaccagacattatttttcccttgtatttggtttaataatgattaaccactcacttttcttacactgacagagtccttaaagggaatcttgaatcagcacattgaaaggtctcatcccttgtgactagctcgaaatagttttggcccagtctttgaactcatttgcttaagaagttgttttaacatcatttaggaagaaacatattttttttactgctttgtgtggctacaaattttcattgaaaggtagtaaatatatataaatttaaatttaaattaacggaaaatt

SEQ ID NO: 52695 - DNA, 1194 bp, Bovine  19866880506869
  misc_feature (1)..(1): n is a, c, g, or t
ntaaaaatttaccctgcaatgcaggagatctggggttcagtccctgggttgggaagatcctctggagaagagaatggcaactcatttcagtattcttgcctggagaatcccatggacagaggagcctgttgggctatagtccgtgggagcacacagttaaacacgactaacactttcactttcatgaataaacttttttgtttattttcacataacttatgaccattaccaagtcataaattaggaaaactcgacagtcacaaaattagtaagttctcaagtttgggtaaataattgaaaaatcattgatcctgaaattgtcaacacagcagcagctgtgtaagggttaacccgtttcccatgctttttctccatgaagatgaactaacaaggttttgttctcttctaaaaaagattatttcagagcgtaggatgctttattatgattatacactattagtgttctcaattctataaatatatgctttgaaatatagcagtgaggtagactttcagcaccttatcaaccaagaaaggaagtatgtacctaaattaccatcaccacactgacaatttgcaactttaaattattcacaaagttcaaaagaagttgatcccaactttatggaaaatttaatatgaaaagtaatgtttttatcttatcgcaaggaaatgtttccagttctaatactgaacacatactgaagaatgaaaatagcaaaatcccagagtgaaaaaaaaaaaaaaaatacaagtctcttttaacatttctgctctcagaagtgagcaggattaaaatgtatttccccaacaaccgttatttctcattaaaggaggggcacacacatgtgtatattaaagaaactatgagatcccccccacatacacacaccctttttcaacccctctgactggagaatgctcaagcaaagttatgactattccagttggtcagttctctagggaaatgcatgcaggcaaacactcatgcacacaatactagtgatatatgtctcaacctgcagtggacactggaaagtcctctgtatcaagtttccttaagataatcaaggccaggacttgcctggtggtccggtggttaagatttgcctaccaagcaggtggtcctgggttcaatccctgattagggagataagatcccacatgcctcagggccaaaaaactaaaatgtaa

SEQ ID NO: 52696 - DNA, 1353 bp, Bovine  19866880510613
  misc_feature (1)..(1): n is a, c, g, or t
ntcttgtgattttaaaaatgatgaaaacgttcatctaaataataaacagcacctagaacctcccagattttctcaaacgtatctcttttaggaacagaaaaccccaggcaccgggaaaggaaaacattccaaaataacctgaagggcttgatgcttattaaatagcaagatggttcagtcgaaaaagctaatgatgccaaggagcgtcagattttctccagagcttcaaggtgaagacaaatagagctctcagcagcattacacataatgaaaaccatcaacaatttcctgcttcttctgtcttgcgctgatacttctgtcgtgcagattacccgaatttgattgcaggatttttctcccttgttgttgccaagaactataaacaccatgggatgtaataaagtggtgctctgggtcttttattgtcattattattctaactcagttttagaaattagatgtgactttactggctaagagcagagctcgccatcttttcacataaggtgtgccagtcagacacccccagtcatgtcacctcttattcatcagttttgcaaaggtgccctggggaaagagccatggcaagcagagagacacctgtaaaatgcattaaaaactcttctgagaatgatttttctctgggactgagccacatttactaggtgacaaacagccttctgggcattcattttatcagtcaagtatgctcgaaagctcagtattctcccacaactctcactaactgtacctccaccctgacatctttttattttaaacaatgtcagaattagctgaatggtcctagtcctaaggaaagggccaatgctgtacttgaaaagcactaaggtgtccccaagagatatataacccactctctaaccaggcatcctaaattgaattcaaactctgtcctgaattagctaaatattttgtataagttactaagccttgatttaattctctcctgtcaaaaagagcttataatacttccgagggtgacggtgagtataaaagagacaatgtcttttaaagtacttacataatgtttgttacttaatgagagcctagaagagtggttggtaagtagatatttgtatctgtatataaaacgtaggaacattagcaaaaggaaaaagaatgtctttgccatcaaaaccaagagttatatggccatgtaagtttaaaaaaatatacaggtttcaacatagggaaacagatttctttaccgaagatttccttaaacttgtattatactaacacacattaggaacccactagaaaaagctataattaaaaaaaaaaaaaaaaatggagcttcacggatgccaaccagtcagctaaaagagacac

SEQ ID NO: 52697 - DNA, 2560 bp, Bovine  19866880526459
  misc_feature (1)..(1): n is a, c, g, or t
ntgtccgactctgtgcgaccccatagacggcagcccaccaggctcccctgtctctgggattctccaggcaagaacactggagtgggttgccatttccttctccaaagcatgaaagtgaaaagtgaaagtgaagtcactcagtcgtttctgacttagcgaccccacagattgcagcctagcaggctcctccatccatgggattttccaagcaagagtactggagtggggtgccattgccttctccgagcacctctatagccctcccttatcactgcatccttgtaatctgagatggtgtagagaacatcaaagggatcactggcctcaaagagctgagaggctagtggactgcaagagataggatttgaatgaggtcacagagtaagcagatcttctatctggagatcatgtgttgaacacagataataacaacaatgatgcttgcaagtgtcatatatcaagcaggttgtgctacctaaatggaaaccagtgagttccattcctatggaaattttctactttcagtgaaattgaagcttgatcccaacatgctggtatgatgtatacagtgagtaaagtgaagtcgctcagtcatgtccaactctttgcaaccctgtggactgtagcctatcagactcctccgtcgatgggattttccaggcaagagtgctgtagtggattgccatttccttctccaggggatcttcccgacctagggatcgaacccaggtctcccgcattgcaggcagacactttactgtctgaaccaccagggaagcctatcccattttaagtggacttaattatccaattgtgcctaccagtgcttcatgaaggttaggaagtcaataactcatggttgaatgaataatgtagcataataaagagaggtaaatagtttctgttatttcctaaagaaggaaatgtttttagggtttttctaaacttcaaaagtcagagtgagctgaagtcataagcttttagggtttcccaggtggcactagtggtaaagaacccacctaccaacgcaggatgtgtaagagaccagggtttgatccctgggtcgggaagaccccctagaggagggcgtggcaacccaccccaattttcttgcttggagaatcccatggatagaggagtctggtaggctacagtccatagggtcgtagagttggacatgactgaagcgagttagcactcacacgcaaatgtttgtttgtttttttttttaactttacatggcattttggttttctttatagattacattgttttacatgaagctttaaatatttttaaaaataagtttaaaaacagaaaaaaaaacccatttgaaaaagcaatagtgagcaattgagaatttgctgacagttgtatatacaggaaaggatttaaatcaagatcactaacgaataatatggtaaattcttatcagatctgtctggtcttgggagagtctctctttagccacactaaccattttcatgacccttgctgcctcccaccgcattttactttgaagagctgcttcctcttttaccttcgaacctggaaactaacctgagatgctactgttccccttaaaaagcatatcaaaatatcttacgcagtgaagctgttttccctacatttggatggcttcctcagttaccaggaaaaaaatcccttaaaactattacatcagcagaggtggctttgtctaggtttatatgcataggtggttacagctatatactagttgatgtctcctggttataaaactttacagcactgaaatattcaccttccacatcacactataattgccttttgagatattaatatttctctacctttgttgtttcttaattctccttaatatttataacaatctctccctgcctttccaaacctctgattctcttccttctgtagtaaaatgaatctatttccattaatttctctggatttctaattactttgtggttttaaatgcaaccctagatgttttaagaatttgcatcaaaagagtattgggaaagtatccaattcagggtagttatttttgtaatccatggggtgcatcttcctgcatctcctgaatcttcatatttcctccaccacattaacttggtatgccacttcaactctgtcctgttagcttctatttttttttttttttctttcaattagtgacagggagcagtgggtggtgaaatgctgggaaaacactcatggggtatgcatcacactgctctaacacagcagtgcaaagtggaaactgagaactaagcgagttaggtcaaagtagaaaataaaacaggtactgaatgaatgcagattcatgggtgacagaaggtacgggtttgtgcactaaagtagaggagcaagtgcctgagagactaaaaataataaatggaagaagttagaaggactaacatctcttccttaaatggctcttacagcaacagttattcttaaaatatctcctaaatgtctgtgttgcatttgcattaaatagagtcgtgactataagttgtatgattttcacatttgatatatgacactacctccagaaatt

SEQ ID NO: 52698 - DNA, 2654 bp, Bovine  19866880589947
  misc_feature (1)..(1): n is a, c, g, or t
naggatagcggatgacagaggatgagatggttggatggcatcactgatttgatggatgtgagtttaagcaagttccaggagttgctgatggacagggaagcctggtgtgctgcagtccatggggtcgcaaagagtcagacatgactcagcaactgaactgaacttaaaattggcagctgcagcagcacatgatttaaatccttgtagaagtagatggcaagttccagtgtatagttgacagaggtaaactggcggaaaagtactagaggatgttggagaatgggagattgatcaatgtgattagaccacttgtgtttgctacctggctcttacgagaatttgtctcctatcctcccacagagactgggagttagaggcttgggttctgactttgatgattacatttcagtaggagaattggctccctgggactttagaaagacttccttgggttgtgaaacaggaaggtgggagaagatttccatctcaaggaatggagaaagactttagaattctaaattgtctacagtaaattctctaggaaaagggatttcagggtcttatataggcaggaagaaacttaaagtttggtctgaggggaatattaagtctctcattcagtggatctgtaagcatcactgtataactgactgcaacttaaacataaggaaaactcactcatctgggttctctcttcattggttttcttagctggggcagtttattcttgtctgccaggttgaaatcctgtttgtccctttaaagcctagtcataggactttgtggcatagtggtaaagaatctgcctgccagtgcaggagacagatgctgtttgatccctgggttgggagatcccctggaggagaaaatggcagcctgctcccgtattcttgccttgaaatttccatgaacagagaagcctggtgggctacagtccatggggtcacaaagaatcagatgcaactgagcatgcacataagactttaagctacagcataaataaatacttttcatgctgttttggtcagcttgggaataggctctttcccttggacagatggcctctagggttcctctattaggaaagatcttactttttcacaaattaaagccaaaggaactgtatttttctgcaaatatgatattgacagaatctaacatctgctttataacagacagctgcaaacagtagctccacactaaatttaacctacccactaaatcttagctgtgttcctgaggaaacatgaataaaaccattgccttagctcatgcccaaagatgggaagtctagtaaagatgccaaaaatattttagtgttatttttatctttgacatttgaaagcaaaccacatttactgatgttttaacatctttactaattgccttcagtgtgctaaaaatctgacttttagcaattatctttcgtttagaaggtatttgtgctaattactgaattcagagtaacctatacaagaataaaatgaggctctatattattccaatcacatgccttcctattcttgtacaagtttgctcaagttccttaacttctattaagtttctccctgataaaatggaaataatggcagttcccacatagggttgttatgatgtttggggattggtgtatgttaaattcttgaaacatggtaagtgtccaaaaatgtatcattattgatatgaaatgttcatgtgcagtttgattatcagaagggcatgctcttgttttacaactgcaaggcaattttgaatatacccaaaggttttctgagctcagatcttgtcagtgaattttctgtattctttctcactttcttagaagaaaaaagaaatattttgaagctgccagtaccaagccatgacactaagttattcatttaagagtggaaggatcatatctatgacctcaaaactccaaagtcagaactcttcaagaggatacagagatgatgtgtatacttgatgcaggattaagcagcactaatacttggctaaatttttggtgaagtgaagtcgctcagttttgtctgattctttgcgacccgacggatggtagcctaccaggctccaccgtccataggattttccaggcaagaatactggagggggctgccatttccttctccagcggaccttcccaacgcagggattgaacctgtgtctcctgcattgcagacagacgctttactgtctgagccaccagggggtagtcagtgtcaaaccttgaatatctgtgatgggatgaagccaaagatgatattgggataactctagaagatttagtcattcatttgtgcatgcacaacatgcatttattttaaaaatatgtatgaagtgctttctattgctatctaacaagccctggacagttgttagaaataaacaggaataataataaactgattcttatttaaccctgctagtaccaagatatggttcaagtgttcatgttttaaaaacccatttactccttaatacttctcatgaagtaagtgttattgctgtcctcattttatagatgaaaacattaagacagaagttaaataacttatgcatggtaacattaagtagggaagtcaggtagtttggctccaaaacccatgcttttgagtaccactccatcctgttcttctcaagtaacagtaagcaaa

SEQ ID NO: 52699 - DNA, 2800 bp, Bovine  19866880604568
  misc_feature (1)..(1): n is a, c, g, or t
ntcttgtgcgtctatgatattgtaccacagtgagaggagaaagtaaggtaaaatgtatgaaggcctagtgtgtcttataaggcattcttaaatgttccctttatatgctgcagtttcattgtaattaccttccttttatattttggtccattcacgttccatctttttgcagagcatacttgagacttagaaaatggtagcattgtgctatcagctaagagaggaaaatctgactgctggaagaaaaatagatatgtgtgtgtatatatgtacatggatatataaaagtatttactgaaaatgaaatatttttctctgtgaacaattttatagtgcataaacatttactactacaaatagggaattcttaatgttatgcataagtttacctgagggcattagcttctaatatataggcaaattttgctttttgtatttgcacttcactctgtttataaaataccttcctaattctgactgtcctttgtacctgccaagaagcacatttcttgagctggtgaagatacattatttactctgagataattcattactgatagtgttgccaggagtctcctatatcctcaaaatgtcttatattttaaaagcagcagcttgttctaggcagagagtaaatggactttcaatttaagctttcctttttcataaatggccaaatgcatctgctgttttggtggttaaacttgaaagcacacttttatattaactttagggggtttttttaaagttgatttttactttaggagcttaccttttacagtttatatcaccagtccgtaaaactcagcagaggcatagatagcttgcttattcacattaataaaaagaaatacttctgcgtatttgccagcagattaaaattggaagctgttgattaaacacatatttcagtgcatctcagctgtgatgttttcttatgggaatcctttctcaccaaagaatactctcacacatacttatgtggcttccggaatgaattagcacttcttgatcaaattaactaaacgtgttttcaaataccaccttacatcatgatgatgtgctttgttggtgaagcatagtgagactcagaaagaagaactggggacttgggaactggaggaagagattaccttcatttcaggagagacttcacaccaaaaaccccagcagaggtccagggctcctggtctcatagcttgagaagtcaggtaaccagagagaaggaagaacagtgaaatagcagtaccctgaacaaaggcatggggtggggtggattttctaggagctcttttttaagatgctgttatggatgctgctgctgctgctgctaagtcgcatcagtcgtgtccgactctgtgtgaccccatagacggcagcccaccaggctcccccgtccctgggattctccaggcaagaacactggagtgggttgccatttccttctccaatgcacgaaagtaaaaagcgaaagtgaagtcgctcagtcgtgtcccactcctagcagcctaccaggctcctctgtccatgggattttccaggcaaaagtactggagttgggtgccatcgcctttgactaatacaaagtagatgacacttgtactgggtaaaggagatcaacattttttatttcaaacaattccaaacatttagagaagttgcaaatgcaatataaagaaattatttttattttcctgagccatttgagggtacttggttaatctgataactgatcacacccaaatactttcacatgtatttcctataaacaaggacattctcctacataaccacaaaagagccatcaaaatcagaaaattaacactgacatattacaagctcctaatcaagggaccaacttaagtttcaccaactgttcaaataatgttctttatagcaaaaggatccagtccaggccatgtgccatattttgttgtcatgcttttagtctgcaataattcttccttccttgattttcatgaccttgaagcttctgaaattattttgcaaaatgtccctcagtttggatctttctgacattttttcataatctgtttcaggttttgcatttttggcaataatactgcagaagtgatgctgtgttctcaccatatactagctggcaacatgtgattttgatttgccccattacttatagtgttctcttgggtctcttgattaagctggtgtctgctacacttcatcatataaggaactgctgtcccctttgtaattaatagtacctctgggggtggtactttggaattatggaaatatcctgttccttaatatccaattttttcacctacttatttttatagattcatctgtagattaagggtttcattctttactcactgagttataatctattattgtcattatttattttgctgagggtcaatgagaccccctttaagttggcttccatgatctttcattaaacttccatcatgttttgatcatttcatttttttttgactgaagaagatattctaggttcaccttgttctttccccgtcctaacactgggattatccatttctccaaggaacccaggcctctctcagtaaagaaaggtgtttagatgccaaaatccatgttctagatgggctcattgcttctgtggtattgctgctcccaggtgctttcaattgtgagagctaagaaatgtatgtattctgtatttacatgtctgtatatatatctatatctttatatctatatctatatatatatatctgtctatctgtctatctatccatcttcctacctatctgcttacctacctacttatgta

SEQ ID NO: 52700 - DNA, 887 bp, Bovine  19866880605372
  misc_feature (1)..(1): n is a, c, g, or t
nacatttataatttatgggaacaatttgacccgataaaattcttggtgcccttatccactataatttcatctgaacacagtctatgttaatatcagtttagactttaacctccctatttcacttacttgttgctgttttaaatgcagccctgcccagtttctgggcaaggcatctgatttaaagattattagccaggactttctttttcttggattaataagtcatttatagagctaaaacacttttgagttaagttagttctcctgagaacttccaggtttaataactgcctaactatacgcaggactttatataagatggaaaggatgtatgtatgtatgatacagtgcctgaccttagaagccttctatatgtctgtcaaattatatcattacatccaacaaagattcaatgagcattaactacaaataggacaaaattgcatgagatggtctgtccctgcttttaagatgattaggatttttctccaaaaagtttgaaatttctagtgaagtaataaaattcatagaatattacaagtctttgtggttctaaatgaatatagtaatgtacacttttgtctcatcttctcaactggaaagtcttttaagtgaatgactgtgtgacataccttttttatatttcaagtgtcaagcctaatccagacagatattcccaaggagcctacacaactgctgtgggatacagacattaaacagtgttccttttccccccaatagagtgtgataagtgctaaaatagagatgttatcagataccaaagaaggataaggaaagaataactcatctggaagaagtttaagaaatgctagttgaataaagaacaaaaatgctaaagggaagtagctgaaatttaagagcttaaa

SEQ ID NO: 52701 - DNA, 1402 bp, Bovine  19866880637038
  misc_feature (1)..(1): n is a, c, g, or t
naatcccccgcattgcaacctgagagtcccccctcttgccacaactacagaaaagcccatggagcaaccaaggccaagcacagagaataaataaataaaatttatttttttaagtgaaaaataaaattattggcttaaaaaaaaagtcaagtttcaatgaaagtagaaacgatagctataaaaagctactcacagcaaaaatcagtatttcacaagagtggatgcctgtccaaacatttttatgttcccaattctagagatttctaaaaatcttataagtattccttttgaagacatcaaggatacaatgtacacagggtttaagggtctcttgtaataccacatatttcacttagattcaataaaccctccaagttaatgaaatggaaagaaaccacacttcttacataaaacaggagttaaatgcatttatgtaagttaggaaaaaattgcatgtaagtgtccatcaactatgaagattgtatctccctaagcctcaagacagctcttatgaaatctgagcttcacaactgccagcataaactcccctgggcagaagaaaagccacagattagattgtggtttacctgagttttcccttgagaaatgttagaccatatttctaatgaattaccaaagctaaagaagcaacagttttacatagctgctccctctctgtgttaatgtgggcatgctggcaggataaagaaaatcagatgaagatatatatttcttaatcctaaactgaggtatctattttactgaaaacacaactctttgtggtggaagtttaactaacggcaaaaatgtattcaaccttttctcaagaaattaaatgagaaacactagtgactcaatcaaactcatgttcactcaaagccaaggcaaattttcaaaatcactacaaaaataagattctggagcatttcttgtagacaaatcccagcaaaaaaattcagaagcaactaggtttgctattgataatctcaatctctcaatgtttccctttatcaaagaagttgcagactgtatggtatttccaaccccaatagtgaaaagcctttttctgtgggaaattataagcaatgggttcccaagaaattttaaacttcccattctctgtgctacctctatatccaatctctaggccatctctttgtttgaggctctgcagcttccaaaccacttacaagtcaaagaagacgactgtgaagactaaatgagatgatgtatgaaacctgcctaccacagtgttcagctccgattagattctagataaatagcaaagttcaatctcttacccagttcccacccagtattttcatttccacattgctttataaagtactttgatgcaaagttttgtttttgaaaattacttcctccacagcaggaaactttg

SEQ ID NO: 52702 - DNA, 2327 bp, Bovine  19866880775873
  misc_feature (1)..(1): n is a, c, g, or t
ntgcagcctcgggacactgtgtgtccattttgggtttattttcctggaaggagccagtatgtgtttgggaacaatgagttaatgcaattcaactaaaagcacattggggagaatttaatataatataaagcagaatgaataagggaattgtttagaattaggaaaattgtgggccctgaaccaatgtgacaagggagggtactctgtgtgaagcagatctttcagtttaggaatctggaatctcaccaaaatggaaaagttgatgaatagctgtgattaaacaatgaagttagacaataaatttaggaatatattaacaaattgggtccagtgtaagagttaaaagtacatccttctctgatccctttacactgtagtgaaacagtagtgagagcttagacagcttatacatgcaggttcagtcatgtctgactctctgagaccccatggacagtagcccgccaggcttctccatccatgggacttcccaggcaagaacactggagtgggttgccatttccttctccaggtgatctacctgactcagggatcaaacccacgtctcctgcgtctcctacactgcaggcggattctttaccactgtgccacctgggaagccaagacaccttatacttaaccagcttttcttgacttactataaagttaatgcgtaaggttcccagggagagcctttggtagtcctgtgatctccaccaatttgtcggatgcctccaaggacaagctgctccaaggaagagcaaagagtcatataatggatggagtttattgaactccacacaagcactagaaagcaacctcgtcttacatggataccttaaaactgccccataaccagaattttctatgggaaggaagagatgaagggccatcgacctacatggcttgtttttttctgtttgttttttatcagcattagatacaggctaagagctactaccaattcttctataaatatacaaacattattaagacagaactttacaaaccggctctaaatgtcaaagttgttattagtcagcaacagtgttcttcctgcaaagtgaatttattctttcaaagccatgaacacaaagttcatatttaaaggcaaacccaaacaaccatcacaaaaaaacaacagatttttaaataaattcaattgttatgaggcatttgcatctgttgactcagtagtagcaaaataatggacttcttccagatgaatgagctacagaaaacaagttctgttcacagcatatgcaggaaatcattgtgcacagagtaaagaaaagaagaaaaaagaaactgttcttgcaaactaatgtatgcaaaggagaaactatacgtggatccctgatgttccaaaataaagatattcatcctaggcagctatacagagaagcatacttccttaaacttaacacaaaggcagcatcaaaagaaggaaagaggaaattgtgttttcatacacaccgaggaaaccagaattgaaagagacacgtgtaccccaatgttcatcacagcactgtttataatagccaggacatggaagcaacctagatgtccatcagcagacgaatggataagaaagctatagtacatatatacaatggagtattactcagccattaaaaagaatacatttgaatcagttctaatgaggtggatgaaactggagcctattatacagagtgaagtaagtcagaaagaaaaacaccaatacagtattataatgcatatatagggaatttagaaagatggtaatgatgaccctgtatgtgagacagcaaaagagacacagatgtatagaacagtcttttggactccatgggggagggcaagggtgggatgatttgggagaatggcagtgaaacatgtatattatcgtgtgtgaaatgtatcaccagtccagattcgatgcatgagacagggtgcttggggctggtgcactgggatgacccagagggatgggatggggagggaggtaagaggcagggttcaggatggggaacacatgtacactcgtggtggattcatgtcaatgtatggcaaaaccaatacaatattgtaaagtaattagcctcaaattaaaataaataaatttatattttaaaaaatgaagcatgcttatttggtaatctacccagtttttccctctcttctcatggtaaatgactttggacttaactttctagaccccgcaaattatttgggagaattctggaaaaaggccttgtcatggaaactttctcagagttgattctagatgaagactcaggctaaactccaatacttggccacctcatggaagagtgactcatggaaaa

SEQ ID NO: 52703 - DNA, 1564 bp, Bovine  19866880776609
  misc_feature (1)..(1): n is a, c, g, or t
ngttgccatttccttctccaatgcatgaaagtgaaaagtgaagtcgctcagtcgtgtccgactcttagggaccccatggactgcagcctaccaagctcctccatccatgggattttccaggcaagagtactggagtggggtgccattgccttctccggagctcttgtctaacactcagataatactcagaattgaattgtctgaggagacatatgtgctgacaaagcaagagattttattgggaaagggttcccagtggagagcagtagggtaatggaactcaggagaactactctgccgtgtggctcacagccttggattttatggtgatgggattagttttggggttgtctttagccaatcattctactcagagtccttcctggtggtgcatgccttgttcagccaagatgttgccagggagaaggattctgggaggtggttggacacgtggtgtctccttttgatctttccggaactcttccggttggtggtggcttgttagtcccgtgttctttaccaggacctcctgtcatgaaacacaactcatgcaaacagttactatggtgcctggccagggtaggcggtttcagtcctgtgcttcccctaacaccatctctttatataattagcattttcattttcctggttagttagggaagtgagtactgaccaggagggtttctaacagtacaggatgactctaggagcaatctttctgcctcttttcagactctagagaaagagaacttctaagaggcttgccaaattaacagtgatgtgttaaggaagatttagaaaacaactgagttggcacttgagttggagacatctttacatttaaaaatatttccatcattagccaataagctgctggatagtcttatctaatagtattactaacaattatctttaggtacacaggctctatcagaaatgtgccaggaattttgcatatattctttcctgtcctcaagtagggataagattcattttacatagagagattaatgtccacagagggtatgaaatttgcacccaattatgcagtggctgagccaggcctggaggtgaagtttgtttattgctccagttcttcattggctatctattttgtgtttgggaataaaggtggtggttttgaaatgatctttgcttgctctaggcatgttttaggagcaaacctacttctgtgacacatgttaagaatttagaaaacagttcaaagattttacttaatttggaaaacagatgaaagtcttgtttgctattattgacttcatatttaacatcagttcagttcagtcactcagtcatgtctgactccttgcgaccccatgaattgcagcacgccaggccttcctgtccatcaccaacccctggagtccactcaaactcacatctatcaagtcagtgatgccctccagccatctcatcctctgtcgtccccttctccccctgtccccaatccctcccagcatcagagtcttttccaatgagtcaactcttcacatgaggtggccaaagtattggagtttcagcctgagtcttcatctagaatcaa

SEQ ID NO: 52704 - DNA, 3909 bp, Bovine  19866880806801
  misc_feature (1)..(1): n is a, c, g, or t
nagaactgtttattcctttatattaacttttgttaacactgtgacaaactgtttttgagcactgatcatgtctgtgtacaaatttgtgtgtatggatatgtgtgtattggcacttgagaacttgataaaaagcaataaagagcagtaagttacatgccctaaaacatttatttgaaaaacaaatcagcacattcatcagattgaaaatggtgaatttaaaacctacactttttctgaaatgctctccctatttgggctcaacaaaaatacttttatttatttatttattttaattttattttatttttaaactttacaatattgtattagttttgccaaatatcgaaatgaatccgccacaggtatacatgtgttccccatcctacttttaaatcattgtaattttatttttaacacagtagccactctataaaattaatcttttatttttataaatatctgatggaaatgtttttagttattggctgtctttgctactgagcctttaacaagtcttttcattcttcatgttttgggggtgaagggggggtcacacctatcaattcaagagaaggtcagtaggctggatccagaatatttatttgctccaagtatctgaaatctaaaggtaggatagcatcgaataccacagaaatcctgccatgggggtgagtcagcatcacttttcttgaccactgaactgacagcaaacagagatcagaaatgactccctatgtggtaatttgttcgtgttctctcctgcttctaatatgtgttggtttgaaagcacatttgtaaaggacatgaaggaaaagcacacaacagttcaaaaacttacagctggctggctgataatctctttcccttgtatttttaaatatgtaggtaagccaaaatactgagtttccccagaaaatactcaaaacgtcggaagcagcataaacagcaccaccttcaacctaccagcaaacaccagctgtcacgtacccacgatcacacaactgtctgcccgcctccctttgataactgccacaaacacatctttcaagacaatgctgtcagaaagctgagagctgcctttgtgctccttcccactggctgctaagagaacaaaaacgtatactcctatttcgtttgcttttcccttttcagaaaggcttcaagaaaaagtccaagtatggaacaacattcaccattaagacccaaagagcaatacaaagtaagaattgccctcagattaaacaaagatcctccatgttttgttttgtacaaatcgtatcttaaaatctgaaaaaaaaaagtctgtttcaacttcaagaaaaaatatggtctactaattatagagaaaggggggaacaataaaaatagcgacaaactgaaggagcttggggtcgcctaattcaacacacgtcctcttgtgtagagagtcttagcacacagtaagcacacaataaatccacagtggatctatggaacgtgcagccaagagcactgaggcccagacttatccagggtcacgtagccacgaagcatcagtcagtctctaacattcagtccattgctggctccatcatgtaagccaagattcatctttctcggcagccttactttccccaggtctaaaatgtgataagcaatttgaagatttatatggcccaacatatgggtttactcttattgcttgcctctcaccaatgacgaagaaggtacttgtcatttcttacaagaaaacaaataaatattggaatgaatgacttcaagcctatttaacaagatgactaccctaaattcctcataaatcacatatacatcacagcacacaaatattctactgtagttatctaacatgggctgtgccccctttatctatatatgtctgtgtccaagctttataactggagctacagtgaagctcgcagagaaattacagagaatccctctaatgaatttatagtctggtcttcaattgtgaaaaactaccgaaggaaaagaaattcaccagtctcctctatcaatttaccttgacttgacatctctctaaatacattagaaaaatggatctttcagcttctggtccatgtgaaatatggttccacccctccatccctccttctctcctcattccttccatttacctatctactcagtgtttagttgtggagctcctactccatgtcatgaacactattagattttaggaccttgttatggaaaatccatggacacaggaacctggctggctacagtccataaggttgcacagagtaggacatgactgaagcaacttagcatagcattcaaagtgtggattagcagcagcagcatcagaaccaaacagaacctgccttttaacaagacccccagtgaaccatgctcaaattaaaattgaggaagtaccatgaagacatggtccccatccttgagatttacaaaacctgtcaggaaacagacagggccagagcctgcctgaacagagcagctggacacaatttttttttttttttatgaagcggatagctcaatacactgtttaaaaaaaaaaaaagtatttattgaattagttaccatattgcttctgttttatcatttggttttttggtgctgaagcatatgggaccatgggttgaacctgcatgcccttaacttgaaggtgaagtcctgaccactagactgccaggcaaggccctagacactttttaaaaggtactgatccccatatggctgaagggtggtgggcacgtgacgtggcaaatagaggcattttcatgcaaattagaaaaaggagcctcttcctccaggcagtctcatccacatgcctggactcagggctgcaggaagcagcatgcaggccagattcaagtaactgagtgacttgtgcaactagaagtattgtacagtgtgtccctgagatagtcatttttttgtctttcttcctcccttccttctcttctctttctctccctgtcttgttctctttctgtctttcaagagagactgacagcccccattcccagcagacccaaaggaatagattgtatattattccaggaagaatgaagattaactatagacaaaagaagatactataggaactgcccaacttacacaatgatcaggttttcaggtttgtttacaggaagatgatacaagaagcaatggaagaaatgtaagaagttaaaaaaaaacagagcagagatatttaagggaaacccctcagagtgtctaagcaagaggtaatgaagccctggaagactgtgaaggtcaccaaggagcaagactggaaggctctctggacgaatgagtgggagtgggaagtggaagagtggatatttctaatccaggaaaccacatgtacaatgagtcaagagtacaagccatgatctcccaccagggcagataatcccttctgctgggagtatcaggttgaatgtgtcaagcagaagcctgcaataaagatggaaatccaggagcctgtgctgctctgcgtgggagagggcatatgagtgtccaagaggagcccctccctgaggtcggaggtcctgcagaggcactccaacacactgaacacccacgcaatgaatcaacggcacaaagcaatagctagacttccattttcctcatgcattcaacccttcctcctgcaatcacggccacaaaatggcctgtttatgtaaataatctgggaactgctgaatggcagaaaaagagagcagagagcacacagcaaatggccagagtcagtctgggtttggaattctggatgtttcactttctaaatacgaccttgggcaaagtgcttctctctaactgtcttcctgcctgtgcaatggagggtagcagtctgatgttcctgtctggttgtcaaagataggatgaccacatttccccgtgtttccaggacagtctttt

SEQ ID NO: 52705 - DNA, 1155 bp, Bovine  19866880889283
  misc_feature (1)..(1): n is a, c, g, or t
ntgatttgctttaagaattgaatgagctggtactcagattattctaagtcacttttccttagaatattaggtttcttcatttgtttgtattttaaggcattcattttggggaagttaagatgtaacatagtttttctaagaaagtatttgttttattcaattttcagcctttgatgaaatgccaggaaatcaagtagcacaggcggactggagttaaccacaatggaataacatccactacagtcctactgggattaaccaaatcatctcacaattaagtgggtcagttaattatgcacagtcagtgaaaatgatagcaacactcctacctccaagaacttcactttagttgactcctgactgattgaacacacacttcttattttgttaatcagaattaataaaaaaatagatatattgctttacctgaaattttcacttctgttaaactctttgaaaagtattcacaatgtattatgaacaaaatatttagaatcttttcagttaaaatgacttacagagaaaaattcatcatccaggacggactagaagaaatgattcctagtgagaatgcatatgttcaagtacagtgacattgttctacaataacagtatgaagaaagtcaagcactaagctatgcacaaaggaaatataataacacaaagccttctttatgttactatgtatcatctgttttaaggtaactaataagatgaacaaaatacagtcaggtggcagcctagcaactttcaaaatagtattaaaggttaacaatgaagtttgctaaaggaaagctacaagacattattggttatgctccaaaagtgggaccattgtttatgaatataactagcaactgcatgttataattggtgacaattaccaccagttttcaactaagaattctcagctgcagtctcttttagcttctctgccagaaattgactgattggacctcaaagtccataaacacagatctgtatccaagcaggcatgtagtcctttccctctgtaattatggcatctttcctttaatagaggaacaaaaaaattaacaatgcttggtctccagagggaggaggctgctaaaattctgaatacagcatgcttttcaccttcagagttctagaccgagactgacagctttaaaaata

SEQ ID NO: 52706 - DNA, 983 bp, Bovine  19866880910795
  misc_feature (1)..(1): n is a, c, g, or t
naaaagttttatattagatcctagcatcaaattcctctaactgcatgagtcaactacactggcttttaacatctaaaaaatttgtaccacattcaaatctctctctcatattattcagaaaataaattacaggaaaagcactaaaatggtttcctcttaacctaattatgaaaagtgacttactatggcacacttaatacacttagtcacatgttaaaatgagcacagaaaaggaagtcaacaaggagagaagagctgtaatagccggtatcacaaagtatcaaggaaagcacttgaaaatgattcataaagctttcaaagcagacaaatggttccatatatgccattacccataagagcaactatttccacttctgacagcttggaggtacaggaagctgctcattgaggatgtcggcaattatttgtttgattctgtggtacctgctccactaaaccaatcaaagagaaacccaaggtagttgcagttagaaatcaattctttttgctgcttcattttaaatgtgttattggctaaggtgttggtattgaatgatgctgtagctaggtgtttcactgcatttagattcttgaattaaaattctgcttctaagtcactacaattacatacctcagtttacttgcatattctgaaatgttatgccttatcaggactctctgtccccctaaattggggatttcctcagacctcacattttgtaattgggaaagtgacttctctgataatttaactagttgttagtaatgaaagctaaacagagaactggagcttacaggtgatttacatccaggacataattaattgtccatgagagaattattttctataatgtttatttaacatgtaccatactcccttgtatgtttaaatattctttttgttatcatattatatctttccagtctgtgcttaggggccattggtactattttccagtgctccaccacagcaactaacgtta

SEQ ID NO: 52707 - DNA, 1490 bp, Bovine  19866881090632
  misc_feature (1)..(1): n is a, c, g, or t
naggctgcatatggctcttgaaagttgtttggcatgtaagttgttttaaggtttttataaattttgttttttgatgccattagcagaggcaggcagtcttgtgtcccttcaggtcttgttgtgcaccaaccctccccttgcacgcttatttaactgcctggccagataggtataagagtgttatactttgaatcaataatccacatgttgaaaatttcattaaagcattctccaggatatgaataaattttctagtgaaaatgagatgtttattttaaatagtgtatattatttttttaattaattatttttgaattaattttttcaagcttggccatttagagttgtacaacatataatatagttatactttctttgttataggaattttttggtaaataactagaaagttctcactgttgaaaatttctttatacaattcatattcattctgtgtcttattagaattgaaagttccttttctttggttctggttttagtaagatcacttatattcaagcattaaaacaacttaatttccataattcttttccctgtgagggagttttgcattttatctatctaagagtcattttcagaatagtgtgtatttatctttttaatgtttgcagttaaatggagccaaagaatatatatctttattgtctaattaaatgttgtttcaaacaaggcagagctcaatgttgatagtaatatttctctgtggtttaaaaaaccatttcttatgactaaacagatctttattagatttcttaaagagttaatttcataccaaagtgtcttatgtcttagcttggccccctaaaggccataaacaccctagaaaattccattatttcacaaaagaatatattttggcagagtttccctgggcttctaataccagagagctaaactataaaaaatttaagtatatataagttctttgtaacataaccattaaggttaaaatatgtgccccattcttatggggctgttacatatcctgcttagcttctttctctaacttatgagcttcctttttctataatgctaattttactgcatcatgaacacagtttatgcccccaaagtatattaatatctatggaaaagtataagtctgggatttttatcttaaattcagtctttcagaaatcatttcttggttctgattcagccatatttagtttttaacttcactaaaagcagtaagcttctcacacctactcttcccacccccattccacttgtcagatgaaatcatcacacactgattttatgaaatctctttctaccccactgttttcttcattgtacaaaataaaattacattctgagttgaaggagaaacttggtacagattttccatgttttgtagccttaggtagttctttttcattgttaactggtagtaacctgaattatgaaaaatgtgtgctttttaacagttatggaaaatgctaagcgggaagatgcttccatgcaat

SEQ ID NO: 52708 - DNA, 1095 bp, Bovine  19866881097886
  misc_feature (1)..(1): n is a, c, g, or t
ntagtatactacatgagggctttttgaaaatatgagtaatataagctttaattagcttttctttaaaaagtctatgtcatcaaagtgaaattatgtgaccaagatgtggttacttcctatgaaagaaaaaaaaaaaaaatcccttttacagaatcaggaagcttcaccctcagatagggcatgactctgctcaggacttcctccttatccccagaaaatgcagattatatgatactcttctatatgtctaaggctcttcattcttaagccgcctgtagtgagtcctggtgtctaggataacataggtctcaggcagagccagtctaccaagaagaaaaataaaataagcaaatttggcacttcagcctttaatcaagcactcttatcttgttctctgttctccacatgtgtggctgaatgtttattctctcctcagcaaaagatagtcttaaaaactgagtaatacatcaaggtatcattgaaattccaggatgaatttaattccatggttaaattcttctggttaaatttgcattttaattattatctttgaatttttcccactgcaggtatgaatttcgagtattaattttagtcaatagtaacccgtccataaccaacactttctgaatcaaaaagcaaaatgaatgttagaaaaataatgggagagacatacgttttaggtgctacttgtcattaatatactatttactccaaattataaatatttggagtatccaaatataaattataagtatgtataatgaaattatatgtatttatgaggttttattttcctctttcataaaatagagtaatagtttaagcctcttccacagaattttgtaataaaattcaggaatcacagaaacttttgtcagtctccttattttatccttcccaagttaatgatttcttcctttgtactgcattccccctctttagttgaagatcttctctccgctcttaaattatctttagcaattgaagtgtcaagctcaattttcacattccaatcatagatagcactcttaagcaaagaaaaacaaaaaataaacaggattcatgaataacacacccacattattccaacac

SEQ ID NO: 52709 - DNA, 1246 bp, Bovine  19866881113909
  misc_feature (1)..(1): n is a, c, g, or t
natttaatggttctgctgcatcgtcagtgatatggcttcttattcctgctataattctacagctttttattttattgttttgtaatgttttcaagtttaaattaaatcatttcatagcaatatagtttttaaaacaaaagcatatatttaatgaaaaaaaatgaatgcatcatgtttgttagtcaattttaatattgtaggtttgacttaaaatgtttgtggacatttaccatccaccaggggcacaatagtgaatcacgttgacactcaaaaccagagaacacatctgcttaagaagcctccccatcctaaaatttaatcattattttaggactgtgatcaaagacaatgatttaatacatatagctacaaaggtcagtttgcttatcactccagaaatatgacttttcatttcagttatataattgttttcatcagtattaattttgctcattatgactttagattttcttgtatgtatacatagaatgaatcaatggctattaatgcattagcaaaaggggaattgctcagttacatagattttatgtcaatgtcatcagtttgcttgaaatagaaaccagtagattctaacaatggttccattttttaaaatccaattcatggaagaaagtaaagctttcagaagttaaatctgtcaaaagtgacattattaaaaagagatatgactttatttagtagttaaaatggtgttaaaagagtttcttgtgtgttgataatatgaatagagatttcagtagctcagaacattatagtgaaaaaagggttattaataaattaaagtgtttatggaacagaaatcaccttgaaattgtttgaggtgtataatgcatccaagtaagtggaaatgcactaccaatcttcatacaagcaaaacgttaaaatctgtaagtcacgttatgtatgtaactggacttcaaattgtttcctgagaaagccatattgtataaatacttcagcatgactttgtttctctctccatcatcaggaaaattttagaaatactaaatctttggagaatatttaaatttcagtctaaatgttctacaatagtgtagaccattactacaaaataaaatttggttacattttaaaaacaagttaaaggtctttaataaaagtactcaacagatggagcaccaaaaatttaactttatcaagttgaattttgaagacaaagcttgcaaacagagcaattaaatacatcccggacagcaagagagga

SEQ ID NO: 52710 - DNA, 1649 bp, Bovine  19866881164559
  misc_feature (1)..(1): n is a, c, g, or t
ntccctgctacttttgttggccttcccatccttgcagatcttgttactcacttaggatagagtcatctgcttttagacaagtgtttcttgttcacagtgtaagccagtgtgcacctgttcttaaaatactcccttgtcttagtctagatgtcccagtatggcaaatatatctcatatttgtataatttaattgaagatgacagttttgggtgggtctcatggagttgggaatacatttaaaaaaaaaaaaaaaaaccttttctccattatctttaactgaaagaccaaaacagtttttaaaaggttgaattgacatgattaaagctctctcctaataattgtcattgatataaattacagagatgttcaaaatatagaatcagcagaatttgctgatacacagaatatagaatccaaggaaatgagaggaatcaaagactatcattacattttcttgacttgagatactaggatgacgatggtgtcagtcttttgatgttaaagataggaaaaccaggctgccatggagagtgtattagaggttctctcctgatgtattatcactgaggaaagcctgatatatccaaggggaaatttcaaatatccttttacatatgagtctggagcttggggaagaggtggattagcctaaagtagattagcctaaatacagtaattacagcctgaaagatggataaatggaggttatataaatagtgaagaatagaagccaagctctgagatattcttatttataaatcaagtactggagaaagaggaaagcaggctgaggttggagggaaaacaaagagagtacagtgtctctaaagggaagaggtagtatggtttcaaggagaggatagtcaatagtattaaatgagtctgaaaggtggagtagaatgaagaaagggagttggatttggcaacatggaactcactagtgaccctgacaaaagcagtttcagtgtgtttttggtaagaagccagattgcaggagcttgaattaatgagatagatggaagtgaggaagcagagggaaagtagataacatttttaagaggtttatctgtgattggcagttgataaataggtggtaagttgtgacatcaagctttgctgtttatttggttttaatatgaaagttactagagcatgtttgtgttctactagaaatgacacatagaggggaagagattaatcatgcaagagagggatggatgaatggcattgtgtagtctttgaaagacaagagggaatttgatccagagcaaaattctgtcagtggacagaagcacagtcagatcatttgctgaaagaggatagaagagaaaatatggatgttactgttagaagtttcttaaatgtgatgatggtaagatgaaatttctttttgatggcttctgcttctctgtgaaatttgagaggaggtcatcaggttgctgagggagaaccattctgtgagccttgaaacaataaagatgttagaaaccctctcatggttacaacctcaaaccaactgccctgttaaacttgttatatttaaatgattattttatattcagtgatttttctggaaaatagttaataaaactataaagcaagactaaatgcttactgacacattgctatgagttagtgcctcctagtgt

SEQ ID NO: 52711 - DNA, 1648 bp, Bovine  19866881186277
  misc_feature (1)..(1): n is a, c, g, or t
nctcttcattaatgaagccccacctaatgactcacctgaacacagaagcatcacagcactcctacttcatggacacttagctaaagaatcactttagcaaagtgctttgcccatggtaatctagggaataaaatttcacttccatgaaaagaaaaggcacagttctccattttaaggtttcatgtggagaaaggaaattgatggtaatttgcaaaaatactgctggaaagtatcatactttgcagcatatgcttacctgttccaatccaccctctcaatatacagagcaagagctgaaagtcaatgtggatcattgctattaacacaggtagtaatcctgggtgagcttggaattgtctacttagaacaacctggtttaatgataagacatcttagcaaattctgattgtttccggtaagtatatttgcatttaaaacactgtaaatgccctaagtcatatatgttgaaaacagagctgaagtatcagttattaatgcctgagaatttcaaggaaacacaacagtgtttccaaggaaaaggatctggaaacatcagtattccacagatgtacggaatatgtgacactagatgagttgtttactcccagctctgtcattctctggccatgagatctcaaggggatttctttgggcttcagtttcattggctatagactaaagtagtttggaagcctctgtttccaacattctttccagcacccgagttccatgcctgcatgcttccctagtgtagagattaccaacatacgacacatcttccaggctcctctgcattcttgaggcacatcaacaccatcactcttccattcccaccaagtccttatgttccaccaagaagcttcctatactggcatctttttgcttctttatcacacccctctggagggtttctgcgttctccttgacctgctcccctctagtttcacttgagagacaaggagctgctaggaaggggagggacacactgtaagaattagaatgctctcttttctcttctcaaccctctcctccatcctccaaaaggtagtccatctccccaggacaaatgatccatataaactgcaaaaatataacaccagtcagtcaatacttctgtttttagcacagtgaattcttcagtcaaaccattcaaactagagctgaaagatgatttcccacttagggtaggttagtcaattccctcatgatactcctgagcgagttttcaggagaaccaattttaaataagtttggcttcaacagtcacagtggatcacctgacctttacctgctactgctgcctgcaggctgacattcctccaagtggcacacagatgggctttgtgcaaccctaggcaatccatggaggtagcaaatgctccatttcaggaagaatgatggagtgaaatcaggatgcaccactcggcaccagccaaccgcccacagaggtggaataattcatcacagccaattacagtgattgttccatcaggataaagaaaagcatgtgccaatgaactttctaacaggattaatactgcccgggaatcttccttctctttaattcatatgaactcctgtttagtccataggaacaaacattccagaagaatcaaacacggatataaaaaggacaaacttatttcaa

SEQ ID NO: 52712 - DNA, 862 bp, Bovine  19866881210691
  misc_feature (1)..(1): n is a, c, g, or t
ncatgctacatagcacatttatgttttaaattatacctttaatagtataaatgtatttataaaattcaaattgatttggtgacatcctgaaccccctctagagacactccatccatctgaatcataaatttataagaaaagagttacccataaaaatactgaaataaataaaatatagtttctaattagtctggtgagggtaaatatactaaagttcccattctccactagctattttgaatgtagcttaacacctggtttgctctatttccccctaaacaaatgtattagttactatgttagcatagtcagagactttccaagaaatttagcttcataataccaactaaaatagttctcttgagagaatgagccataaaatcacttttgtaaaagcatacaagttattttttgtacaattaaatttatctagaacctacagggcaaggggtaactcaaatttgtttttttttaaattttttttggcatcaaaaccaacacaagaggtgacaagtcaaggccttaaaataatcatgttgatatttcaatgacagccttatccataggagaatacattttattttccaaatccactaatgtaaattcagcctttaccaaattaagaacattttaatctcctcacagtacactctgactgaagatttaggcaccttccaaatagtagtgattagtattcaaacattcttgcctttcagaaaatgcttttgaacaaattgatgtgtaaattgaacaaactatcagctccatctcattattaaagaacagcaattttggcacttcctctgccaggtcctttgttttagtaaaaaatgtcttacattttgtgatagactccactagt

SEQ ID NO: 52713 - DNA, 1013 bp, Bovine  19866881292329
  misc_feature (1)..(1): n is a, c, g, or t
nactgtagataacctgaagacagcagtctaacactagcttttgtaacctggcttcaccccattttgtgtctgttaaggtaaatgaacctaaaggaatgggtatcttctaagtgggataaagtcactttggaggaaaaaaaatgtgcaatagaaataatatatgtaggatgtttttacaaacagtttatattacctcataaatatgctccctaagaatctattaacatctttatatttatagataacatcaagggaagatgaactactaggtcccctcataggtgtgataaatgataactcgagcaatgatgagaatgcaagacagactttagtcatttatttccagctttactgcttagagatttcagtcaacaatcttactaatgtcccttggtgattaaaaatgtctgcaggggactaaagatgatttgaggcttgagagttcagaatactgattcttgtttaaccgtatttcttgctcctttcttgtatttcgtaacagatttgacatggaacattgtatacaactgggatgccacatgcaggcacaatttcaaaattattagagtagaaaaaaattttccagtgagtagtaattctctccagatgagtagtgaatttttattttgtaaaagactaatttataagaaaaaacactgcctagtaaaatttccactcttaaaaatgcaccaaattttttgtatatcaggcttcccaagttataaaaggaaacatcataattttgtgacttgtttttagggctactaattggcccagaataagctgcaggaaatgaagagtgtgttcaatatctctacatcatattatcatttactcctgaatcatttcttctcaggtgagcaatctgctgactatagcttatttttgcatccaatttcaggcctggctaagcatccagaagaagaataaacatacttctgactcctagtgttgtcatgtgtgggtatatgtgtatatgtgtttgtacatgtgggtatatgtagacgtatatg

SEQ ID NO: 52714 - DNA, 822 bp, Bovine  19866881317660
  misc_feature (1)..(1): n is a, c, g, or t
naactttcctgaccaaccttcctgatgtaatcccttcctaattttatctgcctcttataattgcagaatgaatgacacattcattcatttaaaaatatccattgtgtttctacaacatgttagttgctatggtagagcaacaaagaagcctagtccctgccctcatggagttgactgcctactgggggagacaagcactaaacatataaactcataaacagctatctaattttgacaagttattaattatgccatttggtacctgttattttgaaaactgaaagtaaagtcgctcagtcgtgtctgactctttgcgaccccatagactgtagcctaccaggctcctctgcccatgggattttccaggcaagagtattggagtgggttgccatttccttctccagcagatcttcccaacccagggattgaacccaggtctccggcattgtaggcagacgctttaccatctgagccaccttacttgactttatatgcctttctagataacctgctcctatgggtctcctgggtagagtacttaataaaatatttataattaatttttaataaattcacatattcactcccaaactagttggtaaccaaaacaggaatcaaaacatttactctcagaactctgattctctaacggaaaattttcagcattctgcattatttctcaggcttttgaatgtttctttaagtataaaaatgcaatgtaacagaagtcttcacacatctgtgttgtacaagatttggcaaataccttaaagcttttatatctcacttaagtagtcacttgcactccaatacgttagacca

SEQ ID NO: 52715 - DNA, 933 bp, Bovine  19866881403132
  misc_feature (1)..(1): n is a, c, g, or t
ncaataaatgattgtgagtcatttacacaggtttaaatatgaataattaagaattttcttatactacatgaattgcatggagatatagatatagttggcagtttaaatattccctgagtggttcctttatgaattaggacagtgacaacattttcactttgaaatggagaggaacaaacctcacattcagccattgtctttcactcattttgagtttgtggcttcgcatgtttagtattttgtaagaataaaaacaatgtatgagaaaagagcttaacagggaggaaaattaaagaaatatttgctactagtaagttagttcctttctgtaacaaatgtatacatatattttttaatatatgtatttgtttgtctgcactgagtcttagtactgtcatgcaggatctttgatcttcattgcagcatgcaggatctttagttgcggtatctagttccctgaccagggattgaacctgggccccctgcattgggagcatggagtcttagccattgaaccaccagggaagtccctaggtatatattttaacaagctttctcaatttaaactcaccatataaaacttggaggatatcatcagttcagttatcaatcgtgtccgactctttgcgaccccatgaattgcagcacgccaggcctccctgtccatcaccaactcccagagttggcaaagtaatggaaactgattatttctggactatatcccagggtgttacttactaacattttcctaggaaaatccgttttgacttaagcctaaactctggatcagatatgtctaaacgctatgaatatatggattctttgccagagtaggactttttagaagttgttcatacataaaatgtcccatctttcatacataaacctgaactgaaactgaacctgcaggctattcatgacaattcatgcagt

SEQ ID NO: 52716 - DNA, 733 bp, Bovine  19866881695559
  misc_feature (1)..(1): n is a, c, g, or t
naatgcttctatgcattcccatgctcactcatcataaaagtcctagttcctaagacaacttagaagaccttctccaccatgtccctgttccttaccatctttttggtccattcctctgtccacaccattctagccatattgacctcccttctcctcctttaatacaccaaggaagttcctgtttcaaggcctttgcacccgctcttctccctgcctgtgatgttcatcttctatgtatttgtctgacttgctttctgacctctactcagtctttattcaaatgttattttttagtgaccactttctgatttaatcttacaacacatggtccactccccccatcagcactctctgctctgacttcttgcttcattttttcaccatagcacttactaccatgaggtatgctaaatatttttcttttttaaaaattgtttatctcgtttttataaatacgagttctgtgcagtgaatagctgtgtctcttttgttcaaagttcagtcacagcccctagatctgtgcctgtgccataaatatctgtggaatggatcctttcttggttttgaaagaaaaccaattaaatgtcaaagatgagaatagtgacaaatgcttataatgaaatgttgctaaaattgtcagtgctcagatttatatttggggaaatgaaccgttcttttaaaaaaatatatagctgtacctcttataaatatggaagagatgaattctgaataa

SEQ ID NO: 52717 - DNA, 1363 bp, Bovine  19866880210483
  misc_feature (1)..(1): n is a, c, g, or t
naatcaccagagaggggattaactgactagagagctagcttactccttggaacgaaagttatgaccaacctggacagcatattaaaaagcagaaacattactttgtcaacaaaggtctgtctagtcaaggctgtgtttttccagtggtcatgtatggatgtgagagttgaactataaagaaagctgagtgctgaagaattgatgcttttgaactgtggtgttggagaagactcttgaaagtcccttggactgcaaggagatccaaccagtccatcctaaaggagatcagtcctgggtgttcattggaaggactgatgttgaagctgaaactgcaatactttggccacctgatgtgaagggctgactcatttgaaaagaccctgatgctgggaaaagattgagggcaggaggagaaggggatgacagaggatgagatggttggatggcatcaccgactcaatggatatgagtttgggtaaactccaggagttggtgatgaacagggaggcctggcgtgctgcagttcatggggtcgcaaagagtcggacacgactgactgactgaactgaactgaactgaaagagagctagctggactctaagctatggaattgggcctctactcattttgcacttcatacttggcttgatgtggcattgcaaaaatagttgtgaatacttacagtggataattatattattcttcaatcataatatacttgaaaaacttgcatgtagacatatgcatggtattgctaaagattaaactctggttaatatgaccacgaaaataaaaatctaaattgtttccatttggtcttatctgaaaggataattattcacgcagagtttttttttattacaataattaaagtgatgatctatgataatatttatagagccttgcattttgatgacatccaagtgtgagaaattctaatataatttcatggactaaaaccacgcttaagggagatgccattaaatatacaaataggctcggatgtaaattatgcatgactagtttcatcttcctcaaattcatatctgattttgtatataggctttcatgtctgagatgaggccgaatgtggaaaaaaggggtctttcctaaaaaatattctattattttcaaaaataatgcactggtaatgcagatagttaaaataatgaaacctctgaaatagcaactgtgtggcacattactttgagagccagtttctaaaagaggcaagcctaggaaaataccctaggttaatttctacatggacaaagattggtagcttcattttctggtcctaagtatttcggaaggcagtaaatattggactacttggggagaagctataagggccttaacacag

SEQ ID NO: 52718 - DNA, 1490 bp, Bovine  19866880370142
  misc_feature (1)..(1): n is a, c, g, or t
ngttaatgttaaatattttcttctttttcctattcttttcctacaagtttctggaggttaactttacaattgcttttagtctttaggtaatagtgggttggcaaaaaaaaggcccatttgggtttttcattaggatgttatggaaaaactcttaaggaatttttggccaacacaatagaatatttattaggattgtgactgattttgagctagtgttaaaacacaatttttaatttttaaaattgtgataaaatatgcataacacagaattcatcattttaaccattttaaaaggtacagttcggtggcatcaaacacattcacattttttgtgcaaccctcaccaccatcgatcttgagaaattttttcatcttctccaactgacacttggtacccattaaataataactctctatgccctccttccctcagccacggcaaccactatgctactttctatctctatgaacttgactgctctaggattggcttaagatacgatttttttgaaagttaagattataactctcatacaaatataaaaagattatatgtcagaggttttacttacctcattaattaatgaggaaaccagtaagatgttacagttagatcacagaagaactcaacaaagcacacagataggcaactaagaatgctggaatgaatttagaaaaagatagaaaacggtgcaaccacaggaaggcaatcaactgtatttcactggacacaattcatttccattcctaaaattgtttacattattcctcattttctacaacttccataatatgtgaaacagtccaaaaacaatggaaggaaaagaatgctgttgctgtttactcgccaagtcgtgtccaaggcttttgcaaccgcgtggactgtatgtggcctgccaggctcctctgtccatgggatttcccaggcaggaatactggaatgggttgccattcccttctccaggggatcttcccaacccagggattgaacccatgtcttctgcattggcaggcagattctttagcactgacccgcccgggaagcccccgtaaggaaaagataaccaggaagaatattcaataactacacacataaacattaatgaatattgacaatatagcactgagtgggggggaaaatggcggtggactgtcccaggtattcacgtcttgtttgccaactccagtgcctcctggagatggacgttctgtgaacattgtgatttgccagctggttcagtgttaggccttatcaacagagggcgctggagagacaccgcaaggcccagcagaggaggtggctgccctttctggatcttccggtttctgtcacgtctcctatggagacccagtggcactcactctccagcaaatcccaccactaccccagtggacagcttccagctgaccaccccgatctgcgggccacaccccagctcggagctgcggctctccagtaaattctgccagctggtaactgcaacctcgcc

SEQ ID NO: 52719 - DNA, 1772 bp, Bovine  19866880393836
  misc_feature (1)..(1): n is a, c, g, or t
ngaccctgatgctgggaaagattgagggcaggaggaaaagggggcagcagaagatgggacggttagatagcattaccaactcaatggacatgaacttgagcaaactccagaagatagtgaaggacagggaagcctggcatgctgcagtccatggggtcacaaagggtcagacatgacttagcaactgaacaacaacaataggacttagtaagtaactcacacagtggaaagcccaacacaagtaacccttcatcacttggcacacattcagctcttggtggtggtgtgactaagtcgtgtccaactcttgggagcacatggactgtagcctgccaggttctcctgtccatggggattctccaggcaaaaacactggagtggcttgccatttccttctccaggggatattcccaacccaggaatcaaacccgggccttctgcattgcaggcagattcgttacttagtgagctacaagggaagcccacattcagctcttaaataggctaattacttacatagatagctttagtgctgtgattttttgattaacgtgcacagttcttttggttgtctcttagatatccagaagagaagatgtagttaagagtgggttaacgttgaccagcagtgactctcaaatgacaagtctctaatactgaggcaaaactagtggcaaaagaaacaggcttacttgaaaatgcttcactacataataaaatgaaagaacctgaatcatttaagattaggatagagaaatctggaggtgatttaacataactgttttaatatgtaaataaattccactttccagctctttgtttaaggctacatgtgtgcccatttgtctggttaacatttcttttgactttctggcatgtaatgtatgggacttcctaggtggcgtggtggtaaagaatctgcctgctcatgcaggagacgcaagagatgtggtttcagtccctgggtagggaagatcccttggagtaagaaatggcaacccgctccactgttcttatctgggaacttccatggacagaaggctatagtccatggggtcgcaaagagtcaagacacgactgagcaggcacgcacacatgtaatgtacacagctcacactgcatctttattttgtggaattgttttatctcagacacatctcctacagtctcttcggaacctcagtacttgaatgtttttcctcttaaaatccagacctgaggcatttccctcctagtaatctgaaaatcttatcagctcaacaagatttctgggagtgagctgggtttagtgaaggaagagataatgaatttactgaccagaagccccaaattcgatgcttttcatcttgctgtgttgtctcaaacttgtgacatggtttagcatgtcaaaatgattaggacacaaaactaaaactttcttagtgtctgtatgttggtagattaagacatggctacacattatgttctgtttattcagaaggtctccaatttcacatagctgaagcaactgaatttccatgtatttctagtattagtcgtgccgtgtagtgcttattttctttgtaattatcaccatgttgttgaaagggagaaagggtagagtttctgtttagattaacataaaactctagaaattagaacttttgttatttgtgattgcaaacatttttgttggaattaaaatcttccaggagggctcccaaacaatattctgtcctggaatactaatgtctgtactatgaatttctcatgtagaacagagttttataacc

SEQ ID NO: 52720 - DNA, 2030 bp, Bovine  19866880400884
  misc_feature (1)..(1): n is a, c, g, or t
ncctcaaaggaatccatgatcccttcccctaccaccaacatgtaaggactattgattcttattcatatctctgtatcactgtgatggagtatttgaaccaggttcagtcttatgactagcaatgaacgttctctagtttcttagatctgccatctagtctaagtttgaaagactaagccagatccagatccatggttgttgataatcctaacagtagtagatgaatgatccttgtctctttttatagcatgttgctttagtgtatgtaactgcacgtatctatgactatgcttggatattcatttaagtgatctataattgcctaattttaaacaccttttttttttccttttcattctgggtggttacaaagcagtaagcatagctgaccctgctgctcttggcttcatcatttctccatggtctctgctgctgctgccatccggcagtgtgtcatttacagatgaaaatatttccaatcaggatcttcgtgcattcactgcaccagaggttcttcagagtcagtcactcacttctctcttccgatgttgaaaaggtaacattaagtattttttttttttttttggcttgattttgttttggtgggcgtcggaaaaatagacactgaactaccctacatcaaccctctgaaaaacactcattgaattttaaataatcatgaaattacttatagtatatggaatctaaaaaatacaacaaactagtgaataaaacaaaaaagaaacagactcacagatacagagaacaagctagtggttaccagtgtggagagggaagtggggagggataagaaaaggggagaggagggagaagtacaaactattaggtacaaaatgagttgtaagggtataccgtacagcatggggaatatagccagatatttatagtaactataggtggagcataccttgaaaatctgtgaatcactgtgttgtacacctataacttatagcatatggtgtagtattatagtataagtgaaagccgtctcagtcgtggctctttgtgaccccatggactatactatccatggaattctctagaccaggatactggaatgggtagccttcttctccaggggatcttcccaaccaagggatcaaacccaggtctcctgtgctgcaggtggattctttaccagctgagccaccagggaagcccaagaatactggagtgggcagcctctcccttctccaggggatcttcctgacccagaaattgaaccggggtctcctatactgtaggcagattctttaccaggtaagctacttcagtttagttcagttgctcagttgtgtctgactccttgtgactccatggactgcagcatgccaggcctcgcttactcaaactcaagtctatcgagttggtgatgccatccaaccttctcatccctgttgtccccttctcctcccaccttcaatctttcccagcatcagggtcttttcaaatgagtcagctcttcacatcagatgggcaaagtattgggagcttcagtttcaacatcagtccttgcactgaataggtgagctcctaaggaagccctatattctgcaaaggtatatttgaagtccacctccagacaaatttggctaggctagataaaagcaattaaggaagagatttcaaacattacaatcaactttgagtcatttcttacacttaacagggttcttagtctgagacacactcagtagataagcaatacagaactccataaatgaataatcactgacattgtacaacatacactattggtagccatctccagcataggagggcatctttccactctcccatttattagtggaaagaaccctgaagactgaggttccagtgttggatctgtcggtattttatgatttgtttctctattgttgataatgtatttattatttatgcaccatttctttctaaaaacaaaataggtataggagatcgtaaatggcgaaccaacaaaatattgtgaacactgtattagttgtcaattgttatattttaaaaaatta

SEQ ID NO: 52721 - DNA, 2827 bp, Bovine  19866880491382
  misc_feature (1)..(1): n is a, c, g, or t
ngcagggttgaggcggggggcggggggtgggggggcagaatctaagcaacagatttacatgggaaattataacattataaacttttaataaacaaaaagcatgttacttacgatgttccctgctgagaattactgtgagtttttgaagatgtatcatattgttctgtggaggagggaaaaatgatcagacgagcacaatgacaaatgcatgagattgttagttataaatcccctctttttttttttttttcctgctatttccccaccaccttttcacctaaaaacacttggtacacctaaattttgtcaacagagagctattataaaataacatttatgttacatcttgagagagggcttgctcagaactggaaaaccctgagagtgctgcccggccagccgaccccacataagactctcttcagggtccactgacgggggctcctgtggaagcaccgtgacgccaccccacctggtttgatgtcacacatccatcagcgatttgctagcactctctttcacagcctctgtccttggccgcctgtgctcccacctggccccccatcattcaacacccccgattcattcgttcaactgctggtcacaaactgcctctcacagacaccaagatgctcaagacatttgcccctgtcctcgatgagtgtacagctgaccgagggacagcaaacaggaacagcaactacagccctaggctgtgagagatccgcacacaaacccatcacctagatgaaacgtccggggaatctagaggttcgtcacaccactgggcacgacgaaagcaggcaaatcagaaaagaaacgaaattaggtgtgtgtgttgcaaaggatgggtgagatttttgacagaaatgactgcaggcaagagggagatgagggtgaagaaggccctcaggcagaagagacgatgtgagggaaggcaggaaacgtgggagcaattgagatggtgcagatgagaaaggggaaggttggggtgcagagtgtgtggagggcaatgtgagaggccctggggaggtcagagggctccgagtgccatgatgggacattaatactttgagacgccaccagggcacgatacagccaccaggcacgatacaacaatttctcagaaagagtaacctgctggtgctacctgacgtaacccagaaaggaacaggaaatgttaagtgtagagactgaagaagcagctgggagaccgtgtctgtgtctggaactgacgcagaagctgagtggcaacatgggtgcctttcagacagcgggcggtacagtaaccacgaatgacccaggagacccttgaataactgcagttcagggcttcatcctcatgggggcagcagctcttacccggtatttttagattcttttcccttctggctagcaaattagggctgggattacaaattaaaggggctaaagtccacgcacaggggctcccacacaaacatcctgaccaggtcctaagctccatgaggctctggtaatcctcaagcagctgtgttttttttgaacatgtggacataaatcctgggacatacagggatgtatatatgggatatacttcagtctctgtgtgcatgcatcctaagtcgcttcagtcatgtctcaatctttgcaaccccatggactgtagcccaccaggctcctctgttcatgggattctccaggcaagaatactggagtgggttgctgtgcctcttctgggggatcttcctgatccagggattgaactccagtctcttatgtctcctacattggcaggagggttctttactgctagcgctacctgggaagccccagtttgattggataggtgtccttataagaagacaagataccagcatgctctctctccacacacgcacaaaagaaagaccacatcaggacacagagagaaaatggctctctgagagtcaggaagagagctctctccaggaatcaaccctaccagcaccttgattctgggcttataggctccagaactatgagtctggtgtttaagccaccagtctgtgtaacaatattaggaatactcagattttaaaaaacaaatgaagaaaaaaaaactgtattcgaaagttgactgccatgctaggtacatttgcataggctttctcttttaattctaacagtaagtgagcagcaaggctgggaacgaaactcaggtctgagagtcatagtttgtgtgtcagctcatttattcattattttgctgctgtttttaactatctcccctctccagagcaaaaggtaaaattacaaaattgaggtacaactagagagagagagagatatatatatatatagagagagagtgtgtgtgagtatgtgtgtgtgttgggggctggaggagttcatgaattgttctatgttacacatactcctcactctgcttcaaacccctgaaatcattcaggaattctcccaaaagccttttttcccgtcttaagtgccagcagagacctggaccaagacagctgaacttgtgcaggttccaggtgaaatacatcaaaggtcagttggaagcacagtagcctttaacctccggccactgacctttccgctgttgatcaacaggcagcagctatcaggccagatcacaggggtgtccgctgtcttttgggaagaagcaatagcagcatctgtactgctgagagctggttagggtctggtggaaagaaatctgttcatcacctgttcctgttctccccaccccaacacaggcaaattcttactgctctgcaatgtttgtgggccccttcagagtcactggttccagtaattcatactggccttcctcttcttcctggcc

SEQ ID NO: 52722 - DNA, 2771 bp, Bovine  19866880611659
  misc_feature (1)..(1): n is a, c, g, or t
nccccccaaaaccccaccccgagccctcatcactgtcagccaccatcagcgccgagagctcagtgccggaatggcacgagggccacgcctggcttcccggattcagtttcgctgggctctttttattaatgttaaaaaaacatcaggctgcctctcaatatgatgcttcaagaaaaacgactcacaccctttcttgcctcctaagccctactgagaaacttggcttcagagacacgagcatgagtttcctggccgctgctgtgagaagagctctatctgcctgcctctgcctgtgtgcctgccctaacagactcagcccctgtcccgtgtcctctgctgggtgcttctgggacatgctgcacagcgatggctcgctttcctaattcctaggactggaagggttttactgctatgggacatccatcctgcactgccttggatggttacagtaataatggagatggcaacagctagcctctacagtgtaattcccattcattccacattgtgctaagcactttgcatgaattgtcccatttattctcaaaatggacctcatcaggttggtactattatctccattgtaagatgagaaaactaaggtgtagagaaattaggactggagtttgcccaaggtcatatagctcccaaatctgagtccagactagaattaggtgtgtttggatactttttatctttcaaatatgtaaagataatgccacttctgttattatgctgctaactctctctgatgaatagcagtctttaataaacattcctgtatgtcagcaacagctactctgaaggcacttcaccttaatgctactacttaatactactgctattgttagcaattacagggactcaaatgattaggtagctgtagtggaatgtattgtgtgtatgtgtgtttggttgcttacttcagatatctttggagaaaccaccgtgtttccatcgttagtccttgtgatggggtttagtgtgaacttctcaccccctcactccaagctggcacttggtacttgacaattagaatagtccataccactggatctgctggagaaggaaatggcaacccactccagtattcctgcctggagaatcccagggaccagaggagcctggtaggctacagtccatggagtcgaaaagagtcagacacgactgagtgacttgacttcacttcaatttcagatagtgtaagtactgtgaaaagataagcatggccaacactgttcttttcctccccagtgctcattcccattttttgttgctaagagaaccttgattatgcatgcgattaaactgggcgcagccttaggtgacagatcatgtttgttctcagccagtgataacaatttgtatcttgatttacctgtttcctctgaagctggaggaggccatgtgacctcgttttggttttcaggtagtaaaggtttggggaaggactttcctgatgtggctgacatagccacaccttcctcctcccatcttcctcctgcttggcatgttgaaaagatgtctggttatgaccagcaacctttttgtacaaagagatgatgtgcctaaagacagcacactaaatgtggccgagcaggaagagccagagttccaaatggcctcattgtatggctaaaattataccactagccaccttcctttagacttgctattgttgctgttgttcaatctctaagttgtgtttgactgtggattgcagcaccccaggcttcgctgtccttcactatctcccggactttgcttagattcatatccattgagctggtgatgctatctaaccgccttgttctctgccgccctcttccccttttgccttcaatctttcccagcatcaaggtctggagaaattgttgtttagtcgccaaatcatgtctgactctttgcaaccccatggatggtagctcgcaccaggctcctctgcccatgggattttccaggcaagaatactggagtgggttgccatttccttctccaggggatattcccaacctagggattgaacccacatctcctgcattggcgggtgggttctttagcaataagccaccaggggagtccagaaatattagaagccactgttaattaaacaattattacttgcagctagacacattctgaacccatatagaatataatgaaatagcgcatgggttggctgcaggcacatcagtgctacatttgcagctgcattcagggagggctcttggagaacgtgttatttgagctgaacgatgggagggagctaacaggctgtgggatgtggacttgagtttggggcctgaaccttgttcaaggcggtgtccgccttgaaacagagggtttgaaatggagaagaggtcgttggggaaatcgtgttacattatgaatgtcctgagggcttcatgtggcactggagagctaaaggaactgtaggcgatcatgtcagttgggggccctgagagtatgaactgcttggggtagagttctggagaattcagatgaaaacagtgtatgacccatgactcaccgctgacacattgccagttaccaagaggctgttattcctggagggtatgtgtggaaaaggggaaggcaagctgaccagggaccagaccagaccagacatcctcaggcctctgggcagttgttttcctcatattctctggaaactgggtcatggtcatggggctttgagacctacttagcagctgtttgtccagtagaaaagcttctctaatgtatggattgtcttgaacatgtactttggt

SEQ ID NO: 52723 - DNA, 2521 bp, Bovine  19866880623872
  misc_feature (1)..(1): n is a, c, g, or t
ntctttgcctgaagtgaactcttagttttttgaatgttgagtttcaagtcagctttcactcctctttcaccctcatcaataagctctctggtttctctttttactttcttgccattagagtggttcagttcagttcagttcagtcgcttagtcgtgtccaactctttgcgaccccatgaatcgcagcatgccaggcctccctgtccctcaccaactcccggagtttactcaaactcatgtccatcgagtcggtgatgccatccagccatctcatcctctgtcgtccccttctcctcgtggccccaatccctcccagcatcagggtcttttccaatgagtcaactcttcacatgaggtggccaaagtactggagtttcaggtatcacctgcatatctgaagttgttgatatttctccaggcagtcttgattctaattgtaatccatccatcctggcatttctcataatgtgctctgcgtataagttaaataagcagggtggcagtatacagccttgacatactgctttcccaatttggaaccagtccgttgttccatgtccggttctaactgttgcttcttgacccacatacaggtttctcaggagacagataaagtgatctggtattctcatctcttcaagaatattccacagtttgttttgatccacacagttaaaggctttcatgtagtcaatgaagcagaagtaggtttttttctggaattctcttgcttttgctgtgatccaaaatgttggcaatttgatctctggctctttgccttttctaaatccaccttgtacatctggaagagctcagttcacatactgctgaagcctcacttgaaggattttaagcctaaccttattagcatgtgaaatgagtacagtagtacagtagttcgaatgttctttggctttgcccttctttgggattagaatgaaaacgatcttttccagtcctgtggccactgctgagttttccagatttgctgagtattgagtacagcacgtaaacagcatcatcttttagaattttaaatagctcagctgaaattccatcacctccactagctttattcatagtaatgcttcctaaagcccacttgacttcacactccaggatgtctggctgtaggtgagtgaccacaccatcgtggttatctgggtcattaagatcttttttgtatagttcttctgtgtattcttaacatctcttcttaatctcttctgcttctgttaggtccttactgtttctgttctttattttgcccatccttgcatgaaatgttcccttgatgtctccagttttcttgagagatctctagtctttcccatttgattgttttcctctatttctttgtactgttcatttaagaacacctacttatctctccttgctatcctctcaaactctacattcagttggttatatctttccttttctctcttgcctttcacttctcttctttcctaagctatttgtaaagcctccttagacaaccgcttcgccttcttgcatttctgtctctttaggatagttttggtcactatttaaaaacatgtcacaagtgcacaggtaaacagtcattactttaggttttcctttttctttttccttatctctgtacattcataccccctatgtaagaaatgaaaaaacaaaatgaatgtgaagatgggtaaatggagccagcaataattatcatgttgtctttgtaacatgaggatgaacgataccagtaaacattggcaataattaataggaaaaaactgaacattatataagatagtttttttttatagtaggctattttgatattgatttctctttatcatagtctaccaaaatgaatggctgtgaagaacattgtgaagaaaaaggtaaaagtgaaaggtaagaaaataattttcaagtatctataacaatttcattctttttttagaagcactctgaagatttccatttagatgttgatttttaagttaatttatcttctcctataaaatgagacttgggtaaattatgaaactacagtttaaaattttaaatgttttaaaaatgttgttataaggcggttccagtgacatgtgacaatgtgtttattataacattgctcaaaaaaaaagcaatatattctcttcatcatcagaaagaattcaagaagggtctacaagaagatacagtgataatagtatcttctcctggtatatttataggcaacttatttttctacacctcataaatttcattctttaataaaaccatagcaggtaagaaaataaaataagtaaaataaaaccaaagcaggtaagaaacattttaaccccccacaaatgtttttcctgttgaaaacagtttctaatgtaagattttttattttgtaacactaaaggatgtatcaggaaaaattatatatattgttggccagcaaagtgattatatgtgaattttgcttcatattaaatgataaccaagcagtcgaagggagttatatacaaatgacaggaatttttcactaagt

SEQ ID NO: 52724 - DNA, 1878 bp, Bovine  19866880664092
  misc_feature (1)..(1): n is a, c, g, or t
nacagaattatgggtaacctcaaatagaaaccaagtttcattctaggctaatctgacaactgtcaagacttttaaaagcccacaaattaaactcacgtgaagtaaatctaatgatttccacttaatcctcagaaaaacaggactgttaaaatatgtttgtaagatgtttgtaagaataggtccctgtcatgagggttaaaacaaaactcctacattaccagcaatatgatagaaattatcaaattcaatcttttatgactttccatctagagctttttgtcttccaggcggtttcaactcaaaaacaaaaattaagtttaactggtttactctgaagtttactgaaaccaagtgacacagaccacactgcttattcgtctctacatcttcaggtagcagagcctcattgtgaaacatactgggtttcctcctaccctttaagtatcctaatgtttgtaaatcttgctgcctgattttttccatgtggtacaaagtttgtattcacacagccttttttttttccaatggagcactagcacaagtatgcctgactctaagagggagttgagagagaaaggcagctatacagactataaaagaataacagaaaaatgtaattactaaaaatgtaaaggttatgtgaaaattactcagaaaaaaacataaaatgagagttttagctcctgttttacagtctagaactttgaatcaataagtatttttaatcaaaaaaacaaaaccaaaatcctattttcaaatggtctattaactcagcaagaagctattttcctttaaaaaaaaaaaaaaaaaccttaaaatcctaagatcatgaactcaaatttttatcagtgttttagtagctaaagttaccaccttactaggcaggtcatctcacttagaaatactgaaggtaaaaaaacatatatattattttgtcaatcatgagacaaaaatatataacgcctacaaagctggataggagacaggtttcatactttcacacaaaacaatgggaactggttaattttataccactttccataaattcacatcctgagaaaatcaggtacacctgtatttttaaagcaaagagaatggggagaggaaaatcatttagcaagttacccagatgcacagctacccaggatgaaagccacaggacagtctcagctcttgcaccaccagcaaaacatatgccccacatcaaaatttaattacactgcacaacactttgtgaattgagcttcatatttttatcgactgctctgcttttgacaggacagtttcctgaaggaaagttccaagaattgaaaagttccaacacccacataccagaaagcgtttcctgaattttgttacaggaactgacttctgctgtaattttaacatttactttccagaggagtttcatttaaaaatttttgttgcagattctttgctcaacacctagacaatgctcttgcttaaaagggtggggggggggtggtggagaaaaaacaaacttttatttcaatttcaaaagttgggatgtgattgactgactcacttgtacaactgactcagttgtaactttttccctggtaccaaaaacaactgccacctgacaggggacgggggtgggggcgtggagttagcaattttgggagggagcccagagtagacatgaaagggttgattaggtaaccaggtccttaagaagtaattcttgggaaagctcggcttgagcaaacgttggaggttgcttcttggtatctcccttttcgtgttttaaacataggtgcatttggacatttgaactagtagagtttgtaattgatacgtaaattcataaaagtagacatcttccttctgtaccaacctctagtctgtttcaatggg

SEQ ID NO: 52725 - DNA, 1688 bp, Bovine  19866880761727
  misc_feature (1)..(1): n is a, c, g, or t
nctagagagaggggagataaggaatgagagcaatgatttcttaacttgggtacatttgaacagactttatctctagtggataaaatgagagttaacttttactccttggaagggaaaaaaaaaagaggtagacctataaattctcaggttgctgcttcagagggagatacctgacagaagaagtgtgaaggcttatgctgtgccttttgtaagtactctgtatgttatcttatttcttatcctcaaattacatgaattagggctaattcatgttataggttatttaactcctattagtttgtcgacttagttgctgctgttcagtctcccagttgtgtccgaccctgtgtaaccccacgggctgcagcacgccaggcttccctgtccttcaccatctcatggaatgtgctcaaactcatgtccattgagttgatgataccatccaatggtctcatcccctgtctcccccttctcttcctgccctcaatcttccccagcattagagtcttttctcagcatcagggtcttttccccatagtgggcttttcagcttagtgtcagctacaaattggcacttgccacgggcatttgccatctgcctgtgaccttcaacatgccctgagtgagttcagagtgaagaggcattctgtgcttcagggaattaaatttagatattttcaggaactgttttcatgatcccagtctttgcatcttctgatatctagaaaagcactaaatcccttcatgatgacatcagatgctcctcatgtgactcatcatgtcatcatgctgctcagaggatatcaagtgactagcagaaaacctcttgtaaagtaagtggttgactgcattgcactctcccttcaccaaaatcttatatatggaccttctcccactgcctctttgagcagtctttcagagctctttgaggtgctgtgtcctgggctgcagtcctcattttgccctcaaataaaacttaactcataactctcatgttgtgcatctttttagtcaacattagtcaaggattttgaggtcctaaaacctatgaaacaaatgaaatttgatggtggaagaaaagatcagcttttgggtaaccaggaggctggatgatagcaataccttcttggaggtatttgagactaaattagtaatctattgccccatgaacaactactccaagatttagcggcttgaaacatagtcattagttagcttatagttagggtatgggatcagcttggttttcctactggtcttagctgggcttactcatgagtctctggtcacctgctagataagttagtgagtcagctgggaaattggttggtctcagacggcctccttcacatgtccagtagttggctagctgttagctagagtatctctgtgtcctcctccactggcctcttatcctctagcacattacagcaagcctgtaaagagacagttttgggtttttaggtgcagcaagggagccagcacctgacttttaagcctctgctatacctcttgtttgcttacgtcccacttggcagctcatgtggccaaatgattcaaagagtggagaaatcaagtctttcttatgggaggctccaaattgccactgggtggggaggggtttgatgcagtttttaccatctgctacagctgtgaaggctgcagatttaagaaagaaagagaggggt

SEQ ID NO: 52726 - DNA, 1057 bp, Bovine  19866880855422
  misc_feature (1)..(1): n is a, c, g, or t
ncagaaggaggattatattttaaaatttgattcaatgaagaaatggacaaaaggttattgtaaccaatattttacatctttttctacttatgtttggcaaataaattccccaaatcctagaatcagaagggagagaagagaaagtgaattactttatattataaacatcgaatacactcacaggttatgtgacccatgtaagataatactcccagctaaagaattaactaggatgaaacccaggagatcaatcaacgatgaaaccactacaactgagttaatcactcgttgacattctataatagtgtaaagtacttttcctcagtctcaccgaaagagcagggtcaatttctggtagcaccccaggtggaggtctacagaggagcaaggatacttctggagacgttcccctgagagtggatatgacctcctgggggaaccatgaatgagaaatgaagacacggttaaaccatttcattccgaaagaccgatctgcctcattaaaaatgctgcactccacaggctgggggctcacctgttgagacaatcctttcaaagaggctccattcacttttaagataacatctcccacatcaatttgtccactttctgcagccggctgtccaggaaagagctttttaacccttactatgctggtgttcatttgctcgggtataacattatcctctcgagaaaaactgaatcctaggcctgagctatttttcagcaatttcacctcaaatgtattctctggaaaaaaaggtatcaaaaaatgtgaatattcttaacaggctctctctatgcatgtataaacatatacagttttgaatacattattaaaaagcccatttccaccatgctcacagctttatatgcacttattgcacgcttattctatactcaaatcccactttacaatctgttattaagaaaatttaacttcttgaactgagctgcatgaactaataggctgcctgatcagaaaagtggggttctgaaaaaaagattctaaaaaggaaactatgtcttaattccatgttttataaactgcagaatg

SEQ ID NO: 52727 - DNA, 3601 bp, Bovine  19866880887639
  misc_feature (1)..(1): n is a, c, g, or t
nctattcattgcggaacgcaggcttctcattgcggtggcttctctcgttgtgtagccccggctctggctgtgtgggcttcagtagttgttctgcacaagctcagtagctgtggctcacaggcttagttgctccatggcatgcaggatattcctggaccaggaatcaaacctgtgtcctcttcattggcaggcagattcttatccagtgcaccaccatggaagtccctttagctggatacatttaaagagatgagaaagcacttagaagccttgtaaggcatatactctgagaaaaatagattctttcccagttttcaacagggagaatggagcttctttttgaaaactgtatttgactcatctggaaacacacagtgtgactatgtttttacagcacacagccacacacttgagggtgcctgatgatgtcactccagcacagcctggagacacatagacacatagacctggagggaaatctgtgacatgtgtgtgatattgacatatttcagcacaacctggggacacctcatttataccctggggacctagtgtgacaggtgtgggatgctgtcatcatgtcatatgtgacaggtacgaggtctccagatttcctaggccataaaaactatctacaccttcagtaagctaccgcctgactgccataaccatgagcaaggacatccactggccttgctgacatttgttgatttttgtaatatgctaaatactttaaatacattaactggtttaattcttatttaatcctgtttattattacttactgagtgatagtcgctcagtcgtgtccgactctttgcgacccattgactgtagcctgccaggctcctctatccatggaatactggagttgccatttccttctccagaggatcttcccaacccaggtgtcccacattgcaggcagattctatgccatctgagccaccagggaagcccgttattacttactaatattacattaatagacagtaagcaacctatccaggatcatcctgctagtaaaactaaggttggcctgccttcattctttccttttacgccttaattccttcatcatctaaatcctatgattgatttgctattgactacaagcacgtgtatgttttgtgtacctaccaggatattttgctcatctgacagcaagtcttctgcctaaagttctctgtgtcctcagagtttaaagagagtgtcatagaagcaacagatgcacactcattattcactgttgtttgttgatgctccagtatttccagaatgaaaaagcaattggaaggctggctatttaaattattttgtcccacctgagttttttttaataaaacagttcgtatgataataatgaggaaaattcttagaacattcctatcccagaatgcttttctctttacattgcttctgtagataaaatacattttaccctaagctattttgatttccgttgtgatacaaatgtgtttgtaagtactgcaaggggaaatatagacagtattcattttagctgcatgtatttctgaagtgagggtctgcgaagagttgatatctgcctgtggaaaagaataaagctaatgaaaaaataaattttagttttctaccttcggaaactacattagcaaataacaacaaaggctcaggaaagaattaaaattcattacaaaaagtctcttatgcttgccttaatgtgtttcttttcctagtataattcctgttctgctaagattttccaattttcatagtctacacaggctgttctcattttgataacattcccagttgagtttcatataacctccgctgtatcatacacccttaaaacttcccaccctttcattcatatgcctgccagtctcttttgaaatttacttaaatgagtgttaaaaaaatcctacctgtgtgagtcagtgaaagtgaaagctggtcacttgtgtccaactctgatatcccatgggactatacagtccatggaattctccaggccagaacactggaatgggtagcctttcccttctccaggggatcttcccaacccagggatcgaacccaggtctcctgcattgcagggagattctctaccagctgagccacaagggaagcccaagaataccggagtgggtagcctatcccttctccagaggatcttcccgacccaggaatcgaactggggtctcctgtgttgcaggtggattctttaccaactgagctattagggaagtgtacacttaaagtacatacactaaagaaatctgtgtactgatttgccaagggtgccaatgaaattaatatatgtgctgcttaaaaacgtgtaatattcacttttcaaaagagaaacaagctattctgtctttctatagtatttttataggcacatcaggaaccagatagtcatttaaaaaatttcattattcacatctttggtaagtataattgagtggagcacaagaaagatatcattaccctaaatcaaataaaaaattgactaataatgtatataaagtacttggcatatgatattataattcaacaaatggtgacagtgatagttttcgctgttgtgattgtccttactaatggccgtggccgttaagtgatcagcagaattgaatatatcttcaggtaaagattgaagtatttgaatctctttcacaccgaggcttccagtttaacattagaagattatttccacatgttgaacattgccttctacgtttacttctttaaaaatgcaagtcttcttggagtgtactacattcagtatactaccttgtctaccaaaaaatgttaggaggctgcaaataagaaaagattgactgtcttaagaattgcaatttgagaggcacagattcagagaactttgaaagacagttcagggaagaaaaggggcagaggtttataaaaagaaaaagctacaaagctgtgaaaagttgcccgacgagaactgtgattgactgatgcgaataagaaaaattattcttaaggattcacgaattgtgttaggatagggtctgataagtagatagactattatgcgttattttagggtctggaaaggatcttgcagggcttccctggtggctcggtgataaagaatctgcttcccaatgcaggaggcatgagttcaatccctggatcggaaagatccccctggagaaggaaatggcaacccactgcattattcttgcctgggaaatcccatggacagaggagcctggtgggctgcagtacatggggttgcaaaggagtcagacacgactggacgactaagtatcttgagtttctggcagatgttctggatgcatttgttaagacagttagtggtcaaaggtcagattctgtccagactgagatgtgcaaaagtcagagttctcgtggcctccaagctccatcttcgagagtcctcttagcaactccatgttgcttttgcttttatacctaacacttcactcattcaggtataattcataaaatacctgtattttgcaggttactctgctggtaagagcaatatacctgtgaacattacagttaaggttcttgccctgagggctcacattctaatattagagccagagaccaataaata

SEQ ID NO: 52728 - DNA, 1583 bp, Bovine  19866880968830
  misc_feature (1)..(1): n is a, c, g, or t
nttttatctttaccaatcttttctaaaggctagatcaatcaatcctatttatcaaaaagtagcaatggtagaatatttgtaaggatttacatctaagaagttttcacaaatttaaaaatacatctcttttactggctttggaagggtagccttaactattaacataaatctttttctaaatgaaaatttatttctttatcataatttctttgtgcttttatcagttttactggttttgttttccttctccctttgacagtggtaaaataattgaaacatcaattccacaaattaaaaacaatatgaaaaatactgctattcatatacatttaacaactgatctctacagcatatacatttatgaacacaaaaattagatatataacaatttaccatacaacatgatcttacctaattactctataggactcaaatcaaatagactgtaccatcaaattgaagatcacattttaaatcaattcatttccataaaatttgtgtggtcataagcagtaaaaccaaattgcttaataatcacttagcattttgtaatacacctgacttgaattccaagttcatagattttgatgagagagtcttcaatgaaaatgaaataatgtttcatacaagaatactcattgagatttgagaaaaacccctaaaacttcaaatcacttgtgtttcatcttctagtttatttcctcttatatcccttcttaggaatctgacttagtggcatcagataacatccaggataacaagttttcactgattttttatagaaagtcttggaagtaaagatgtgaggacccaaggaagaagttctaactgtatcttggtcataagggtggctcctgtatctcctaacatgatgctgtacaacagaattgtactcactcactcattccatcacaattctgaatgccaggaaatacgtgccaagttctgcaccaccactggggtaaactagtggaataacctggttccttctcctcaggaggctataggccaccgagggaaatgggtcataaaggagattacaatgaacataccatgaatgtctggtaaggaaccgccattcacttgaaagcaaatgtgatgaggtaatctagtgtgtcatgtgtgcgtgtatgggtgtgcatctgatcaatttaaatgtgcaataacaattcttatcttctgggtcatttcaccaagttctatttccctttttggcttcttgacgtacctatagtagtaaggggcaactgattcacattttctggattaggcagtaccatgactctaattacatttattttcttatgtttaagagcaataaattattctctttagaacatgttaaattcccagttttaaagaaaaacatgtaacaacataagcctttctgactttttatcttgacctattctaaccattattatattttgaataattctagatatactaagttttattttaatttttagctgtgtgtcctcagtgttctttggaaggaatgatgcgaaagctgaaactccagcacttttggcttcttcttggcctcatgtgaaagagttgactcattggaaaagactctgatg

SEQ ID NO: 52729 - DNA, 964 bp, Bovine  19866881010646
  misc_feature (1)..(1): n is a, c, g, or t
nctgtggtgttggagaagactcttgagagttccttagactacaaggagatcaaaccagtcaatcctgaaggaaatcagtcctgaatattcactggaaggactgaggctgaagctggagctccaatactttggccacctgatttgaagagttgactcattagaaaagaccctgtcgctgggaaagattgaaagcaggaagagaaggggacaatagaggacaagatgactgagtggcatcaccatctcaatagacattgagtttgagccaactcctggagatggtgaaagacagggaagcctggcgtgccacagtccatggcgtcacagagtcggacatgactgagcaactgaactgactgactgactgatctgttacctggcagtcattttcacaaaaatgaacaaagtgagtctgtttcttccaggaaaacaacggacagtatttattgccagtgataaaatttgagttttgaagcatcttggacaacttgacacttgtcatggtgagcttgacagcttcccaatacttaaagtcgtccctgatgaggtaaggacagtaacgactgtggctttagaagacctgcctaacctagtgaccaaaattttctaaatagtacaaaatcatgcatgggtaaaagatccactgaaagtgcaggaaagaccaatggattttaatatatgaaagtttaaaaacagttcaatgaaatgactccagattctacactgcaactaacctttaggaaactatgattgtagagttttgatataatatcaaaaaaggtattaaagtactcctcttcctatgtgaggctacattttctcattttcttcatagatttcaaccaaaataacactgccacacactgaattcagaaacagatatgagaatccagctgtcttctattaagctagacagtaaagagatttgcataccgctatttctctactaaagtttttaatttgg

SEQ ID NO: 52730 - DNA, 915 bp, Bovine  19866881010885
  misc_feature (1)..(1): n is a, c, g, or t
ntctgtacatatcatatgattaagttaagcgccagagcagaacgtacagagaccaaaggcagaacaaaaccatggctaggaattaagcgataatagagaacagggagaaccagaaacgattaagatgcagcccaaatacaccagagcaagatgatccttgtttgggtgaagatggtaatgagatttttctactaaatggttagagcccataagggcatcagacccttgagttacacataacattcactttcactctaagcgtgcaggggagagaaattatcgcaggcagaaaagcagctgtggggagagggaaggaacataagacaattttccctcccacttccctttccctctctaactccccacgttctccttctgtacacactgtcatgcatgtgtgcgtgtacacacacacacacacacacacacacacacacacacacactgaaatctgaaagcctcctgcagtttgtttctgatatttattgaaaataattagagaaaattagctgagacattaaattcaacataccatagcaaggaaccatgtcaagagaatttcctataagctaaagctcacctatcaaaataatttaggtagcggatagctttttaattaattttaaaagttagttgcttcaatacataatttgagactccctgggaaggcttgtgatccataaaatatttcttttgtcaatcaagttattaaatctaccattagattttccctcatttgaatactttcaacttttaaagagtctcctatgagtttcagcaacgagatagactcagcagtacagacacccctcgtgttaccaaaaaacaaaacgctggataaaatataacccccggggacttctctcgtggtccagtggttaagactcagtgcctccacatggggcaactaagctc

SEQ ID NO: 52731 - DNA, 1365 bp, Bovine  19866881049050
  misc_feature (1)..(1): n is a, c, g, or t
naaaataaatacatagagatagatagataaatctaaggcaatatttgcctttttaattcttattctctcggaagtatactgtgtcattttccagaggctacaacgaagtaaatacagaaaaataaaggaatccaaatgtcttctattaaggaagatattaataagatttgcaaaaatataaaataatgccactcttctcattatattttgtttgtttcagaaagtatacttacttcttcaataaaacatatcttatttgtgttaatatatgatggacttattactgttatatttaaaagctgaagtttcaatattttggccaccaaatgtgaagagccaattcattggaaaaaatcttgatacagggaaagattgagggcagaaggagaaggggatgacagcgggtgagatggttggatggcatcaccaactctggacatgactttgagcaaacttcaggagatatgaaggacagggaagcctggcgtgctgcagtccatggggtcgccaagagttggacatgacttagcgactgagcaaaaacaacaacaataatggatttattcacacatgtatataatttctcagtttaatttctaacaaacattgagagatattaataaaaggcttataaataaagctttttaggattgtaatacttcttaagagtgtataggagtcctgggatcaaaacgcttattaagcaccactgcggcagttccaagatgggaatttatttcacatgcttgtgtaccagcccaccttaatcattaggccttttctttcttcaggctggcaagcgaccccctggcccagccctgtggtgggtgaatggcaacggagatgaggtaatgtggaacttcagccaactgagtgaactcagtcaacaaacagccaacgtcttcgcagggccatgtggtctgcagcgtggggaccgtgtgacagtggtgctgccccgagtgcctgagtggtggctggtgatccttggctgcatgcgggcaggttggtgattgaccatctgagcggggcaccatctcccttgtgaaggaaagtggtggcagagaaatgcaatcattcctcccaaaggatgccccctccacctatcatgtggtccctcatcatatagagacaccactgttctcccatttatttaagcaaactatgccctaagcagtatactaattggttgctaatacagagtaaacaaaacagagtctatgggactcacagatctctggagaaagacagctgctttaaattattaattgcatatacaactattgaatcacagttttgataagtggcattgaggttctataagaacctatacaaaatatttgtcaaactattacctatagggcaaat

SEQ ID NO: 52732 - DNA, 2553 bp, Bovine  19866881193480
  misc_feature (1)..(1): n is a, c, g, or t
nggatgtgaactcagtgcttgatttctctgaaaatgggggttgccgagttaacatatatataacagtctttgaacatgtgcctggcacataataattgcttaataaacattactcattagtatcaaaacagattagagagagattccattgaaagaaataccaaaaaatgagctggagttttcagtctttctggcagttcaaggatggaaatttcataaaggagagtgtatgctgcatttacaagtatactagccactagcctgagatgggcttaccctacagatgcagaaagaaaattcaagttctttgatcttcaaatatctactacaaaggaaaaatttaagagaggaaaaaggcaatgtttgctgtttttggtaagtaaacatgctgaaactcccttaaaattcagataaggaaaagagacaattctggaacccttccatattctaagggctttcatttcttaggaagagtggaaagacagcaataggaagaaacccaagattcaatttctgtcacaatatcacatttctatcaatatattcctaaacatcttttctaacatctcagattattacatttggatgaagcagagcttttctaagagtaatgctagtggtgagaaagatgtctgcagctaaattttagaaaactgaatttcacagcaagtaagttgttcctgctgttcagtcgctacacacgctaagtcgcttcagtcatgtctgactctttgtgaccctatggaccgcagcccaccaggctcctctgtccatgggattctccaggcaagaacactgcagtgggtagctatgctgtcctccaggggatgttcctgacctagggattgaatccgcatcccttctgtctcctgcactggcaggcagattcttaccactagaatcacctgctaagtcatgttcagatccctgggatttcacggactgtagcacaccaggctcttctgtcctccactgttttctggagtttgctcaaattcacatcaattgagtctgcaatgctatctaaccatctcatcctctgccaccctctttctcctttggccttcaatctttcctagcatcagatgctgggtctttcccagtatctagcttcagcttcacctaccaccactttccctacaagggcttccctcatagctcagtcggtaagagagtctgctggcagtgcaggagacctgggttcgattcctgggtcggaaggatcccctgggagaaggaaatggcaacccactccagtattcctgcctggagaatccccatggacagaggcgcctggcagactacaccccatggggtcacaagagtcggacacgacttagtgactaaaccaccaccaccgccaccaacttcagcttcagcatcagtccttccaatgagtattcaggattgatttcctttaggatggactggtttgatttccttgcagtccaaggactctcaagagtcttctccaacataattcaaaagcatcaattcttcagcactcagccttttttatggtccgactctcatatccatatgtgactactggaagaatcatagctttgactacacagacctttgtcagcaaagtgatgtgtccgctttttaatatgctgtctacatttgtcatagcttttcttccgaggagcaagtgtcttttatggctgtagtcactgtctgcagtgattttggagcccaagaaaagaaaatctgtcactgcttccaccttctcttttatttgctatgaaatgatggaaccagctgccatgatcttagctttattaaatgctgagtttcaagccagctttttcactttcctctttcaccctcatcaaggctctgttttaaattctctttcaatgttcctgcttaggtcatggagaaagttccagtttagtagtagttagtttgttttatttgctaatctccccctttcaacaaatacagacatgtcctaagcatggagcactgctggcataggcaggccactctattatagcttgtacttaatgacattattatgttttcaggtttcaaaatgatattgacttttccacttagtctctattggcaggacattttactggttttccatttaagaaaataatacagatttaagatttcattttttaaacaaattcaaacataaaaatgagatatttaaaaatattaagtaaagagcattaggatatgacaaagattatgatggtagtactcaaatgaatacagcacaggaaacacaagcttaaacaaattctgttcttaaggaaaaattgacgacttagatggttcagttaatgggctcattaacacttatgggttatctgtgtaggagaacagagcaaaaactttctagaacctctttctccagatttcatgactcataactaaagttcagaacctcctgtctaaacagtcaacattgctgacattatgaaacaaactatgctgctgctgctgctaagtcgcttcagtcatgtccgactctgtgtgaccccatagatggcagcccaccaggctcccccgtacccgggattctccaggcaagaa

SEQ ID NO: 52733 - DNA, 1580 bp, Bovine  19866881211365
  misc_feature (1)..(1): n is a, c, g, or t
nctactaagttgcttcagtcgtgtccgactctgtgtgaccccatagaaggcagcccaccaggatcccatccctggaattctccaggcaagagtactagagtgggttgccatttccttctccagtgcgtgaaagtgtaaagtgaaagtgaagtcgctcagtcgtgtccgactctttgagaccccatggactgcagcctaccagtctccgccatccctgggatttcccaggcaagagtactggagtagggtgccaaacagcacaatcatgtggaatcaaacagcacaatcatggtttcttacgaatgttttgcttgttcagatgcttcttaccttgcctgaaatctgattcagaggaaataatagatggactttcactggatgtactaaagagatcactgtggtaagttttgtatctttgaactggttctgaaaggattaaaacaaaaacattagaaagcaatctcattagctgttccacaatcatataaagcactacatttattcttgtgagaccagaacatctattgcttttaaacttactaatcactggatagtcatttaaaaatgtgactacaattttgaggtggtttggcatcctggttagggtcctggactctgaaaccatattgcctgggtttgaatctcaggtctactactcaccaagtgcatgatatggggacggtatttaactttcctgtgactcttcttcaattgaaaagagggtataagggaaatgcacatctcctaaggttattgtagcattaaccgaactcatatgcaaagctcttagaacagagcagatgctatataaacatcattctgtttcaggtgctattagggatagaaaaatccagacacccagccccaagctcaaataatttaaaatgcagaagtacaacactgctatatttaaaatgggtaaccaacaaggatgtactgtgtagcacaaggaattctgctcaatggtatgtggtagcctggatgggaagacagactgggggagaatggatacatataaatgtatggctgagtccctttgctgtctgcctgaaactatcacaatactgttaatcaccattgttaattggctatacaccaatacaagttttgttttgttttttttttaaatgtagaaatacaaaatactcaagatgggacatttagttccaccagaatgagatcagtaagcactgggagtgggtggggggtctgtgcagggttgtgcggtgtatgctctgtacgaggagggaagcactccactgaaatctaaattctaccttctcaatgtctctgcctcagcccctcatcttcacacttctgtgatcactagcatagatgataattccatgataagtctcatgcctggactacttttaactgtcctagattcccctttctgcagtcttgcttgtctcatattataacgcacattacagagagtgaactttccacgaacgaaaatctgagcacattgctgtatttcttaaacttcttcaaactagagtttttaacatatagttcaatgtctccttagtattcaaagcctttcataagttgatccacgactacatttacagcag

SEQ ID NO: 52734 - DNA, 1170 bp, Bovine  19866881218208
  misc_feature (1)..(1): n is a, c, g, or t
nggttgaaaaaagtttactaatgttgtcaataaaggaaacaaggaggaaaaaggaaataaaatataggcaagctgaaaacaaggaatgtggacctgtgaaataatgtaagaacaattataaagcaccaccaaagaacagaaattgaaattaaaatttactctcttacagccactttgcagaaatagttatgaaacagtaaattcatgaaattgttgttgcatggcatagattcacgtgactgaggttctctactctgtctaccgaataggtttattgcaactttcagcttttctttgtgaggtaaaactatattgcctccatccttgtgggtcttctctttggccttgttggttttaccgtcctataggttacaatgccaggtttggcatttggtcaagttaccttgggaaaatccctcaaaacttttccatggaagttctgtacaacaaaagaaaaagttctttgttgctccttgaaaataacattcttcttacataatcatttaactatgttcataaaattcaagtagtattagataaagctattatttgacatcttctataatcctttcaaatcatgttcctcttataccagaggaatttgttttattttgttttttattttaccatgtcacttcctgtggtagcatggaatccttttttttttaagtgctggtcaatatttgtcttttcaattccagagctcttttaattatagttttatttgacacttacattcactgtatacaaagctggacaaagtaggagtcacgtatattatacctgcttcaccaggtaaacattgttataagaacaatacacaatatcctgtccgtcaaatccatggccatttatcctcctactcctcccggcatgacgtctaccctttgcctcagcatgacctcccatttttccagcccatcatttccatcctgattctacaagcctagtctctgtggtgccatttaattatttcattcattcatctcttgatttttatttttaataagctctcttaaaataccttctagcacaagggaataattcattttgtgaaatacctgccctcaagttaacaaagaagtaaaaaagaagccctcacatacggttgatcatctgttaccttggatcccacaccactcctcggatatttcccatggtctgctttct

SEQ ID NO: 52735 - DNA, 1485 bp, Bovine  19866881310931
  misc_feature (1)..(1): n is a, c, g, or t
ntagctcacccaggctcctctgtccatggaattctccaggccaagaatactgggggggggattgccattcccttctcccagagggaacttaccaaccccaggggattgaattctggtctcctgacttgcaggcagatactttacggtttaagctacagggaagttataaaaaccaatatgttaaagataatagtgagcctaagatttccatcttataacttttttttctgcttaatattattttaagcttcttaatgctgagccatttttgttgttcttaacacatttatactattcaagcagtaaaaacatgttgtatttgctatcatgttagccgaactgtttgcttgtgaggacagatatgtgaagtgcatgttattgtgtgtgtgtatgtgtaacttaaaactgtgtatcatatgaaagtgataggtgaaggtcactcagtcgtgtccgactctttgtgaccccatggactatacagtccatggaattctccaggtcagaatactggagtgggtagcctctcccttctccaggggatcttcacaacccagggatcaaacccaggtctcccgcatagcaggcggattctttaccagctgagtcacaagtatatcatatagtgcttgggaattgacttcctgatactgtttgtctctgggcctctttctgacttgaactttcacaagaaacctatgtaacagcccatcttaaaagtaatgtgacttgtgccacagtaggaggtatggagtaaataattaaagctgctttcataaaaagcattccacagcaggaaaggaatgaagaatcttctttgtgaagaaaagcactaaatcacacagtgagaaattaggaaaacaaaaaccaacagagagcaagccatcataaatagtgccttgaggaagtgaacaatgttttaaaaacaggactcaagcttaggaagctgaaaacatttcagtggatttttgggttgccagcaattttaggatcaactcccttgacatattggcatcatatttatgttgcctgtaaggaagttagtaatagaggagcccatggctatcagaagccttcacactgtatcaagtcacttagtcatatattgggctccctagtggtgctagtggtaaagaatccatttgccaatgcaggagacaagagtcacaggttcgatccctggatcaggaagatcccctagaggaggaaacaacaacccacgtcagtattcttgtctggagaatccatggggtcgcaaggaatcggacacgactgagcaactaacactttcacttcagcagtcatatattacttgatatataaatggaggggcttccctgatggctctgtgttagagtccgcctgcaatgcaggagacacgatctgatccctggatagggggagatcccctggagaaggaaatggtgacccactccagttttctttcccaaggacagtggagcctggtgggcctgcagtccatgggat

SEQ ID NO: 52736 - DNA, 1026 bp, Bovine  19866881320741
  misc_feature (1)..(1): n is a, c, g, or t
natggggttttaattctggctttatcattcaatcccatgagtttgggcaagccacttaatttctgtttctcacttcccttcatctacgaaaatgtggatataatttgctatgccttcttcttagagatgataggataaataaactaacccatttgaaccatcataagctcttctgaacaagtagcagcataaaattctaaattttgcctctttttttttttgcttctgctttatttttctcggcatataattatgtactgagggagaatttaagttccttttgaaagaaaaatcataaaaacagaaatcaaaagatctcctagaaaagttttagattctataataaaaaatcaagttattcagaacaagtagtcattgtaggtagatttttctatttcttaaggatgttttgagttcagagaatttatagacaacattagattacacacaattataagtattcaaatttaaaatgaaaccacaagcattttcctttcagagagcatgtagtttgctaaaaagtaaagagcaaacaataaactttgaagagatattaataaaagattttaagatcataaggagtattcataatataacatattttacttattaaatttaaaaaaccttccttgtaaagtacactgttttaactgtttttgttatttatgattaacattatccttaatgggatagcatcattcatctttcccctcacacacagactcaaattcacagcacctcttagaagctaacttcaaaatgacatttcagtattaaaagaggctccctgattccccatctgtcctcacaaatgtgatcaggtacgaaaaaaaaaaagaaacatgatattatcaacatgcctgagttctggagcaccatcgtgctgatctgatcaaggtgtaggtttctaccttaagctcacctggcaggaaatgcttgatttctttctgcttagtgcagctgttacatttagtgcgctggcagtattaaataacaaagtaggggcccacagcctgctagttcagg

SEQ ID NO: 52737 - DNA, 1621 bp, Bovine  19866881330166
  misc_feature (1)..(1): n is a, c, g, or t
ntagatgttgttaaaaaacagcacactgaaaatgttacacttgtctgcacacactcttggcttgttcacgtttttcaggtgtatttttatttacaaagtgagcggatgtatagcatgatggagttacaaacatatttggtatctctatgttcatgggaaaagtatataaatatattacaggaagttctagatagtaaacattagaaattgatatagggaatgtttgctaccttttttttttctatgccaatattactgtcatttaaagcttaaatactggcttcaagtatcccctataaaatagctctagtttttaaaaaaatactggaaaataattttgctataaacaagattggtacatgaaaaatagactcgatatgtctataatcaaatgctgccttattcatccctaagatctgcattattcagttagtgttaaaaaaatctctgatacttatcacaggttgcagcagctgtaaaaatacagcaggtcaccattatttactgttattaagaacgcccctctaaggtagaggagaataagtataatgaggttttatggacttgctgtcctgtgacctttaagtagagagcaaagaaatggacagatatccagaaggctgttcttctcatgtcatttcagaggctggggctgctctttttgctcttcttcagcttgaagacgtgtcaggacataaaggatgacttgatagcagaaaatatattgatcctagaacaacaacaaaaaaaggagacagggagagcagacttcagctgtatagtgtgaatatatgatatatagcttcaccaatgttggaagcgatgtttgagtaattttgaaaatatggaaaagctgtgttataaggttgaaagtaaaagcaggatgcagaattgtgcagtgtcatgaaaatgacgagaaagagaaacccgactgacaaagtgtggaaggaagcagccttggggtggtgggtgagtgctaactgaagttatctccgatgggtgggccacctctattttttgtgctttggtgatacttacggtcctctggtttctaaccctgcaccctcctccccaaaccacgtcttgttctagcacagcagctggagtggtcctttaagatgggcgttaacttatgtcattccatactgacaatcccgtgatggctccatctcactcagggggagccccaagctctggccccgtcacctcctctcacccctcccctcctgctccctctgcctcagccactggttgtgactactcttgaacacagaagacgaactcctatcatggacctcttcgaaggcggttctgtccgcctgaaaggttctttctcccagacatccgtatgaccacctgcttcatgtccttcacatctctgctcaaggggttacatcctcagtggtaccactctatgtaaagtattacccaacctgccatgactcatcctctacccaactctttttccttctaaagcacttaccactttcaaatatcttataacttatagcataaccgagtacagtaaatggatctattatctgccttgctcatcaccacccaccagaagatcttttattctggcagaagatctttgttattcaagttatttactgacatg

SEQ ID NO: 52738 - DNA, 2284 bp, Bovine  19866881380771
  misc_feature (1)..(1): n is a, c, g, or t
naagggtgcttcccaggtggctcaatggtaaaggatctgcctgccgatgcaggagacacaggtttgattcctgggttgggaagatcccctggagaaggaaatggcaatccattccagtactgttgcctgggaaatcccgtggaccgaggaacgtggtgggctacagtccatggggtcacaagagtcggactcaacttagcaactaaacaacaacgagaaggaatgaaacctttttgctcttacagagttcacatcagaaatagagcaaagcacattacattcttctctcattgtagtaaaatccctattcaatctcctaggtgactctctgttgctgtatatcatgacttttaaggatataatgtgaataatatgatacttattattagtagtggtagtctttctaataatcattctatcatgccttaataaaccagactcacatgtgctccaggcaaatgagttcagtttcaaaagcgctttcattatttttactgagagcaattcaccaaaacctccgccctcttttccagaatcgactcttcattgttgtttctcttttgatttacagtgaatgaaaagctgctctaacattatggagttctgttctttacagaaaactagctctgctgacggataaagtacatatatattaattagtagcatatgaagatataattatttgaaagcagacaatatgaaattcgatgaagtagataataaaggaggatatttattcaccataaaacatttctctggatcaagccatgtactgggcactggggagacaagatacagacacaatccttgctctcaggaactgacaatctggttagattaaatagaaattgcttccctgccaccccaattctaatgtttatcattctaatttgggcatttatcacttcctgcttagaataccacaatggtctcgaaaaagaggctaaattgatttagcctttggtaaatccccctatttgatccttcctggattgcctattcattctacctctcccttttaaataataataataatattaatgtaggattgtgtaatcctgctcaaaaagcttaagaattgatgcctttggaataaagttctaattttttaacacttctaaaatctgatgccaatctactcaccagtcctaactgctgtattatccccatactataagttaaactatacagcaaatcattccctatatatgacacattctttcccatatttccatattcctaccttggataacagtgttcctttgtttagaattccctctgttgaaatcctacccatctaaggttaagttcatgttccacttctaccataaagcctacccagaattcctctagccagaactactcacgcaggcacccccaaaccactcttacttctgtgtgcctgcatgtgtgtgtgtgtgtgtgtgtgtgatctaaatgctttgacttctttgtatcactcttacggcaccaaatactaccttgtattgttatgtttctttctttcttcctcacaaacatattaaacacccccacataactcttggcatgtgtcatatacattgagcgattagttaataactgtgaggagttgaacaaatacagtgagaggaacaagtgcaccagacatgagagtaaatatgttggtggggacaaatgtcatgggaagctctgtaaaaaaataaaagaagtggagcttaatattgaagaaaggaattttattcacaattgtgtcaatgtattgtttccttacaagaatgttccagcttctcacataagcatttcattcatttgtaagatatgctgctgctgctgctgctaagtcgcttcagtcgtgtcggactctgtgcaaccccacagacagcagcccactaggctcctctgtccctgagggaggtacaaaaaagtatggaagtcactaggtgaaattattgtgaaaatgtcaggaaagaggaaatttagaatacctgaaagaaaatatgtccatggtagcagcattatttgcagtccaggcaattaagtgaccagattgtatatgctaaaatagctgtttacttttgttttctgtattaaggtgtcaggacttccctggtggctcagatagtaaagaatctgcctacagtgtggagacccgtgtctgacccctgggttgggaagatcccctggaggagggcatggcaacccactccagtattcttgcctagagaatccccatggacagagaaacctggtgggctacagtccatgtggtgacaaagagtcggatacaaactagcagctaaca

SEQ ID NO: 52739 - DNA, 1325 bp, Bovine  19866881426406
  misc_feature (1)..(1): n is a, c, g, or t
ncaagttctagtgtttgataaatttgaacagagcgaactaccttgagattttactccttccccttgtgtgctcactacccatcccccaacgtctttgttagtcttttgacttttctaaatgcaggtgaaatccccactgaaatggtaaaatcaaacttgattgtgtttttgctttgattttaggctagcgtgagaaacaccaacggcaacaccatctcagatctctgttatggcgactcaggcaagaagctgttgaattagacccatttcctgtagatgagaaaccatacaagcagtggtgagttgcaaacttaaacacattccttagcaggaaacatgtgatctacataagcaatttaaatattgcatatgatttagtgtgtggatctgaagaaatactgctcccaaatcatgtcaactaaagaggtgaaaatcagtgtttaactgatggtgtggtgctattaataccacgtgaaggagcttgaggcctttaggggcataagtgcgtcatccagcaccataatgctaccgccctggatggtactagtctaagtgagatgactgcagtgagcaatttcctggggctgcgtaacagttgggtatttacataacagtatttttcagtggcatttattatctgcaacataattctacattttactgcttcatcttctctaggagaatactggttctgatctaaattctaacacttaattcctttcaggaacatatatgctcgtatatggggcttcccaggtggtgctagtggtaaagaaccccctgctaatgcaggagacacgagagatgctgaagacacaggagacgctggttcgatctctgggtcgggaagatcccctggaggaggccatagcaacccactccagtattcttgcctggagaatcccatggacagaggagcctggtgggctacagtccatatagggttgcaaagagtcagacacgactgaagtgacttagcatacacacagcatgcgtgtacatatatatgtgtatataagatatatgtgatatatattaacataacatttagatctttagacataagggaagagaaaccacatcatagttttataaaactcgatttgtggacattttagcctacaaattctttgcttaataaagacagtattaaaaatagatccagctgctttgttatttggaatcattttaaaatcttattattttataaaaatatcagctcacataggcaaaatatattttttaatacttgatgcttcatagttgccaatgtcaataatcaatagactccagggagagaaccaggtatatctgtcaaacaacat

SEQ ID NO: 52740 - DNA, 730 bp, Bovine  19866881560478
  misc_feature (1)..(1): n is a, c, g, or t
nttcttgccatttcctcttccaggggatcttttctgacccaggggtcaaacctgtgtctcttatgtctacctgcactggcccggaggcttctttaccagtatcgccacctgggaagcccacagtctattacatttcaaacttgaatgagaacctgcagtgatttaatttgattcacattttcagggttgatacttatttctggtccaagttcccaaacggtctaatagaaaatcaagtagaatatctatatttgttgccagaaagaatagcaccattgccatagcgttttgggtaataaagaatctatatgggttggtttactaagcattctaatagtaaacgtgttctgtaattctaagacaggtatgttctgtctcatttgcaatttatccttttcaaatgaaactccgtaaagagttattcgataaatgttaaattctattggaagtcaaatgttcataattccataaaatcatctgccttgatccataatagctaaaatatagcctcaaactactgcacccgtttaaacagtgctacagcatgttttgagtcatgaaaaactatttaaggaacagcttctgacaatttttgtttacagatcagaaaaatcatggaaaaagttgcatctgtttgtccttgaaatttctgtatcagcttctcacatctcaggagaatacgtcccctatacgtgaaatatttcagaacataatctagtcagccaccaca

SEQ ID NO: 52741 - DNA, 912 bp, Bovine  19866881852901
  misc_feature (1)..(1): n is a, c, g, or t
naacttctggcaggcaaaatctagaaaattacttttcaaaaataactttaaatcagcacttctgaattcctagttacaagcaggagaaagctttattgtaccagaattaatgtggttttaaaattttaatcacacttgagagatgaaagtagtttggggaaaaaagaatctttggagtttattgctttgaaatggaactcattttaactaactttgttccctagttagcagattaggctttgatagatgtttcttggcttgtatttcctgaagatgaattggccagaattaagctacgtaaatcttatccaaggaatatatattaacaatagcatatgtgcagtgtttttactcaaatactacagcttccaaaaactatctagttggtgtcattctgtagacacttaccttgaacagaagggagattctttagtcaaacttgacttttgattacctgtgtacagacggatcagctttcccgtagcagcgagcaaaagcctgatcgaagccaggctatccgagaccgattgagaggaaaaggattaccaacaggtaagagtgtgttaacagaaaatttttagactttaaatttgttactatttcctttacaaaatcttagttaacctagcttgaaaatctggtacttatgatcataatcataagtgtgcaaagtggaggcattgaacaggtaggaacactggatgtattaatatataaatccttgatcattttgcagaaaatgttaatacagtcaggacacccacagtatatcatttctttcccaatattgttattatagcaataatatctttatttactttatcatgatatttttttattaaaaatacattttaaaggatgataaaacacacaaatttatgaacataaatgttactaaagcaaaagtttcag

SEQ ID NO: 52742 - DNA, 634 bp, Bovine  19866881854597
  misc_feature (1)..(1): n is a, c, g, or t
ntccctcccccgccaccccgccccggatgagacaactccgtctctagcggccctttgcctaatcctagatccacttggagaggtagtgtaggctggctcccgtgccagtggagaaagttcagggatgcctctgggactgttcctgcagaggatgagagcgttccaagtacgaaaataccaaccccaggctcataggagcgcactccatcaaagcagacacagtcaccagaagggaattttgcttaattggtgtaatggcttatcagcttccctggtggttcagatggtaaagaatctgcctgcaatgcagcaggcctgggttcgatccctgggttgggaagatcccctggaggagggaatggccacccactgcagtattcttacctggagactcccatggacagaggaacctagcggggtatggtccatggggtcacaaagagttggacacgactgagcacctaaccctttctaccagccgacagaatattacctgcttctaagttgctgcatgtcagtataaagcagattattccagtaagtgccagcacagttgttaaagctggtgtcaaagttgatccttggttctgggctgttctcttagtcaccagtggcacaagccagagttaaccag

SEQ ID NO: 52743 - DNA, 1305 bp, Bovine  19866880652268
  misc_feature (1)..(1): n is a, c, g, or t
ncctacttgctccttatcatctcacttgtccttgtgattcgtgtcccaagattgccttgggagcttgaggattatatgcctggaaaagtcggggagagtgtcctagaggaattcttggccagcaatcagaggatgcctccttccttgccaggaccttcatttattaattgattcattttataggcagtgagtgaaagattcagaactccaagagacacatgagtcaagggtttatcacccatgtcccttttaatttgacttgagactataacaagtcagctaacggcacaagtttttcagttctcaccctgaagtttatttccttgagtgtttaaagaatgtaagcagtacctagaggtgcactgcccactttagcgtccatgggctgagttctgtttccatcacgagcacctgagatgactagcaggggtgatggccagctgccgcttttcctttcacaggcggcccctgacgtgctgcctccatttttcagccacgggattatcaagtagcaagcgtagcaaaatcttgacacgaagtcttgaggactggaacatcttcctttccttgttaggatgtaacttaccacgctgggcagaagcctgcttttgtagtggcagtcagctctgacgattttttcccagaagaagaaaccccaccccacaaaggaccaaagtgtaggcctgctggcagaactgtccacaggtccccagacatgttccattgcttcagttctttacctaaagtcagttacagatgggttcaattcttaagaggagtgaatcctagtaactggcctgaattcaagacaaattaaagaaaatgagccagtgtgagcttgggttattggcaccagtgcaggaccatgccctacaatgacatcaagtccaaccaaggctgctggaccggactttgaatccagcaactcagagaatcccacttgcaagtgcttccttggtgtctaatgtgtacactactaccttattggattcatctaatttctaacatgtaatcctgggatgcaacatttttctttaactcaggttaactggggtctccacagcctctcacagggacactactgacacctcaatcggcattatttgatagatacctgatactggagtggtcagaacgttttctctatccactgcacctgctatccattaaagctagatcagacaatgtagtatatttcactttagcacaactctacaggaatccaagccaagccagttagctgaaccagtatagactggtggagtacactgatgatgacaggcaggcagtcacactgacaccctg

SEQ ID NO: 52744 - DNA, 2059 bp, Bovine  19866880734295
  misc_feature (1)..(1): n is a, c, g, or t
naaagaaaaatgaaacccagaattctaagcaaagtgaaaacacagcgaagtccactagtgactggtactagtattaccggtaacaagcttgggggctggggacacagagaagaagcagggtacattttgagagtgctgtcacgggtaggggagccacttaccatatcactgacgggcttgaccgtgtgatcaaagcccacgcagttctcatccaccatgcgcagagccttctggaaggcctcctcaaaagaacgcccaatgcccatgacttcacctggaggaatatgatgtgaggattgagggccagggggcactggtgttgcccagaatgtcggtagtttaccgtcaaatctctctgggacgttctcaagcccacaatggtggatttatgttgtttcattgagaatcttacacttgcagctttttctccctaccattttcatgtggatattgaacaatcacagaggcccaatcactgatggttatccatttatttggtttcctttattcacattgtgatgatgtaacctgggatctggctcatcctttaaaactttttaaaagtctgggtagtaagatgatcccattattctttgaattcactcagggttaatcatatttccaacaatcactctagagtacttcttccaaatgttttatacaagattatagtttacgtaaacatttatcctgcttttcccctcattgtaagcttttctcacattagtgtgtgactttgttaccagcagtttaactcttgtgtgatttccataaagtgactgctcactcactgaaggacacttagctttgaagtgttcatcactgtaaataaggcggtaatgctatctgggatttagtttatctcctgaggatatattttcagaagtgcataggcaataggcaaggtatgttttttggcccttgataagtattaattgctttgtagaagtctgtgctttataatacaaagtattgggttggccaaaatgtttgtttagctttttccataagctattatgaaaaacctgaacgaagcttttggccaacccaaatataaatttaaccaatcttttaagaagtgggtatagtcatttaaaacaacttttgccaacaagtaaaaataattctctcattttaactagatttcttctaactactactaagaggaaacttccctcctatacccaggcctgcttattgatttcctcatcaatgaagtttgttcatgtcctctgacaatctaccctagagtcttcaaatatctcttaccaaatgtatttttctatttacaattctagtatttgtttctttacaaaaattttcaaaaacatcaagatggtactggtagtgttaaggaaaaagatgagcgattttgttcaatttctttgtaatgtggttatatgataaaagtttttatcctggggaaaagagaaacccaatgcactcacatgcaagcctagaaaaaatcctagaatcatataaatccccaaattaatgtctgtgtgataagattataggtgattactcttctttggtaaaactaccttttctaatttctcaatgattcatgcatcttacttgtataataaaagttacaaagagttaccaaagaagatcaaattccaagaatactcagatataaaatacttaaatctctcatttaggaatcaatctttgtcctattttcaatccacttctcttggctacaatttatggcttcgttcccatgtttattataattttcacataacagaaattcatctccagaaggaacaacttggcagtcttgtaagatttctaaaaatcaagtaatatctgagcttagacttacaagtttaaaggctactactgctgttaatggaaatttggagcacagtaaaaagctgttatccttagctggtggcagcttggtacatgcacatgcttgttttagtagaaatgttgtggacgacaaactaagggaacttaaagaaagggtcactgtaaggcagcatactaactcaattacagcattcttaacattgcctagaagctgaccatcaaatccattcattactaa

SEQ ID NO: 52745 - DNA, 1617 bp, Bovine  19866880746324
  misc_feature (1)..(1): n is a, c, g, or t
nctggagcccattctgtgcacagaaggttttgatttctcagcccttcaggcttcagagatactggtcttgcgtctgcgaggtctctcgtctctggtcttgaggccccagtcccttccggattcaaggcaatgttgcctccaaacaaggcccaggtgctgctacggaacacagcgtcccctgggcggccccctcagggcccctcacaaactgaagactcccttttctataacctacaacctcagcctcgccaacaatcactccgctccacccagccatcttgctctcctcccccacggtcccactctgcggggtcccatctctactcttctgattcaaattcggactttgtcctacatccctactcttcttctctctcaaattcccccactttctttcatcagaattgcctctctctctcccctccctgttcttcctcaccttcccgccggctatacccctctgctaccctcactcactcctcgccctctcagccacagaattcctctttcccccactccccttgccagtcacctttccacctcgaagatctacctacctccactctcacgtccccgagccccagcccaccttctcgtggggtccactctaacagccaggcatggcacttgcatcagtacaggaacaccaggtcccctggggcggagggggtatgcgtggcaagcgggaaggaccctgcagagttcaaggacccaggagccctggcccaagccctggtgctccatctggggcaccgtcgtatcgcccacgacttgcagctactgcttttgcagcgcctgtggctaggccaaaccgacaaggccccggtcgtggaataccctgtatgcctggtgtgtctccggctccgcaccccctcttgccccatccccaggtacaggactggacccaggctgcttgctttcccccagctgctgccctgtgcccagggcaaggaatctggaccactccgcatgggcattggctttggcctccgcctgcctcagggccaggccaaggctctacatctgctgccaaaaagaaggccggaggaagcagggcctcaggccaaggctgctcaggccagtgggtgtcaagcccaggtagctcaagccccagcagctccagccaaggcagatctaggggcagggcaccctgtcccagaacgggagcttcaggtctgtagaccgtcagtcactaaactccacacgccattcagagtctctaactcaggcaccaaagcaggctacggtccacttgaagcccaggccttcctctgccccaaagagacctgcctctctagggcccattccccaaaagtcaccactctagttccagagccacggaggccccctggagcacctcttctgaatcccaccagccctgctcggctccagacctcagggagcccccgagacactctgaagggctggctggctggaggtcaggtgtgttctccagtcctgaaccctgggagccccttgtggagtctgctttctcctggctgaagaggaccaagggcatctgaggccccactcagccttctgtgtaaccaattaaaaaaaaaaaaaaaagcctgaccctgcaaaacttgtgtttgcatcttgctgagcagatactgt

SEQ ID NO: 52746 - DNA, 3405 bp, Bovine  19866881067975
  misc_feature (1)..(1): n is a, c, g, or t
ntggttggaagtgatggggtaacccgggagagcttcgcggaggaggtgaggcttgaacggattatggcaaactgggcggcgggctggctgttctggcgggggagagtgcagctcgtgccaaggtttgcgggcggcgagcgctgagggattgtacagctctggggagcggtgaggaacggaagcactaaagggtctgcgcgcgccctgggcgccgcgcctccacccacgccctgcgcggggcccgcgccagcctctcctccacgcgctcgcctctccccagctctccgcgcgagacccagcccacagtccacgcgcgtcaagggagcgagggtggggtggctttcttccctcaatctctccgagaagcatggggcctcagcttcctctgtgagttatggggaggcaaactgaatcggctagaggggaagccacctgccaaggtcaccttgttcgtctgtgtcataatcagggtgcagatcacgtcctagctcaggtccccgggcaagtctcgcctggcaccgtcggggttttgttgttgttgttgtttgtttgtttgtttgtttttgaagctccgcaccgggcctgggacttggccaactctgagagccttggagcagagacgcgggggccaccgctccctccagggctcggatgctgtagcctcgcccggagcggccggctccagcgagctggaaaatgggcagacaccgcgggagcctgtgcgggacaggggccgctaggcacgcctcagccaatgacgacaacaggggaatgtgataacaacaatggcttcctccgggatttcctttcctgggcagcccctgctaggctcagggacagcagcccccgggtgcccgggagggggcgcagacgctggcatgtgctccaccggccacccggcagggagcgagaaggctggaagggaaaggggcgttggagcagatggatcactgggctgtctttcccctcagctccctggccttagaacatactgcctggggaagctgagtgcaacgggttgggagaataccaacagtttcttttgcttggaaatttatgcaagataagcttggctttgaaaaagacagcttgcacctgtttctcaagaaaccatcaagtggccctgtgaaaatctttgcaaagtgtcctcttgaatgccaggtctgaggaagacattctgcacctggacaggagatgggaagactgtgcaggagttaggacagcttagggctggtgccctgtatggaacacttcattcaaccttcactgaacagtaatttcctgccatgcaccttgctctcccacctggggattcctggtgaaaaagatggacgtgttttctcccctcctagctttgacttgatttctcttctgcagttttgggttactgatgtacccactcttgatgctcttcttcctcagatactaattttccctaaggtgtgtccttaggctattcttagtcccaaaggagatgaggcagggagccctggaggttctcaaaagaacaggtcagtgccagcttccagagcacacagtgacagagcagctcaaaagggggcttcagggggccggaccagttcacattgggagaaaaggggagcaaggcccagtgctgaggtcagcatgtaggctgagccagagatcttgggcaagatttggagtccaagcctgtggacaagggttaatgtgtgaaagggccatgtcaggctgaagggtacatacagaagtgttacccccagaaagcctttcctgatcccgccatcccctgtcccaggtgggttacctgctcttccctggtgatctcaaggtcccacagtgctttaggtgctgggaccactcaccacacgataacaaaatcatttgtttttctgtctcttcactagagcaggagctgcctgaagacaggtgttgtctttctcaccactgtgtccccagcttgatacacaatcccccgtaaagccatcccagaaaggaagacctgattgtcagagtggaagcaggaaggaggaagcaggatttagttggagacatagaggaagaaggaaggctgcagcttaaacgtcacctcctcaaagaagccttccctgattcccccaaaccaggctagtgcaggttatacattctcattgcacacttctttttcttccttagcacttatcataccataattaaattattattcagggattatttatttcttcacttggctttcaggatgccataatctagttttcctcttatgtcattgactgcttattttcagtctttgctggttcctcctcatcttcccaaccttttaatgctggaatagtccaggacttggtcaccctcttctcttacctttctacactcagtcccatggagatatcatccagtctacaggttctaaagactacctggaaacagcaagaaatgattgttgaagctggggtataggtacatggaggatcgatcattggactactctgtttttatatgtgtttgaaactttctattaagaaaaaactttaaaaaataagtggcatcttacatgacgattcccagatctctctcacttgaactctgatctcatatacccagatcaatttgacttctcctctttaatgtctaaaagcgtctcaagattcatctaaaaccaagctcctgatcatcaacccatcccaaacattcccttctagcagtcctcctggggcagaacatgggaactccatccttccacttgcacagaccagaaaccttagaatcatccttgacttctctatttattctccacatccaatctgtcagcaaatcctgttcccatccttgtccaaaccacctttgtctgccttcttgattattgcagtagccttctagttgtcttcctttttctgcttttgttgccctgtcatctagcctcaatccaggctaggcaactagacctgtttcctcactctccatctcactcagtatcagccaaagggcttccactggcccacaaagccctatgcagtccaactcctctgatctcatttcatactactcccatctcaatccccagccaccctggcctttgtgcatgtgggtcctacagcacaccaggtacactctgccagatgtcttcacaactcaccggaggacctgcttcaggtcctaacttgaatatcacttttacaggccttctctgtttttctttttaaaaattgtattcttccctcaaaaattttccatctccatcccctgctttatgtttctctatagtgatgattaccacccaacatactgaatattttacttgtttactgtctatctcctctcaccagaatttaagctacatgatgtcagaaatttttgtccattttgtatgctgctatatccccggtacctagaagagtatcggcacctgatagcacctaataaata

SEQ ID NO: 52747 - DNA, 1057 bp, Bovine  19866881433106
  misc_feature (1)..(1): n is a, c, g, or t
ntagcttgtccgccctctcccccattaggagttagagactccaacagacaagcgcatcttcgtggtggcagcagccctatgggctggctactcagtggatcgcctgtatgaactcactcgcatcgaccgctggttcctgcaccggatgaagcggatcatagcacacacccagctgctagagcaacaccgtggacaacctttgcccccagacctgctgcatcaggccaagcgccttggcttctcagacaagcagattgccctcgcggtcctcaggtcagggatggtgggaggatctcaggctgagaacctggggcagagaacctttgtactccgaaagggccctcaggaggaaaagtgtgtgtgtgtgtgtgttggggggggtgttggaggccactgcccttcatccctgggattttcctctctgattcctcccttggatctctgccctctgctggggccattccccactcccatggtctatatttctgacccttctttagcacagagctggctgttcgcaagctgcgtcaggaactagggatctgcccagcagtgaagcagattgacacggttgcagctgagtggccggcccagacaaattacttgtacctgacatactggggcaccacccatgacctcacctttcgaacaccccatgtcctagtccttggctctggcgtctaccgtatcggctccagcgtcgagtttgactggtgtgccgtgggctgtatccagcagctgcgaaaggtctccaagctcatctttcatatgggtctctctgctgtactgatcagcttccgcagccgccttccccccatacttgatcctggcactttctattcattactgtgcctcacatctgtcatagggctttaatggggttgggggtcccttaggccgtcctgtgccctacacgtggttcctctccagaactccgtgtctacttttccagtaccttccctcccaaggcaggcgtcctgtatagcaatttcagacagccaaggcagtactctctgaagtagggacttgggcttcctttcctcatgctatccaccca

SEQ ID NO: 52748 - DNA, 1447 bp, Bovine  19866881646139
  misc_feature (1)..(1): n is a, c, g, or t
ncagaatactggagtgggtagcctattccttttccggggatcttcccaacccaggaatcgaaccgggtctcctgcattgcaggcagattctttaccaactgagctatcagggaaacccgtacctaaggtgacatagctaattagtggccgatttgaattcagatctgtctgaccctaaaacccatacctttgatcacattctatggcctcaccctgctgccccaactcccacatggacatttgctgattcccacatgccttcagtctgggtctctcccagggaaggcaccactgtatcctgggtcacatttgtggccgaggcaccttcttgactccaaggcaacttccagggtggggcttggggggaagttactggggagatatttttggattgcagaggctccaccagaccacagagtaggctccctgcctgctggcctgtcaggttgcctcagccacgtggacatgcttgtggccactggagtcttgtgacagcaccagcacccagaggagcttgtctcatagcttgtggttattgggaaggctccctggggtggaaggggttaagtctctcctcccactaggaaggctccaagtcaggccctctatccctgcctcctgggcactgacacccacactggtggctgctctgcaccaggaagacctgggcctccagcaagggcacagctcatggcaagcctgggtcgcttcctgctgctctggtctctgcaggccctcctctgggcttggacaagaggtgaatttggggaaatagagaaaaagagggcaaaggattgttggatcaaaacctctggaatccccagccagagcagctcagtcattgaaaacccacagactgccaggaagaagctggctctgggaagatttatttgctctgcgactctgccaagtgagatgccaggtcacaggtggagccctcccgcaacccggatcagcccagggagaagggtagcccgatgccaggctggccgcagaggagaaggcaacaggagccagtgatgccagcctggggcggggtgtgagctggtgcccgctgccacagggcactcatacaatgccatcaaaaccctgcagaccgcacttcttgccggccacctggcagccgaacctcagtgcctcctgcatgctcttccctagagagagggacaagtggccaggtcagccgggtcttcggggcaggggcaggccccagccctgtgcctcctgctggggtactcaccctgggacaggctgaagatgaccgccgcgttgaaggtgtctccggcccccagagtgtccaccacgcggggcggtgggaaagcatcggagtggagcagccgtccatcaggccccagcgcgtcggcgccctcctccgcccaggcacagaccagcgtggccctgcgacaccctcctctcagcgagctgttagcccagccctggccccagc

SEQ ID NO: 52749 - DNA, 3221 bp, Bovine  19866880449923
  misc_feature (1)..(1): n is a, c, g, or t
ntcaaagctatcgtttttccagtagtcatgtatggatgtgaaagctggaccataaagaaggctgagcaccaaagaattggtgcttttcaactgtggtgttggagaagactcttgagagtcccttggactacaaggagatcaaaccagttaatcctaaaggaaatcagtcctgaatattcattgcaaggactgatgctgaagctgaagctccaatactttggccacctgatgcaaagaattgactcattggaaaagaccctgatgttgggaaagattgagagcaggaggagaagggggtgacagaagatgagatggtcaaatgccatcactgactcaacggacatgcatttgagcaaactcctggagatggtgaaggacagggaagcctggcgtgctgcagtccatggggtcgaaaggagtcagacatgacttagcaactgaagaagaacaataacaagcagaaacatagaagcaaatgtgaacagacagaatgaaaatgtgtgtgacaagaaaacctattaattaaggtatctgggtcaattaaatctactttcagaggagaatgaaacatatttctgggtcctgaggaaccattatatcttactttagggtctgttcctaatctgactgattacctgtttttcaggaggtggattactatttccctctcttttgctgcatattcttaatgtttgttcatattaataatgtgaatttgctaatgatcacatcacattccagaggcacctttaggaattttttggatgagtgtttgttttatgtccccatctggcatgaagcttcttaaggacaagaacttatttcttacatggacattagcaaccaatggcatactgtgatatcatggtaatattttagttatttaccgaaatttttcctttcctcttatacctttctcacactagatctcacatttttctctagctttcaacctctataaatcaaacttttcttcttctaaccatgtcattgtagctttcaaaatttcttctctcaaattttacatattttacatttagagtttttatacaccacttgaggttttcttaaactatgttttaaaggggaatttggatttcttaggatctgttttgttttgttgttttttttttttaaatttctgggaagtcataagtggaataacaagcattttatgttgctttcttcaaggacataatattcttaagaagcattatgaaaaattaagattttgcctttgactatgtgggcaattttgcctcagattccatcatgaaatgccatcatatagtgttaattcctggcaggctcttctcttgagaaaatgatcattatgtattaaaagaaagacacacttcatatattttatatatatatatatacatatttttttttctgtgtcttctgtgagacatgcttaccttgaaagaaagaaaccaaagctttctttctattttgcagttgagctgtgctgggacaaaatcacggtattttagctaaatatttctgtaatatttttctgattataagctatatcttctcattatggaatatttggaaaatatgaaaactatgcaatggaaaataaaaatcacttgaacttagttataaatagcattgacatttcagggaatttcctttcagtctctctcagtgtgtataaatatagcttacctcacttgtgcattcacttctctgttttgccattttgcatagccttatattaatagtgtttccatatcattaaaatcatcaaaagtatcatctctaaagaatgtacaatgctacattgatggtcattttctttggtagcagttttattgagatgtattttaaatacttatattcatataattcacccatttaaattatacaattcaatggtttttagtgtggttacagagttgtgcaaccatgaccacaactaattctagaatagtttcactactccatcaaaagaaaaaataccttttagttatagcctccaattcccctagctctcccatcctagataaccattgacctgctttgtgtatagatacgtctcttggatattttttttataaatagaaccatatattgtgtgatctttctaactggcttccttcagctttcatactgtgttcaatattcatccagtttgtagtgtgtattagcacttcattcctttttatggccaaacaatatcccattgtagtggctatgtttttaaggtaagtcttcataaaacaaggatattgattctaggcttgtcacaatttgtttatggagttttacgcagtgaaaaggatcacttgtttaaactttaaagtaagatacattgatttttttttctatttttagatctcctttcttccccattcattcagcaaagtatttacttacagagtataaaatatcaggctttgtacaaactttgtgaaaataatgcaaacaaaaccgacacagctgctgcctttacaatcctgtgaggagcccagctgtaacagacagacctccaaacaaagatagactcaaaatttaaactgagataagaaggagcaccaacttccagccgcagtttacaggaccctgtgaagtgaaagtccctcagttgtttgcaattctttgcaaccccatggactgcagactaccaggctcctctgtccatgggttctccagagaagaatgctagagtggggaaccattcctttctccagaggatcttccccacccagggttcaaacccaggtctcctgcctgccccacgtctcctgcattgccggcagattatttactgtctaaaccaccaaggaaggcttcatcaggaccgtgaaagtcaaagtgaaagggaaactcactcagttgtgtcccactctttgcgatctcatggactgtacagtccaaggaattctccaggccagaatactggagtgggtagcctttcccttctccaggggatcttcccaactcagggatcgaacccaggttttccacattgcaggtggattatttaccagctgagccacaagggaagcccatcaggggccatgctgctgctgctgctgctgctgctaagtcccttcagtcgtgtttgactctgtgcgaccccatagatggcagcccaccaggctcccccatccctgggattctccaggcacgaatactggagtgggttgccatttccttctccaatgcatgaaaggaaaagcgaaagtgaagtcgctcagtcgtgtccgact

SEQ ID NO: 52750 - DNA, 1958 bp, Bovine  19866880531114
  misc_feature (1)..(1): n is a, c, g, or t
nctattcatttcaaatgcaggttattattaaaccaattatctgcttggcctgttgacattctgagtgcattattctctcttgtaacctcagcatactgtcttgaaaatgccttttctaagtatctgaaattgtaaaaagcaggatggatttagccaggcttaggctatggtttttcctgtggtcatgtatggatgtgagagttggactgtgaagaaggctgagcgtcgaagaattgatgcttttgaactgtggtgttggagaagactcttgagagtcccttggactgcaaggagatccaaccagtccattctgaaggagatcagccctgggatttctttggagggaatgatgctaaagctgaaactccagtactttggccacctcatgcgaagagttgactcattggaaaagactctgatgctgggagggattgagggcaagaggagaaggaaacgacagaggatgaaatggctggatggcatcatcaactcaatggacatgagtttgggtaaactctgggagatggtgatggacagggaggcctggcgtgctgtgattcatggggtcacaaagagtcagacacgacttgagcgactgaactgaaataagcttgagtagacttccaaaatcgatttgagatgtgtcatgttctaccacattgctaaatctgtcctgtgttggtcttacttttctgcgtgtgatactcttctgcattgtcttccctttagaaactgttctgcttgtaaagagtattcataaaaccattttaattgcttttggcatgccatattcatgtacagctgattcttccaaatatatatttgattgcagcattttttgctttaggttaccatgaaaatttcctatgattaaacaatgggtgaataaaaacaaagttgtgggttgttttgcatataggttagacaaaataaacttttaccaataaaatcgctcaattttcgtttagtttctagactaaaaacatctgaatgtttaggcttcctttataaacacagctcatatttgtatcattgaagcaaactaactatgctttgattaaaattttgatgaaatggatctggaaagttctcatcacaagaaaacaaaattttgggaaaaagttttatattcacagtaacagctatttcaaagcagaagtagaaggccatatattgaaactcaaatggataaaaaaggaagtagtaagataaaatgacttagattaacaaaaattaataatgtcaaaaattaaatcatttatttggaacatgaaagaaaaccatgttgcctctctttaggatgaagccaaaagtctttgtctctttatttcatcccatctatatacctccacactgtcattccagtcttgctattttgattattggagtaaacaaagaaatctgggagtataacaacttagttttcaccaagaattgtctatctttagattttaggcaatttattgtctacctgtaaatttacaatttctatagataatttaagtgtagatcagtaaattagatttaagagataatttgtcatgctaagaaaatttaatttgtgttaaaatatgaaaaaataatcttatttgagaagtagatcaaataatagatcattccatctatgtatggaaaacagactttaaatattctttatatttatctttaattgaacactatactcacgaaatacaaaaattagaagatgtattttccccaaaaagtgccaaaacaatttcttacccgtaactcacatcttttaattgactgttagaaaatttcattgaaaaatgatattcaggtgaagtcatacaaccttactcaaataatgtttccaatgtttgtatctaagtcttaagctagctttcttatattaatgagctagcagttttatggctgaaaataactctttattttttatcatttatggaacatttttcagatcttgaatcatgaat

SEQ ID NO: 52751 - DNA, 1559 bp, Bovine  19866880570640
  misc_feature (1)..(1): n is a, c, g, or t
nagtttgaatttccattttttggattctctgtccagctgttgcataatggaaatttacttttagaatatattcagagaatataagtccttctaagtgcttctataacaagtgtctctataaaactgaatagcaattgtagccttgaaaaatattagaaatgcatatctttggtatattgcaattataaagggaagatctgcattacttcttaattgtagttattttctaaaatgagtttgagtttcacatgtgtttgcttaatggagctaatcttccttttgtggtaaaaagtacttgaacagtgtctgtgtgtgggtttttttttttcttttcaaaggaagtacattctaaccattgcttaatatctggcagtcattgaagcaaaagaaaaaaaaacatttaatattctttgcatgattttccatccaaataataatatcaaaatacccagacactggttatgaaaatatagaaattgtggcaacagccaattagttcccagaaagtcttacactttcataattttttccataataatcaggcattggaaaatcttctggtacacacacaagtcatagtaaggctaataggtcaaatgaacctaaactctcttcctatttccgacaaagtataaaacagcatttccagaacaagaacaacacaaaagcaatcaaaatcaatgtacagtcaataaatacacagtcactgtgaaacaaagatgctatcttatttatatttgcctcaaggacatattaagtgccccaaatatttcagcatccaatgtatctctggcctgaggaagcatgcaggaggggaaaatcagactgttttccaatttttttcaaaaggctttctacttgcttccaggtctgatctatcatttctacagtgtcatgtcttagaaatggacacccgttggcaacacgtttcctcctgactctgtgctgtggagatgaataggaaaaggaaaattttaggattgagaagctgatctgtttcaaaagttttcttccttagagtaactttgtaaaactaaataataagtgtcctcttctgaaaatatgttacattcatattaatgaaagtgaaaagttgcagtccttcagtcctggggatattccagggttgggaaggtcccctggagaaggagatgtcaacccactccagtattcttgcccagagaatcccatgaacaggggagcctggtgggctatattccatgggatcataaagagacagacatgactgaagtgacttaagacacacaacacacagattaagaaagtgaaatatagaaaggataaacaaattgctcacaaccacatggtttataggagaattccatagctcagttggtaaagcatctgcatgcaatgcaggagactccggttcgattcctgggttgggaagatctgctggagaagggaaaaactaggcactccagtattctggcctggagaactccatgggatgtacagtgacttccctgggggctcagacggtaaagtatctgcctacaaggtgggagacccgggttcaatccctgggtcaggaagat

SEQ ID NO: 52752 - DNA, 1140 bp, Bovine  19866880623187
  misc_feature (1)..(1): n is a, c, g, or t
nctctttgagaccccatgggactgcagcatgcagttaaaatgatgttaagaagtgattaaaattgaaatataagtgcttcactattacaagtgtacatgtgcctctgtagtgattctgcaataataggcaaactgtattttgagaaaaatatattttcactaagtagtaatatgctttgattcttttctgtgcaattcaaaatgagtcaaaaagatgaaattactgaatgttaggtttctttctttatgcaagatttatgaactgaaactgtcacccagtaagtttacattatcaccatttataataaaatgccaaattcagtcacaagaaaaaaaaaataactgagactatgtgatcacaaaacatatcattctggactttgattaatatgaaagtggttcggaattcattaaaatgaatttcctttagacacgttcagttcaccctctgtgagatttatttgtttgcaaattgggctatttggccaatgataagacatcaaggaatgaatgagagaactgttttcattagctccagtgaaagttcagccacattctttgtaggggttgagttgttttccacctctaaattccagtcactcctcattgatcttagaaaaaaagatgtttatgtagtgacaatataactattttataaaatgtaacagattttccagattttcattatttactctgaattttttttctttggtaaatcttttggctttgctgtgtttttttccgaaggcctgtataatagaaaaacaactgaacaaactggaataaagctttatttttaattggggtatgattgatttaaaattatattcacttcagatgtacaatgtaatgatatgatatatgtacatattgcaaaatgatcatcattatataagtgtggttagcatcattctccatatatagtgacaaatgaatttctttcctgtcatgagtattttaaaaagttactcttttagcaagtttcaaacacgtatcttgatattattaactatagccaccatgttgtacattatttgcccatgattatttattttataactggaaagttggactataagtaattttttaattcaagtatacaataagctgaataaactgaatcttcactgagttttatgt

SEQ ID NO: 52753 - DNA, 2454 bp, Bovine  19866880683932
  misc_feature (1)..(1): n is a, c, g, or t
ntacccatagtagtagatataatgttcatgtgaataaattcacccattcccagttttcccaatagccagtccctcctgttatgaagcttgcaaaagcctctcattcccatccatcatagggcagacagaaggtgtaagaactttaatctcacagaatgaaaaccacaatcagaaagccaaccaaaaatgatcatatggatcattgccttgtgtaactcagtgaagctctgcgacatgctgtgcagggccacccaagatggatgggtcatggtggagagttctgacaaaacgtggtccactgaagaagggaatggtaaaccacttcagtattcttgcctcgagaacctcatgaacagtatgagaagacaaaaaaacaaaaacaaaaaacaaaaaaatgacagcagaagatgagccccccaggtgggtaggtgtctcatatactactgggaaagagtgaaaaagtagctccagacagaatgaagagactaggccaaagcagaaatgacccttagttgtggatgtgcctagtggtgaagtaaagtttgatgctgtaaagaacaatattgcatagaaacctggaatgctaggtccatgaatcaaggtaaattggatgtagtcaagcaggagatggaatagtgaacatcaacattttagaaattagtgaacagagtcttagagggctcattaaaagctatgcattttagttcaggataattagaattagctgcagttttttgtttgtttgtttgtttgtttgtttatgaaagatgacacttaaaggaaaataaaatatttttcaaaagccattcattcagattgtgctccaatcttcaaatctcactgcaaagaggcctgtatttcctcctctatttaatacagtaatctatccttacccatactccaatcctctcaaatgccctaaatccattgcattttttttctgcctcccaccaatcaaattacttatcctgtttgtggtcagctgtgagtccctggtcattaatacaggacccacagagcagagagctgttttggtgttttctgctgcattaaaaatagcttcataggagcacttagtacatgggagaaaatctacttgataattatttactcaggacatgaatttccctcttggctgaattgcttattaaacttttaaactttctcacaaattcacactagacagattaaacttaattgaatagagcataaaataagctgtttcttttttccttcctttagatttttttccagtgaaaaatcttagtattatttttaagctttgtagcagacttggtcacattctcagcagagaggtcatggaccagatattttcatccaagaagatgttttctttagatcagactcaagaggtacaatattggcaagtcagcatgtgcaatatttttctgggcctgttctcacatatatccatttctgttcacagtccacagcatgaacttcacattaatgggaggtacgttttaagttcacatagagacccctcaaatatgtactcaaacttaacctgcttaaagattctacagcagaaattcaactattttttaactcctaagatatcagagctgccatggaccagaaaatggcagacttgcatttttaaaaggacattggccttttttccatagagtctgaagtcttgaccagtagagggcagctgcaactcttcaaaactggctccatgtcctgaccatcaggagacacatacttcactcatcatttatacagaagttatgactgctttcagtatatgtaaatcttacaaattattgatttttatacatgagtaatacaagtaaacagattagtaaaaacataaaaagaaaaccactgatatcaccctgagataacataacagctattaatattgattgatgtattccaattatatattcatataaacttcattgattttccaaaaatagaatgctagagtgaacactaatatcttttaaaaacagaataaatatgcacattgatggggtgatgtcaaagagacagaggacccagttgagagagctctcagtgttcaaagctgaacacttttgggcagtaaaatgaagtagtattggagtacaatccaaggtatgaaataaacatttgagtctccatattgatatcaatattgactaagtagattaatgaatatagaaaagagacaaatctttgtagaagaatcctaaaaattgggaataatttctcacttaagtgtaggctgtgcatgactttcttttaatgagtacagtgtaagaagaaaggaaaaacctgacatactatgttagataggtatcaaggtcaaaaataaaaaaagaatgttgatagtatgtatccttgatatgtttgatgcactttacctctgtggtggtccttctagaacttaataacttagaagaaatggagatctggaaagaccaaagacaaatttcaaattgc

SEQ ID NO: 52754 - DNA, 2446 bp, Bovine  19866880708265
  misc_feature (1)..(1): n is a, c, g, or t
nttttgcctattaatagtttttggtaaaatagaaaaatagtatccacaggggaaaaaaaaggaaatagcattggatccaggagtgattccataggtgcaccatttgtgttgtcacacagctcccgtgaccagtagaactctattctactgttaccatcttgaaattcttaagaattattttcttaaacttgtgtcttttatgtgaactttgcctgggctatggagaacacagctgtttttctttttccccaattttccactgcctttaaaacattatacagcccatcctggttggaccaactacacacatacctatagtcattgatccctgggagacataacttgctctatttctttatcatcatcagaccaggcaaccagtttaaatatcagttgagcacctacaactccaaaagttttgaggtaagagatggacttccagggtgggtaccaggatggtaaactgcaaggaaaatatttttcttcatgtaaattgtgataaacctgctttacaattgtaaactttttctaaaattgtgttgctaaatacttacgtctttaaaaccaaggctgccaactaagggtcagtgggtcaaattcagcctacaattatgtttgaccagcaaacataatttgtttgaccataatagagatttacaaaatatgaatgtgagtgcttttaactggggcccagattccaggaagccaatggcttaaaccatttaattgtcttttgcaagccagttacacaaaagcggtttaccccttctggtttttgagagcactaaccgtggttttcaaactttagcataccccagtcgagaccacttaatagggctcgttcaagcagattgctaaccccgtccccagagtttctgaaacagaaggccttggttaggacctgctgcgtttttgtttagttgttaagtcatgtccgactcttttgagaccccatggtctacagccccccgggctcctctgtccatgggacttccccaggcaagaatactggagtggattgccattcctgctccagggcatcttcctgacccagggaaccaacccatgtcttctgtatccgcaggtggattctttacagctgagccatcatgggagccaggtattaatttctcacaaatttccaggggctgctgaggcctctaacccagaaaacagactgagaaccactattttaaaatagcaattccatttctgctacttgctcttaactataatgaacttcagctgactcagtcatgaatgaaaatgtaaataaagcatatatactttaattattcaagctaattgcataaaaagtatagctatgagagcatacactagctgaagcaattaaagagtttgccattttttttttctctcctaaagggaaaatgatcttgctgttgcctagtcatatcacaatctcatttccacgttctccaattttttttttaccaacataagctgctgctttctcccaaatagtcaaacagtttttaaaatcactcagttcaaaatgctgtaaagtttggtcaccctctgtaaatatcaaaagcaatgagcaagtgcaacaagatggttgggactcctgatgatccattcacattggacagactcttatccaactgtcaaggagttatacatgccctgagcccacaatgccaagattttcccagatatttaagaaagtagcagtatcctacagatagatgcagttctaagctgggagccgtgtgactctaaatgttctaatggaatgtagagttcaccctgaattcattttcctccttggtctcctctttgagacttgaatgtcatgtcattcaaacaaggttgctctgtgatcatgatcagccatcagcttcaaacctacaccttttagaggatacatgatatggcggtgtggtgactgaactggtttttctgaagctaataccttccaaaaccctctttatgtcagctttccagttgtttaataactttgcttgggtaatggaatgggagattactgaaaaaaaattagcatctcaattttactttttgtttccatttctttttttgtgtgtggtgagtcaaggggaattattaatatgcttttatttgatgcaccagtggaattttctcaaagacttgtttttaatgggttcattaattttatttattcttttaaccatcatcagccataactacagttcatttagtttctatatattggatcatccattttccataataaagggagattttgagaatatgaataagttacatccacaatcctttaattatgtacatgcctctctaatcccctagatggcaaatatcttgagctggggactatgtctcatttatctttgttccctacagcaataaacatatagttgctgtgtattatggtagatattcaatacaggtaggtttaatattaatagaaagactcttccaaccc

SEQ ID NO: 52755 - DNA, 1329 bp, Bovine  19866880805466
  misc_feature (1)..(1): n is a, c, g, or t
ngatgttaattatattggatgaagacccaacttaatgcccttattttaaattaattacatatataaagaccttatatccaaataaggtcacactctggtgtcctagaagctaggacttcaagggataaagatttaaagaacattgtcaactcacgtttgttgttgtttttgagtcgccaagtcaggtccagctcttttgtaatctcatggagtgtagctcccaggctcctctgtccatgggatgtcccaggcaagaatactggaatgggttgccattgccttcttcaggggatcttcccaccccaaggatcaaacctgtgtctcctgcttgtcaggtgggttttttttaccactgagccaccaggaaagccccattaaactcttaagaccttgcatagaggagttgaaaagggagagcaactaagctcttcaaacatacataatggttggagataattaactcttgttcatatagattcaacacctatgaagggaaataaaacagtaaaaatagaaagaatataattctgacagtggttatgacacagtggattggctctgacaaagttatgaaatggaaaaattttacatcgagacatctttctctgctgttaagaatgatttttttttttttaattctactgcccattttgacattttaaagtaagttacagtttaatttctccaggagttggatactaggctatgggaccactgatactattaatgttttgttccaaataaggataatggtcatttttatccactctttaggccgttaagtcaggatatgattgcataaaattccatgaataacttgatcactatgaaatgaaatgtgcctcactatgtttgcatttagttagttacatcagctgctgttcttttctcaacaacaataaaatactcagccttgatattcccatagagaatagaactaattcttttgacctggagctgtaactaatggtgaagttgtagaaaaatcacacccatgttaaaacagatgcattgctcttacctctaaagagacaaatgctggaagcattattaaaaatgaagtcatggtttaatatttttcagctcaagaattaagtgctaatttatttcttccctgaatttgttgaaaactgtttttattgcttgaggaactactcaggaaatcaggattctggattttgacttaagagtccaccattttgtattatggtctttagattttagcttcattgtgttttcccacaactgtctatctttctgaacaaaataagccatcaacaggagccttaaccatctaaactttaaccacataaggaaaaacagactcaa

SEQ ID NO: 52756 - DNA, 679 bp, Bovine  19866880914468
  misc_feature (1)..(1): n is a, c, g, or t
ntactggagtgggttgccattgccatatataagcaaatttagaaaattctgtaattacttgatttttcctctggttggagacttaaagagattcaattcagtgaaaaaactgtgaaaaggagaaaattgttgaattactcacatcttagctatgagtacaaatttaaagcagaacttcaaaaagcaagttgttttatttaatgtataagaattaaaacaacagaagttaaactaaatgccagtaaaatatatcacaatctaagtatctcaaaactgaccatttgtagatttcaaaatgtaaaataattataataataagtaatttcaattttattgcatatattttgtgcaaaagtaattattattaataagaaaaaatgaaacaatttatcaagtaataacttattccaactgaaatggatatcatgtatctaaagtgaattttaattcagtaatttcaattttattgcatatattttgtgcaaaagtaattactaataataagaaaaaatgatgaaacaatttatcaagtaataacttattccagctgaaatggatatcatgtgtctaaagtgaattttaattcaagctatgcatttacttaatttattttacaaaggtgaagccaatactttccttttttattattattattattattttttactttacaatattg

SEQ ID NO: 52757 - DNA, 1440 bp, Bovine  19866880951582
  misc_feature (1)..(1): n is a, c, g, or t
ntttttattgggggcataaaaatcataaatcaaaaaaagatggagagttaaattgttgatttctgaaaagagaatcctaatttctattcagattcaatattctgtctcatgtaaacttatcaagtatgcatgtccttgaaaacatgagactttaataaagtcatgttctttatagaaatctaaatagatttctttccttatctgacgcccatggagacgttttttgagagaagaaatgttttatttcagggagtaaatatttcctgcaaattttgatgatcactttaactgcactccaacacaaacaacatttattgcatgactgatgtttcacctcctttccttgatttaaattttgagttcatcatagttcctagagctcgaactaacataaagataactggtctaatcccgtaattttcaaatgaagtccagggaggaaaatggacttgccaaaggttatatatctagttagtgataaaagatgaacccaattctttttcttagttcaaatctcttacctatccatcaactcaactactttatttactaggcaatatggacacattttctgagccctgctagttttcgaaagacatgtaagaatgtttgagactggagtggggatattgttgacttaaaaacatttaagaaaaatgcaagcctgaaatccataaatatattattaaataactacacggcattaatttaggtcaaatactagttacagcaagagttacaattttgcatagtcatgtaaatttttttaaattttacctatttattgttacatagaatcaggcctacaatccaatataaagcaatcctgattctgttgtgcaggttgattaaagtgggttttttaaagcaatactatcaaaaatattcatgtgtacaaacacatagacacacacaccacatataattttccaggtttttttaactagtgatctagttaaaaaaatctaattcaagttttaaactctatataaaaattccaggtaattaaaagtcatcaagtttgggggttttatgtcctggttatctggtctgccattctagggtattgggcacataaactattttatctcaaaggttcctatggtcctaaattctcttaattctgttatgatccttctcttatgaagatcagtcttcaagaaggaaaatcttttctaaatccctgtaggggacacaggggcaggttggctattgtttttaatgtcctgagttccttcctcttcattgcctcatgcatttgctgatgtcaggcctttgactgtcaaacataaactgcaactgccacagattttccaaatgttaacatgttaggcaaatgcatcctttgtgggagcagcaactgctgtgggaagggaaatcttggaagcacattccagttgcagcctgatttaattgaggtagtaaacatcatgggaacga

SEQ ID NO: 52758 - DNA, 1028 bp, Bovine  19866880993333
  misc_feature (1)..(1): n is a, c, g, or t
ncttgtaggtaactgtttgctggacctacccacgaaaaccagattcccgggcccgaggagctcccaggccagacctacgatgccagccagcagtgcaacctgatccttcggggccagagtactcggtgtgtcccggcatggacgtgtgtgcccgcctctggtgtgccgtggtgcgccagggccagatggtgtgtctgaccaagaagctgccggccgtggaaggaacaccatgtgggaaagggaggatctgcctgcagggcaagtgtgtggacaaaaccaagaaaaaatattattcggtaagtgcttttcttgtcacgcaaggcctggagcctcaagggctgaagtacattcctgtgacatgtggaggggactgtccccagaaggctctgtttcctagttaaaatatttttccttgagggatctatttaccgcttcctcttttacctggaggagtcatcctcagctgttaattactggagaaaatgccagtctcgggttataccagtaataaataagtagagagcccagattctgtctcattgagaccacaagtagggcccccaagtcaccacttgggagtttgctttcaaactgctcttcaagttatcagaatacatttgtttaaattcaggaagggaatcacagtagagctgacagatgatcctcaggaatacttggtcagctccaaaatgttcctggtccccctcatggtgtgcctgctacatgcatagttgctcagtcctgtccgactctttgcaaacccacggactacaacccgctaggctcctctgtctgtgggattctccaggcaagaatactggagtgggttgccatctccattcctcaggcgatcttcccaacccagggatcaaacctgggcctcccaccttgcagacggatcctttaaccatctgaggcaacggcaagtcatccaacttcagtaactaaagtagccacatctgctgtaggaaggcacccgacctccctgccctgtataaccagtccagcttcacgtcagctcccaccac

SEQ ID NO: 52759 - DNA, 1634 bp, Bovine  19866881012893
  misc_feature (1)..(1): n is a, c, g, or t
nacagtggagttttcctgataatttgcccattaggttataaaatatttcttaacagttattttctactttgcagaggagtctaagaacgtgcagttgttccattttcttgctagacttcaacttgttcctttcttacaactctgtcatcttccacgtcacacttactaccaaccagaattttggaacaccatcagtgtctttaacttaaagaatctgttctctctgatcttgtgtatcattaaatgtgaactgtgctgtgtaggaataaaataaagcaaagccttgtccatgtttcatgtacaaatctatcatcactgtaaatggcctatttctatattatccaagatttcaagcgtatactgttttgcatctactttaacttgctttctataataatcttctatggtaggattatattttcaacaaaaattccttgaataaagtgtacagtgagagtcaattttccaatgtcccctgaaccaagaactgctagcttatactcacacatagtgcaaacttgtaagagccagtacctgtcacaccatccccggggccctgcacccaagagccttgagctccctctgtgtcgatgcttctgtcaccaagtctgtcctgttgctgcagctgccagggctggtttgtttagaagcctgactctgggcaagttttgccctctcttctcaatttcaggatcagcttgtccagctcagtaaagatttctacttagatgttgattaagattaaaatgaaattatatggttatttggaaggggaagttgacatttttaatgtttagtcatttaagaatatatttctctattccaatcacttatgctctttaaaacaattttatagcttatttcatctagtccttatacatttcattaaaatgaattcttaggcattttataatatgtatgttgatattattgtacataggacttttttcatcacgacctacgacgtgtggaatcttaactccccaaccagggatcaaacccgggccttcgacagtgaaaggtataaatttgttagttttaaagaaagtatacttcctgttcatattatattgggaaataggagtgagcaatatggttttttgattttgtttttagtattacttagtttttatttcagtaaatatgtgggaatccatcaaatatttgtttgaagaaagaaacttttgatatgcaacccctttccctcaacatattagattttttaaaatattttaattttattagagtatagttgatttacaatactgtattagtttcaggtgtacagcaaaatgattcatttatacatatattcattctttttcagagtcttttctcatataggttatcacagaatataggatagggttccctgggctgcacagcaggtctccatcagtcatctgtcttatatatagcagtgtgtgtgtgtgtgtgtgtgtgtgtgtgtgtgtgctcatcccacatgcaataagtcttatagaagaattattttctataaaaccacttagctaattaactgacaacactttcctaatttacacttgatatgctgagtaggttaattcttataaaagatcagtagagtcatgggcaataactaattatcagaaatgtataagttacatagtcca

SEQ ID NO: 52760 - DNA, 1271 bp, Bovine  19866881080876
  misc_feature (1)..(1): n is a, c, g, or t
ncattggcaggaggattctttaccactgagtcagtgactcagtagttagttgctcagcctatagctctctagactcctctgtccatgggattctccaggcaagaatattggagtggattgccattcccttctccagcagaccttcctggcccagggatcgaatcccggtctcctgcatcgcaggcagattctttaccgtctgagctaaagggaaatcactaggaaggcccttaaactaacgggcgatgacaaaggcacagtcattactgtgccaaagtaattcaaagtaattcatgagatctgcttgtgaaagtgtgagaagcattagtatactgtttagcagatgttatgccagggaaatttcgattaaaaattctctgtatttgaggatgaagattagcttttttaaacaggttactgtggacttaaaattcatgtcttacttgcaaactctgttaaagaacatatttactgtgaaaaatcaagaggctaccatagtggactttgaatttcgtaagaccttaaaaaccaaatgttaagatcgtattacgacctctactgtctatacttccaaaggattaagagaatggcttttaataccagttttcctccaaagttgtgtgttcagtaagtggctgcaaattagttctttaaatatgaatttttaaaagatgtctatagcttttccttagcagcctgtgtcttgggtgtgcttgagttgtatctgctttggcagtggccctttctcatcacctggcactggggactcagggatccagaggacacggctattatttttggcttcaagattattaagcatttgagaaaggaaatttaataacttgcttttgctaagcaatttctctgccagtgcttacctttatttttgaggatcatactcctaagccaatttgcctagagctaggctgtataaacactacagaaagttacaagtatcttggccaggctggggttgtgggtctcccataagacatgacttcttcctttctgaatcacaaatttgcaggcccagttactttacagtgtgcaaactgaattgtcagtcataacctaattgctgtgcatttcttgttggaactaaatcagaaagcactcaatattaataaatttaaatttggcagtggtagagtgctacacatgtctagttacttatggctaataattttaaaaacaagtgatacaaattaaattgtactctaagaactcatttctccagcattgctggaggtgggaaggagacaggtaagcaa

SEQ ID NO: 52761 - DNA, 1812 bp, Bovine  19866881088357
  misc_feature (1)..(1): n is a, c, g, or t
ncaaagttcctatttaacttctaagaccgtaacttttgaggaggtaaagcttcttaaggtaggccagaaaaagcattaaaatgtactatccagccaaatagaactttgggaggaaaacatcaagttaaaagaaaaacatcaacagcaagtcaataggaaggaatggtagtaaaacctcactaagctttgtttagaagataaagtgagatgaggccctttggactccaggaagagcattatcttccttgctgcataaaaaagagccttgtgtaaagcagagaatgcttagtgggttgatgatggtagaagactgtcaacagatttctgaagcatcaagaatgctttccagatcttcaaaagtactgtttgacgaatctttttttttccactgaaaatcacagactgtaacactgtaactaaacatcagctggaaagtatttaatatgcgtgggtgcctgtggcatgggtcgacattgcttttcctcaagtcaaaacaactcatcacctccccacggatatgtcactgacaccctttcaacctccccggcagatgacttgtgaaaagaaatggacaaggtaattggaaattgacttacaacaaaggaggcttcaggaggtgggccctctttatttaagctcatgtatgtctcgtgctcagtcgtgtctgactgcttgccaccctttgagctgtagcttgccaggctcctctgtctgtgggatttttcaggcaagaatactggagtgggttgccaattccttctccaggggatcttgctgacccagggatcgaacccgtgtctcctgtgtctcctgcactgcaggtggattctttacccactgaaccataacatatttgcttgactattaaaaagaaaaaacatatttagttctgtggttttccgttagaggtcagttggagacgagctgttcttgcttaaaaaaaaaaaaaaaaaagctttattcagatttgcctttacttatgactttaatgttctcaacatcaggatttgttgctgcattagttgctgataacactgaaatctacagtcaatcgatttcatctatatgttgacgtgtcgtttggcgataaaatagatatagacagcactaccaaatggcagactggtgccagggaacaagaataaaaaaatcaaaatacagtttgatcctgagtctcacgatatgaaatatttaagatctgagtaacagtggattggatatacatctttcatctaaaaaatgtgtacaatttggggaggggttagcaaggaaattgatcactcttttaataccatttatattgacctctaaaagtgttcagtctattgctgacttttcttaatctctattacttttattctcaaccatctctttacatattttaaaatttatcttagcctgaaatcctatctggacttcactgccaacattttgtctatttattttgctccataaaattgccaagttctttttcccttttctttccccatctcttttccttccttctttccttttgtcttaacattctgtgtaaagacaatgaaaatgtgtgcataccgcaaatttgttttcactatccatgttaaattaaatgctttcagtaaggtgaaaagtttaaaaagtaagactcagtgatttgtgatgaacaaataaaaggaataatgtggtcatatcccatggccataaagtacacttttgggtgatggaaagtatgccaagtctccaagaaatggagcagaaaaatttttcttttttgtatctgactggtgccactgtctatctttcatattaatgattaatgaaaattatcag

SEQ ID NO: 52762 - DNA, 720 bp, Bovine  19866881176481
  misc_feature (1)..(1): n is a, c, g, or t
ncacgactgagtgtgcacacacactcacacacatacatcaatcaggtgcatctgtattcctgatgtatgtgctgtgttgtctgtaactggagaggaatatacaagccaagtcaacaagaagcatttcttaaaacaaatcgcatgccatggtaatgtaaaaaaaactaaacgtgatttttgatatgataaaaaatgtatggctggagaatttattctgtattaaaatattcattcctaatcttgttgctagtgatattataattattcatctaatggtgttggaccatctaggtcaaaaagcctgcaagtccaattatattctgcatttcagtatatttcaaagctgccggcaccttagaaaagatcccatctaatgttttgctttataaatgagggatctgggactctgaaactttagatttacgcagttttccatgactggggaatgccaaagtaaaggctatagtttaggtcataaaaataggatgcacaggctatttgttaaaaaaaaaaaaaaaagagagagagagagagaaagaaggaagggaaaaaattcagaaccaaaaaaagaaagaaaattattttttaaaaaatagcttacgtactatatgctatgtattcttcccacatcaacttataagactcttataatgctagatttagcttctaggttttttatgtatttacagcaaataaacacgtatttgctgtcacacaaaa

SEQ ID NO: 52763 - DNA, 2080 bp, Bovine  19866881213420
  misc_feature (1)..(1): n is a, c, g, or t
ngagtatgtgtaaatatatgcactttattataaaattaatttatagcaaaagaagtttaaatgatttaataagtttggagaccagtacagatgtcttcttagacatagaaatcttgctggatttcttgaaatatttctaaatgatttttgactaaaaattttagaaatttcctgaaaaaataattcataaactagaataaagcacatagaatgagttttcatatatttgtttctttatattttgtcccttttttctttatattttaatgaacctatatggtcaaaaatcagaattcaaaatactttgataagaatcaagattcatgttttgttaactacaatagtaaaattttcatcataacctatgaatgaataaatagtattgaagtttaaaaaagtggaaaatgtggaagcagttacagattttattttcttggactccaaaatcactgcagatggtgactgcagtcatgaaattaaaagacacttgctccttggaaggacagctatgacaaatcctgacaatgcattaaaaagaagagccatcactttgccaacaaaagtctgtatagtcaaagctatggtttctccagggacttccctggtggctcagacattaaggagtctgcctgtaatgcgggagatcccggttcaatctctggctcaggaagatcccctggagaaggaaacagcaatccactccattgttcttgcctggaaaatacaaatgatggaggagcctggcaggctacagtccatggggtcgcaaagagttgggcatgactgagtgactttgcttcacttcttcatggtttctccagtagtcatgtactgatgttggagttggaagataagaaggctgaatgctgaagaatgctgacgaattaatgcttttgaatcacaatgctgggagaagactcttgagcatcctttggatagcaaggagatagaaccagtccattctaaaagagatcaaccctgaatattctttggaaggactgatgctgaagcagaggctccagtactttggccacctgatatgaagagtcaacttattggaaaaaacccttgatgctgggaaagattgaaggcaaaaggagaagaggggtagcaggggatgagatggttagatagcatcaccaactcagtggacattaatttgagcaaattccaggatatagtgaaggatagtggagcttggcatgctgcaatccaaggggttgcaaagagttgcaaagagttggacttagtgcatgaacaacaacaacaatcaaagttaaaatgtaaacttggaaattattattaggatttggataacatttcctgcattgctgacataataagcatatttgtgtgagaaaattcagaactcatcagctccatcaaagataaagtcatatttagtttctccacacgtcaacaaaataaagatatagcttcctaatgattccaatctattatttgttatcactagattcatgctttaaaaatgagaaatgttgacttcaggattccaatttcccaaaaaagctgcagtaaggaggctgcttctttagtttattgttacttgaggccactggagcttgctataacccgcttatgagcactgaggttggtacacaggcatgcatgctcagctgtggccgactgtgaccccatgggcagtagcccaccaggctcctctgtccgtgaagttttccagggaagaatcctggagtgggtttctatttccttctccaggggatctatctgacccagggattgtacctgtgtctcttgcatttcctgcattgatggtgagttccttatcactgtgccacctgggaagctatacagagctagagctatggattctttaataggcatacaaattttgtcatctgcctaaatgcttcttgcatagagagaagacaggatgtgttttccataaaatatgttcagttcacacctaccctttactattatacatttgattaaagacttaatattattttatatataaaacatacttggcatcactgattggaagaatttttccattcttgagaacctttgaatctgcatggggtcaaataattct

SEQ ID NO: 52764 - DNA, 1016 bp, Bovine  19866881258592
  misc_feature (1)..(1): n is a, c, g, or t
ntttttgtgtctaaatatttatttctagtccctgtgatgtgtacatatgatttttgcataagcattcattgtcacaatgctgtatgataagaaaaataaatttaaagttgctatgcctcagtttcattttcaattatacaagatgatagtacctattttaattatcttagggttcattatgaggataaaacaaattacaaaaaagcatgtaaagaaaacaaagaccaatgcattaacaaaattttatgcatgactcgcaaaactgtatctaatgagtttggggactgaatgtgatcatgtttttaccaccagaactctgattgtcatgggtaatgtaatccaaatattttagttctcagagagagtcaggaataaataggacaaatgctgcatgttaattctggccatggagtctaaagcataacagagatttgaatgaggaaatctggtttggtgtcaagtccaataaaatgaagagatgtttgttgatgggatgtgttccctgctgagagagtagtttgactttagacaaaataatattcagctttagtaactctttggatttgttactgctcctggattcactctaatttgaaccttgtaggggtcatttgtgtctctgtcatctctaatgctctgcacttcagtgaatcatacggtcatgccgccaggatgaccacccagaagtcctgtttatgtaggacttggcttttgcagagaagttcatcttaagtcctgaacagttgagttgggagttcccacaatggtctcctgtttgtttctgggcatgggtggaaaatggtcatctacaaggactgataaccacctggaagttcatctgttggaattctgctcttctcactgcatacactggactgtgctgtcctgggcatacattttcgagagtactgtcttggtgggaaacgatatacgtcaggcaagcccccctgcttttgaataaagaagttgaaatgtaaagattccatttgataaaaaaatccatcagccaattacac

SEQ ID NO: 52765 - DNA, 1463 bp, Bovine  19866881279663
  misc_feature (1)..(1): n is a, c, g, or t
natcaagaaaaagggagtgggtcttaaatttgacatcaaagggatttgatatgtcctggaaaggaagccaaaaccactgatgtgacactgagatgataaagtgtgggaaaaggaaatgctttccttagagacctacaaatgagttttaagtgggtcattaaattgggattggcctttcacaaatcagtttttattagtgcccactctatctgatcctgtccttggcatccccatccctaaatttcaaaacatacatttgacatgcttagaatcttcccaataaatgcagatttccatgaaaagtaactcaggagaattaaagagaaagctcagtcacatcttcacaaaaccagttgcttgattgttaaacccacccaggttattcttagatcctgggaagaaggagtgttgcttattttcatggatacagtacattgtactttgtgtccatcacatacctctccttgattaagaacggttacattcatttggaaaatgtgagcttgaaattgaccgcacagtccctttggcttcctaatttctctcagcttgtatatagtatggtagtccaatttcctttcatctaggtcaatttatcttcctataacaccaaaataaatggttttctactaaagtctcaaaagtgctaatgtgttcattttctgctttgcagctgtaattaatttaagccagagagaactgttatagtgtttatattagaaatgatgtttctcatgtgctgtctccattttttaaagaaaggagattaaatcaattttatctcatctgaaaatgttcttgttctaaacctctgaagctcatgatgaatcactactcaaattatactttataaattaaatcaattcaatccaaattttgctcccctatatactttatccaatttggtattaagttgaattttgctatttttcctatttaagctcataaagttaggatataatttatgaacttttaaatttatattaattaatacaatgtgttacttaattctatgtggatgtccataatctatttctaaacacatttcttaatattgttggaaatactgagtcccacattgtttttcctgctgaaaacattgtcttctgggagattttaattgctttgagaaatcttttagatatttaaaatgttgcaaactcaaagtaatctctgctctgattggaaatagtcttggtcactcaaaataactcatatgtaaaaaaagtatccggagaaggcaatggcaacccactccagtactcttgcctggaaaatcccatggatggaggagtctggtgggctgcagtccatggggtcaccaagagtcggatatgactaagagtcttcactttcactttcatgcattggataaggaaatggcaacccactctagcgttcttgcctggagaatcccagggatggaggagcctggtgggctaccatctatggggtcgcacaga

SEQ ID NO: 52766 - DNA, 1566 bp, Bovine  19866881321612
  misc_feature (1)..(1): n is a, c, g, or t
nccttggcgttagcagtcaaattggcgaaggatattatcaacaaatttctctgctgacagtagatgtactcaatttgagccaaattttggcagtcggttactgctgcacacaaccctggggtcagtccctgccctcgtgttcttacgcaggattgctgtggaactcagctttgatgcaactgtagctgagcatgaaatctgtggaggctttggcatggaaatcactgacagcagaacttggctcaggatttgtttaatcagagcacctctcattggaccacaggaaagagggagggagaaaataaagaatggagccgtctgcctattttggggttgcctggcaggacaaaaagcttggagtcctatgaacaaaacagtgtattaaaggagatgttaggacttgacattaaaacacagaaaatctatatgacaaatttaattcctgaccataacagcaaaaagtatgtagggcaacaaatcagtaattttattcatttcttgtgtatttctaaagctttgacaaacctagagtgtgtatttaaaagctgagatatcactttgccgacaaaggtccatatattcaaagctttggttttttccagtagtcatgtatggatgtgaaagttggaccatcaagaaggctgagcaccctaagaattgatgcttctgaatggtggtgctggagaagactcttgagagtcccttggactgcaaagagatgaaacaagtcaatcctaaaggaaatcaaccctgaatattcattggaaggactgatgctgaagttgaagatccaatactttggccccctgatatgaggagctgactcattggaaaagaccctgaagctgggaaagattgaaagcaaaaggagaaagggttggtagaggatgagatggttagacagcatcactgactcaattcagttcagttcagtctctcagttgtgtctgactctttgagaccccatgaaccgcagcacaccagacctccctgtccatcaccagctcccggagtttacccaaactcatgttcattgagtcggtgatgtcattcaaccatctcatcctctgttgtccccttctcctcctgccttcaatctttcccaacatcaggatctttcaaatgagtcggggggtgacatcaggtagccaaaataccggagttttagcttcagcatcaatccttccaatgaacacccaggatggatttcctttaggatggactggttggatctccttgcacttactcaatggacatgaattttagcaaacttcagaagatagtgaagaacagggaaacctggcatgctgcagtccatggatggaaaacgtcagacatgatttagcaattgaacagtatgtatttctagaatataatttatccctaggttcccttctcaacactaatgtcaacaaatgactgatttatttcatccagtggaaagtctctcatatcctttacttttgcactcaaactgtccttagctttacatttgatttgttttccttcttattgcagatgtaaagatgcttttctcttaaatgcgaactgttctttcccaaatct

SEQ ID NO: 52767 - DNA, 1280 bp, Bovine  19866881343597
  misc_feature (1)..(1): n is a, c, g, or t
naaatgaaagagtgacgcaagctaacatttgcatgaaaccaggaagttgctaagttcacttctttcttttctcttctagtcatctcttatatggctacctatttacgtggccaagaaaatggaagtccctgaccttcaaataccagtattaagtgtttgtaacttgcagaacatagagttaaatatagattttccagcagtggctggtggggagtaggggggtggggaatgctttctgatctcatggggcttatagttgagcacagaagatggaaaattaacaagtattcaaaataatatgttgtgaggactatgacataatcccacagttgccttgcaaattctagattctaaataaggtctgtttctacatattcttgagcatgtgtgatccagatggattatgggaacatctcgtctcgtgtaatttttcagttttccccagaatgttcaccaaaagtgaccgctctgatgacatccagctttaatttccctagggggcgtccagtctctgtgtgaaaaagcagttaaaatgaactcatgtacaactgggaagagaagagtcaagtgctagtttaattgccacagaaaagtagatgtgcaaaaatcgctcattatttgcacttcatctatcctgtctttcaggacatctgcttggcctctcccatgacgattccaagttctgtgaagaaaatttcggctccacggaagataagcgcttaatgtcttccatcctcaccagcattgacgcatccaaaccctggtccaaatgcacctcagccaccatcacagaatttctggatgatggtcacggtaggtacagctccacaggctcagagacaacacctcattgcatcctcctggtgttcaccttgtcctctaagacaatggttgctgagacagtgtcagaaaaagaaacaagggggtctgtctactggtatggaatgccaacatccttggtggcattatagctatggtattttttgcttttgaattgccaagttcaaagagaagcagtgtgggagaccacacagaaggcctcgctagtgccctgaaagcctggcttttattccctctttcaccacaccagcctcctgtgagaatgttggcatatatctcatttccctgttattaataggactctcagaattatttgttacatgcttattataaagatatggttagaatataagtaacaattctgtcagattctctttatggcagcataaaaccaagaaaggaagctccatagatctacattcactacaagactggcttca

SEQ ID NO: 52768 - DNA, 1036 bp, Bovine  19866881353528
  misc_feature (1)..(1): n is a, c, g, or t
naaatagctatgactacaaacatctaaatcatttaaattcgatttgtttactctcatttataaattcctaaagatgctgagaggaaatgatactaatgttaagaagggtttctaaagcagcagaagacattattttgctttattatcattgatatcatttggaggttgtgatatatcaacaactccttgccaagtttgtcagtgaaagtgtatggacctgattctgaattgtcttagcttctactggaagcttccaggctacctatatactctagttttaaacttagaccttagttccttgaataaatgtgtttcttagctgaggtttgggaagattaggaacccaaagacctgttaacataactacaagtgatgaacactactagccacggaagattaaatttaaaatgtccttagaaaggaaagggacagtatcagaataagaatacatgaggaatatacacatatacacctgtttcacacagaaagctttcagtaaaaaaaaaaaaatacaaaagcaaccagtgccatatattatgtaaacttacaaagtgtactttatacacaaacatgaagcataaattaaaaagtaggtcaacagcaaaacatcttaaatatagaagaatttgcacatatttttgttaaataagaataaataattttatcacacaaattcacataccagttgcaaaaacaataaattacttttttttatcagtgctgcattttttttttgtctgtgattaatcccttcattcttaatgtgctaaaactgtttccacaggaaggcagaggaaattgaattggttgaataaattaaaacaatgtccttaagcctctaaacaacaaggtagggcttcatttgacattttctgttccagaagaaataaatgttgtattgttcagggatcccttttatctactgaaacaatctggagtgtttagttttgtgagtgtgattagattcttactaacctgagcattttcaaacaaactcttttaaactcttctctttttaggaagggcttccagcatc

SEQ ID NO: 52769 - DNA, 1363 bp, Bovine  19866881373086
  misc_feature (1)..(1): n is a, c, g, or t
ncttccctgtcctcccactttagcatctctaatgaacttgctctttttctcttgagatatttaacaacttattaaaagtatttagtatttatttagtatctgaagtagggaacaatatgaatttttatttttgctcaaaaattgagactttgctcacaaaaaaatactttgtaaacagtaaatgggaaatgtaccactgatttttattgttttcctgtagtcttgattctctttttgattatctttgtgaaagtttaggttcctcttttgttctgtcatttgctaatggtcaattacccatcagagactgccaaacttttctttcatacattgtatgttggagaaaatgacttgaatcattgatgttcctgattttacagctattagttaataattgtaatagctgttattcacatgagctgagaattataaaatagttggatgtatttaacctccatgtctaaaatgtcttccaatcattgcctttgtgcttaattaaattcagttgtatttcagttttttagccaactatattgaagttcagattgaaatctgtttctatttttatttgatgccgagagagcaagctatcagcatatggcaaatttaaaggcaaatatgtctaccaatacacatacgtggttttgcaagatgtaccaaacagtgcacattcctccagaggagaggaaagagagttcacaaaagtgacttttattgcaagaggaatacaagtgagttgaaatcctttcatgataacaaaagcctcacaaagaaggactggacttggtccatgttttaggaatttgcacatataaagagttagttatcttctcctctggctctttaacgtgtagtgcaaaaatatttgctgtcaggaaaaaaaaaaatgttggaatgcatagatttcactgacagaaagagctcaagaaacccctctcctctttgtctttatatttctgacttttattcagtattttcaatataacaaagtcattggtttttattccctagtccaccctgcccctcaccatattgtttgaatccagcaagtattttgttcctttgggatgcaattcactcttaagacatgctgtgagagttcttcttgcctaaattcataacactaagcagtttgcttttacatagctgataggctactctttcctattttcccccctgaaaatgtcatgaagttttaggcaaaaaagcatatgaggtaataggacacatatgccaataagatattaatttctaaaaaatgcatcccaaacatttgagagtgttacaggaacactttctcagttaactccccaaagggtgtaacaaaaactaaatgtgtctgtaaaaagtcgtttacaaagca

SEQ ID NO: 52770 - DNA, 784 bp, Bovine  19866881377817
  misc_feature (1)..(1): n is a, c, g, or t
nttttctctgttaataagcatgtggtctctaatgtgagtgtcccttgaaaataacttatgcttttatctgtatcttgccattctaaggctcaaagatacgggatgatttcaggctgacgtaaggtgtcctagcttaatgatgagaggaatcacatttgagaatgccgtttctttggctgtccgcagcctttagtatgcccgtcacgtctctcctgaagagtgtccggacatcccgcacattgttcttccatttcaatccctctccagcttctgaagggaagtcacatgggtctctcactgtgccctggatccagctcctgtggcactggctgcctgttcctctggtgctgaaacggtcttcacattgcccatgattctccttgtcctggggagagcattcctctcccagccagctgacaggctttcttcatggagaacagagcattcatcctcactccaaggagtctgtctctctcagttgacccgcaagcagtcctttctgactgactctgggagatcttataaaattcatttttcctttcagctcttgccaaagtggacctccaatttgttcatgcccagagtggctgtcttttctaataaccatatacctatattttcagcaacaagttatcacatggataaattagaaattcagaggccaaagagtctgccaaaagattcatttaaaaagaccagagcatctttatcttaaaataaattgctttgctttcataattgatatttaacacacaggcatcgccattatgtataaaagaaaaaa

SEQ ID NO: 52771 - DNA, 1311 bp, Bovine  19866881394268
  misc_feature (1)..(1): n is a, c, g, or t
nccaaaacatcataggttcagaacccttgaacaaagcaaacaaatgagcaaaaacaaaacacactataaaggcttgctggtaagaggtataccagtgttgaatgtgttgaagactttgctgtgtgttctgtatggctacgacacattgtgagatatcagacagaagccagagagagagaaagcagttgtgaaaatataacttgaaaatatggtgaagcaggtatttttttgtttgtttttacttttaaattctaacaggaggaaattaattttcagacctttgaatactgatacacacacaaacacttcttctacctcctcatgatacattaatttgtctggctgcctgaaaaaatacaggcagttagtgatttaaataaatggacccctgcatatatttaaatgactaggtacattgagacccttttttcttttcagaatttctcagaagatgcttgctgtcaaaatgttttttgacaaaaattatatctcccgtagtctgaacatataactaactctttttaaagcagcagcaagttcttaatttccagtaaaacatccacagctctttctggaaactggaaagagtggaaatagctgcagacctactttggtcaaatacttttttttaatagaaatatatatatatatattttgatagaaccaagtgatataaagtgacataccaaggaagaatgtatttacaaacaataaaaataagctgctgtgtaaataatatgcatgaaaatgattatgatgcctttgaagacattctataagaggtaggtgaagagggagagcctgctcggccatcttcgaatgtcccctgattctacattcatccgtgtttctgcaatctcctcggcccaggggatgttcaataactcgcaagtgttgccacgtttcaaggtcaccactgtcccacgaagcagtgcacaccttcattttggtcgctgagggcagattctgcccataatcggactcctcgttgacgatgacacggcagggtgtgactttctgcgctttaggtggaccctgtgttcaccacgcctgcatccgcgagccatcctttcagccgtccctggagacggtcataaccacagggctaacacttcttctgaaaacactgcttaaacgcggaaggcctctgggagaggagacatcccttcgccagcttccgattcccgtcctggcactgcaccgtcctggtgtgccagcccgtgtcacaggttcgcgaacaggcaagccaggggcccgtcacccactgcagctgcgggggtgggcgagcccactttattgctgccctggctg

SEQ ID NO: 52772 - DNA, 3017 bp, Bovine  19866881519162
  misc_feature (1)..(1): n is a, c, g, or t
ntacacagaactccaaatgcattttcattttctttttgaaaccagaactgtcctttatttaatcattcagtgaacatatatgtatatcttctaggtacaagttacatagtgtaaaacaaactctgtacccagctctgatagacttaatggtcaaattagagaatttgaaatagtcaaaagagaatagaaaagcttagaatcaagaaattttagatagtaaaagaaatgcactatgctttttctaggtacagaacactaaggaagaggtcaagaacttgcttacttttcttttcatgactttcccaaagcctaatttttatatttagttatcagtctaggggacaatcaacattccaaaaggattagttcctagcaagaggaaacagactccacaatagtgtatttcgagggatcactgagcatctgtgggtcaccagtcacaggatttttttcctgtccttaaggcttgaagcaaatactgctcagtaatatgaacagaaaagattcactctagaaataatttccttttatgctttgttcttcgccacatgcaatttaagcaaaccattctttaagtcacactgggatgaaatccaaatgaaccacagcatggatgagactcatgcaaatgaagagaaagaggaggaacccattaagtaccaaaacaataacaaggatacagagaagctaggcaagactggattctctggtttcagggtgaccatgacccagatgaacaagatccaattattaaacaagagtaggtagcttaatatcactgcctgttgtgtattattaggaaacatctgtatgaagcagcaggcttccccagtggctcagcagtaaagaatccccctacaatacaggagatgttcaggaggcacaggttctgtctctgggtggggaagatcccctagaggagggcatggcaattcactccattattcttacctggagaatcccatgaagaggcttgggggctacagtccatggggtcacaaagagtcaggcatgactgaatcaactgaacacacacacatatgaaagatgtgctgcctttgaattttctgttgttgtttacaattttaaaaaaaagctattatctttaagaaagtaactgcaaaagaaacaaatttcattctttaagatttaggagggcccaaatatctcacatcagtgatattggtagtaccaatgcaaaggtatcttcctattttttaagaaggtctgatgcaatgaatggtagtccaagacacaaagctgagagtctacagcaactgaggctgagagcaattaagatacattaatcatcagtctgaaagggagagaaagtgcctaacattggggaagataatataaccatagcttaacttgactaggtattgtcatgttgctctgcagaatgggtacagcagtcttcacttccactagaaatacatgaaagttcccttaattccatgtgggtgaggacagatggatacttctgacccaccagacatgagtagaagcgctataccatttacttgcctttgcaaagcccattccttcatcccaactccatctcatccccaatctctacccagagagctcttttcccgtgtgcctggtgatcagcaatagttaatgggttgtgctctgacagcctgggtttctgagtctagtggacagagggataccttcgacattgtaaacccttgtgcatcctgagcaataaataaacttttgtgtttttagccaccaggactttggtgtgattcatcttcatagcttttactagtttacccagacagattccaaaaccatcccaatatttgacattagctggatctgtaaagtttcccagttttagatatataaatgtatattccaatattatcctaatgtgcttttctctgatatcaaatattctaatactctgtgtctctcatacaactgtaagattttgtgtttcctctacaactttcctgttcatggatactgccattttatatttcatgagttattcaagttttttgttaaccccttttcagtttcagccattgcaaatattttcttccactctggaagttaatcctcaacttcatctgtgattttgccattgatgttttacttaagaaagaaagtgaactgaaagtcactcggtcctgtccaactctttgcaaccccatggactatagagtccatggaattatccaggccagaatactggagttgggtagcctttcccttctccaagggatcttcccaacccagggatcgaacccaggtctcctgcactacaggcagattccttaccagctgagccacaagggaagcccaagaatactggagtgggtagcctatcccttctccagtggatcttcctgacccaggaatcaaactggagtctcctgcatttcaggcagattctttaccaaatgatctttcatcctttccaattggtaagcttctaataacattatagtttctttcttctcatatgtagttctttattagtcaaaaatttcattttcttccatgggggatgtaatgttctccgcaccatgtgttaaacaatctgccctttacaaatgatctgtagagccagatagtagttgttgttgtttagtcactgagctgtgtccaactcttttgtgaccccattgactatagcccgccacctcctctgtctatggcattctccaggcaagaatactggctgctgctgctgctaagtctcttcagtcatgtccgactctgtgcgaccccatagacggcagcccaccaggctcccctgtccctgggattctccaggcaagaacactggagtgggttgccatttccttctccaatgcatgtaagtgaaaagtgaaagtactggagtgggttgtcatttcttactccagggggtcttccagagacagggactgaatcctagtttcctacatttcctgcactgcaggtggattttttacaattgagccaccatggattctttaccactgagtcagattacttgtatactaacttctcatata

SEQ ID NO: 52773 - DNA, 2171 bp, Bovine  19866881547613
  misc_feature (1)..(1): n is a, c, g, or t
ntactggagtggggtgccattgccttctcccatggatagtgctgttgctgctgctgctgctaagtcacgtcagtcgtgtccgactctgtgccaccccagagacggcagacagcccgccaggctcccctgtccctgggattttccaggcaagagtactggagtggggtgccattgccttctccttcttctctatacaatgtatagagccagctcattcacaaacttgcaaagataaagtgaaaaaatgacagctaatcgtgtccaaccctaatttctgtcattagtgttgttgaccggttgaccaggctggctgctttatagtaaatacactgtcctttcatttcttttcctccacagtagctgctcccatgatttccactgcttgaatccactgccaggagatgacctgctccctgcaaaaagtcagggctggctgatacaaactcccacacctcagcctgtccctacatttctgcccatgctctctcctccacatctcagaggtactttcacttgcccatgctgacccctcttcctggtctccctcatccagataattcttccttctgcctttgaacatctgcaggtcacctatcccattgctaaaagcacctttctttgatcctgctgcctcctcagactaaacttcttatgtctttgccttccatcagacttcctggaagggaaccttgtctctacattcccaacaccccttttcttgtttagccctttaaagtgggctgggatcctcacctgttataccagtggttctcagccttggctgcataaagcaatcggctggggcacagcatgctcttgaagtggagtgggagaaacttgataacccgacacaatttaagaaaaagagaaagaggggtagggatgccttcctaaaaattttaaaacttctaggtaaattgttgttgttcagttgctcagtcatgtctgattctttgcaaccccatgaactgcatgcatgccaggcttccttgtccttcaccatctcccagagtttgcttaaattcatgtccattgagttggtgatgccatccaaccatctcatcatctgtcatccccttctcctcctgtcttcaatctttcccagcatcagagtcctttccaatgagtcggctcttcgcattaggtggcccaattattggagcttcagcttcagcatcagtgcttccaatgaatattcaggactgatttcctttaggatggactggttggatctccttgcagtccagggaactcttaagagtcttctccagtaccataattcaaaagcatcaattcttccagtgctcagccttcttcatggtccaaatcccacttctgtacatgactactggaaaaaccactgctatgactatacggacctttgtccacttacatatgtatatgtgttgtgcctgcaagctaagttgtttgagttgatgcagtggattatagcctgtccatgggattctccaagcaagagtgttggagtgagttacctcaccctcctccaggggatcttttcaatccagggatcaaatccacctctcctacactggcaagctggttgtactagtacaagtaccactagttactccctgggaggctcacatatatgcatatattactctaatattaggaaagctctgataattgctgcaactgagctataaacaaaagctgagaaaggaaaaagaagggaacaatcaattctgcctctggatctttatacaggctttattgtaaatggagaattgaattggtcctcaaaggatggatagattttatttggattcaaccagcttttgttgagcatttcataagatgctattcatagtcataaatcatttaagagttaattctttcaacaatgtgcatgcatctgatcctattatcatttgacagataaggacatgcatacaaagagaaacagagataaacttctcccagtaacagctgacaaatggctgagagggaagctgtcctattaagtggtctctaagataaaaatattacaatgaatttatgaaaacattcaatatatttctaataggcaaagagggattcagaggtttgaaaagtggcccttttcctaagaatcctaatgtaggaaacagaaaagaagtagagattgttctacagtgtgagagttttaagatatgggtcattaagtg

SEQ ID NO: 52774 - DNA, 1242 bp, Bovine  19866881650644
  misc_feature (1)..(1): n is a, c, g, or t
nattgatacctgtgaccatggatggatatattgcctcccctctgttacatgctttgatatattcagcagcaagaaatgctctactcttaatgtgtgttccacaaacccatatgggaagactagtagcttctagtcagtcgtttaaagctgtggagtgaaatatgacttggcatcaagcttcttgccatttgtgttcattccttatctccattcctgcaccttacttcccttaaccaatcaactctgttgctttgggctttcccattatattctatggcttccccagtgactcagatggtaaagaaccttcctgcagtgagggagaccaggttcaatccctgggttgagaaggtctcctgaaggaggaaatggcaacccactccagtattctagactggagaatttcatagacagaggaacctagcaggctacagtccatggggtcgcaaagaatcggacactactgagcgactaacacacacttttcattctgtatcagtgtcttaagtctgccataaagacataccattatatgagtggcttaaaagagcaggaatttattttctcatggttctggaggccaaaagcctgaaatcaagatattggcaaggtcatattcattccaaaagctgtaacggtgaatccttccttgattcttccagcttcttgtgggtcctgacattccttggcttgtggtaacataactttaatctctgcctctatctctgcacagtcttaattctgaatgtttctgtgtcttgtcttcatttcataaggtcgcctgtctttggatttggtgctcaagctcagtctagattaatttcatatcaagatccttagctaattcaatttgaaaagattttgttttcctaataagaccatatgggtatctggtagacttgaatttgggagggtgaatattgaactcttcagcatgttattaatcactttcttctcagttatttagaattaattcagcagaattctcagacaccagtgagtagctctttgtgaaaaaatcaacaatccatctttggcaaaggactgtacagaagtaccaatttcacttttctacttatcaggagaaatgaacacttttatttctgccacccacaccactgttgggatattaagctatgcctgtggctagtatttggatttcacatcctgagaattcttattgcatgatggaatgtgccagttggcaggcctgcagaactgtagctcctagtgcaacagctg

SEQ ID NO: 52775 - DNA, 5391 bp, Bovine  19866880181473
  misc_feature (1)..(1): n is a, c, g, or t
natatgagagttggactgtgaagagagctgagtgctgaagaactgatgcttttgagctgtggtgttgaagaagactcttgagagtcccttggactgcaaggagatccaaccagtcccattctaaaggagatcagtcctgggtgttctttggaaggaatgatgctaaagctgaaactccagtactttggccacctcatgcgaagagttgactcattagaaaagactctgatgctaggagggattgggggcaggaggagaaggggacgacagaggatgagatggctggatggcatcaccaacttgatggacgtgagtttgagtgaactctgggagttggtgatggacagggaggcttggcatgctgcaattcatggggtggcaaagagtcagacatgactgagcgactgaactgaaactgagcccgggtcatcattcagatcccttaatgtctctaaaactcatgtttgtgtagttaggatgggagcaaaaaggcatttagatggaaatccagctgagagacaattactgtagtcaaataacaaatgcatgtgaagtacagccatgggccagacattatataggcgttgaggagcaggaagaataaatagcagggaaatgggccttccagactgctgggcacctggaggcaaggatcttcttgtccaggagaagcttggatagttgtctttgttttcttccttctcgtctcaccctacttctccctctggatatggccttgctgatgctggtttcgactcaagaaccaaaaggatggatgatatctggaaaaatttcctatcaaagccgtgaattacttgcatatgctcttgaatagtgatgcaagtcccaggtataaaaggattagacttgggccgcatcatgcccctcagcccctcaggcacttgggacaccaagggaagctgctaaaaaacagcttcatctgcttctgctctgggtggctgccccactgctctggcattcttggccagagaaatcaggcatgtaaccttgaagatgaagtaaatgtggtttctgtaaacttaaacctccctgtatgcttcatcagtctttggctttcagtgaaattatagtctaataggaagacagacatatgaacaaatacatcacaatatgacaagtgttttttttttttttttatgtaactttcaattaatttatttttggccccaccatgcagtgtgtgggatcttagtttcccaatcgtggatggaacccagaccctcttcaggggaagcaccaagttttaaccactgaactaccgggaaagtacttggcaaatggttcttatttctatagactggcagggtggtgctagagaactgaaagaaaataattttctttgctgaatttggctttgccttacttttagggtcccaaccgatgaacttctgtttcctcttaaaaacatcacactgagtcctgacaagtggaggtgccctggttgccaaggagggaaagttcttccagaagctgtgcagggactggaaacaagggaaatgtggttcttcttgttccctgaaaaagtagccctggattttccagcctagaggaacattgcctaatctgcatgggtgcttctcctctttctctgtcctgacccttctttggctgcttgtccgaggaaagctgattgatgaaaataaactttctttgtcttctgtggatgctcacccaaatgtgaagcaccaaactagagaggctgcaagcctgggctctgccattatttagaaatgaaaattaaggcaagccatttatccttttgggtgtcatttgctcatcagttaaaaagagaccctctgctctgtttattcaaaaggctaatatgaggatgaaatacaatttaggaagatatttttgcaacatagagggtcactaaatacaatgcaccatttgattatcaatcctttctatagctttttctagcctctagtatctactagccatttttagcttcatcagctgccttaaagcattctccttaaattctttcaattttggtcaaacccctgattggcaaccataattcacattcttgctgagggacacttgaagtcggctttcactcctaaccagatctccaaagccggatttatatttctttttaaaaaagggaaatgaaaacctctatagaaaggttgtctggcaaccagataaaagaagaaatttctttcaggctttccaagaagacagaatgggagtcttgaaatataaattactttttaatggtgtcttgaaaaggtgttattctcaaccatctgcctctcttacccctgctcctgactacggcctgtgcaagcaattaaaccgttgtgtgtccttaaattgaataaaagtagagatattttaggagatggaagaaatctttagaggtttcctggtttatccatttatttcttgaagtaaggaagtggaatttagaacaggtaaaagatttccacttgatctctagcttttcagtgctgagccaaggtcaaatgcaggggttcctgactccccagttcagggtctcacccgttagggtaaagataagatgcgagcatgaataactacaaatggagtcagagaatggtattctagcataatactaggcctcaaagtccaaactaatggtaagggtgacaaatagtccaaggccctaggccaaggggacatcgttttgcattttggttggaggtcatagatgccacttcagatgtctaccttggaggtcaaacatctgttctgttgaattccaactgtgcctatttcccagaggaaagacaattggttggcatcctttcttctagctcagaatgttccagttactatgacttttctgctctgatttaagtcctcgtggtctgctctagtggaaagcttggtggcttttctggagtgtcaggttatggagaataagggtacctgggagtagggagaacgtatgtctggtcacatcccatgatactgaactccccatgcctggccaaactcccttggtgttaatacaaatcagctccacttaagttacataggccaatgcttggggcttagaaatacttgttttacatgacctaactgtgatagaacattcctccttctctggatctttttcatagaaatgagtttctttttttttttttttaattttaaagatatttttttaatgtggaccatttttaaagtctttattgaatttgttacaatatcatttctgttttatgttttggtttttttgccctggaggcatgtgggatcttcgcaccctgaccagagtttgaacccacgctgtctgctttggaaggtgaagtcttaaccactggactgccagggaagtcccctagaaatgagtttctataagaaactcatagtccagagggagtggagtctacctgaggtcatggcttgcccctgtctctacttctgcttctctgttccaggcctgggtaccatagtacagggctcttggtcctctgcagtgcacaatgcaccacatagaaacttatcctgctggctccccgggcctctctgtgaacttgcggttactggagtcttctctggagccctgagggtcatgccctgtgttagattttcagggagttatgtatagttaattatatgccaggtgggggttgggcagtactccccagtaactgaagtgctaagaagttctatgtaagagggattctaggcatgcagaatcatggagtcctaaagctggaagggtattaggatgacctgtgccactggagatggctttgctgtgagaacgtcaaggatctggctgcagcacagggtcagtgagcgtgcaaagacttggcagaggaaaacacgtgtgttcgtggagacctttcaattaggaactgggcgagaaggcagaggaagagatggggagggttccctgtagccctgagagatgaagtggcttgaccaaggacacattggtagttcttttttctgtgcacccgtcaggtagacctgctttctcgaagagccgatttgagggggtgaggagaactactcttcattagatgagaggagagaagccagatatttgcagctggagttggctatgtgactcctgccacctgctgctgctaatttgttcctgggtcgaccatctgaccttctgcccacgaaatgagacagtgaaacactccttctgccaacagagtaagtgaaagggttttcctcccactgttcaatcataaaagtggcgtgtctgtgcctggtggtgcttgaaggtgccaactattcatgtcatctgcagtctggatcctggaccagttgaggcctaggcataggagtccgaaagggctcagagcacccgccttattcccatccaaagagaatagtcttccccatctgaatggagccaatgacagctattcagatgctaggacacctccctgtatcggcagatgggacataaagggaacagagaagatggggaagagagaaggcataaatccttattctaagatctggttcaggacgaggaggagaaaatggctcctctacatccattttttcctttctttgtgaaatgacctccctgtaccttcaactgtggttcttacctgttgtcctgggggctgtcttcctctcaggttgtttccccagcccacccagtgccaaacacagggtaagtttctcagcaaatccatgttgagatctggggttacatcttggtgaaacaggaaccatccacttctgccggtggttgtcctaggttgggtcttccctgagacaaggattcgggggccacaagtttatttgggaaatgaatccaggaaacaccagtggaggaagaggaaagtgagacagggaagggaggcagtcagtaaagaggtgttatcaagcgcccacttgggcaactagagtttacgtccctgaggaactctactgccagcgtacaaaagttctggagttctcgcagttggagtgagggagctgggtgtctgtttaccacactccattggccatcctttgaggctgcttctctagccctcccaggctgcgtgcagcacgtgaaacgtaatttgtgctttttgaggaaagcccagtctagcaggcaggtgtgagcctctcaccaagccctggtggtttgtctgtgtgttttttgttgcctttctcacaagaggctgtctaagctccactcttgggtagaatgtactgcggcagcctccaacagctcaaccacttgtgctgacaacactccctctaagaactgtcaacctctgagacatacaggaaaatgacagctttgcaccaagctccataaccaattccttaactggacgaggtcacacagaaattgtcaagatagactggcaggtactacagtcctttagaagcaccatgaaatgccagctgctgccaagctgctgactt

SEQ ID NO: 52776 - DNA, 2444 bp, Bovine  19866880236965
  misc_feature (1)..(1): n is a, c, g, or t
ntccatgaaactggatgcttggggctggtgcactgggacgacccagagggatggtacggggagggaggagggaggagggttccaggatgggaaacaccctgtatacctgtcacagattcatgttgataaatggcaaaaccaatacaatattgtaaagttaaaaaataaaattaaattaaaaataaataaataaaggttataaagaaaaaaaataaaaatcaagattaagaccctcatgtagaaataatattcttaaacctgaatcacaaagcatctgggggaaagaatgatagcaacagcaaaaaacaacagtaacagagagatagctgcctctttctttggatgacagaaaccctgtgtctccaatactgacatcagataatagagaatatgacaaatgcctgctaccttgtttcatgaaaagagtaagtacatgctaatttgatgagtataattgtaacataaattaatcggttttatgatttcttctattttcttctcagaagttgaaattgggatgcctgctagtctcagttcttgctgatgttgtggtcccttctcccgtctccatgggtaatttaatgggaagtcagaggagtgagcagtagaagtttgggttatataccattttaaattggtctggtcacattcaaatcttggctgtctataataaaatatagtttcattccaacctcataaaccttctttcttccttttgttcttcaaatgtataaacactttatagacagagatatacttgctttcattgcgattattttgatttacttaatatttttcaatatcattgttaatattgttttaaacagttcttgaaaacaagaaacaatgcagaatcttctcaatacaagaaaaaaactaaaattaaattaaaaacatagattatatctggtttacccattgtaatattagtacctaaaacttttgaaaaaattagttactaagaagctcttaaatttagcattaatcataaaatgcttaacatagttatttagacaaaatgtcacttaattaatattttttttaaaactcttacattcttactttcagcaagaaatgaaaactggagaagaagggataactttaccatataagcgttttaacctaaatataacaaatttttatttttaaggctttcctagtacaagagactgagaaggcaatggcatgccactccagtactcttgcctggaaaatccatggatggaggagcctggtaggctgcagtccatggggtcgctaagagtcgggaacatgactgagcgacttcactttcacttttcactttcatgcattggagaaggaaatggcaacccactccagtgttcttgcctggagaatcccagggacgggggtgcctgatgggctgccgtctatggggttgcacagagtcggacacaactgaagcaacttagcagcagcagcagcagcatgagtataccacctttcaatgagttctctgaatctatcgagtgaattattgaaacagagggtggttttgggaatgcactgaactgcaactggtgtcagaagtgaggtcttgtggaggactccaacttcttgtatggctaactctcacagctggccaaaatttctcaaacaaaccatataaatatgaagactgcttacctgagatcctttcttgctacctggcaagttaattatgagagttttccctctgattccacatacaggcctggaaggaaaaagaaactggatgaatactaacttagcatgatggttggtttaaatactttcaacaacaaagaccaatcattgtttttatatgtgaacaacttttttaggagtaaaactgttacagctaaatatttaccaagtattatacaaattgggcactctctctggctgaggtttttataacaatggatagtgtggtggattagaaaaatgcactgaacatgatatcagaataaattagccactttaaagaaataatggccatattatcttctttctctaacttcagctttttcatatctcttacagttctaagaattcaatgagatagcatactaaaaatgactaatatagtaatgtctatgttcaaagtctaacacataaggcactctggcattgagtgagatgtttaaactcttgcttctcaggaagtctataagttttaaagtaagaatagacttttagactcagtgggagaagaagagggtgggatgatttgagagaatagcaccgaaacatatacattaccatacgtaaaatagataaccagtgggaagtttgatgtataacatagggcacccaaagctggtgctctgtgtcaacctggagggataaggtcgggagggaggtagcaaaaggagttcaggatgggagaggacacatatatacctacggccgattcatactgatatatgtcaaaaactatcacaatattggaaagtaattat

SEQ ID NO: 52777 - DNA, 2516 bp, Bovine  19866880359186
  misc_feature (1)..(1): n is a, c, g, or t
nttttaagggcttgggttgtggttttgctccttaggaagatttacctcctgccttgggaaagaggagatgagggcagggaatgaagggcatgaactctttcccctgatgcttcccaaaggcagatatttctctggtaggaaagctgtgaaggaggttcaaggtcagaatgttgagagagaaatcattctgctataagcaatgtttgctgctctttcaccagccactcactcttgcttcttggcttctacctttgctcaaaatccccctgactttcttcatcccctctcttctttgcttgggaacttgtccctcacagccattcctcctctttttttttttttttaattaattgtgtgtgtgctgtgttccatcgtgtctgactccttgcaagcctaccaagcttctctgtcaatggaattttccaggcaaggatactggagcaggttgccacttcctacaccaggggatcttcctgacccagggatcgaacccacatctctgtgtctcctgcattggcaggtggattctttaccactgtgccatctgggaagcccttaaatgtaattcatgagttaattcatttggctgcgtcaggtctcgtgtcacgtggcatctctggttgctgcccatggactctggctgtggcgcacaggctccgtagttgctgtgcatgggctttgtttttccactgcgtgtgaggtctttgttccccaaccaggaatattccccatgtcccctgcattggaaggtggattcttaaccattggacaatcaggggacaatcactgcccctccttcttgagattctagtctttgtctccagagtcagtctactttcttgagaagtacgtgtcatgcactgcttgccagtgctcccccagtgtagcagagtccagcctacagtggctgcatgataagtatctgttaattgggatgaaaacgtgggggctgtagtggaacttcagggttctgtttcttcagctctctttctttattcttctctggaaagactgagtatttttggcattgtcatctctctacctggaagaagaaaacaactagtgtgcttagagagtcatctgttcacacagtaggagtcaaatgttcactggcccactaaatcccccaattgaacatctcatgagagataaagggcaaagatcctgggttatttgggcatcctgatttcagagactgatgaaatcaatagttatgtctaaaacttctcttagtttggagttttggttcctcttgtcccttaaaggttaaatgccctgcacaaagctgctgacagtataatgagatgtccactgagggctgcctgatgacccctttgcattgttggttaaagctggctcagtttcagaggtgtggttagagacatatttactgaggatttgtgaaatctgtctccagggtcaactctggggatctgtctattaacaaggctggacccatttcctgaccccttttcatcttcttgccaaaaaatctccaaaggttcaagaagaattgagttcatttcccttgaattccttcctgttcattattttaatgtcaacctcatcttgatttctcactcacaggctgactagcaatgaggaagaaaatattgatcatttcccaagaagatgctttaagaatgtctccagggcattgaacatgcagcttttggccagggttaatagttcagaaaatcttgcaggcatctagatatttagttgcatagaatcttccaccctgtgacctaaagtagatgactcaactcttttgcccactgacagattcagattcagcccctactggtgccaggctcagtctactgttgacatctttttatcataaacgtctgcttcttttctgggttcggtgcacttttgcttccatcagtccagtcctgctattcttctctggagaccctcccagccactaaagtcctctgtccccacaaagacgtgtcagggcctggagttcaggtccctggggcagccctcagacagtgattgacaggtgtggagtatgaaaaaccagcttttttgcttggattgaaacaaactcaggcataatttatgctcctgagtttcttgtgggatcagactggagtacctctccacagacctgtgcctgaaattgctgcctgtcttagtttccttctcttcccatcctgctctctcattgccttacctgcttctcctgggagcatttcacactgaatcacttgcccacaaacactcatctcagtctctgcttctgggaaacctgacccaggacaataaaattgcattgaattctcacagccgttctgtgagaattaaatttttaaacatttactttcatgattctcacttatagatgaagaaaccgagatccctagagtttaagtccaggtccatacaactaatataaggtgcagcgctgggattaaatccagatcttctgacttcaaatcttggatatggtttttattgagaagaattttggtttgagggaagacaggtttgcaggaaaaaacaaa

SEQ ID NO: 52778 - DNA, 704 bp, Bovine  19866880400716
  misc_feature (1)..(1): n is a, c, g, or t
ntgttgggaaaactgtgacatgctaatgaaaaaggcaatagaaagctccacctgcaatctagagacaggagagatacagaaacatcctggtaagggtttaaaaataggtctaaccagtagtctgaccaagttgtgctttctggttgctagaaaagtatcttttcctgggacaacaagggctacttttcagactctaccagagtgggtgctgtgagagtaggtgatcctttctctgactgtgagttttccaaggagacttaagatcttcagggaaggcactgggaaggagatgatccagataagcagatgtaagaagtattcgattactagaagtcctgcattaatacgtttataagccaatgtcttataagtttggaaaatgtccttccacactctggatctagagcagcacttaatgtactgacacaagcgggttccaaacctcaaggccaagaactcagatgctgcattaagatgtcctcactagaggctaccccatggacagccagctagcttcattaatgcttcctcacactaatctggatcttgatttttaaaataacatcttacgtcttaaattttacaaggctgtctctttacttaagatccttattagattcattttcttttgggactgtctaatgttacagtcagtgaagatggattcatctgacttaccaagatcttcctcttattgtatttga

SEQ ID NO: 52779 - DNA, 2029 bp, Bovine  19866880410158
  misc_feature (1)..(1): n is a, c, g, or t
naatagaaatcaaagtaaaagcaatttatagaatccccaaatcccaccagctccttctggtccaatttcaaccagggtctttcccagagagtcctcttggcttctggtcgacatcttttttcccaggcatgaggcgttgacccaccagtcctttttcttttcttctgaccaaagaaatgtgacggttcacctgctttttgaaaagttgtcttttcttgagtttcagatgaagcacacatgttgttcccaagtgacttgcaaggctgtatgattgatttaaaccacaatgaacaattttctagcccagaaggccttggcaaggagcccttcccagctctaaagtctctgatgatgactcacttagaacccttccctgccactcaccagggaaattatctgataatacagttagtgatgagaaaaacaacccatcttgttgtctgaggcagctgctgctaagttgcttcagtcgtgtccgactctgtgcaaccccatagacagcagcccaccaggctcccctgccctgggattctccaggcaagaacactggagtgggttgccatttccttctccagtgcatgaaagtgaaaagtgaaagtgaagacactaatagctaggctcatttctgtgaggttcttttcttagatcttgtcctcatatttattcactgctgtgttccttctctgaagccctcaaacataggtagaactgtttttcccaggtttcatagcagttctcggtgaaagaggttggtatgattcacattaccagaagtgattctcctggaagagttggctcactgtccttgatcaaaatctgtgcgggaagtcacctagttccacattaccagaagcacaggaagtctcagatctttttggggtcaagacttcaggtttgcttttgtcgaatttgaggagctttggagatctctccggtaagataattgaaaagtggttggataaacaaatctagacttcaggaagaagaatctccatggagaaatatttttggcacagcagtgtagagataacacttcaagtgacaaaatgaatgagatcactcaggagaaagtctagatagagaaaagaagaggggctgggaatgcacttttaggagctgtagcgtttggaagttagctagaggaggaggtaggagtgaaatactgggaagaggttgttgaaagggtaggcaaatgcccatgagagagtatggtgtcagagacgcagaggaaaaagagaatttaaagaagtagagaacgatcaagtatgatttatttaatggaaagtctgacaatataagacctaaaaagttcctgggcatttgagcctcacaaatatcccggagacacttgatggatggcggtacttgggaagtagagtgggcggacagcctcagaaagagtgatgcagggctgtgggaggcctgcccggcagccatcaccctggtggctttcaatctctaatctgatcatgagctctgtgctatctcaatctgaaagacttatttgaagcctgagctctgtcctttttggcaaataacttgggtaatacctgtcaagggcaagaaaggatggtggtgcctatgcttcttcctaatactcatcagttcttgggggagcaaacctgtagttcatgttctcaaccagagcacagctgcacctcctaagtcgagcctgccttgctcagcgcacagaactccttctgacactggatgtctctccagaatcaggaggcagagaaaatgtcgatttctcatgctagagatgtgtgtttttttacagcaagcctgtactgtttgaactctcaggatagctgcctttactttattggtccagaagaaaatttaggctaaaggagaacctatttctatttgtcagtatttcagaatcgtaacagttacgtacagtacaaacctcattatggtctccttatattcctaggaaacattaaacattggcaatgtgtttgtatatgtatgctgagtttgatgactagacacactgatggtttctagatggttttctttgttt

SEQ ID NO: 52780 - DNA, 1863 bp, Bovine  19866880442596
  misc_feature (1)..(1): n is a, c, g, or t
nttctctcttgcggctgagagtagcacaggtgtgatacttggatctggcctcctaactgggaccagatgttcttaatggatttaggatgaattgtaattgctaagaagcaagaaggagggtgggcattttaggaactaacagcttggctaggcacctccatggcccagtttctgatacctcaaaattatggtagccctttaggaatagagctcatgccaagaaaagtgagggaaggaaataaccttgaagtaactgagctgatcttgaattggtgagattgtgttttctgataccatgtagaatgaaactcaagacagttaaagaaaaatcttaaaattatgttttggacatctgagatgtatggcctgaaattattttactttctgcataaacaattctctgggctaaccatcaaatgttgacctcacatgaatgttgcatattaatgtgtataaaaggccaccagggtcagaggagaaggttgccattttgctttcactaacctacgcagttgttctctgccatcttgaactgaatattctgtcttaccatatttatttgccttgtcagtataacaagggccgtggagggaaggagggcttccatggtggctcagtggtaaagagtctgcttgtgatgcaggagacatgggttcgatccctgggtcaggaagatcgcctggaggagggcctggcaacccactccagcaaccccctccagtattcttgcctggagtattccatgggcagaggagcctggtgggctaccatctatagcattgcaaagagttggacacgactaaagtgactgagcatgcatgtacatggagggaaggaggtgggtgaaggagagaaaatagggcatccctaatgattgctaaaggaactctgaggacatcaactcatgctttcaacacacattaattaaatgcttgcatgtgtcaggctctatttcaggtacttgagacacagcagagaacaaaatagatgatcagctctgtccttgtgaatcttatattctagcagaggaagaggataataaatgataagtaagtaataaacaagtaaactgcattgcaggttagaaagaggtgagtgcttagaaaaggaaaaaagtagatcaggatgcaaaggattaggaagtggggggcagagggtagagcaggcagagatattaaataaggagcaggagagaccttatctgagtaaagactgaaggaagggaggaaggtccctgagcatcaggttgagggaacaactagatgaatagccttgcatgctgctgtttgtttaaagacaaggacaaggagaaggccaatgtgcccagagccagttgtcgggggacagtgggggtagtggagtcagggagttaatagggactggatcatgaaggattttataggctttcactctgaatgaaatgggagatacattcatttcctgtggctgctgtatagcaaacgaccacaaacttgataactgaaaacatcagaaatttattttctcacagttccagtcaaagcgtcagcatggctgcgctccccgaagctctagggaaggatgtgctccttgcctcgtccagtcctggggctacatcgctccagtctttgccttgtgggccatattactttctcttttgcttgctggcaaatctttctctgcttccctcttataagaacacatgtgattatatttaggacttgcctagataagacaggatcatctctccatctcaagatccttaagtatatcaacaaaggctctccccttttccaaataagactctcacaggttgctgagattagggcgtggatattctttgggggaccattttgcagtgaaccacagggatcattgtgggtt

SEQ ID NO: 52781 - DNA, 1316 bp, Bovine  19866880486972
  misc_feature (1)..(1): n is a, c, g, or t
ntgatgcttttgaactgtggtgttgaagaagactcttgagagtcccttggactgcaaggagatccaaccagtccattctgaaggagatcagtcctgggatttctttggaaggaatgatgctaaagctgaaactccagtactttggccacctcatgcgaagagttgactcaatggaaaagactctgatgctaggagggattgggggcaggaggagaaggggatgacagaggataagatggctggatggaatcactgactcgatggacgtgagtctgagtgaactccgggagttgttgatggacagggaggcctggcgtgcttcgattcatggggtcgcaaagagtcggacacgactgagcgactgatctgatctgatctgatactctgtacacaaaattgcagcattatttgtggtgctaacaagactgtaaagagcacagatgtccatcacaggagctatggttgaataaattacgttacatgcgtaccatgaaatatgcagctattaaagaatatgtctattatttatatctattgatccagagatagttccataatgtgtccagtaaaatctcactttggggagtatttttcaatctatgtctattgatccagataaagtttcaataatgtgtacagtacaattccactttgggaggtatttttctcagcatatttaacagttaccttaggaagtgggataggacagagcagactgttaattttctccatatttatttctgaattggttgactttttatataagtttgtattgcctccacaatttaaaaacctaagttaaaaataagtataaactcaaatgtcataatcagcctagaaaatgcattttagatcttcagctccatacaaaaaattatataaataatacagcttttcagatcaaatgggaaagactcagatttatatttctagagacctcttacatatacaggcattgtaatttacagttttcagcaattacaggataaacattcattttctttattgggtgtttctggcaatagagaacagaagggatagtttgctcattcttcgctgaacgatataacttactagtgaagcgtaatattttaaaatcagggtatgatctacaatcttcatttctaatccttcagtttcaccctcaagtagagaaaaaagtccacaactcaggagggaaatgggggggctgatggtattgacaaatttaaaaattcctttattttttgatagaggattaggcagaccttcgttgggcttctcatccctctttctatgctctaagctgtgtggagctcaaagaggtaaagcggaaa

SEQ ID NO: 52782 - DNA, 2501 bp, Bovine  19866880497186
  misc_feature (1)..(1): n is a, c, g, or t
ngcaccccactccgtactcttgcctggaaaatcccatggatggaggagcctggtgggctacagtccatggggtcgtgaagagtcaggcacgactgagcgacttcactttcacttttcactttcatgcattggagaaggaaatggcaacctactccagtgttcttgcctggagaatcccagggaccggggagcctggtgggctgccgtctatggggttgcacagagtcggacgtgactgaagcgacttagcagcagcagcagcagcaaatgaggtcaggtgtggtctgggcaagactttattgacattatttattaaagaaaaattgagaaaagaattttgaacttcatattagatcatgaatagaggcaataaaatgaaagttaccaaagaaaactagtttatccttcttattttccccatgagcactgaagtagggactacacttgtccctactttgctttcattatggagatgaattccctgaatagatttttcctggtagggtgagaactttggtctcttcagagaatagacacttaggattcaggaaaaaacaccaagctctctacttatttatctgcctgtgtccctggacagtcctcttgcccttctccaactctcctttgaaactaaaatattgaagaggaaaaaaaagggccatccacagccttgctctgtgtgactgagcaaacctattccgttcttactctgtattcaagacatacacgctcctcctcctgtagtatttgctgatgtactttgcactccagctgctgcaatatttaaatcagtgattcagtacacagaccacacgatgtgccactacactccaacaagcaaggtctgtctctcggtggggacagaggatctaagcatctgtcattctcctcctgtcgcttataattaaccacaatacccctttacacacacaaatatttatatgcaaaaataaaactctcttgtgctttaagccaatctctcttctcctcggtgagctttgaaagttgccaaaatggatgttttacttaattcaagactctataagaaattctttggtgtgaagaacttacagcacataattatatttgcagaaaataattttaaaatcttggagttagaagtaggatacatgaaaacttccagaatgtaagctccatgagggagtggtctctgtctatctcattgacataccccgagtgttagaagagtccctggtataaagtgtgagctcagtgaatatattttgagtgttgaatgaatgaatgtatagaaaccccaattgtgaaacatgatcctgctatttaggatgaagaatttaagactagaacttctaagcaaacattgtggaacttgaaaatactttgatattaagtgagagtagggcagagtgaaaaataatcacccacttatttattaattgacccaatgaattatttaactgttgccaagcatgataaaactaagtactgaaacttctataaaaaataaagaatggtccttcccctcagggaactcttggcttgtgtgtgattctcaaaggatggctcatgaatctcctatgtgtatgtgttaaaagtgcagagccccaggtcctaccccaaactatctgaatcagaatcaatgaggatgatcctaggaatctgtattttcaacttgctggccaggcactcacaagcactgtttgagacgctggtctagtggaactggaggcttcccaggtggcacgagcggtgaagaacccgcctgtcaactcaggagacataagagacgcaggtttgatccctgggtcaggaaggtcccctggaggtaggcacaacaacccactgcaggattcttgcctggagaatcccatggacagaggagcctggcgggctacagtccatagggtcacaaggagtcagacacgacggaagtgacttagctcacacacacgtgcactagtggaacttgtgctatttgcctgtttctcagcaattaccatttaggtaatataaatcatcacagccaagcgtctcttagtgaaccaatagaatgtaataatattaaaataaaatgaccactttagattagttgtccagtatcttattgattgggcttccctggaggctcaggggtagggaatctgcctgccaagcaagagatgtgagttcagtccctgagttgggaatatcctccagagaaggaaatggcaacccattccaatattcttgcctgggaaatcctatgggcagaggagcctggtgggctgcagtccttggggttgcaaaagagtcagacacgactgagcgactgaacaacaatcctattgattggagcttacaaaattgtcctctgtaaaactaatctttactgggactgcaatttgagttgtgctaaaaaggcaagcaggtagcacttatagactttcagaaacaggcctaaactgaatttcctgcacattcactaagtttctaaacttctgcaaattgcgttgaaactgcctcaggcctcatcaatttca

SEQ ID NO: 52783 - DNA, 3553 bp, Bovine  19866880509842
  misc_feature (1)..(1): n is a, c, g, or t
nctacacactggtctaccgttctagagacagctcagagtaagacgcaggccctgttctcaagctgttgggtcttttgaaggggagtcagaccccctcccccagtgggaaaactacagtgtgggtgtcagtgctgtgattgtggtaagggaagggaccacccacccccccgcaacatggccaggtgttctcagcaggaccaaaaaagccttggtaagtctctggcactagatgagcccctagagccttggcacagccctggggagcagcccccagatggctgaaattgagtctctcacaagctcaggtgagaaggtaagagctcgattaagctggtgtttgaaacaacatggaaacaagctatttctggctcactgggttatgcactaagatttatctccaccaggcaacgttttgttccaggaagctatgagatctagaggcagaacttgggaagatcaccaaaagcagaaggtggatttagagtatcctagggattgggggcaggaggagaaggggacgacagaggatgagatggctggatggcatcaccgactcgttggacatgcgtttgagtgaactccgggagggagttcatgaggttaatgccatgaactccatgatggacagggaggcctggcgtgctgtgattcatggggtcgcaaagagtcggacgtgactgagcaactgaactgaactgaactgaaggattaaaagcaattcctttgcctcctgacccaccatcttttccccatcagccaagattctgacagctgtttggtgttggtgaggtcatcgctgggcaccctgaactggccaatcctttttgaaactcccccaaggacagagtccacagtgccccagataactggttctgagttttattatctcaatggccaaaaatgtgctttgtcctacccacatcactgttacttgaattaaaattcattttcttttacctgggctttggaggactaggacaaccatggtttatcaacctaaatcatgaaaagatgctttctaagctgtgaagactcataaaaataggaagtcgttttatttctatcatatgtaagatcacacagcaggtgaggtggaattaaattttcctgaataaccagtctgtgtcaggaacagggctaagctcatgacatatgttatctccctgtaagcctagctccacactgtcaggtcagcatgatgtttctcattttacagatggaaaatggaggcacagagaggtcaggtaactttcccatggtcacacagctagttctagctaggactagaactcacgcttgtgcgattctttcaactcttctacaatcctagaagattgtaattagctcatccatagccttttcctttccaatttatttaatttttagccccctttataatgaacacttcatcttacatttgacagtttttgaagatcaagaagtgttgttgaaggatacagagagatggacttattttacaggctaatgtattgtaacctctgtgaagaattttttcttgagatcccaccagtactggggtcttacaacagttgtggccaatttaagcctgggggagtcacatgagaagtacttaaaacaagagcgaagacacatattatgcattttcttgtgtcacaataagaagaggttgaaactcttatgaaaggtttaaaatgatattaacatagagttacatgagggtagtagagacaatggcagtggagaaaaaaattatctatccatcactctgttcattcattcaaatgccagattatctctgtgttgaagactggagctaggcactttggcagacacaaagtatgtatatgtgtgtattatgttttggggaagggggaattattgcatatgtttgttatggttagttgtctttatttttttttggtcatgctgtgcagcctacagaatcccagttccccgaccagggatcaaacccaagtcctcttcagtgagagcacggagtcctagccattggcctgccagggaatttcctgttatggctaattatgcctctttaccttaattaggctaagtttatcctgtgctttttatttgtctaatcatgagaaaaacatcaaattccagtaaaggagcatcttatggtatatctgaccactattcctcaaaactcaaagtcctcaaaaacaagaaagtctgagaaattgccccagtcagaaggacgctttagtcgtgtccaactctttaagatcctgtggaccatagcctcccaggctcctctgtccatggcattctccaggcaagagtactggagtgggttgccatttccttctccaaaaggtaacatggtatcctggatgaatcctagaaacgaaaaaggacattgggtgaaaactaaggaaatctgaataaactatggacttcagttaataataatgttaagaaaaaaaatcccccctcagttccagttaggtactattgtctttcctcatcaagggtggggcccaaacgttgagataaagagagattctgaggtcacaggaggggagcagatgagcacgaacccacagaggggaccttggccttgcttggcctccagccatcatttcagccttcaacccatcatctctcagaagaatcctcaggccagtgaaaatctcaggtgcttgaccagatgagggtctcccacgggacccaaactcatcccagaccaattgttttaggccatttcttaagacaagccctcgtgtctcattcaccacctctcacatggccatagattgtacctggcaagattttgaaacaatccccttcaccttgttacgctctcctcttaattagcagagggacaaatgccgttattggaagcaacctctctgcagcactcttccctctgtttggcaaattaaaagcatttggatgaaacccttttgtggtcccaatcaatagctcaagccgtaattattcagtggtgcttgcagttttctgtgctgacagccggctgggtgtgctgatctgtaattgtttcatatgcttatgtggctttctcatcccatgtttgtggtctgcagcagatgaatcgatagcatctttggggaaacaaggggatggacttgccagcatctgaatccctcaggcctctccatggttttaggaatcaggtgggccctcttacttccttgttaacccacctgatacaaagccgagcagtacatttgggagaccaaaaataaataaataaataactccaactttattggataatcatgtagtatcaggctttaggttgaggataatggttgtgtgctaagggatggtaaataataaaattttattagattccactaatttcagaattaccgatcatttggatgggatgtggattagtgctcaagcagatcttttcctaaaggaaaatgtaaacaaaactgcaggggttgatgcttaaggtatttcagaggattaattattttcaatatcacctgtcttttaaaagtgcaaacagtcacattcaaagagctgttttattccttccaaatccttctggagtctactagtgagagactaaactcccatc

SEQ ID NO: 52784 - DNA, 1656 bp, Bovine  19866880586765
  misc_feature (1)..(1): n is a, c, g, or t
nattttattctgtgtgaagagatcctataaagccatttctataccatctctgcatctttcctgctatagcttatgagaaaacattggtgttccttgtctccttccagggaacaagagagaatcctagcatatatgctatctacccccaaggtccccaaatcttctggtgtttatgttgccccacctttggcttagttaggagtaggggcaggacagagtccctgcttagggccatccattacatctaaccatcttgtcaggaaaaatgtgtgaaagactttggaaacagacaaaattgattgctgggtgtcctgcttataccacccttctgattcatctttcttcgtctaaagctattttacaaccctgtcaagatgtggaatactggtagtaatgcaagtgattcttgcccatagaaatgcaaactgtgtccagcagagaggcaattgatcgctgccctacaatacctttgtatctttctgtatttatttcggcattctttttgaaatttttattgaaatatagttggtttacaatgttgtgttagtttcagttgtaaagtgattcggttatatctcagcattcttgatgatctatatgtgttttcttgaatcctcccctgaactagttgcaacatctgactagtttcatcattaataatgacatatgttcattttatatttgtgtaagggtcatgattttaccttttgtgaaaaaatatcctttgacaatctttactctattcttcttctcccaactgctttctcttcttctgttgttctgaacaatcacaggttaagccagaagtaactggcactctcctctgtatatagagggaacaactggggcttgaggaaggcaaaacttacccttggattcctgattcctgtcctggtactccacataggtggcggtaccacctgtatgagttctttaggaagtgcactgaagtatttggacaaggaaagggtctgttctgagagagataatgtcgtgcagtgtgcagaacagtcccctcaaatgaggatacgttgccccacatgccagagcacctccagggagaaatgtacaagatgctgctcatggatatggtggtcttaatgactgccccccaagaatcctgctgggacttgtctattcatttaccaaatgactaaaccagagctactttagtggtagtatttccccccagcatgcagaaatgtttacggccttcaataaagactgttctctatcgagaactgagctgggcgtatactgttgtaaacgtcaggcatcctccaagtaagatttatattcttattttgcttaatactcacactttaatgaggcaataaaaacaagtgagattgtctcattgcaaaggatcctacttagttaattatcaggccccatgccacaaatcactgtgttgggtttcttatacccaaagaagtctgctttttatccctctcctcacgtgagtcacatgagcctgtattgacaagttgagcctgagttagaggtggtggggaaggaagagtaggagagttaccttccctataatgtgggacccccaagcgtccagccctgtatacatcaatttgggaggcagtgaagtgaacaggtgatgtccagattctagggtcagatcttaaatcccagctctgccatcta

SEQ ID NO: 52785 - DNA, 2193 bp, Bovine  19866880592427
  misc_feature (1)..(1): n is a, c, g, or t
nccctctcatctgattagcattagttcttactgcttctgccttttaaaattcctcacataatctggagaaaactttaattcaaaaagatacacgcacctccaggttcatagcagcattatttataagccaagacatggaaacaacctaatgtccattgacagatgaatggataaagaaaatgtggcgtgtgtgtgtgtgtgtgtgtgtgtgtgtgtgtgtgtatacagcttctgctcaggttcattcaggaggaagttatcattatctcatttttatggatacggacattgaagctcattaagaataaagtaattgtccaccccagtgccacagggtaagtggcaaaactggaactggaattcacattggttttaatccaaagtcttttgctagcacgccatgaaactggaggtgtttttggaagtgatgatcctacggtgcatagcaggtagtcgtgtgcactactcagaacacttatcccagggatgtggatgtcagaggaagacatctcctgtgtgaatcccacatttggggaattctgggaaaattgctgtccccttgacctacattccctctgttgaagaggtagtatctaggctgaaccagaagaatcaggacacagactacaaaggaggaggactcctgaccaaaagaagcaataacaattgatgttccagtctgtggcttcttggaacccagctgccccaacagcttgatgggacacacagacagagcatctctgtgaagccagcctctctggagccaaccaggttagaacaacttaacaaacaggagaaccaattcagaggtatggggctgaagaaggccagatccataggaattatgctcaaggtcatctttgacaaataacaactgcactatgattttgcaaccctgtaatttccattacactatatgaatatgcttgggggccagagaaagggagattgataacttcatttagaacaaatcaattggattccactgatagactcatgaatcatccaagagacaaacaaggggtgtcaaggaacactgagtcctctcccctggcaatttttataagcctcatcaatttctgtccaactgaacacttccatttgggttattaacataaaggttctagaatacatgaagttaaattctttctaaagttctggcaccttggtcaacacccatttttgtcattatgcctttgatttaactaacatgaataaagaaaatgtatgcccatccgaatgtgggctggttaatcatgacacttaaaaaaagtcataacagcaaccattagcatagcctccaaaaatagcatcctgggaagagggaggcttaaatggtccaggtgcccttgtccaaagattgttagagccatcttagcttcacaccattacacaaaatcaagtatttcttgttctgatccatacgtactgactgagtctggagctgggggacttatgctaaaacctcccttaatatatccacatattccatgatttacagtacataaaggctaagaaatcactgaatgaagtctcagatcctgggtttcagttataaacaacacggctggtagacttagcagatgatgggatttggtacaagaggagagtgtaagatgccccgagataactccattttgttttccctggtagttaaattaattaatattccataatagatctaccacatgattcagcttctgggtacatatctaaaggaaatgaaaacaggattttgaagagatatatgcactctctcatttactgtaatatttcacaacagccaaggtatagaaacaatgtaacggtgcaccaacggatgaatggataccatatatgtggtatacatacaaaatggaatattattctgccaggagaaaggagggtatcctgccatttgtgacaacacgaatggaccttgagcacatcatgcaaaatgagatgtcagacagagaaaaacaagtactaaatgatatcatatccatttatatgtggaattttaaaaaacagagagtaaaatgctagttaccagggcatggggctgtggggataagattgatgttatttaaggatacaaatttccaacaagtaataaataagacaaagagatctaatgaatacagacattattgtactataattatatactggaatatatattactacaattctcatcattttataatatataaa

SEQ ID NO: 52786 - DNA, 1558 bp, Bovine  19866880605680
  misc_feature (1)..(1): n is a, c, g, or t
nacggcagcccaccaggccatgccgtccccgggattctccaggcaagaacactggagtgggttgccatttccttctccaatgcatgaaagtgaaaagtgagagtgaagtcgctcagtcgtgtccgactcttcgcgaccccatggactgcagcctaccaggctcctccgtccatgggatttcccaggcaagagtactggaatggggtgccacttcctctggtaaactccaattgttgccgttcttaaactcagtaacatgatgggtaattctacagagtagccactggatggcaggcttcaaccttcaaaagatctccagtgcttcaggtctgctgcctgcgaggttggcgagcaatgaaatgacaagctgtgggcagaggcatctcttccttttatgaatactcccaggcacagtttgagcagctttcacttcacattaggaagctgatctgtttgggcatttggtttaagaagaataattccctaatctcttgtccggtgacgtgcttttacattttagcttctgcctttataggaaaaaaagatgtctacccagaagattcatgacaaggggatgtatatacaggcaggataatcacctgcatgttaagagaaatgttgttttccaggggttccagagagtatagagtttacccactggcaaaataaatgtggatatatattactggaacacacacactaaccagaaaaaaaaaatcatgttaacaatactgtttcaaatttcaaccataattataatgttcaccatcaaccctgctttttctttctgacttcaaacaactgtcgcctactcaaaaatgagaaaataaaggttcaagaacatttagttgaaggtgtccaagtcacatcttcaaaaagcagaaaataaaaatctcatccaacttgttcggaaagagagttgtgtacttgttcccatgagaaatctaccagctggggagggggctgcctcggaggggagggggctgctgcggaggggaggcaggaacaagtgaggacaaggatctccactggggacagtggttacacaaacaaatcatctaggttctcctgaacaaaatgaggaggtaatttagttgcagctggatcaagaagatttcagagcaataagaatcaggtaaggcaatggagagagttaatagaggacaatttagactcacaataaagatataatttccttagggccttccaaataacaataacttccagaaggtcgttagcatacactcttggagattgcttcagctcatcctgttcataaagacacacaaatgggtccacgcacaagagccagtaattagattctgccactccctgtcccgagcagtcctggactgtgaccattaaccctctgctccagacgcaggagaagtgatctgggaatgtcgtgtgcacaggccatggttattcccgacagcagcaattaccctccctcccaggatgtgtctgcctcagggggacccagggcacttggcacattaaagagcatttataaacagtaggttagaagagctcacaggaagatgaaccatgtaatgag

SEQ ID NO: 52787 - DNA, 1621 bp, Bovine  19866880610668
  misc_feature (1)..(1): n is a, c, g, or t
nccccttcctgggcataaatgttcccctgcctctttctatgaattcatttatcttttcctttttggggaagctaggtcaatggcaccccactccagtactcttgcctggaaaatcccatggatggaggagcctggtaggctgcagtctatggggtcgctgagtcggacatgactgagcaacttcactttcacctttcactttcatgcattggagaaggaaatggcaacccacttcagtgttcttgcctggagaatcccagggatggtggagcctggcgggctgccatctatggggtcgcacagggttggacacgactgaagcgacttggcagtagcaggtcagaccacattcttttaggaagtccactgtgatagtaccacctctctctgctctactctgaacactcccctgtcagcatcagcagtgcttatattctcttcatggttcatactggctgccacatagcacagactgaatacgtgttgagcgtatgaataagtagattctgttgattctgtctctgagccatctctcaaatatgtccccatctccctgttccccactgtcatagccccaggtaaggctctcatcactgctcccatggaccatccaaataattcccaaaaagcttcccctgccttccatcttccctctacgcagactccccagtgccactaagtgaactttctgagagaaatctgatcatgtctcctatttgtcatggttctccagcacctttgggataaagtcaaaagttcttagtgtgacttttaaagctcttcacaatcaagtcacaaacaattattcttgtctctattacttttcactgctgatatacgcgtatctgagttaacccttcaagcccaggacgtatgccttgtcaatactactctgtttgccaggggcatccttccttcttttctacctgctgaacttctgcttatgttttggggtctatcatacatactaccaccaaagcctgcatggttgcccccatgcagtcccagagataaacctgccctcctgtgaacccccagcaatttagggtcttgggaacagggcacactgagcacagggcactttaattactagccggtcagtcttgctgctgctttgtgaccctcttgaaagcaggctgaaatgcctcttacatccacagccccaatagagcacttagctccaaggatgctctcagtgaataagtgaatgaagcagactgttcacaccatgtaacttttcattcacttgaaaccatacactttcagaactaaaaaagatattataaaatgttttttctaacttgctcatttttcacatgaataaactctagcctacagggttttaagggacttgcccaagatcgtaaagaggcatcagaggcattggccctggtcacctgattcatgccaccttctactttattgtatatataaagttatggtgccaaaagacagagtaagccccacaaagaaaaagattgagtagattctttcgtttgcatttctctatacaggggactcggagaaggcaatggccccccactccagtactcttgcctggaaaatcccatggacagaggagcctggtaggctgcagttcatggggggtcgtgaagagtcg

SEQ ID NO: 52788 - DNA, 1083 bp, Bovine  19866880614277
  misc_feature (1)..(1): n is a, c, g, or t
ntcttagaagatcttttgggggatagacagctattaatttaaattttaaggttagatcaagaaagagaactagccaaagattaaacgacttgccaggggatgggagttggaggtattgaattcctctgagctaggctctgtgagagagagtaaagcaagtcagatgggataatttccccctctctggcattcccagtgtaatggggctcagagctagagctctggtctaccctatctcctccagtggtttgtttctccactactcatcttcgtcccagcagaactgtgtcatcctgatttatcttagtgtaccttgggactgcccctggaaggctactgcttattcttacaagctacacactgaggtccgtgttctataatggatggaatgaaaaacaacaaaacaaacaactctttatgttaaatctgatttgaattctccttaaaaaaaaataaagcaactggcgtgatattttgacagctttttgacagtgcccacatttgatttgatgagatgcatgctcctatttgagttatgtccaaaagagggcagacagatggaaggtttttacaaaagggaaaaaaaaagtcctggttagtgtaagcctggaattcctaatttgcttttttttcttttaaaaagcaatagataggtcttaacagatggcctaactcttcagttagatgcattctttgaaaaattacaagcagtaaatgccttttacagatgtagagttcaaatacatgaaaatcatagcaaaccacacagcctagagaaacaaactttctggaaaaggaggtttagagaaatgaatacatactcagctatagaacaatctgctgcagccctccggcataacttttcaaactgtgagtcatgacccatcaataggttatgaaatcaatttaatgtgttgtgaccagaagttgaaacaaaagtcatggtgggaacaggaaatattcagagtgcatcacgtgtagtaagaataaaggctgtttcatgctggtttgtcccattacacactgtttcctgaattatgtattttttactataggtcaggctaaaaatttttttcaaagatg

SEQ ID NO: 52789 - DNA, 2089 bp, Bovine  19866880658118
  misc_feature (1)..(1): n is a, c, g, or t
ntgattctcccccagaaatgcctgtttatattgtatggcgctcagcttatttacacataatggtatctaatgatgctgagaaatagcggacaagatgattgtgaagatcctaatgcagatgaaaacggaatgaggatgaactagcattgttggcagagcgggattcctgggctgcacaaatgcccgcagagcagccagcccctcagcctgagtgctctagtcccttgaagctttagatggtttcagacaattgcctacactcagcattatcctatgacaatttgtttggtcacaattatctttaatctcctgaggcattaatgcttactgtgaagcattaacacatcctgatcttattcaaacacttaggactttcttgctggtctcagatgcagagagaaaagccagagaggatgaggaaagctcgtggagagcagatccctcactgagggctcttcagctgaagacctcttcagccagagctggccctgaaagggctacctgggcaagtggttgactttttgtgaggtggacctgagtgagttaccatgacaaccaaggaagcccatgcccgggactcagcctgcctgggcccctctccaggcctcagtcttcctacatgtggaaaggagaagactgtccctatctcagaagtttcttctccagggatggttgggggtgtgggcagctggtgggttttgtgaaaaatacttttaatgtattctggtatctctttccatgtaattcagtaaatgtttactgaataccagccaggcagtgtgcaagacatcaggggatccccaggacaaagtttcaccagaggcaaggcactgacagattgtgggaaggagggaatggaaggcaagcgcacagagaaacacaaagaaggagaactctgttatgagtctggagcaaagaaagctgtgtgaggcaatggaagagaaaaagatcagctttgattcgagtcaggtggcatttaaattgtaccttaaaagcagaacttaaaaaaaaattatagatgtttccaatcatacttgaaattaaacagcatagtataacggattcccatgggcacatcatccaacctcaatccccaacacatgcttccacgtaagaccccacccacttttccagtataacccccaccgggtcatttccattaaaatcccagagagcagagcatttcataggaatctatctcaataagactattttaatgcaagcacaatacaattattatatttaaaacaactttcttaatatcatcaaatattcaatcaacacccaattgtctcataaatatattttacagttggtttgttcaaatcaggatcaatgctagtctgataggtctcttaagtgttctttcctatcttttttccttgcaatttggtgattttgttaaagaatctacatcatttgtcctccagagattccccacatctgaattttgctgattacttctctagaatgttaatgttccttttttccctgtatggttgtgtacattggcagttcaatccagagcttcatctgacttgggttcagtgttcttggtaagacttctttttaagtaaggttgggcacttccatcagagggtcataaagcctgatgatctctttttgtgatgtcagcagatgctaagaatcttcacctagacatgaaagctctatgtgggggattgacacagatgattgctttgttattattttataacttggacatgtgtctcatgaaatttctagtgtgtgtgttctgtggcattagaaaaaaagaatacaggcattttaataggccatagggctttgtgaagggcagtgaccagtcaaatccatgggataaagcacagtacctagaagattgaagctgggctttaacagctaaaacttcaacaattttagtttctgaaacccagaggccaagtaaacggtggcataactgaggcctacacccgtgagcctacactttggggcccttactgttgttaaatagatgcttcggcctcccaccagagtcatgtcagaggaagccaagcagccgtagtcaggagatatgtgagagagccctcatctgctgtgtttataataa

SEQ ID NO: 52790 - DNA, 916 bp, Bovine  19866880713939
  misc_feature (1)..(1): n is a, c, g, or t
ntattaaattaggatttaatgccaactaaaggaaaattaattgatgactataatctcaaaaaaaaagaatatctgcatcttaaaaaactggactcttcttggggttataattgattactttcagcagtaatatgatattttctaagtttcaacataatatgcaaaaaaataaaataaaaaaggataaagaacttgaaagaaactgtggccaagatttagacaggatgctgagactttgggaggtgggggcagaattaagtggtatgactataaagtttcttaggtttctcagtctattgtagtgattactggtgtggaattaattttctttgcaccactttggtgactttcttacctagagagcatgcccagaggtgtaacattaagtgatcccatcagcattgccagggccatccctggtgcttcccgttctattacttcttttgtggcctgtaattaaagattaaatagcagactgagtgaaattaaccaaaaataaggaaggcagagtagcaaaattaacttaaaaaataattatagatcatgctatctattaatataaaccatactttgtagtgctccaattttttttttaaggcttaaagattcaattctttgggaccactgaatgaaagctgaaaaccaggacattgagggaacttttatattagtagatctttcttatcccttataactcagaagtgtttgacagcaatatcatcttgcttaaccttaattttaaaattaagcctcagattgttaaaatggctcaacagattttcacagaacaagaaatctgggtatttttctttgtctattactcttgaaataattagtccctaaaaatctgagaaccccttgtatctctcctagctcgatgattttatgatataatacagggaactcaccaaatcat

SEQ ID NO: 52791 - DNA, 1643 bp, Bovine  19866880716142
  misc_feature (1)..(1): n is a, c, g, or t
naagtgaagtcgctcgttgtgtccgactctttgtgatcccatggactgcagcctaccaggctcctccatccatgggattttccaggcaagagtactggagtggggtgctattgccttctccgaaaaggggtaataattgtacctaactcctagtgttgttttgatgattaaatgggtggatatttacaaatcagtaggcacatggtaaggaacctgtaaatgttggctgtgattatcatgcagtgcatgattcctttgacatttgcttccttagcctctgaatagcaaatcttgcagtggagtcttaagaaatattaattgatgaagctagtattgaaaaaaaatcactagtttcttagatctctgaaaggacttggcctttcacatcaatgtgggtcaaatagtttcttttttcttttttccttcatttcttctagtaaggagacttcgtgtattccggaaactggtgaactttctgagagtctgagcaggaaataaattatggtgatcatactgattaccagcctgcttcttggaccttttgccagaaccctgccaatacccccttggggattgtaaagttattagaaacaaagatataattagcatctgaaataggcaaggataaaaagagtcaaactttgtgatctacaaatgaccaagaggctaaaaccactgaagagaaaattaaaaaagcaaaagccaaattcttctaactcagccttcactttggcttagtgaaattctagcttgaagcttgctgatgaggatcagggcatgatgtgcttagagcatctctaaattagatctctcagtttagatgtgatttccaaatgagatattttccaggaatctcttaacattgctgtgttgtcagtggtccatcaaaaaatatgtattgagcacttatagtatatgggtcttaggggacttacattctaagggtagagacaaatgagcaattataataggaagagagattatataacttaaagagagctcagtttaattaacagggttcaaaaggcagtccatgggttactggccaagtatttaataaagacaaagagaaggaaaagaggtagggagtgaggaaagaaggaataacagaggagagactgattgattatgagaaactccagagatatgttagctttttagaaactcaatttaactgaagatgaatgagagcctaagagattaaaactagtgattaaaacaaaattttgatatccatgtatttcatttatcaagaacacattgatacatctgacactgatggtcagagtgacaaagtgaatgactgcattgtctgcttgtattagtttcatattgccatgtaacgaattatcacgaactttcttaaaacaacaggcttcccaggtgagctcagtgataaagaatctgcctgccaatgcaggagacctgggatcgatccctgggttgggaagatgccctggagaagtaaatggcaacccactccagtattcgtgcctgtagaatcctcgtggacagaggagcctggcgggccacggtccatggtgtcgcaaagagtcggacacaactgagcatgtacaccaagaatgggtattgtgtctacccctgctgccattatcttagtgtctcaccagtttgtgcttaga

SEQ ID NO: 52792 - DNA, 681 bp, Bovine  19866880749746
  misc_feature (1)..(1): n is a, c, g, or t
nggtccctttataaggtgactgattgtcttctgaaaggtgctccagagagaaggcgatgtcactttttatccaagcatagacagttttattgaacaccaactgctaagtaaggtaccgttatttattttactacacccattggtttcagcaactttgagcctcgaatggcttcatgtttcttttccctctttcaatatcctagacgcagaggccagtgagctcctcccatcccctctcacacctctcccgcccctccccaccaggacgacctctccaggcctcaggcctccgcgggcctgtgatgtggccccgcagcgtccggaaggcaccgtgtttgaacagggatgaggcagacctccttaagctgcttattctaagttgggaattgttcctcctagtcaattgatactgaaaataattacttcttagaatctttgaaaaccaaatgtgtaaagagaaattaaaatctaattaaatggatgtaggcaattctgtctgagctgacaatgcttaagccactgcagtttgtcaaaggttacattatctccctgtccctgggcactgcaggctctgcctggctctgagcccggcattccctctccaacacccttccgtctgccctgtcttggacctgagtcctctttgttctcgggcagagacggggcgacgaggccatccat

SEQ ID NO: 52793 - DNA, 837 bp, Bovine  19866880751108
  misc_feature (1)..(1): n is a, c, g, or t
naaactgaggaagcaggaactgctagagatactaaaacctctagaagacaagaacaacctgttgttccagaagttgatgtctaacttggaggaaaaacaaagaaggtatgtgttcccttttcaggatttcctagaaggggaaaggcaggagaactggatttagtgatgattatttacatttttaaaaaggtttagtagctatagtagattaacaagaaagtaaccacaaaatcagagtggcaaggaatccttttttcttttagtagaattaaatatgactcagctcatctcacagggctacagttacaacatttcttcccaaggaaaagataagaggcttcagtatcctccgtgtattagggtcacacagacagctgcccattcatgtttgtggaatcaccttaggaggcatgactgttcttcaaatgccaagcaggggaatggcaaatcgtttctgagcatcaaactcctctggattagggtctggccttactcttaataaatgcactaggcaatcgaggtcttaactcacttactgttcttggaatctaccaactttctttttccttcctagtcctagggaatctcactttaatgtgtctaccttagcaaaaacacctcatggagcttggacttttggaaagcaaaagtcaggcagaaagctgtgagaacaacagccaggcagaaaattgtggtcaatcaacagcttcttccaacccagaaacttagccctctcagggcaagggaacacaaaggcttgcttctccacttataattagagaggggaaagtacaaagagggaaaagtacaaagaatataagcacaagttaattaatg

SEQ ID NO: 52794 - DNA, 1615 bp, Bovine  19866880812473
  misc_feature (1)..(1): n is a, c, g, or t
ntcctcaactgtgcctttcctttatttctcaacagctgtgaaaaccccttctctgctgggctggcgacagcccacaggagatgccctgggtctgggccttgagtcagggcttgttggggtggatcttcatgagacttccattccagcagacccagggaggtctgagctgcttgctgttgttgttcagttgctaagtcatgtccgactctttgtgaccccatggactgcagcacacaggctttcctggtcttcactatctcccggagattgctcaaactcatgtccattgagtcggtgatgccatccaaccatctcatcctctgtcgcccccttcttctcttgtcctcagtctttcccagcatcagggtctttttcaatgagtcagctcttcacatcaggtggccaaagtcctggagcttcagcttcagcatcagtcctcctaatgaatattcagggttgatttcctttaggattgactggtgtaatctccttgctgtccaatgacatcttgtccagagagaacagtgaagacagcttttgcccaccaacccagtggtgagttagggagttcaccatttctggggcagagcacacaatcaagtttcatatcacagttggaaattcatggagggaattcatggaatgagacaaggggctggaaacagcacttttcttaaattacacttttcttaaagataaatagatgtttcaaagcagtccattgatgggggtgtttgtgtggctctgatgaaaacagttgtgcttctcgcctctgggagagccgagctgatccacctgagaggtgcttttccaagtttttgatcatgcatgatgcgatttgtgaggaaataagtttactttcttttcattgtggacttctgggttctgcaatgagctcagagaccacgtttatcagattcaggcttgcttgctgaactccagattcattcgtttattcaagcatgtattcaataaatgtatattgagtcccatctgcacctcagacactctgctcggtatcaaattaatgagacttgactatgcacacgtgacattcacagactcacgttgcaggggactcacagtgcagcaaccagaaaagctttccagggcaaacacttgagttgggttttgaaggaccagtgccagttagccagacagatgggggcaaaggaggggaaccaaggctggctgacatcaaggcccagactctaagtggcaggcatatggcctccaaggatctgtattgacagggaacatctcaagaggggactcaccaagagaagctcttttcctgaagcccacacccccttgaacagcgctaagacttctcttacacaaatgggaagtaagtgaaagtgaagtcgctcagttgtgtcctactctttgcgaccccatggactgcagcctaccaggctcctccgtccatgggattttcaggcaagagtattgcagtggggtgccattgccttctccacaaatgggactgctgctaagtcgcttcagtcatgtctgactctgtgcgaccccatagatggcagcccaccaggctccgctgtccctgggattctccaggcaagaacactggagtgggttgccatttccttctccagtg

SEQ ID NO: 52795 - DNA, 748 bp, Bovine  19866880815227
  misc_feature (1)..(1): n is a, c, g, or t
ncttacctctaaggttgttatgattcaacaatcaaacgaatatagaccactaagcgtaagtactaaatattcaaaaaggagctttttatattactgttacaggacagttatttatattacattatttatgtaatatattacataaattatataaacagtaatatataaattactgttatttatattacaggacatctcaatgtcctgagttctgaaataagagattaattgcactgtagtgagagtatagcattgactttattcatctctcttctgttttccacttcagaccctttttttcccaacctagttacttcaccactccttatagaaaatagatttcagccatcttactaccccaactgtcttcctgtataaattccagtttgtaggtaattttcaaaaagtgtgactcccaagtttaactccaagctcactttcccaaagtacaatgggacttttatttcccttgaactagaaaacttgataactgattcagtctcagatcccattaacttttcagcagccattccgctcaggatgagaaagggcccttctagcccaagggctaagaaaaggtaatttatttggaagaaaccaccaaactccacccatttaagtttttattaaacagagagaaaatgagatcttgagggatacaatgcatttgtgattatcagattctttgaaaaggttatggtgtttactatatgatgtaaaatagtgatcttcatctttgccattaaaa

SEQ ID NO: 52796 - DNA, 2042 bp, Bovine  19866880860664
  misc_feature (1)..(1): n is a, c, g, or t
nttccttgaggagcttccttttgcagccttgggggtcacacccctgtagaggtgaggcagtggattttcaggggactgtttgtgaattatgctaaacttacaggcagtctagtgtgaaatgtattctaggctacaggtcaagcatcttcaaggacagacatctccattagttttcctgtttcttgatgcaaatggaatagtttgggaggttcctgacatgaagccagggaaaaataccacgtgacaatgaaggcagagatcaaagtgatgcttctaaagctaagggatgctaaacattgccagaagccaagagaagccagggcagcagcacagaacgatttctttcttggacctcagaaggaaggaatcattttgatcctgagagatttgtgagtgagtatatttctgctgtttaagctaccctgtttatgatgctttgttatggcagccctagcaaaccaatacaacactcaaatctttttcagtgatggtgataaactagatcttgccgattcaaagcaaacttggaagtcttcaggtgaattaggcttttttgaataaatactcaagtaattcctattttcctctccttctcttctctcctgtctttctcaccaggccgtggccctacatggaggcatctgttctctcaggattctgctatgtctgtttttccctttgttacattggctgtaaaatgttctgtgtctgttgctgaagtgtctattccccatgctttccctgtattgggtcactggatccaacccatttactcaactttaataccctcatcttaaatgtgaggcttggctagggtcagcctcacctgcacctgtcttgagtgatgtaggggcaggatgggataaggtaagggaacactttggatgttgtcctgaacctatatctgaggccggaatctaccagggcaggagatggtggtcccaggacacacctctgccatcccagacctgtcgtacttccactttgccactgctttgaccacccacgtgtcaggggaccttctgtgaggccaaggtgtctgagctttgtggtatcattgcagtaaaaactggaaacattctgaaatactatcagtgggatgaaggttaaataagtgaagattatttgcattatggaatactatgctgccattaaaaagtgccagggatctctctttaccctgaaacaaaaagaactccaagacatactgtgttctagaacaacatgtgtggtatggctccatttttgtgaaaacaaaaaactatatacatgtatagggatacaaaagcatagaaaaccctggatggacacaaatcttaacacaaagtgttaagagcgttgcccaaaagagacatgaattgggagagaagagcaggtatgtgagagaggaggctactttttcctccatgtctttttgtatgatatgacatattaacagaataacattttgacaagtaaaaaataaacaaaccaacccttcccaaagagcatgaactgttctgcgactggcctacctgtcccttttctcgatgattaaccctttcactcttttttcagtctgaaaaggctcaggcatacttgttggcttaactgcacttctctttcactcaggtattgccagcacaaaacgtgaacgaataaataaaggaacagggaatacagatcccaattgccctggagaccacagccggtgctgtcacagagggcttcggcaatccaaaaggaatagaggtgaaccaagtagcaagggggaatcaatatcttattcatgttaaacctgccctaacgccctccattctgtgattcgccccacagacaatcgatctgtttctcttctggtggaacatgggaactctaaaaaatttcatttatatctatattaatttttaagaagagaacttcactttctggtgcaatttcctttctctgtaaaacccatggattaatagcagagtttcagagcgcttggtgtttgactcagctctgcatgctaagtaaacattctctgaggaatagttcttgggtcaggacaaggataataa

SEQ ID NO: 52797 - DNA, 1608 bp, Bovine  19866880862371
  misc_feature (1)..(1): n is a, c, g, or t
ntttttttacctctagttgttgttgaatatttattacatacctactttccttaaagattgaagcagtggaatctattttttcagattttaaaaataatacctgctgtattaacttttgctgaattatattgtgtaacaaaagaccccaatatttcactggcttataacagcaaaggtttatttttcactcttgctgcatgttacctgaagcttggcagtggctctgctcttgctccatgtatcttctgagatttctgagatccaggctggggagcaactcctatttgggccactctgttcttataacagggggaaaaaaagaaagagatttggcagaagtatgttctggctcttaaatctgctttggatgtttgtttatatgccattggccaaagccaaagtcagtggggcaagagatgtttactccagtaaaagtactgtgttacataggaacaagtagagatgatattccttttgacgaaaggtagactgaataattgcaaattttaataaaactgattagcccgtgctaactgaacataactgcagagacatatagcatttgtagtagaattctgccttctgccttccaagatcatcagtgatgatattttggtatatatccaggattgaagccttcttgttgtcctgactttatggtttctttgaaaataatagtcttgactaaattataaataagatctttgtctttttagccatttactcataataacagaagagccctcgatctggctacatttagttcttgctttgccaggtagttctagacttactataatgttcaatttacatttctaaatataaaatatctttaatacaagtttgggtctgatttgtggcttataatattatcactttttcactctgagagaaggtaaaattctgtattgtgggattttataaaggatatagttaagggagacagtgctagaaataataaaagtcaataaaaagttcttatgcagctgaattattttacctaatatgattgacattggggcgtaaagagggttaaccagactccctgttagaatgagaatacctgtgacgagggtttatttagtcctttatagatattttacattcagagcgattcttaagtggttcagatttttatgaaggggatctattagaagggaaaaatggaggcaattttgtataaattgagggagggcatgacttatttgtgagtttggacacagaagggttcttagaagaaggaggaggtgaaagaggcctgggaaaaaattgtgtaacttgtaatatgcctaggtgcaacttggcagagggtggcatgccaatgaaaatcaaatttataagacagcttggtgctgttggtatcatggaaggagtgactggaatgaagcacatctgagttcattttctgttcttattatgtaactgaaatgatgcgtgctttggacaacttaagtcttttttacaaaatagagataattgatttattgcctctaccatgttttaatttgtccctctgttccttgagctgtcacttcctcttttatccaatgtaaatttcatggtccttcattatctgtagcatgcattcacaactcctttcataaacag

SEQ ID NO: 52798 - DNA, 1993 bp, Bovine  19866880916449
  misc_feature (1)..(1): n is a, c, g, or t
nctgattgttttactacactctatactttggaggtgattttcttctatttatggtggaaatatgatatcatggagttactattcatctcttcccagttccatatctagtgagcactcacagagacaaatcagggcttgagttacttttttttgtttgtttatctatttattttatttttttggccacatggcacatgaaatcttagttccctgaccaggcatcaaacttgagtcccctgaattaaaagccagagtcgtaattactagatcaccaagggagtcccttgtttatctatatttaagaaagtaatgagaccctgatgataatgcgaagtagcgtgtgttgtgtctacagctgattgtgagcagcagcctcaagttgtctacaggtgtaaaagattggcaaaacgcatcagaagcattttgtgagaatcaattggctatatagaatctacaacaaagtatagtgcatatttaatttttttttgggaaattgtactgtacacttttttatcagtaaaacttacactaaacttttgtgtatacatatatatgcacatatgttggaagcctggttattaaacaccaacatactactgcatacacatgtttttattattttctgagaagaaggtgcaaatatattgccccattatcacttaatacttcagaatgaatttcctaaaaaataaggatgtggccatacacaactgcaataagtcgttaaaactagaaacttcacattaataatactgctatgtaacctactgatcttattcaagatttactaattgtcccagtaatgttcttttttgctcaggaaataatccagaatcatccattgcattaagttctcatgtcattttatatcctttaacctggaatagttttccattaaaaaaaaactttttttttttcctgctactctgacatcttcaaagagcacaggccaattatttcatagaatgttcttcatttttatttggtgttttctcatgcttccatttggattttgcatatctggtaggaaaaccacaggagtgagattatgtcctttttagtattttacattggcactctattagagaaggaaatggcaacccactccagtattcttgcctggaaaattccatggacacaagagcctggtgaggctacagtccacagggtcacaaaaagttggacatgactgagtgactaacttggcagtatatgatgatatataaataaatgagcatggctgtgttccaataaaattttatttaccaaaacgaagggatgaatgtggcccatggaccttcatttccacacttgacctaggcttcagtgtatagcatttgatagggtggattgaaactgaacgacttctgcgagatttaagatttaaggatacagagtaaaagctcattaactgtaactatctggggactacgtccaggccacttcatttaggttagaattgtagaatatatagagagaatttctacaagtgtatcaggttcaagtttcctaagttatttttagtatctgggagtcagtatttccaaggatgccctttcatatgaaaaaggccaccagaggaccatgtcctttcttcttagctatccccatacttgggtgtgcatcacactcattggtgaggtttccctgtgtgtgttcctgggctcttctgcttcagcagaatctcggggatgggttgagttctagttttaaagcattttccaggtgttccagatgaacgactagcacaaagtgaagaattgagattcttagggacttatcttaatgaaaagatgagaataatctctaattactgcattgattttatgtaaacagattcttgtaaagggtttgcaatattttaaaagttaataagtagttaaattactctttcctaagcctgctctctaaacttgattgccactgctgagcttcttatcaaactattttttcatgcatagtgaaaaacaaagttcagaacagcctctgctgg

SEQ ID NO: 52799 - DNA, 1901 bp, Bovine  19866880998028
  misc_feature (1)..(1): n is a, c, g, or t
ncacattatctttgtaggatgtattcttacaagtgcaatttatcctatggggataagattctttaaatttttcatagctcttttgggattatataattgcatttagattgaacttccaggagtgaacgccctccctgaatctgatggtttgtttgggggcttggtgagcatggagggactgtagtggagatgcgggtctgtttccatctttgcaatggaaacgatgccttctcccctactggctgccttggacatcactgccctgaaattcagccagcatctgggtctggggcattgagcttgattgtcctctggcctgtcctggccttacccaggtgccagctgctgaggtctcttgtgagctgtggcctcccctgctccccacgcgtgttcatgctcagttgtgtccaactctttgcaaccctgtggactgtagcccaccagtttcctctgcctatgggattctccaggcaagaatactggagtgggttgccatgccctcctccagggaatcttcctgacccagggatcgaacccgcatctcttacgtctctttcgcctgcattggcaggtagattctttaccactagtgccacttgggaagccctgtcctaattaagtgtgccacctccccccgacacccccagaatttctgtcgattccaccaccgtggcctaattgagcgctgaaagccctgagtgtgtcagctcctgctttatccccagagtgtcattaacacatgtttctaagcttctgggatgggtgagccaatttgaagatcaagcaagaaagaagagaaattagattaaatctttgctcaaaacttggaactaaacccagggcaagacctactagaaagtgccagggagaggctatgtctgacaccctggtgtgctgatgctactaatctctgctccctgtcagctgctcagctgcttgctgaaagggcatagagacctttcttattagagttttcattaaagaaactcctagaagacttcgaggaaatggtgaaatgacaggcagtggggctggggacccctcctgaactcatttatttccctcactcttttgttgtgaggattggagaagatcatgtagagtatttggcatgtagacattcagtaaataatagcagctggaagtagctaatatttattgcaggcctgtgcaccaggcactggttaggtattttacatatggtaagtgattttatccccatgacaacactggtactttttcctcagttttacagatgagggaaattggatgttgctgttttctcaggtttactgatgaggaaaatgaggcacaacaatataaagcaattggcccaaggtcacacagatagtcagggcaaggaaaggggttcaaggctaggcatccatctccagagccagggctggttctcacgaaacaatgtttcctagtgaagtgcaggctgcctttgaattctacagtagacactgcaatgcctcctcaacatccattttctcctgtttcttccttactgaaccccaatatttttgcagagtcatgaaagcccaagtgaaaataaaacaccacccagattccctagcaggcaggggggacatgtaacaccgtcctggccactgagatgtaagccagtgggacaggttcagttggcagtcccctccccccatttgctgcctgatcacaattgtgatgcctggaagcatctagaagccgtcttgtgagcaaaaggatgaaagccacatgccaagaagaaagacagggggatcctgggatgtcaacagcattgagaaaccagccagcagtcctggagtgctcgcatctgatccttcagggaaaatcatcccctttgtagtgaagccactctatgtctggtttctggtggctgcagtcagaagcaatcatag

SEQ ID NO: 52800 - DNA, 751 bp, Bovine  19866881056825
  misc_feature (1)..(1): n is a, c, g, or t
nctgtgtctgactctttgctaccctatggactgtagcctaccggctcctctgtccatgggattttccaggcaagagtactggagtgggttgccatttccttctccagaggatctttctgacccagggattgaacctgggtctcccacattgtaggcagatgctttaccatctgagccaccagggaagtccttcctgccattatcaaattcatttttcccatttttttatacctaggaatatctctttttctattcaggaagtcattctctcagcttgctagagagatacttcatgatttttttccctgaacatggaacccagaagaaaggcttggacttgtagttctcagctgtctttcaattttctttttttttattggtagatattagtatgtcctgaccgacagcaaaagcttgagaaaagttattgtgtgggaaaaaaagggagcctctgttagcatataaggcagcagcagtcacatcctggacgaacttacttgtaacttgaacaggatcctcagataagtagcaacaaaagatcatcacaattttttagagagggttggaaggtaactctgcaagttagaaacagtggcaaaggagcatgagaagaccatatacaccagggctggccactcattcgtcacctgccatcttacatggtcattatctttctcagtcactgaaatgcatagaaggcaatgaggcagaagagcagtggctcaggagtcacagcctagcaacagcattt

SEQ ID NO: 52801 - DNA, 1287 bp, Bovine  19866881085564
  misc_feature (1)..(1): n is a, c, g, or t
nctgggggaaaaggagcagtcataaaaagaaatgaggccatggacccgcccgaggtcaaagagagtcagcacatgctgtggccttttttggatagatgacctataccacaggccaggatagctgcttagcctcaaatgctctctgacccagtactgggggcttccttctaaatcacctgacagaaatgaccatgaactgaaaggtccaagccaacatctgggagctcaaaagggctatgaccacttaggggctgggacaaatattcagagccatagtctccccagtgaggggaagcaagagcagtgggcaatgcagtggaacagagacgatggcagtgagtcatgtgactcatctagggtgaggctgcccaccccccaacaagctgggtcactagccttctgacaaggaggcaatcagcgcaggtcccagactttcatcctgtaacttgttctttagagaagagacttctgccaagtggcctagcctcgagcaagttggccaactttattcagggttttggctagcccttcccagcactgggaggaaatgggagagactgaagaatgtggattaagcacctccagctgctgacatgttgctgacagtggcagataagatgggatgagtggcatgtgctgaatgcaagctctaatagcactcgactcgactgcattcagcaagctggagttcggggtacttgaaattatttatttagatccatcagccctgtttgggaagcctgattagtgtcagcagacgcctgtgagtagcccagggaaccacagagtaaatgtgtcagggctcacagttgcctagcccacgcgctgccgcccctgctccaggcagttctgaatgcacttcctcctcttcctcctgactgtggaagagtgaaaggggactgtcatagtgatccaggcaactctcgaacaatccaaaggccaggtttgttattaattcctgaacttcccaaaggagggaaatacataattctttatgaacatctaaaatggaggctggagggacttacctggtggtccagcgtttaagattttgccttccagtgcaaggagtgtgggtttgatccctggttggggagctaagatcctacatgtctctctgctgaaaaactagaacataaacaacagaaacaatattataataaattcaataaagactttaaaaatggtccacattgatttaaaataaaatggaggtcagagcaaagaacagcagcactctgacacagcagagcctcggtgagtagggaaagcaatcatgatgctggg

SEQ ID NO: 52802 - DNA, 736 bp, Bovine  19866881086438
  misc_feature (1)..(1): n is a, c, g, or t
naaaaaataattggtgaggaactggagaaagattggcatgaatgttaaaatgtggggctgctatgcccttttcagttgtgtccaactctttgtgacccatagactgtagctcacgtgggattttcccagcaagaatactggcatgggttgccacttcctcctccaggggatcttcctgactcaaagattgaacctgcatctcctgcatttgcaggcagattccttaccaccaagccacttagaaagccctaaaatggggaaagtggttattaaagatgtcagaatctataaaggaaataattgatgagccaggagaaatcacagaattgaacaatgcagaaatatgcaagagtagacatgaacaagacgttagacaatcaaagatgtgacaggctctgcctgctaaagccatgttgaagagagtgttccagtggggaagaacaactgggaaacagatcttacaactcacaggaggtcagcaaagttgtttaaagatgtgctatgtcagtagtcataaaaattgcactaaattacacaacatataattaaagctaaacattcagaatattaaggctctgtcacccttagacagatggtagttgattctgattataccttgggcactgaggacctaattagttttttcaagaagatgtacaggtgtcagtcaattctgggagtcagtgctgagcaggacagtttaatggagacactctaatacttgaaattgatgagg

SEQ ID NO: 52803 - DNA, 1050 bp, Bovine  19866881117732
  misc_feature (1)..(1): n is a, c, g, or t
ncctgcctggaaaatcccatggacggaggagcctggtaggctgcagtccatggcgtcactaagagtcggacgcaacttcactttcacttttcactttcatgcattggagaaggaaatggcaacccactccagtgttcttgcatggagaatcacagggacgagtgggctgccgtctctggggtcgcacagagtcggacacgactgaagcgacttatcagcagtagcagcagctgtaaagttccaactaaaggaaacttgctctctcattttcctatggctaattgttctctaaacttcactccaaaaccatctttagtctagggcaaattttctccccattaaagatagacagtcaggaagcatgtatttgtctcagagcccagttatacctatgccccctagggatcactttagtacatcgtgggtggaaatggcaaagggcttcaagcttaataatcatgttaaatagtggcattaaacagtcaaagagaaaaatcccaggaccccaggcccacagatctctaagggatgaagggcccacttgggctgcctggcaggtagggctacgcagcctggattggcctcttctctcccgaactgctcttgcctcaggcttcccagcaaatattcactgcgggctggatgctaatgcatataacatccctggtgagcatgttatcagcgctccttctggtgagcacttagcagccactggagcagaaatccaggtacaaacaactgacaggcagcaaaataacaggaatcagccctctctgcttgttctaagctctctctcgaggtatcagggttgttgcatcacacagcagagggaacgcaggcttctaaattaaatgagacctaggttttaagtcttccgatcgtggacaagttgttttggtatctctcagttttctcctagatatagtaggatgataccatgtaactcctggagagttttgtcaaatcaacaggataccagatgtaagtgagtagtatagttactattcacaatatctattcccttccatagctcccctgccccccagttcc

SEQ ID NO: 52804 - DNA, 1101 bp, Bovine  19866881130900
  misc_feature (1)..(1): n is a, c, g, or t
ntaattgcattagaaagaaagatgagaatgtaatttggagacggaaagaaaaaagatttgaattcaaagggaaaaaaatgaactattcacaaacttaaagggggaattgggagaagccagtgacttcacagaggcacctggaagctaattcaactggcaaagtgcccctcccgaacccgtgtatttttatggaactccaggtttctagaagaaatgtttgtgaaatgctgcacccacagttaaaacagcaatggcagcagttgtgctgagtgaggccaaagcatctgataagaattagagacacctaagcaaagcaggtgagagcagcggagaataacctgctcctggatcagatgcaacgcttccaatattccattgctacaaatcccacctacagatctgaatgcaaatccagacaccttgacttactcaattgagcaaataacttctttgagccttggtttcttcatttataatagtattacctacctgagagggcaactgtgatcatcaaatgtggaaagcatttaaatgttctacctagcaaccagctctcaataaatcatggctagtaattataattattattgctacggttgtcaggaactatagcactatttgggtcaaggagagtaactttttgcttatcttgcagtttaaagacatattttcatctgttctctgcttcaacaatgcacaatcataacatcagtgtctctctttttgtccactgacatttccctaaaccggccaacaatgtggaagtgtctgctctttaaggttcacgatttctgtgtcagctatgagtctgctatccaagagacaagcctctgcttttaaatttgagggggtggggaataaaaggtaagagatgaagccctttatactgtcttatgtcttttgaagtttgctgtctgaagttgctttagctctttgcctctctctctccaaggacacacaagaaacacatgggatattctagtctggcttaataataaagaccttttgtgaggccagatacaaagcactgctactcctgaatgtgacgtttgtgctgcgtgttcaatgcctgtcctgttaaacatacctttgagcaccagt

SEQ ID NO: 52805 - DNA, 1495 bp, Bovine  19866881140849
  misc_feature (1)..(1): n is a, c, g, or t
ntcttctcagttggaaaatgagggtaataataacaccagaaggttgttatgttatgtatctggcacatagtaagccctcaataaatatttgttcttactatttttattattatctttattataaaacgatatatctgtcctttgaggcagcacagtatagtggtaacgagaatggactgggaacatttaggctgcatctgccattcactgctgtgtgatcttgggcaagttaataatctttctgaccctcacttcccttatctgtaatataaggatgatgagggcatctacctcatagagttgttgtgaggattaaatgagacgataaatgtgaaatgctttgatgagaatctggcacaaaatgcttatacatttgttgttattattgttataattattattgcactaattttaatttttaggttgtacactgtttgggagtgaggggattctatagaaaagttgttacttttccacattagtgactttgttaagataacagaacaggctctgaagatacagtcctgtatttagttgggtgacatgtgaggtggcctgcaagcccgcgaagccgaggaccgaggaccgtggagagcctctgaaatggctcatctgaattaaatgggatgactttctcctccagattctgtgtgggaggcttatacatttgctttggtaatgagtttgctttttcagccaaagaagaggagagaataataggagagagaaggcgtgagaggcaatcatagaaacctggaggctcagatcctccaaaatggaaaaggagcctgcatttctgcagaaacaagagagaaacaatgaacaacctcaaagctcattatgatttaagtttgcgatagcagcaaatgatagccatgtgactactgaagcctgtttgaactgtaagcaggacaaagggggaaatgaagtgtattagcaggagtgtaaaagataacctcctcgcttacaggctgtgcagatgttagtgcacggatatgctgttaaaagctatgaaatctctctaaagtgatcatttccctttctatggcaaatgatcgaaaaatctttgttgtgtatttacttgaacaaaattcttagagccttttaagatgcttgctctctgttgtgaaaagaatgcaaactcaagagtgacggggttaacaggccagaagccatgatgaattggagggcacattgccttgcattgctcaaaagagtaaagtaggaattcatttaatatttttttcctgaaaagaagcatttctctttgtgttgtagaaggttgaggaatctgattgcccaacagcgtcagtttctttgcttctccccatgtctggtattatcagacatgattatcattaggatcatctttctttgacttttcccatctgagaagagcaaattatcttcagcatcgtattgtgagatggaagttagaatggaatagctagacattagtgtttgtctagattaatggcataaatggaaatttaat

SEQ ID NO: 52806 - DNA, 861 bp, Bovine  19866881150651
  misc_feature (1)..(1): n is a, c, g, or t
ngctgcttattctaaatgactaaatttctgacatgcataaggccaagcacctaactagcatttccacccatttcggaggagaaagagagtgaaaacagcactaaaacaaaggttggaaagattttaattaacacaaatggctgtgcctagtctttaaatctatccaaagcaaatggagtgaaagccttctaatccttcagcacttcatctggccttgacctcagaaaaaagagcctccctcttgcatcatcaaactgacttcctttagctctttgttgttctgtggaggtctttgatcccagaattctctaagacaggaaaaaacagaagaaaaaaaaaagacagctaaaaccccaagtttcctggcactcactttgcaaatcccatgcaaatattaaattaaaatgtacattaacaaatgcattccaaaattctatacctactgtctattcaagcctttaaaatgactcgaaaaccaaagtaattctcacctcattagattcatttttgcaggtagttgctctgctcatagttgtagtgtccaaggtacctgatggggaaaattaggaaaatgagagctttctttgagtaaaaaaaccctagttttatttttagttgcaagtctgttagcattcagcccagtatcatatcattgtaggactgactctggtattaacgttgatacggattttttaattgatgttttataaaataacttcatcaagcaatatttttaaagtagaagtggcaaatctttttttttttttctcttgaaagctcacgttccacagggaaaaaaatcatttgaggattacatcaaataaaaacaattttattttgagagcctaaaaaggatacttc

SEQ ID NO: 52807 - DNA, 1110 bp, Bovine  19866881161403
  misc_feature (1)..(1): n is a, c, g, or t
naaattcttagcactttgtcaatcacgcatgcttgcttgctaagtcacttccattgtgtctgactctttgcaaccctatgaagccctctttgaacccgtccaggctcctctgtccatgggattctccaggcaagaatactggagtggcttgccatgccttcctccaggagatcttcctgatccagggattgaacccaaggttcttacatctcctgcattggcaggcaaattctttaccaccagcacctcctggaaagccctgtcagtcacacagtaagccctaataagttactactactattttactaccagaaggtggtagtttgggtaatttcagcaaatcatttaactctctatgctttattctcttcatctttaaaatgaatgggtagccatatggtcttgccacccagaattggaaagaaaaactaattagaaaaacgtttttaggtcttagctgttctaactgtgaaacactatcaacttctgctgttcatcttctgtatctaaaaactgataaggaaatctactctgcatatttttatgtatgtattaatttagttggaattccaaggccaatttaaactttcaatttggtgtatttatatttctattgtagttgttgaaagagaaatttcaatatttaaaatttattctcctcaatataactctgagttttcatgagtggttttgtttttttactgagaggggaaagttatcttaatataatgtctccattgttggccaagcctaaagaaatactagtagcctgccatactcttcctcttacataccagttaggtaagaaaagaaaatacatttcagaatgtgtaaaatacaaaggagattcaaatactagtcccataggtccttactattagatcccacttagagtggcaaggaactagaccagttaatgcagctgttgtgtaagagaagttcaacgtaactgaactctcagttattgaaccttaagcaggcattgtgttaggtgatagagaggcaaatgaatttaaaacaaaattattgccctcctagaatttacagtctgataagaaatgacaacacagcgtgataaatactataaaagtgacacgggactatcaagga

SEQ ID NO: 52808 - DNA, 1503 bp, Bovine  19866881213576
  misc_feature (1)..(1): n is a, c, g, or t
natcgcgtccaactctttgccatcccatggactataaccctccaggctactctgtccctgggatttcccgtgtttttcactttctaaaactgtgaaatctttctagtgctttgaaatttacataaactctatctggctagtatcactgtggaactgagcagggaccccatgggaaacttcccagaacacacacctccccttccacccacaccatgccccccacttgcctcttgtttgtagaaaaactactctcccaggactcccctgtgtcacaaatgattagaagaatgtgaacatgtagtagcaaaagttagcatctgggccaagagaactggtaacatttgaacaatagatcagtcatatagtagaggcacagactcttttgttcctctctgtaagacataaaaaactgtgtcaggagcatgttgttgagttgttttgcaaatattgaaacctccaccagatggagaagtaactgaataatgaccacatactcatagcccctagaccaactggatcctgattgttggtgatgttaacccctaagacatcaccatcaaccagtcagagattcctgcccaaggtgagcacacaacctgcagctttccccctcacattgcctttaaaaacgtttctgaaatccatccaggagtctgggtcttctgagcattagtcagccatgctccttgcttgaccttgaaataaccactgcactgtttttcactaccaccccatgatgtcaggagcttggctttaccccagaagtgggtgggcagacctatttggttcagcgacatttggagcactactatcagggactggtggtatagagggagagatatagttaatccttattatctataagttgtgtatttacaattttgcctacttgctaaaattgatatgtaacctccaaacccatattttgagcactttcagatatgttcagggcggttaaaaaaaaaaaaaaaaaaaagagttggtaaaatccaccttcccagctgatgtggaacaagggtacttgctggtttctagtttcaactctcatattttgaagaagtgtccttttgaggtctatttagtgctgcattttatgcatcttttgtttgtgtcattgatttatctgtttaaaattacccccaagcatagtattaaagtgctgtctaattttcctaagtgcaagaagactgtgatgtgccttcttgagaaaatatgtgtgttagataagctttattttggcatgaggtatgtggctcttggccctgagttcaatgttaatgagtcagcaatatatattaaatgaagtgtctttaaacagaaatatgcataaaacaaggttatacacaaggttgatgaaaatgttgtgacagagtctcacagcaacttaaatctgctttttccctagaagcaatgagcagtatttgctaaatagtaacttcataagtgacacagacagtaacgaaactgcctgcaatgcaacagacttaggtttgatccctgagt

SEQ ID NO: 52809 - DNA, 1150 bp, Bovine  19866881228892
  misc_feature (1)..(1): n is a, c, g, or t
ntgtcctcttctgaatttagttttgtggtcggcaggctccctttgtgtttgcaagagggtcaacagcagcgaccagggtgacatgctttctccttcatgtctgatgaaggagagagcaaaacctctgccccaagagttgaatgaatgcacttcccttccatctgtttggaccctcttagaatacgtgcccacccatgaaccaaaagccagggtgaaatgccatgatggattggcctagcatgtggtggactcagtgtcaggaaggatttaatcgtataacctctgggcactttccagcccatacctagccctcagtaaaagttatttttcctaataatgaagagagtattattggggtcaattgcacttatacaccagactgtgtgtcaaatgtcctctctaacgtttatcttcagcccttcctttggcccaggggcacaatctctcttcccatcagaatggatgacaaggcagtacacgtgctgggatggtagtcctgggcttgtttggtacatgagaatcagctccatggttatgcggaggcagaaattaggacatgtgaccaggaaaggaatgtggagtgtgggctgggaaagagtaggaattgggaatcgggagcagaaacttcaaagtgctatcgattttacttttgctcttttctgtccttggtactgtttctaccttcacaaagactcattgcgacaagaagtgtggggagaggctgttacagcaattagagggacatttgaaacaactcatccatccaggcatccttagaaccccattccatctttatgtatttggcaactatcgaggaaagaccagaagtgaggctttcacacctatttagcacctggttaagcatcacttggcacctgccaaatgggtctctagtatttagggggaatttgcactgattactgtactaattaagcagaagtcattgctactcacaatcattaggctaaatcggtttctgggggaaagtcttgataagcagctgcccaactgaaatgggttcgaaggctccccgtgtacacaggcttgtgcactggcagctgttcacacgttgtcagcaccagcaggattcttctgagcaggttcttgatgaggctgaacgcagggaggtggggtctcaaaactagggaca

SEQ ID NO: 52810 - DNA, 973 bp, Bovine  19866881235487
  misc_feature (1)..(1): n is a, c, g, or t
ngagtatgatggttatctaccttattttagttctcgtttaaagaaataaattcaatattgtttcttgatttgagattctactcaaaacttggctgctatgtgtctcattgtattctctgacctgacacctaaaagaaggttactgctcaggaccagctgataggaatgcttataaggaacagtttaaaaagtgcagcactgtgtaaatgctaaacaccaatgagaatgatacagtgtgggagggaaggtgtgttttcctttgccaaacgaagctgtgtacagttcgacctccaagaaagtcattttgttttgtgggtgtatgagcaagtgtgcaatacatttgaaccatcagaaaatatagatttttatcattttcagcttgaatttttatctcagcaacttgaagagtctttagatatcaagtcagtgacatatttaaatttgtcaaatgaagggcatttttgtgcaccaaatttttccttctatagctgagcttggatacatagatagatggaaacacagactttttctcatcattaaccaactttaaaggcaacccagtttaataggctgtagctgagtgctcccagctccatcagccgctctctgcttgaacgcaggcaaaagtaattcactctcagtgggaaacagaaagggcatgtactattttcctaagaaaccaaagtaaaagctgtgtgtctgacaggcagtgacattcccctcccacccccagtggctgctgggtagcaggtctgttgagagcatttcccattgttgtcactgaagtgtgtggatttatctcctggaggcactactccttgaacagtcttcctgttgtgactgccctccctgtaagatatcatcataattttgcattcagttgttacttcctggaagagagtcagagaccataagaaagagagagcaacttgtagccataccccaaatatgaaggacataaggatccaatcct

SEQ ID NO: 52811 - DNA, 838 bp, Bovine  19866881286043
  misc_feature (1)..(1): n is a, c, g, or t
nactttttccttaatcatggctttctttcccccagtttttactagaataactctcttattctgccaagtaaatatcctgtatgcctaaaaatgtattttaccttcctacttgattgacagtttggcagatacagaattctagatcagactaaatccagttcaaaataattttccctaagaattttgtggcattgctctatgaacttctatcagccaatgttgctgatgccaactgatatttgttacaatgcagtcttcttgatttgctggtttgtttcactctgaaagcttttagggtcttcactttatcctgacctttctgagtatgattagatgactcttacgtgctgatctttttttttttcccacactgttcaacatttgaagagccttgtcagattgaagacttgtacctttcatcaactgttgttagttccctcacaattaaaacaaaagcaaacctatattgtatagtctaaattctgtagctaccattaggcatacgttgcacctatattgattattctttcatgttcttttttttctcatgttgtccaactatccttttgctttatagcatggaagttggctttgactttactatcaaaatctgctattgattttaaatttttaacataattttttattacacaagttaattctttgacaattcatttattacatcattctgttcttctcttgaatacaatgtcttctcagttttctgtgaggacatactcagattttctttttttagttatcttttgtttgctggggtttccctggtcgctcagatgataaagaatctgcctgcaatacagaagactcaggttcaatc

SEQ ID NO: 52812 - DNA, 795 bp, Bovine  19866881291187
  misc_feature (1)..(1): n is a, c, g, or t
ntccccctgctttgtggttcccattgtcaggaatacaagaaagttctttctgatctggatctctgcttacctctccagctatacatcttaacataacttttcttgaaccagaagaagccgtaaagagctacttgcagttactcaaagacatcctattttctgtatctttgcagcttttgtatctctaactccacctgtctggaacagctctcaacacagccttgtcctggcaagttgggtaggaagcattctcatttcccccacatgcactaacacatcacccctgcctcctctacactcatcccagccccttgcactccaaggcctcttttctggtgtatcatccatattgaagggccttgaagaaggggttgtgtcttgttcaacattatccccggaacctgccacatttgggaacacagtgggtgctctatgaatgtttattgactgagtgactgagaaaataagtaaataaattaagatgcacatgaatcatagatctgagagcttcttcatcttgtggagtgaagaccttttagttcctcacagatttcctcctctcgcctatcatctacaaatgggttttctgtccttatgttattggtactatctttaggtcctataaaaatatctccaatttcctttactagctgtcttagagcaataagcttctcaagcttcccctgtctctaatgactgccatatggggacatgatacgctaatgctggtttcaagtgagctggagttatcattaaaacaaactgaacttcctccagctcacctcccatttttaa

SEQ ID NO: 52813 - DNA, 864 bp, Bovine  19866881296913
  misc_feature (1)..(1): n is a, c, g, or t
nagaagcttaattatggttaaaaatctaacttatgtttcctccttcagtagtcatttattatctgtctttttaaactactatatgggaaacctgagcacaaaatggttgtttttctcctccatagttattggggtgggtaatgggcaattactggtggcactcggctgctaatggcaaaaatagtccatatttttaatacactgttgctggttttgagaatatttttttctcctaatttcaggttgggtgggactatatcagcatacaagatagtaccagatgaaatagaagaaatcaaggtatagtatggcatttttcacctctacaaaaacttagtatcttggagggaaggtgggcaacaaattgtcttttctttatactattgaatctttacttgtgttgggatatcatttaactcccagttattctgtttgaattaaaatatgcatatcagataatcatcatcagatttcatctaccatcatcaatacatggtaggaaaatcaaaaaaggaaccctttcttgtaaaactcattgaaaatttacttaagaaagcactgtatataagcattattgtgcataaagtatttctttatcattttaatttctttttcttactgtctctcaccagttgtaaataatattagtcttctaataaatttttctggctcctttgataacacagtaggccaatttcaatttaaaattaacagtacaataactgaaaaattgaccttactctttgaatattacagcatagtcacatttttctgtctttacatcttactaaattctgtggattattaatattcttgcataacgtgtggcctttctctaaaaagcagtttaaaatctaatgagaa

SEQ ID NO: 52814 - DNA, 509 bp, Bovine  19866881303786
  misc_feature (1)..(1): n is a, c, g, or t
ngcaagaatactggagtgagttgccattcccttctccaggggaatcttcccaacccagggatcaaacctgcatctcctgcattggcaggaagattgttcactgttgagccaccagggaagaccactcatgaccttgctactgcttaaaaaagactcaactgtatttcaccaaggaaattttatgcaagccaaagcccttctcgttggcctatgggtacctgcggcctgtctgtgcaccaagctttttccataaggaattggttcccaagaactgcatctaaaaaataacttgctattgattatcttcctgtgttagagaagagccaaaagacatcaaaatcttatgaccaagagacataaaatgagcagatgctctttgctctgggtcattactttcttcagcctgcttaaggattctgtaaattaccaaaaataagtgatgcaaagacaaagtaaggttggggagtaaagctaaccataaaagggctactctacccagcacacccctg

SEQ ID NO: 52815 - DNA, 1100 bp, Bovine  19866881341416
  misc_feature (1)..(1): n is a, c, g, or t
nccctaaaattgattctgtgaaataggcttttaaaaaatgtcctcttcaaggagaaaatataaacaggggagggtttctagctcagaaaacacaggcctatttggagacccagtttgtttcacttgaccgcacaggaggtaataatgcccgttggcacagtgcagtctaaatctgtttccatccacattaatggaccagagctctcaaagattcttagaaacaatgacacaagcttcagttttgaatgacttggggagtgactcggctatgacatgtgcacaactcatgtgtctatggtggtgatggtgtgttagacaagcactgtaacacgaatttcttttttcatcttgtgtcatggttcctccagacttccctgatggctcagacagtaaagcgtctgcctacaatgtgggagacccaggttcagtccctgggttgggaagatctcctggagaaggaaatggcaatccactccagtatttttcctggaaaatcccatggatggaggagcctggtgggctacagtccatggggtcgcaaagagtcagacatgactgaacaacttcactcactcactctcctccaaactactaaaccagaatatcacaattcttttctttggctgtgctgcaagacatgtgggaccttcgttcccctgataagggatcgaacaggcatcccctgcagtggaagccatggaagcgcagagttttaaccattggaccgccagggaagtccctggggtatcacaattctgcatctaaaaactttcctatgactgtatgaaatctgtggattacaccaatttagacacacacacatatacattttaaattatccaagccttctattcactatcttcttggcaacccactccagtattcttgcctgggtaatgcatggacagaggagcctggtaggctacagtccatagggttgcaagagtcggactcaacttagcaactaaacctacctacctacctatgactgtaaacagtaaacagccccaggcagagcacttctctgcaacaggactcgtttgggggtcttgttggggaaaacatctatttctgctttattgactatgccaaagcctttg

SEQ ID NO: 52816 - DNA, 1186 bp, Bovine  19866881419799
  misc_feature (1)..(1): n is a, c, g, or t
nttgttgaagaagatttagggagggtagtcagtcttttgcaatgttatcctaaaagaagtttttgcagcatttggatcttcagaatttattattcaaaatatataatcacctatgaggtcaagaaccttgtctgataccatgtttatactgtccaagcacctagctagtgaaagatacatattcattccttaaaaatcctctgaaatgatttctccaactttgaggttttcttgctatcactgattgcttttcctgtctttccctgaaatatattaattactccctggcccatggattcccctcctcaacccctccagctcctggcagctttgttctctttgctcatctatttctgggccattccgttgcctactagagttagcctgtaataccatgcttgccagcaggggctgccatttgccataggatttgctaattttcaacattccctaaatctgagactccagattgtgtaaaatagtacagtgcctaatttatcaacttggcaggtttgaaatgctataaaatcagttacttaaaatgagtcaactcgtaatgtgctgcacagttttaatgagcagagttccactgctccattaagacaacaggagaccacattgagaaaacaagcagcaagattgtgaggttaagagaatagcaggaaaacctgcttcttgcccacaagatcccagtggggacaatatgttcaaccaacaaatgactttctccttggcaagtaaaaaagactcatctttcatatctgtccttcctctccatttgcatacaagatcagccctttattacctcctataaaaattactccagttgtcttaagtctttgttccctgcccctaggctctgcccactccaaaccatcctgtgcatttgtataataattttcctaaagtgatgcttgcttaaaaaccttcagtgatacccacaaccaagacagccctcttcaacaggatactccaggcccttataatccagtatcaggttacgttccaactttactttctattattcccagattctccactttgacaaggcaggggattttgttcttcaccacagattaagctcattgttgtcttaggagctttgtgctcataatctacacacctgaagtgcctgccttcttctcttaactccttagtcaatgctattgctagagtaatttcccag

SEQ ID NO: 52817 - DNA, 1205 bp, Bovine  19866881483480
  misc_feature (1)..(1): n is a, c, g, or t
ntgaatctaggagcagaatcttagcctgtttagtgtggactttgcaccttcccacggagaaggcgatggcaccccactccagtactcttgcctggaaaatcccatggacgaaggagcctggtaggctgctgtccatggtgttgcaaagagtcggacatgactgagcgacttcactttcatgcattggagaaggaaatggcaacccactccagtgttcttgcctggagaatcccagggacgggggagcctggtgggttgccatctatggggtcacacagagtcggacatgactgaagtgacttagcagcagcatggtcaccaaagagtggaccatatagtggtcaggtgaaaagaaacactgggcacactggcagggaaggcctctaggaaagatttattattcattccacaaacctctacttagtgcacgccgctgccttcagccacagaacagatggcccgaggcaacaactcatgaggactcttccaaactggaggattccctgctccctgcaaatgacaaatcggtggcttctatacacacccatctgccgtgatctggagcccaaatattccctctgaatcaccagcttggggagcaaatcactaccaatttttctttctgtcaacaggagctgctgaataattatgcccaattgacacaggcagctccaattgccttcagaatttggcctgaagcccaattatatttctctaacttgtgccacagcacacgaacagtacaatttgtctcacttctttctcttcctttttagaatactcaaaaaaatttttggctcagtgaaaccaaccaagcatgttcttcaagaataattttaagcatgatctgtaagccaagttaatatgatatatactctgggagaaattcagttgaaagcacctagatatattatttttaaattatatgcacataagtatagtatactgtacacaaataattttaaaatgctgttgctaggttgagtacaaatcagccttgtaaatatgcacacacacacacacacacacacacggtcccaaattcaccaatgagctgtttcataaaaactatttcctaagctggttgttggaaatttagactgtatgtttacagaaataatgtcagaaatggtgggcaacttcccagagttatctccaaaaacctttctcctagaattcagagaactacgtaggacgatcaggtt

SEQ ID NO: 52818 - DNA, 748 bp, Bovine  19866881647514
  misc_feature (1)..(1): n is a, c, g, or t
ntgtttttaaaatagtcttttaaaatagattcccatttttatcaactatctccattctttcataaacttctaaagattcttttctttcatgaaaatattgacaattgctgttttaaagtctttgtctgcttatttcactatctgcatctgtgaccttgcttctattttcttgtttttgtcttgattataggccatattttcttgtctcctcacataagttgttaaggaaggaaaaaaataaacaatgaaaatagagatgaaaaggatggttattttaatagcagttcaaattttttttattatacactgaatattatattttgattctataaatttgaagagaatatatacctttttccaactgttaggccagttgagtgaggtattgacatttcaatttaattaagaattgagctgggtttaattagggtcagtcttgattgtagttctagtaatattttagtaagatttaatcatttctcatttgttatccttgcgctactagatttttgactgagagactgtcaggcttcttctccacagtcctgaaagactacagaagtttcagttctgttctttggtggttttgagattggccctttgatctcttgcttcacactgcttcagattcaggcagtgttggagacctgccacgtgtttgcttatgtgagtctcctttttctagcaggttttctcccaactaccatgaaactaagggaaatttatctctgcaattcagtgtccttca

SEQ ID NO: 52819 - DNA, 1177 bp, Bovine  19866881675142
  misc_feature (1)..(1): n is a, c, g, or t
natcccagaatgcagtcaagcccatctgtttcctctcctatattaacttatttgttgcagtaaaactccagacagtcctcagagagatgcagttataggaaagaaaactgattatgagggaaagattttagggtcattgagatttattcccccgatatgcaaagtctgtgtaatgtgtgcagtagcctgagatcaccttggcataaagcgtggctcatgttggagtagctaattttgcagcctgcacatgtggggaatagtaaggaagggattcccatcacagaaggtttaacaatcaggagcttaagatattgcgatggaaatgaggccggttgtgcagcattttaactgagcattactctggagcttgtctccaagtattaaggctctcaaaaaatattgatttggatccaaatgaaaagaaggatttaacatttgccttgttttctgtgaaagtcaagataaatttacaccagcaaacttgaacctgagttagactgtgtgtgtgtgtgtgtgtgtgtgtgtgtgtgtgtatgagagagagagagagagagagatttagttgatgaagaaatctgacagtagaaggtaaataatgatagataattattgatttactccacattagttatattaatttatggtaattcttcattttacttgcaggattaaggggacaggggttttcatttctatttccttctatctgagaggtggtgttaggtggcctagtccccgtagagtggcaattcaaatgttataatagcctgcttcccagcacatagtttgtgggcagagttgctcccccgccactcctgtctcctagagagcctccagacccagcaggtgaccactgatggatggtccccacccagctctttattgaagtctcacattgtacacagaataggtgagatagctgatgcctcagtcagggtggacagctaacaggtcaatagaaactcaacctgaaattgctgtcacagcagcttgttacaacttttggctttgatgtacagctacaatactttgtaattcagcaaatgagatgcttcaggactgctctgttgggtgtagctgtaaccagacgtcaggtgatctggagcccagttccagcaagagcttgtgaccttgggggatttctcaatgcttctagactatttcttcatcgccagaa

SEQ ID NO: 52820 - DNA, 1026 bp, Bovine  19866881705373
  misc_feature (1)..(1): n is a, c, g, or t
ntgaattgaatgcctgatgttcctgaggcagaggttggcaggccctacgctggggatgttgtaaatagagcgtccattggaatgtgctcatctttgactttcttcaccttccaagttccataattttatgcaaccaagaactagatgctatgagagttaaatagagggacaggtgacttcagttgtagaaatccaagttggggtaaataggttgtagcccaggaatgttaaaagccccacaaaggaaacagttggagtgtgggtttagcaaactgtcttcaaaagagagttgagagctttttagccatgatctcaaaactgggtcaagctagcacttgtgaaatattgtattattccgaggcacagagaaaccctggtaacgttccaaggtcatcaccttggaaggcaggatttacccccaggcagtatggttccggagtcatgtgagaaaaggctagaaaagtcagtgcaggatctgctcaaggagggaggcacttgaaaatcaaacaaaggggcttgggctttctttgtcaggtgaccacaacctcagtgatggagggacacagtaggacaagaacaagtttatagaaggatacacagtgggagggaaggggccttagtggttgagaagctgtcatccttgctaaactgtttataatcttttatctccacataaatctttttaacctctttctttgggtgatcccttcttccactaagatatgcatggtgtgtatgggtcctttggggagaggctgtggcaatgtggatgcaacttttgtagacaaaggctaagggatctttactaatttgtcagtaccccatattttaaatttctctttagaacatcttgagcacagacatgttattggagtcttggagctctcccattttcttttgtgatccccactgttttttaacataaattcgatttattcaatagatgactgggcttccctggggctcagtggtaaagaaatcacctaccaagaaggagatggggttggtcccgggtcaggaagatcc

SEQ ID NO: 52821 - DNA, 878 bp, Bovine  19866881822703
  misc_feature (1)..(1): n is a, c, g, or t
ncctacaaatatctgtatagtcaaagctatagtttttctagtaatcatgtatggatgtgagagttggatcataaagaaagctgagcgtcaaagaattgatgcttttgaactgtgatgttggagaagactcttgagagtcccttggacttcaaaggagatccaaccagtccatcctaaaggaaatcagtcctgaatattcattggatgctgaagctgaagctccaatactttggccacctgatgcaaagaagtgactcatctgaaaagaccctgatgctgggaaagattgaaggcaggaggataaggggatgacagaggatgagatggttggatggcatcactgattcagtggacatgagtttgagccaactccaggaagtggtgaaggacagggaagcctggcatactgcagtccatggggtctcaaaaatcagacacaactgaacaacaaaaatatactctccaggtcatctgattctgtggggtctctgcatttttcagtgtggttgaactattttacaactctgtaaagtcgatggaactgtcagcaagacacttgattcttgtccataaataggcaaattaattttgtctggcagaggtgcaactgatctcccacatttttgctctactaagcaaattcattttagtattcctgattgcttctacctgtttctgttctttgaattactcattgaattggttgtaatatcttacttgtgccctctttaattaatgagttaaataaaatcattggcatgtgttcattctaaaaaacaaacaaattattaaacttacaaattttctttgtaagataagtatcagttcagttcagttcagtcgctcagtcgtagtctgactctttgcaaccccataaa

SEQ ID NO: 52822 - DNA, 515 bp, Bovine  19866882112603
  misc_feature (1)..(1): n is a, c, g, or t
ntctctaatctattgtctaagattggtgtttttcaactaaacgcagagcctctagcgaagaagcctgaagccacaaaaccctgggacagcgcgaggagcagaagcctgttctttctcaaggggctctgccgcaggctcctaagcttcgctagtgaggatccttctgtaggtacagccttggagttgggaaatcctccggcaggtcgagtcgactaaaaaagcaagcgggaagatgaggcacgataggatacctcctccctcgctcaccgcgggctgtcacagtaattggcggttgtgccactcacgcagctttctaaggcacctccaggctccctggagccctttctctttctccttcgggaaagcgggctcggtagccccaaaagcctgccggagtcgctgacaaacgaccaggagccgggctcggcaggggattgcttctgtctggggctcggcggaacctgcgttcgtgtctcgcgcgcactcgcttccgcgttctcctagccaatccggcg

SEQ ID NO: 52823 - DNA, 1644 bp, Bovine  19866880210239
  misc_feature (1)..(1): n is a, c, g, or t
ncagatgacacccccttatagcagaaagtgaagaagaattaaagagcctcttgatgaaagtgaaggaggagagtgaaaaagttggcttaaagctcaacattcagaaaactaagatcatggcatctggtcccatcacttcatggcagatagatggggaaacagtggctgactttatttttttaggggctccaaaatcactgcagatggtgattgcagccacgaaattaaaagatgcttactccttggaaggaaagttatgaccaacctagatagcatattaaaaggcagagacaatactttgttaacaaagttctgtctagtcaagggtatggtttttccagtaatcatgaatggatgtgagagttggactataaaaaagctgagcgccaaagaattgatgcttttgaactgtggtgttggagaagactcttgagagtcccttggactgcaaggagatccaaccagtccatcctaaaggagatcagtcctgggtgttcattggaaggactgaggttgaagctgaaactccaaatactttggccacctcatgcaaagagctgactcattggaaaagaccctgatgctgggaaaggttgagggcaggaggagaggaggatgacagaggatgagatggttggatggcatcactgactccatggacgtaagtttggataggccctgggagttgatgatggacagggaggcctggtgtgctgcggttcatgggttcgcacatagttggacacgactgagagactgaactgaactgaatgctcactgagcttgtttgtcttgggctcatgttgtgctaattatttgtgaaagctaccagttctttttcataagggctactgcagagacacattttccacttaattataaagaaattctcccagggatatttactttttgagggacatctgcatagtttgtataccatcacactccaaggaacggctttctatagcagatgtttagacatagaccccttaggagaggtgaacattttcagacgagagttgtcctttaccacgctttctccgacttattctccctttcaccccatcccacctccgttttgtattccctgtgctcctgtggaataataggagagcccagaagacattgcagcctttaattcaagccttcttctctaacctggaaatacagattccaaaaaatatatataattagccataaatccatgtaactgtctccctagtggcctcaagtcctacactgctcgtggtcgcagatttttacggatatttcattaacactggaagatggcactttttgctaatgatcgcctaacatttaataaacacagcccaagagttttacaacctgttaacttgtaagtggcagtaattaaccaaaaatgataaataattaaggtctaattacatggtatcagtcatttcattttccagcctgtgcagtaagtgagtttgaactgccaaacagggttctttctccatttctctgtagtcctctgagcagggcctggggagcactgtggccgcacacgcctttacgggggaatgagagggaaactggctcattagatcagtaattgggctgtttcccccgccaaggcacattcccgggaattgtttgcaagctgggttggaagaagaacaa

SEQ ID NO: 52824 - DNA, 2913 bp, Bovine  19866880266063
  misc_feature (1)..(1): n is a, c, g, or t
ntgtgagcatatgtgactattcatctacagtcagtctcatctgtcctatgtagtgtgtcatctagccatgctcatacgcctagggtggaaattcctccttaacaatggatgagtggaaggtaattaaaattatttcatgttttgttgagtggcatatgaaatagtatatgcatgtcagaaacagaagcactataccaaatatactgaatctctttttacaactaatgcctttaacattagatttatcactaggtcactaaaattataaacatctaaggacaatgacttggagaaggcagtggcaccccactccagtactcttgcctggaaaatcccatggatggaggagcctggtaggctgcagtccatggggtcgctaagagtcggacacaactgagcgacttcactttcacttttcactttcatgcattggagaaggaaatggcaacccactccagtgttcttgcctggagaaccccagggacgggggagcctggtgggctgccttctatggggtcgcatagagtcagacacgaatgaagcgacttagtcatagtagtagtaagaggtcattttaacttttttttttacgatcaaagctttcagaatcggtgcctgctttacgctccggttccatctcagtttgaactgactgtgtctcggttgctccacagccacatgtactcaggggacaccaagtcagatagcactgtctaggctttcttcctcaagtgcggtctgcggaccacaccttgcacatcgctgggagcttgtgagaagggcagaatttcaggctccatcccagatttccttactcagaatctgcacgccttgggggatttattcatatattaaagcttgagaaagttccctcctttcccatagccaccagcaactttcataacagcctctcaactcagttccccaactcccttgaggtctatcctttgtctgtttttctggacaatttactaccagctttccctccccgtcacaatggactgctctcagagactgaagtcagcatgttcccttacacttctgagcatgtgcacaggatacttcttccaggaaactccatctcctcccctcctcataactgagcctcacatgaattcggctttgaggtcattttcttaggaagccttccctaagccatcctcctcacatcccctcagttcttctggctccttgtatttctctgttccttattttcaggaatgccccctgtccctcctgctaggtggatgggaagcttcatgatgacggggaccacctcagtccctctctgggatgctccatcccgagcatccagccaggatcagcacatcgtagcagcaggggttcagtacaattgtgttgggagggagagaagagggaaggcaggaaggcaggtttccccccatgtgagatggaaaccatattctctgttgagaaaattctcaatgtaacatgaaagtctgagccagagggtgggaaagaaaaagagaactgacacggactaaaagctactgtggcagagacttccttggtggacagtgaataagaagctgcctgccaatacaagggggcagaggttcagccctgggctgggaagatttcacatgccttggagcaactcaagccagtgcaccacagctactgaagcccgtgggccctcgcgcttttgctccgcgttgagagaagccacccccgagagaagcccatgccccgcaatgaagaggagcccctgcttgctgcaactagaaaaagcccatgcgcagcagcagagacccagtaccgccaaaaataattaactaaaacggaataaatataagctactggggctcctactctgccgaccaaaactgcctggagtcgggccatgtggggtctggacgagtcacttgacgtccccaagtttcagctccctggctacaaagtagggctcagaacgcccacaccagggggcagtggtgaacattcagcgaaaagatgcgcgtgaggggctctgcaaaccataaagtgctgcagaacgagaagccgtcgtggttcagttctcagacgtggaagccccttccccgctcctctccaggccccgagtttcattttccacttgagtttagaagtcaaatatttagctgcgttaatggggtattggatcttttcattatggccccgccactcggtgcgcgcagctttgccgagataataaaagatgtgagatctggtctcgcagctgcttaatgcagaaatgctacgggaacacacctggggtgcgacttcgaacggaatcagtgggtgaagtcagccgtgtccccagcagagataaaagcattaatatcctatttcaccctcagcccacactggcatgacgctgattaaaattattttctgcggtttgactttttttttaaaaagaaaatttgtaaaggggtctctgtatgtgtgtgtgtctgtgtgtgtctctgtgtgttagagacagagatggtgagacagagagacagaggatttaataggagttggatttgctacctctgcttgaagtctgggttcggatcgagttttaatggcatacatttcacagtcccttagctcagatggggccacagggaggttttgttaagtgctccgggcgtccctctgcgccgtgccctcccccaccagtcttctggtgtgcagcactagtgtgtgctcctggtgtgtggtgcaggcctgtcggttggcacctgctttatgtgatcaagaagagaaagcctctgttgcagagctgctgtgtcttgggagatgaagtgcaggtgaagggaaatgtgccaggtctcggggcaggggtacacacacagggatacctacgtgtacacacacggggatacctacgtgtacatacacggggatacctacgtgtacacacagttatacctacgtgggtgcggg

SEQ ID NO: 52825 - DNA, 1051 bp, Bovine  19866880617935
  misc_feature (1)..(1): n is a, c, g, or t
ngatttctctgcaggtttcagagtaagcatggctcttcaaataccctgactccagacttccagcctccaaaactatgagaggaaaaattttctgttgcttccagccacccagtgagtggtcccttgttttgggagccctagctaactaatacagaggcttcccagatacgtgacatttgaataaattctgaatttccaaatggaaatacaggatttatttgcccaacagatgtggaccggatacttttttctttctttctttacttttcctagtatttataagtcaacctctttcacacagacattctgaggtccagcctccttcaaaagatgaaaagagccacaggccaccaagagctgaaactgtactccatgaaggccacaggaaggagcatgtgttcccaggctgccccatttcccggcactcacacctggccctctccactctttatatgtccagcctggcgtctgtgctaaatgcatgaactggctctaagattttttcagccagaagagagttcagaggagaagtctctgcagctctccccgggagcccctgtgcatggcgctggttgtcacctgtcctccagagccctggccacttgcctgtgccggcagcagtggggggatgaaccctatcctggtatctttaattaaatcaccactcctcagacatcctcttgctctgcaacttattaccataccctggatctttcacccctgctgctgaattccaatgtgatggatctcaagtcccctacgtgctccacaatttgttctttaagtggaaacgtttacattttgattacctaatacgtttctaccatcttccatccagcaggatgtcagggccctctgcacagcactcaggaaaggaaaccagtctagactgcaaccccttcattaagacaaagctcaggtcaaaccccaaacatccgagaaacctgccagggctgtataatgtgactatccccgcttaccagggaaaccgggtctgagtttctgcttcactacttattacctatttgggcaaactacttgacctctcaca

SEQ ID NO: 52826 - DNA, 2604 bp, Bovine  19866880689851
  misc_feature (1)..(1): n is a, c, g, or t
ntgcttatatttctttgaattaaacccagtgatccaaggtcagatatgataagggagaaataattgatacagacacacagtgttaacaagtcgtattggttgggaaggatacaaaattcttagatgatagattatgtttcagacagaaggcagagaaatcgggatgattcctggctcagtatctgaagctgggttacagaaacaagggcgtactttagaaagatgcccggctggaaacctggagacacacttatcgtctccatcagcctcaagaagcaagccctgaaccgattgtggaattcacaatgaggaagagagcctacaaacgtgatcaagggtgagaggaatcacgtgtggaggcaagagaggcagaagcaacggagggaaactccaggaggatgttcatcttgcctctctgaaaatatgtctccacttgctttattaaaagccaccccagggctggtgggggaggtggggcgggggcagagagaagacgaatgagatggctcactgggaaaatttctccagctctcgccatctgggttttaaaagccattttagcaattgttcagagctgtcaaaagtctctgtcagatcaataggttactgtggaatttgcccagactgttggccaatcaaaatgtaaattccagataaatttattacataaaccaacttgtcttcctcaagccattttgaaagtcatgaaaagtaatttgacttttgcttctgactgtcatacaggagacacttttctgctggtgccaagcatttatttggcctcgaaactcattgtgggtccagtgacggcaaaggggagtgtagagtattatgtgcatttaacgtctttacatccgtatgcttcagaggcagttggcaggttcaatcatttgggtgcccctttatggaagaaattaatgtgaatgtgtgtggtgcctgcgtgcacaagcggtgttagactggtttgtgggatgtgtgattaaaaaatcatgagctcctctatttatgtctctcatgggcagcctcattttcctccagaacatgcaatgtgtgtctgggtacatgattatgtgaatgcttgttgcaacctatcttttccaaaaagagacataaatttttgcattgaaagaaaaaccaattataacctagccaggacagctccaggccccatggggaagtatgctttagagacatgccctaatttttcacattgaaaaaaaagtcgtaatgggaaaatcatgtcagcaagaggtacaaagctttcaacttgggaatgcctcaagtggagattttgcactgaatcatttttcctgtggccattatattccagatgcctaacttgcaagtgccctgagtttataagacgctttcacatctgtcatgccatgggaccttcacagctacccagcacagtaggtatgttggcccgtatttcacaggtgaagaaatgaagacccaggcgagggaagtggcttcagcaaagccacagagcaaggaaaggaccaagacatgcacccaggcgtgcagaatattctctactgtgccctcagatacactttctgccctctttaactttgccctgttcttttatgctatgctgtatctaggctcttgtattcattttctgtggctgctgtaaccaattatcacaaacttggtagctatagtcagcaagaatgtattctcttacagctctggaggacagagttctcaaatggatctcacttaacatcaaggtgtcatcagggctctgtttctcctggaggctctggggagaattcatttccttgattcttcctgtttctatcaacatttctcagcccctttcaatttcaattaaaattcaattaaatttaagaggggtccttttcatgccacagttttcttcctctgcttcctcttccatttttatggaatcttctgattacactggactcacacagataataggtgagggataatctccctgccttaaggttagccgattagcaacttgattccaagcacaacctttgtcatgcaacctaacatattcatacatttgaggattgggatatggacatttttaaggaacaatatttggcctgcctcagttctctggctttttagcttctaatgggttctcccagcagaagaacttgtcaggagatcaggaatggaagagagggaaagtcaggcatttatcctccttgttctctccttgctgtgctccacttctgctgaggccacatcattctgttatagcctgggctctgctcggcggaccttacctgtagctaagcctctgcctggccccaccctgctgcctgctcctgtttcatcagggccgggtgagaaaagctcccctttgctgtctcccccacctgccctacctccctcggtggcacccttaaccattcccacaactctgtcaacaatcctccaattaaatcatcttcagtccctccttgagccatggcgtcggctgcttgccaagcccctggctgatggatggaggagacgtcttccatggccaggtctttccctacatcacagttggctaactcaacgggatagcaactgtggtcacagaagagtgaaaggcgggttctctttcaacaataa

SEQ ID NO: 52827 - DNA, 977 bp, Bovine  19866880753704
  misc_feature (1)..(1): n is a, c, g, or t
naccagtctcaagggcttcagtgttgcctttgcactactcccggacagacgctcgtcccgggtaggattgggtaagctgagaaactgacgctcagtgagtcaagtaacatgtccaaggtcacacatctcaggaagatcagagcaagcattagaaccctggcttatgacaatctaaagtcttcactatttcttctacactactgcattgcctttttcgtattttatttctcagatattcattattaaaatagccttgggaggcaggggacactatatccattttagagggagaaacaaaacattttagagggacaacagggttatccactgtcatgtaaagtttcgaggacacagctatgagtctaaaggcacggagtctgatgatggtccagctcactccagtgtgtatgggaggaccccaactcctttgtaactccctaacaccttttctgagagaggcagggaaaggagcagggagggtaagtaatttctctcatgctctgcagtgaaatatttctcagccctgcctctgtaagactttggagactggcccctggtgagctctgtttcaagatccaaagccttttcctggatccctgtagcatcctctccctggtggagtggagttttccatctactgagtgaaactgacttctgagtgacaacacccttccacctacaccctggatggggtccaggcttcaggttccaggcactgccatgaaattcacgagcctgcattgcctggggctgggcctgtttatgcctggtgtgggcaggtgtccacgctgaagccgtgactggggctgaagggtgcgttccacttctggtaagagcacacagagagacccactccatctttcaggcccttgctaagcagaaatgctccatcccaagaacacattagtcatggtgatgactactgctgactctaagcagtgcaagatatgacacacaacagcaggggggaggcgccc

SEQ ID NO: 52828 - DNA, 888 bp, Bovine  19866880780583
  misc_feature (1)..(1): n is a, c, g, or t
ngacttattcttagcttcttgaaacctcttttcacattttactccatcttgtgtgataagcatcataagtcgatgagtccccagttttttcaggctttacatgcctggttcttttggcttttttttttttttttcaccatttgcatgattcagagacccccctcactatctggggtaactttctctgaaaatcccccaatttctcctaaattcccagttataacaagaatgaaacagtatggctcaaataagtctggttaccacagagtagagaggaagtatccttcttcatctaaaacattttgcttctattaatacaacttagaattacaataccttttccaggcaatcatagctcatgggttttaaaacccattagtctattcctaggtactaccaagtacactatgttttatccatctattcctgaaatgaccctttttttcttttaaattcaaggactttcctccacaagtattttcagagtgctaagtgtttggatgcctggtttagtggccacctacctttgaaagaactgcttttctggatttgcgtcattttcgtgatgaataaagcatggagaatcactctcagctggtagggatattcatagacttcccagattggagagaccttaaaagaccgtctcatgcctcctcctgtcacccagcacgatgatctctacaacactcctcttcagagagagggcagcagctgtcaccaatctacccagatctctaggctgtccctctgtgacccagtctcaggttggcatattcctgttgattaagagttttgagagccttggatgaatgcagtactgaaatgctaatttcaggaagtagtggaaataatttgcctgcactcagcgtcttgtgccgacagcat

SEQ ID NO: 52829 - DNA, 1878 bp, Bovine  19866880793042
  misc_feature (1)..(1): n is a, c, g, or t
nagttctctgcactcttcatttatttcgtccccacatttttttgtgtgcttatgatacaaggcagaaaaaaaaaaaatcactctggggatccagaaatgaattatatgtaagtcctggcctcatgaagtttccagttaggtgagaaagaaatacaagaatgcactccaactccaaatggttgacaactaaagaggcataagcatagagagctatggaaacatcaaagaaagactgctcaagtggaatgcggagcgtctatacgatggtttcaaagaagaagaactttgggctaagtcctttgggaatgagtaggattccaacaggccaaagaccagttcagacttgctcaagaaagagttattcactgagtgtccctatttgtttccaaatgtatgaatatgtttgggtaagatatctggtatatcactagtatctgtaaaacaccgcagcctacgcctgatgtaactgactaaaattaccatctgtgactgtggagacacacaaactagggcttgaaccctagtcctaccactcactgtgtgacttcgggagaagtgatttcacccagtgaaagcccaggtaccccttctatataaggtgggagaagatacacaggtggtctctctgatggtgctgtaaggtttaaatgagaggatgcctaccaagtgctaagcactaggcccagcacacatgcagtactcaaaaatatactactcttactcgtccctgacaatcccttgcacattgtaataaaacagataaatgaataaatagaaaaataaataaattaatacacaatgagcaagtatttagcagtcttggcccagatactcctccacaccacaaggcccatgccaaagcataaccccccaaagcgctcaatgaaagaaaggcaagggtgagctcagcccagctcttacctgtatattttatatctggttgtaaatccttgacggtgtctttccacaaaggacaggtagctcctggagtggtggaaaggccccctgtctgaaataagccaatcaaattccttggagacatgttggtctgttgcagctggttcctggtgggagggctgcactgagattcggccccatacaaacaggaagtagaggagctcaacaaacctccagttcatgcttttctgccggcctttttcctctcattcttgctccattctgtggagtcctgggaagaaaggaatagaaaagagaaagaaagaggaagagagagggagaggaaaggtggggaggggaagcaaaaacatacagacaagagagagagagacaaaggaaaagattttttaatgcttttaacatactttcatcataatacttcacatcagaagactgggtcagggtttacgaagatcagtgcagtttctgcttaagagtgtggcatctacggacatctgggctcgcactcctgatttgctgttcacatgtggtgtggacatgtacgaacatgtacaaactgcttagcctcttatatatgcagtttcctcatctgtaaaacggaggccgggcttaagcatctgtaacttggcacctggcacatcgaaggtattcaaggtgtatgggttgacagcaagagtgaaatgaaaaactgcagaaacagtttcctccagccaggaggggacatggagatggaacttcagtatctgccccgcccgctgtcttcacaaacagcctgaatctcatagcagggactcagtaagcgggaacacatttctctcctctcccacagacatgcacccagtgaacacatgctttgctttcgcatcatcagttgacggactgcacaaagtcttgggatgcatcatgatcacggctatccaggatggataccttacacatgggagagtttatagagctcat

SEQ ID NO: 52830 - DNA, 1239 bp, Bovine  19866880845458
  misc_feature (1)..(1): n is a, c, g, or t
ngaatatgggaaaaatatttgtggaaaatatgcaagactttggaagcaaagaatatgctttaaaatggacccttgctcagcttgttctcagatgatggcctagacaccagaacttttcttaatcttccaattaaactgactgctcagatcgctgtgccagaagcctgtcttccagacaatgggtaccaagtggctaatgagatggagaggagatcatgagaggaaacgccaggagtggatgcctgatggaacatttctgtctgtgatgttcgcgggagcaggggagggaacatgtaaaagatacaaggctcgacggagtcctcagagacagcaagggccagagatcacgggcaggtcatggctatgaaggaagaggttttgctcagcctgtggaggtagcagagttgaaggccgaggcagctggttaattgactgaaccggaggatatgatgactgctaaactaaagaagcaattctgtgaaagagccagagtactcagacagacccaaatgatccaatgtaagccatataacctctctgagcatcagactcttaatctgtgaagtgggaggcttgagcttaagtctgggcttcaagcagcattgtgtgctacgaatcttctgtaaaagagaatcttctgtaaaagagtaagaattatgatttttatatttctactaaatgtgtcctgtgcccagttacactgcctttttaaaacactattaaggttaaaaagatgatgaagtatacgttgatttatggtctccaggagacacttccaaaagtcctctgagctctagtgaagtgtagagcatagcacttgttagattataagatttcaataaaatgaccacaattattattatcaattatattgttttatgattttcttcaagatgctaaatgcaacatacttagaaaggcagtatattaaaatgtcatcagtcactaattttacagccaatttagtgaacccctattaagagtccaaggaagataaaagctctttcctagtacatggtcagtgccccaataatgcatttataaattagtaagaaccagctacatacaagtctccacctgactaacaactattaacaataatttgtggtttgtgtatagaaatacaaaacaaccaatcatctcatggtttcttcccatcagcccttagaggtaaataggagaaacacttgtttcccctttgcaggtggaaaaggtgaatgttagatagcctaagacatg

SEQ ID NO: 52831 - DNA, 2778 bp, Bovine  19866880886080
  misc_feature (1)..(1): n is a, c, g, or t
nttgtgtgtttaatcttatacccctcaccagatttaaaactcctaaaaggaagagatttttccctggtattttattcctgtgttctgaaggttagctaatttagtcccttaaaaattttctgtggaatcagaaaaacatggatttgaattctgggtcttgagctagttactgtctgtgcctcagtttcctcatgtgtaaagtagtttagttacacctgctatgaatataaactgttatgatgtgccaaaagtggtaagaacatagcatgtaagaggtaaatacttggtgattgttattactctgttttcccagaacaatgacaaagaaataaacagttggcaaattttcaatgatatctcaatggattttttaaaaatcagtaattcatgaacatttaatacaggaaataatttaaatatcaccactgtagataactgtggggtcatgcaaactagcttctagcacagactctgccagggaaggggacaaatattggaaagaaattcggcttgttgtgcctgcagattcagtgtctagacacttccccatgggttctggtgcctggaaaggagaatttgtctttaatgtgaagacgtgcttggaaagagctgcttagagttcagcttctgccatcgaatcacttaacaggtgactgaaaaaatgagatcaaaagatctaatgcacagtgtccttttggaagtgaaaggaaaaggaaaatataacccagccacattttgccagtttagatactggagggggtagcctttcccttctccaggggatcttccaatccaggaatcaaactgggatctcctgcattgcaggcagattctttatcaactgagctatcagggaagcccttagatagaacagacaccatattttctcaatttttacatattttttttcatttttaactgaagcatttctgaaatcagcatatgtctatgtgtctagagtcatatacataactctaatgctcctctccttttcccgaggagatcttgttatgttagtagtgtcttataattggaaatgtcttcaaatcgaggggaagcagtgttacctatctcatcctaactaaacagaccctcctaagaacgactgctgcttcacctggagtcaactgttgtgggttcaggaatctgctaagaggggaaatagaggaggagatgccttgatgtagtctcatattgtcctctgcagcaaggtccattgacttgtcttgggttattcctcagctcagaggtgggaaaatggcagacacatggatatgtcgcaaacacatattctttggatgccttttggcatcagcttactcttatgtatcaggacccatcgagctctgcaactgaaaacctccagcagtgttctttgcctacaagatgttacacagatgcattgcaaattgttatcagagctcaaaaaaagaggaaaagagaggattgttgaagccttgaaggcatatgacacagtaaacggtgcatttaatttcaacttaatgtgagagagagtgtgcactagattaaatatcatctgatcattaaaaacatatttatggaagtttagcaactttgtcagagatgtgtgactaataacatagagttgtgaggcttcgaaaacatatttgtcttaatcgactgatgttgagtatggattattgactgttaaatcaaaataaaagttttcacttgagattttgcatttcatttgtgacggatttgtctttatccagacactcatattggagacccagtttgcccattaaaaaggcccactctaatagaatcatagaatttccatgttgggaaagttcttagaaatccaatctccttccagctctttttggcgaaagtggtatcatctgttttgaattgcagctttattttctgaacaaatgtagtattaccacaccggggaaaatttgggaaagaaaatgggaaacaatgtcagctgtattccctttatccaaacaactccttctctttcactttctgtacatctgtgtgtgctttatacacagtgataattgtggtatacatgtacattatttttagtctccctttttcattcttgatatttagttttcatgatcactgtgttcagtaacataatactattctatggaatagctatgctgaaaaatactgaactattccccaatgttgagacatttaaattgcctctaattgatctagattgcctgagtatgagtcttgcttctacccagtgaacagcaatgaattacctaaaatttctctatctcagctttctcatctgtaaaatggggataatattagtatttcctcatagagtagttttgaggattaaatggtcaaacacatgttaaaagtattcatagtaaagagattaatgtttatgtctactggtatatcatgagagttagacaaatagaaaggaagtctcaaacattatttcttttgtacaagcatcctatttttttataaaataaaatttatataaaataaggattagtgaataaatggttaaaaaaccagaaaagcaaaaacaaaaaagtaagcatttcaaactggcacgtaatgagtgctccatcagtgttagctattatgttgataagtgagtcaactatgaatacactgatacatattccttcccaaaatgttgaaatatgtccttcaggggaattcccaagccattttcataaaaactcatgcagacagtgatacacacccttttaaaaaattttaaaaatcaaataatcaattacctccttagatcacttcactttggaatga

SEQ ID NO: 52832 - DNA, 1722 bp, Bovine  19866880901778
  misc_feature (1)..(1): n is a, c, g, or t
ntcatactaagaaaagcctctttaaaaaaaaaaatactctaagcccctcatccataaaaggaaccccctgacattttttgcactaacctttttatactgagattgtgtatgacaattctcactagagagagaaagagaagaatagatttgagacagataaagccaagatgctgaccttgctccagctggaaatgttcctctcacctgttcttccctattcagatgctaatggacaagtgagtctattaagaaaaaggaaaatcagtgcctcatgaaacaagcagcccaaccagcgtagcccagaaggctcacagaattgctgcagttggccacattcatctctatctctgccgtagtctttgcctgcatgtaggagttctcaaactttagcaagcagcgtaattacttggaaggctcattaatcagagtcctggaccataaccacagagttcctaatttagttggtcttgggtggaacccaattttcatttcaaacaagatttcaggtgatgttgatgttgcttgtctgggaactacagattgaggacaatttccataggtcataaatcctccaaagcagagacagttcatgaattctcctgagaactatggaaaggctccttcatccttgagttgccttgatcttctgccagggctcctgatgggctgaggatattcatcaggcaaaaacgtgtgaagctgcagttggcatgggaagactagccctgggttagcatcgctagtccgtttgtgctgtcgacctgctttgcaacacgccatttttctctctctgggtctagagtcctcatatgctaaagaaacctgggggtggtgcttcagtcgctaagttgtgtccgattctgcagccccatggactgcagcccatcaggcttcatgggatttcccaggcaagaatactagagtgggctgccatttcattcttgaaaaaaaatctaagcactggataactagttgattagaaaatcctttattcaaaaataaatacataaatatttaaaaagaaattcttcattcaataattatttaattttattgtcatactgtgtgtaactatgatgttggataatttcttaaattctgcaagtctcaaaatttttcttttttttgttatccttctcccatcaccccctttcccttttgataatgagttttgttttctatgtctgaaagtctttttctgttttgtaaatatcagtaagttcatttgtatgtggaaaattctgaaggagatgggaataccagaccacctgacctgcctcttgagaaacctgtatgcaggtcaggaagcaacagttagaaatggacgtggaacaacagactggttccaaataggaaaaggagtacatcaaggctgtatattgtcaccctgcttatttaacttctatgcagagtacatcatgagaaacgctggactggaagaagcacaagctggaatcaagattcgaaggagaaatatcaataacctcagataagcagatgacaccacccttatggcagaaagtgaagaagaactaaaaagcctcttgatgaaagtgaaagaggagagtgaaaaagttggcttaaagctcaacattcagaaaacgaagatcatggcatctggtcccatcacttcatggcaaatagatggggaaacagtagggaacagtggctgactttatttttttggggctccaccaaaatcactgcaaatggtgactgcag

SEQ ID NO: 52833 - DNA, 1069 bp, Bovine  19866880920305
  misc_feature (1)..(1): n is a, c, g, or t
ntaaagaatctgcctgccgatgcaggaaacccagggaatgcaggttcaatccctgggtcaggaaaatccctggaggaaggaaatggccatccactcctgtattcttgcctgaaaaagtcccatggacagaggagcctggcaagctacaccgtccatggggtcgcaaagagtcggacgcatctgagtgactaagcacgcacatgcagtgtggggagatagccaggaccaggactcaggtattctaggctcccaaactgtctttccactgtaggattctgtgaagtatctatgcaatagtggcatacgttttaaggaataaagaacaattatattcctcccaagctttatgatttgagagggggctgatgcagtcaggaaggactttctggaagaggcaaggcttcagtgggacaaaatgggcagagaaaatgttctgcatggatacatacaggagcacatttcccagagtgttcggaaaatggactcattgtggttataggctctgcactgttgtacagaaaaggaaaacagagtgggaataaggttagatcctgttaagggagagattaattaagatatctggactcaagcctgtaaactcagatgcgcctgttagcacaggcatgcactgtgtttgaccccacacgggtaaagggtaagggagagagcatttgtcagtacttaaaaatggagagattttacacacaaaaaaatctaaatttccttctgacttctgagaaatcaggtggcctggcagcctagaaatatcattcctacccagaagcgtctgctgtcctagactgggtagtatgcctaccacttgtcactatgctgccttcttaaactctgaaccagaccactttcattctctcacatttatggtctggactcttttggcttctgaatttacattccctgaagaggtggtgatgcacaaaaaattcgtcatcattgatatgatgaaatcaatgtttagaggatgtttatttgctcatcaaacatttattgagcatctattgatatttcctgcaaggctctgcaagggaagaattgagttcaggagatgaat

SEQ ID NO: 52834 - DNA, 2016 bp, Bovine  19866881051077
  misc_feature (1)..(1): n is a, c, g, or t
ncagcagagctctgtgtgggaggatgtttgatacataaaatcaaggttcaggcctccgtgtgggaagaggaggtgcgcgtgtcctttcgttcctctctggattgagaaaccaatcatcagtcttaaacgtcacctgctgaactggtctgccttgaactagagtgtttacgggaaacacaagaaactgttgctggaaaacgacctcatttttacttctgtggaaccaggccatcaggaagcgccagatgcctctgccataggaagctaggtttcagcacctccgtctgcaagcgttcttctcaaggcagtttcactttcattatgtcatttaaacctccacaaacactcttgagatacacagaattagaaatgaagattcttgcatgacagctaaggaaactgaggcgtgggcaaatgaaagggtacacttcacctgggaccattaaagatgatctgaaccaaggaaacttgtgatcttacgccctaattggtggtttcctttctgccccacatcccctaatggatgagtgacccattctcgtttgttcttgtatggaggcagcctggtaaatagcaggctgaagtgccagcataaaaaaggttttgaacagtggttgcaaaatagcaatctatgagtcacatcttccctgaagatactgtatttatgccatataatttttaaaatattttaaaattaggaggctccctacagaaacctgtgttttcttataagatctataaaccctgggctcacagtcctgtgtacatggtaacagcatgtcagatgccaaagaggcagcccctgggacggccatccgtgacccgtgctctgcagcctccccctggccaggtgtacccgtgaggtgcccgtctgcctcccacagacttttactttacagcttcttgtacaaatgacttgaaaagcacaatcacatcctgagttttcactgtatcttcgtgagaatatactacctcattctgtagttgtgaatctttcattgtaatatgaagctgtcggggaaattcactcatctgtaaataataggttatgtgttgttgttttttttcattttgatcctaactgaggtatcaaggagggctacctctagaagttaacccttgaattgggtcttgagaagtaggtaagagttaggtgggttgaggaaaaaaaggtaaaaaaattccaggtagaccatctgtactaagcagtgcttacaaggctgtcatataagaggaaattcaaaccagctacttttgcaggaggaaaaaaggagcaagaattaaggcctctgacataagtggtgtctgtgtcctagaggctctgtatgccatgcgagagagagtgtcaaaaattttatggacagtgaggaaatggttaagtgtattaagcagcaaagaatttcaccacaggctgattggtaatatgtacattttaactagattatctggcagtcatagaaaggatggatttaatggcaggcaaaccttgaagcagggaaaccgtattagaagctacttcgagattccaagtaagaagtcatgggggattcatttgagaaatcctgtaggatgtaagaccaggaaatcgagagatatgttattttgacatttattgagcactaatagtgtgcagaatgcgatgggagaaattagctatctagtccaactttctttgtaatgtttcagcctgttttactgcctctccagtaaacggtcctccagtctctgattggtcactaccaaatgatccaattcccactttaattattagaaaccacttccttatattgtttccttagattgagtccaaattgtcctcctacagcttctggttctgtcctctggagccacagtgacaaagcttaatccctattctgcacaacagcatttcaggtatgtgatgacaggaatcgtgtttctcaaaaaatctattttcagctaaaaagaatatccctcagttctctgcaagagtcggcattctccacctggctccagcacatagcacgttcaagttca

SEQ ID NO: 52835 - DNA, 1337 bp, Bovine  19866881085804
  misc_feature (1)..(1): n is a, c, g, or t
ncctttcagactggatgggcttgttttcacagtcctgtctcctgtactatccatttaggcctctcaccaagctggatgttgtcctaggcattgtctagtttatcttacttacagtgtaagccacaaaaaggagaggggaaattgagtgaggattaaaaggaaggttcattcacgtactgatttggctagtatttatcggctgcctactatctttcaagacttgctgtagacccgtgctgccacagaactttctgtgatgctggataggctttccacgctgtccaatatggtggcccgtaaccacaagggactgctgagcacttgaaacatgggtagtgtaactgataaatgggtttttaaccttacttgagttttattcgtttttaaaatctgaacagttgtatgtggatagtggctactgtattgaatagcgcagatctagacatgagaaatgtagcatcaacatggtcctcttctcgtggagctgatgatctagtggggagagattgctaacagatgagtaaatacataggcaagcagaatataatttcatataatagtaaatatcatgcaagtaaaaactggggctaataggctagaaagaaatgtaggtcacagaactttagggtcatcaggaaaagaacctccggagagggtgatattagaactgagatttaaatggaaaggacccacccaagcacgtgattatgaggggaaattctatcgaaggcagagaacagtgatggtgtcactaggcggggtcagcctcaggaaatctacgggatggtgggactgaagcttttgcctgagaaagagagcatcataagatgagaataaggtagggagaggccagatcacaaaggcctcatacagggtgagcggcaagaaatgtagacatctcccctttgaaatctccctgcctaggaagtaagtagtctgaggactgcgctgaggagagtttggagattgacagagctcgtcgttatgtattctctctgggtttccatcgtgtccatttttaatcagtcatttcagtgaatgcttctaatcttaattcctagtcctgctctgagtgctgtgaactctagaaattccaaaatctaaagggaggaggggaggacctgaagagggaaaaatggctagaaaaggaggagggggatggatacctggggagaaggtaattgaaatgaagtctgatgaaaaaggatgaaagctatagtcagttaggatcagcaaatatttattgcatctcttgtctgggaaaggccttgaacaaaatggcttagggggtatggtgatgaaatctgccaggattagacaagatctgcaaatccata

SEQ ID NO: 52836 - DNA, 1550 bp, Bovine  19866881095656
  misc_feature (1)..(1): n is a, c, g, or t
ntgaaggaaacaaaaagagttgctaccagtcatgggtttggccaacatataagaagctgccactgtgtgcccggggcatcgtgaggcacagagggtagggctgggttggtctctctccccagagatcttctagtctagtgggtgaagttgaaattgcaaaagatgagctgctagccaccaacgagactggccgcttgactcttgagccccaccgcctagtaaggtgtctggcatgtgaggggcattcactgatggtttaatgaataaatccttcaaccaaagcgtcctgcccctatgaagactggtacactgaaggacaagaggagttcagaggaggaagaagttccttccagatgagaaacagagactctttcatggagaagcctgactcatggagtctcagcaaaagaagagaacacagggatagaactttccagatggtcagcaatactggtgtcacgaggcaggaaagcgtaggtcacgctcacagaactcactctgatagctctatccttccttatcttacccgtttacctgggctccgctgactcctaattgatgtctttgccttcagtttccccagagctgatctatcctacccaggtctgctggccttatctttccaaagcacagttacaatcatggcactgcccttgtcagaagcataagctgactcccccactctcagttcagtgaagttcaagcccccaagccagcacctgagcctttgtgatctggccatagtgtttccgaatgaacttagttaccacagctctgtctcactcagggctgagatggacttcccctgccctccattatggataatcctttgttgcttccaagtctcagcttgtgctcttctttataaatgaaaacctttcccttaatatcatcaggcccagattttatccacacctcaaggtctaaatctagtacctctctttgtgaaactttgacctgaactcctaaggaagtcgtctgtgaactcctgtccctatgcccacatcactaacagctcatacctccctttttagctaaatgggcacacactttgtctttcccccagacaaagtaaaattgtcttgaatacaatttcttgacaataatttaaatttcaccagaacttagcccaagacagggaccagaggagtcctcagtgtaaatgcagtaatagagctctacattttttgtcagattctctgagattctcccctggctatgtgtgtgccactccatactctgttgaccagggctaactgatagaaaggcagagacccctgataaaggtgggccagttagattgctgctgtgggaatcagaatgaagagagtgatggaagacagttggagctgagtcttctcacggcaagacccaaggaaaaccacagacatctagctgctcaagtctttggaactcccctactttctttccgggtgtttcttttttctggaggttgatttttgctggctctcccatctatcactgtattggtttgccagggctgccagaaatgaagcaccacaaactgagcggcttagccaacagaaaca

SEQ ID NO: 52837 - DNA, 2406 bp, Bovine  19866881127914
  misc_feature (1)..(1): n is a, c, g, or t
nacccgcttgcttgacaatatgtcctctcccagtatacctctggcactgaggcaggcacttttctccctctctctttcctccttttctttcctctatttccaccagttcctctttcctcctccacccagaccctaataacactgaccagctgtgcactagatatggggaatgtggctgggaccttcagcatggcatccccatcagtacagccttgcgtctgttattttccctaaacagataaggaatctggtgcagaaacagaccttcccgaaaagtatttttccagtactttctatcacgatacactccttattccttatatatcactgtctgatagtatctggcttatttatttgcacattaattatcagtattactataagaaggaaaattccatgaagataccaggactgtgcctgtattgggttctatcaggtgactgagcagcgcctagaacctgatactgagcaggtactcaatacataaagataagactgtggtctctgatgattggaaaaggcctccctaaagatgcagaacacattctgtctgtgctttgaaggactggcaggattagaaacagcattctgaacagaagaaatagcttgagaaaaagtttaaaggtaagaaccacagcgctttcctttgttcatgtgcgaacttttcagacacacacacgagggctccagaacatgcccatgggattgttttctaaaacactgagttgaagcttggtaacaagaaactcttaatggctttggataggtcggagagcaaaaatcactcgtttgaactaaagctggtaggatgaaagagagagtacattcgaacacaacttgaaatcctcacttggccacacacagcctacagcatgacggggaaatttagggcttgaaaggactacagtcctcaccgtttatgaagcctagtgcaaccgcctctgaaggctgtgttgccattcttgtcctcattcctatgaatataccattatccaacagctgctagagtggggtttttaaaaggctgagtcggatcatgtcactcttctcacatccctccaatgggatcccgtcaccccagaacaaaatcctaagtttcaccctagcctgcaagaccttactgttcttagaacatgtcaagcacatacccactcaggacctttggacatgctgtttgctcagcctggaaagctttctgccaaatgtgtgcatgtctcactctttgccttcaatcagttctttgtttaaaagttaccccttcagagaggcaaactctgattgttctacatgaaacagcacaatctggcacaatgccccatcagacgctgtgtggcttctattgtatttatatgtctgatactgcattttcacttattcacctgtttaccgtctaactccctaggtaacatgtatgttccacggggatagttctgttcggtttacttctgtttagaacaattcctggcacaaagtgggtatttaataaataagtgttgcatgaatgaatagaacccacactcctttattctgcagtcttagaaaaaatgtatactctcattttgccagtatttcacagccaggtgatgactgaggcagaacttaggtaccctacttcccaattcagtctgcttcctactgccccagtgatcttgaatgtaccttttctttatccattagatctccactctgccttccccgagaagcagtattatatggataatgagaaagtttcctgcaaagtaaaccaacacaagtggccgcgtgaggccttaaagaggcaatggtgaggacagttttaattgattagctggaaggatgactgcactccactcctcagggccagtgatcccatgcacttcgccatccaatgcaccccaagcccccaaggaccccgatggaacagctaactagggcactgattgtggaagccagaataaatccagttggaatgagacatccagcacattttgggaaacatctcaagaatagtctgcaagtgggatggtgaccagctgttctgcctctctgctcaggaagggcgaaactaccatgggattcagagactaggtggaggagagattatactgatttgagggagtcgtggtttttaagaggcagagaaggaagagcgggttgtggactcagcacgaggctcaccctctagctaccttttaaaagcaaatctggccgcaacatccctgtgcttgcaactcttcagtggctcctcgctatccctgggataaactgcaaactaactggcttgataccaaaaagcctccattaactgactgctagcatccttttcagcctcatttcttgccatgccttgagtcacactatactgtacaatatcacagacgttgtatttcgcacacaagtcccagtgctttctccctctgtgctttt

SEQ ID NO: 52838 - DNA, 837 bp, Bovine  19866881162665
  misc_feature (1)..(1): n is a, c, g, or t
ntaaatgagctaaacaaatcccttgctgggcctgtcacactgatgttccgcatgcaaatcgttcctaatgagcagggcacagggctggtcccctggtttgtaaatccatccatttcacaaaacattgtcctggtcccatatttctgtgacaatccattggcagatgagctgttaagtggaaacactgaccatttagaaccgcttttggaatgtgctgtctcacaacgagacacgctgcatgcagtgggctcaggactgaatgaatgacttgggttcatgtcctgactctgatcattttccctcttctgagcctctatttttttcctgcatgaaatgaggggcttaagctaggctggcattttcaaagggtgtgctgatatattcacagcttgcaaaacaattttttttttttaagattctaggataaaatattacagataaatcgggggttgagaagttcagtaagcttttttttttctttttggttttcattctaagccccccatgagacatctcagaatcattaatacattaacttgtattatgagtattgatccaacaggcatttaaaaaaaaatggaggattttgttgatcaaatcttctggaactgctaggccagatgatgttggagattcttccaaatccttacctgcctgtaactataaagaatcagtgtagagaaagaaagctgcaaaaagttgaaaagggtcatattaattgatttcaaggacacttattgggaacactatgccaggcattattcttttctattaataatttctctttcacatctgctggactcaaagaaggtaaaattggaagagaaaggagagtca

SEQ ID NO: 52839 - DNA, 1851 bp, Bovine  19866881225221
  misc_feature (1)..(1): n is a, c, g, or t
ncctgagcaaacccttcagaaactcttccctcacctgtgctcggaagcccacgctccctgtcagtgcaccaaggccccgacaacataattttcccctaactcttgacacattacaatctagccacactgaatccatgtggaatctcccgaatagtttatactggtcaatgccgttctgttttggagctaccattcctctgctcttgttattcacttgtgtgtctggaaaatgatgtcatacaccccaaaattcatcccagatgttttaaacctggggaaagacagagatattgggccacgtctccctagagagcattttgtaatgccatttcttatttccatgtcagtttccttcactaggttgccatatgtttgagggaaggagccaagttctatttatgtgtgtatccctagtgtgcagcatgaaatagatgttcagctaatacttgttaattgaatgaatgtctgtgctggaggcagtgagaagctcttgaagactgctggggctaccaaggcttttgttaatgtctggacgactatatctcaattcctatttgcataactcttgaactgattatctggaaaccccatcctttctgaaacaactgctttcagggcctcccatatgagaaaaagattaaaacctgaaccagcttccctggtattcatcttcctcagcaaagctttaactgctgctggcttataaggtgggatttcctaattgtgtttaaatctcctatctactgctggccatagatgtgctaacaaatgaaagtttctgtgtgtgtggtggagggggggagaaagttttgcctcttatagcaaggaaatagtttgaggctatgttttaattaaaatgaatatctgcgctatcttaatgttattgccagttaagtgtagcagggtgatttagagttctataacacaattatactctggtaatgaagctctgcagaattatccttggaatttagaatgcagaagggagcagtagctctcatttgtaaccatgttacggcctttattgttacagtattttctgttttcctcaaagattaactcaatcgtatttaagtctctggctacattacagagagatagagaaactgggcaatggcaactgttttactgtccctgcagcccatcttaatgttttactgaggggacaaaatagtggggaaatttcatcagagcatcaccatttttattgttcttgccctagccctcctgactaagccctcaggctggcctacgcagttcctggctgattctcacttgaggttgtgtgatggtcagaacaaagtttagagagccagcggggatggctgcatttcaagaagaaggaaagcaagcccaggaggtggtgttgttcttggttctgaatccctcttgacatttccggtgtggtgagagctgctctgactcggaaagaggagtaacagtggttaaaagtgtgaattctggggacaaatccagaatccattatatctcagctgagggaccacagacaagtcattcagcttctctaagtcggtctcagtttattgatctgtaacatggggtgatagtagaaactgcttcagtgaatttttgtgagtgaaatgttatacacgaaacttggaagagtggctggtatatggtacgtgctccacaggtactagatgactcagttactggacagataactagcccttgaccagctagtttggagctctgtttttcccaaatggcatcatctgaagattggccaaaaccaagttattacacatgtatctcccctaaacttgcacttatttgaaaaattcaaaagcaaattttgattcattttaaccaatatttaacacctatttt

SEQ ID NO: 52840 - DNA, 1030 bp, Bovine  19866881288040
  misc_feature (1)..(1): n is a, c, g, or t
nctgtctgtaagatggaacccaaacctgcttccaagtatgtggtgtaaacactaataatatataaaaagagctttgcccagggtcagatacagagcaaagattcaatgactagttattgggattactgtagttacagtagttatgaatacatcaaatgtttgcttgattttctcaaatcttttctgattttctattgaaatgttttgtccatctatgtaagtgggcctccttttttccttaacattgtggccttttcttgttacttctgtttcacttctctttaaaaaatatgccatagaataattaatttttgtttataaaaatgaataaaatcatcttttatcttattagaaatgtacttttctatagtaaagtgaggttcgtaagactcccaccacctggattcttataaaaagtttattgatttattcaaagtcaccaagcaagatctgtaatccagaacactttcactatcctcccatattttgaatttaatgttatctttgtggtctttcttccagaatatttaaatttgaatttgacttaatatcctttggaatattgttaggaaactccctttctttaccctccttttcattctgccattagttggcatgttctcagtgaatgcaaattcacttttacatcagcaaaagcaaaattgaataaggaaggccatctgatatgtagtaaatcaaacaaaaccacaatgaatttcaaagccaagtataaatttaagatacagcatgatgtaaaggaaagagaaatgagctcaaatcaggcgatttggatagagtgtagactctgtactgactcacttcatgaccttgggaaagtcagttagcttctcttaggttccttatttttccttagtaaaattaagtgtagtgctagataatcatgaattaatcactgatttcaattaaacatattataattcccattggttaatctaaaaaaattaagcctgaactccatcaagtattgtaaaataattagaatttttaccaaaattaagttatatattca

SEQ ID NO: 52841 - DNA, 1810 bp, Bovine  19866881363068
  misc_feature (1)..(1): n is a, c, g, or t
ntttttttctctgcatgaaaataaacaaaaggcattgtggacaaacttctgaaaatcagcaagaatctatgcaacatcttggacgcaggtattatccagatggcagcctcatctctggcaacaagcaaaatccaaggagccagaagcaccaacaacctctgcctcttgaatattcacaaacacatctgattccactcacgtcacacagaaaaccttaccagattgatttcatcttaagtatacttggtaacaattccagtccctcaacaacattctaacaaccgggactgcccttaatttcatttgcaactttaagtttcatcatcattttcatcaacgcctttataataagcagggtctttgtcaaggtaatgaattttgggggggaaacggaagttctgtttctaggtatctctgtgaaaaagaatgtctcagctgcaatcattttaatgtctccaccctaaggaaaaagaataaacttatggatacttcaaagaactttccagaaggaggaaactaggtggccccagaccttttccataggctacttcacctttccagccacccatcacactgccttcttcatagcaacagactgttcatcctttacggtccctcttcacagagtctttttcttctccatcctacacttgttagcttactaaagtcttactgactattctgaatttggatttacacaaagaagttaagcaactcttccaagtttactcaactagtcaaccaggagcaggaccatgtacgctgggaatccaggtcaacctgggctcactgttctattgtgtctgatgatgtaagtctcaatgatgagagtcaacatctgctgagcatttcctatgtatccggtactgctctaaaaatgtacccaggcaaactcttcatagcaactttaagaggcttttatcataacccactttacagacaggtatgtacatccttaaggatactgcctgaggttatacagctagtgagtgggctcacactcaggcagtctggttccagaaactgatccttaagcactaatcttacccagctccaaagccttaactgtaagctcatggttaaaatttgtatcaggctgatatttgtgtatactcctgtgtatgctttaacactaagccgtcctgaatgcagaaaagatactcaatatgtttttgattacctggagattcacttacttatcatatatttaatgataacctagtaggcacaagacattaccaaggtattacaggagctgacgaactatacaaagatatgatagcaatctcctgcagtcaaatgtggaaagaaaaccacacttattctgtgtgacctatagcatcaacattattcttcctgattccacggccaagtcaaattcataaaaccaatttttggaaccagtaggaacttatcaatatgttcttgttctaggaaagaacatttagctaaacagaagtcaaaagtactactattagcattttataaaagaaagtatgttctaaccagtgacagaaaacagaataaaagacagtccttcacatttagacaacaaattttagatctgcatttgaaagccatcaatctatacttttcgaccaaagaagaagagcacagaatgaaagaaaagcccaacaggcagagacttcagcgatagacggaagtcgggttgagaggtgtgggtgctggcattcacagatggagagagaggctgaaaatctcagagacatttcagaccacagagtttgtgattctatggctcttccttcaaggaattttaaaatgccataaaaatgtaattatagaaaga

SEQ ID NO: 52842 - DNA, 1030 bp, Bovine  19866881372454
  misc_feature (1)..(1): n is a, c, g, or t
naaaatgctgcttcccccacagaagcacaccgaatgtccctgactcagaaaggggtgccaaatatggggaccagtgctctacaggtgctcaaaatataattgttcaacaaacaaatagtgttctgctgagttaatgaccctgagttcttccctgtggctaatctattcttattactcagtggagcaaataaataaaacacttacatttccatctgaacctaaatttcagcatttactcatcaaaagctctgacccttggcttaatgttttcaacaggtcactaatgaaagcagatgaaaggttcctggtggatccatttggatagaagctctagggctctgctggttcttgtgcaatggctttattccttgcacatgatgcttttaaaagaatgaattaaaaggactgtgacaactgctgcttgtctctgacaatcatggaacccaaagaagaaggcaagggacagacatctgagggcttaagcaggtgctgagttaagcagtcacagactttaaaaagcatggtcactttggagatgataagcactgtctctcttgagactctcctcattccatccttgcattccagcaagatttcatgatgcttcatcaagcccgtttgatctcagagctacttttaacatatacagggcacagatttatacctatttgggaaatgagaaattaacatccatcaaggcagaaggaaacggcaacccactccagtattcttgcctggagaatccatcccatggacagaggagcctggtgggctatagtccatggggtcacaaagagttggacacgactaagtgactaaagaaaaataacaacaaagggaacaccagtaagtcatttcaatataatgtacatgattcacttagctctcaaaacaagcctctgaagaaggcttgattattcccattgaatgggagatgaagcagagaccagaaagattcagaaatttctcatcgtctcaaaactagtgtgttattttggtttcctttttttatttttctaactttaatcca

SEQ ID NO: 52843 - DNA, 874 bp, Bovine  19866880439910
  misc_feature (1)..(1): n is a, c, g, or t
ncacatattgatgttccttatgcaagaaaggaactaagacaggtggattgccaaacctcagtcacctgcagacaaaatttaaaagggttcagaagactaatccagttatgtgggacagacttagtgaaccaccagggacgttataccattaccctttcatcccaatatacaactgtcagtttggacaatctacaggacaaagtggcatctgtctttcaggaaagtgtgtatgaatatacatgtggtgtgcgagattaagaagggggaaaaaacatagtgatctcatgatttaaaaattttttttcactttctttttttaatttaaatttatttattttagttagaggctaattactttacaatattatattggttttgccatacaaaaaaaatggtacaagaagcctgtgaggctttcaaaaataaaattttgaccacatcattgcaaataatcccaaagagttcttaaaaacaagtgtggtgttgaacgagatgcatgccatcatgcaggggatcctaaatgagctctgattctattgataaaagtgtatcaacatgggatgaaaatggagacataactgagggcaaatactcaaaaaagaacactatagaacagtacaaacagtgagggaaagttgagcctggaagcaagtgagacttgtgatgatgttaaaaacaacattcagggccttttcacttttgtttggaggaagtagcagcagaaagagataggttcactgattagggcagaaggggaaggttggggatacagatgacacagaaagcagaaccgctcagctcctctgcttgtctgctctgtcagggacaatgttcatcaggaggaaaaagcataactgtacaagagaaataagcc

SEQ ID NO: 52844 - DNA, 924 bp, Bovine  19866880579834
  misc_feature (1)..(1): n is a, c, g, or t
nagattcagtggtaaaatttctttaaatacattttggccttcatttttcttttgcaaactttgctgtgggggtggcctgcccccttcagagtactgcgcaaccttcgcaagagaccatttatcactagtttccaccttggagcagatcttcctacctttccagtcttaattctgtgagaaatggctgcaaatcgatggttgagctctgagatttggggctctattactttcctgcagtggtcgccgcggtttgccatcaagtttgctgcttggtcacgcgtggagtccacctttgggcgtatgtcattcagttcagcctttaagcgctatattccatgagcaagagacagggcttgaagttagtaattcagtggaggttgaaagagaccgaaagagcaagaaagcaaaagagagtggggaggggagagagagaactagagagagggcagagagacagagaaggaaaaagaacacatgcagagaaaaccaagggaggaaaaagccaacttccataaacaggagtaaagtgaaaatgtgtgtgagctcaggaaaataggtcactgtccttgcttcagtttgatctaagtttatttaaagcatttccttagtctgaagaaggacaagggatgttttcctgatttttctatgttgccagcaacaattgttgtgtcttatatttagtcgtacctttcctcaatttcaaagctgtggaacaactttaacacatgctcaggaagaaagggagctgaagaacaattttctattccttccgaggacttatgaattcccttttgctttatcgtatcgattgtcacagaaaaataatggattttctaacagatagggattctgtgtcacagacagaggactgaggaaagctgagccgacagagggggtggagaggctagagtaaataactcagtt

SEQ ID NO: 52845 - DNA, 1913 bp, Bovine  19866880622237
  misc_feature (1)..(1): n is a, c, g, or t
nagttggaaaacggatgcctgtggcttgggcttgggtggtaaggagaggtttttcagatttgggaatgttttcaaagggaatatagaaggttcatttctgtgttcaccaaaaacctgagcatggttgtataaaagcccattctcagcaaagttcggactcaggagaatttaggagtcctgtgaagtcagtgaaggatcccttaggaatgtaagattccttctcatcgaaaacttggccttctctacaccagtcttgctgtgaaacaggggcatcagtgctggtaacagagatcttattactctggtcaaaatccttctcctttgaaatctgtttcatcacacttaaccacacatttaataatggcagtcacttgaatgaagacaaagctaatgccatgagcaaactgaccggttttctattttggtattaggagaattagataatcgatggaggcatggcatatacaaatcagaacaaaatatctgaaggaaaataatcaatgtttttgtgtatattgtaatatagggccatgctagataaaggattagatttttcaccactgctactactactccagcaaaaattattgtaattattttaaattaaataatcatggagcatataaaaagtcaaagtgaaatttgattacaaatgctttttgaattctacttaaattttctaatgaaatagtttggtgtatggaaaaatatgacttctattaatgtattaccatattgtaagatctgatcttttggtctataacatttggaataatgtaatcattttgtgatttctcagaaaaatcaagattttctttttcaattttaatttaatttttattttatgttggagtagagtttatttacaatgttgtgtttcaggtatacagcagagtgattcagctgtatttagattcttttctcatatatgttattacaaaattttgaatagacttccctgtgctttaaagtaggtccttattgattatctgttttatatacagtagtatgtatgttaatcccaaattcctaatttattcctccccctgcctttcctctttgataagcacaggtttattgtaaaagtctgttgagtctgtttctattttgtaaatgagttcatttgtgtcatattttttaaattccacatttaagtgatatcatattgatagcttacagtgaatgatgtcggattcgtgatctccaaagaagaagattttgctttggggccagggaccaggcttgatcactcaagagcttttgtgtagcagagttttattaaagtataaaaaggaacagagagagcttctgacatagacatcagaagggggatggagagtgcccccctcactagtcttagcaagggaattatatacttttttaattagttattacagtaaatcaaaaataatgtctcaaggttgtaaagatcttactagacccactcccataatatgcactttaagataacaggattagttagaaggttttcaggaaggagaaacatgtcctcaagcaggatacgttattgttatataatccttactaagccatgtaggaaaaaacatttgtcctttcctcctccttgagaattcctgacccttatctcctccttgagagccccagacccctttctcctcctcagtgaccctggactttttctcaagctgcctaggaagtgactctctcaatatgatatttggtctttctctgtccaatttatttctcttagtatgataatctctaggtccatacatgttgctgcagatggcattagttcattctttttatggctgagctcaaaattctccaagacaggcctcagcaatatgtgaaccgtgaacttccagatgttcaagctgggtttagaaaaggcagaggatccagagaccaaattgccaacatccgctgga

SEQ ID NO: 52846 - DNA, 1346 bp, Bovine  19866880829057
  misc_feature (1)..(1): n is a, c, g, or t
ngatgatattctttgcaagcagaaatagagacagagacatagagaacaaacatgtggataccaagggggaacaaagaggtgttggcatgatttgggagaatgaaactgacatatatacactatgtatagtcactatgtataaaatagacagctagttggaagctgttgtttagcataaggaactctactcagtgctctgtagtgacataaataggaaggaaatcaaaaaagggggatgtacatgtatatgtgtggctgattcactttgctgtacagcagaaactaacacaacattgtaaaccaactatactacaataaaaattaaaaaaaaataaagatatggataggtattttgtctaggtagaagtttcatagaactcatcagattctcaaaggtatctgtgatccaggaaaggtgatgaagcacttaacaattgggttccaatgttgttgggataaattgtaattccttaccagccaaggccttttgcaaggattggctcaccccaatccccactcctaaccctatctcccaccacttgatactgtaaatctcccaatggagccaggcccatgagggcttgagtgactgtcaccttctgttctttccttctctaagagctttgattctctaatagccacacaatttaaaattctattctcaagcacttttcataagtctaagcccaaaccaccacttaagactcccttaagcctcagaaaaaaactttatatttttccttcagattttagaaaaccttatatattattatctgcatttatcacacttaagatgtatttaattcatgatgtacacatttttttcctcaatatagttaaaatcattatagataagaactgcctcttacatgacttggtattgctctgtcatcaaggaaaatgataatcatatagtatgttctcaaccattctctggtgaagtcagtaaatacttattgagcccctcctgtgtgtcaggctggatttcttgaagtgaacacatctgccagaaattattgtacattcaagtgcagaagatagataaataagattaaataaatgtacaatatgttgagtgctaaggagaaaaatataaagccactaataggaatagtagatgcccaatatgcaactggagatcagtggagaaatagctcagaaagaatgaagggatggagccaaagcaaaaacaacacccagttgtgaatgggactggtgatagaagcaagattcgatgctgtaaagagcaatattgcataggaacctggaatgttaggtccatgaattaaggcaaattggaagtgctcaaataggagatggcaagagtaacatcattctagaaatca

SEQ ID NO: 52847 - DNA, 1045 bp, Bovine  19866880948807
  misc_feature (1)..(1): n is a, c, g, or t
ntaacagtggaattgcagtgcaagttacattgcaggcatgacttttccaaccatccccgacccacctgctgatgttatggaaaggcttccaaagaattagaaggtgaagaggcctagcatggaaaaacccagagtccttaaatcactatgtggaagaaagctatgcacagataggaatgcctgtgtatattttgaagtatacattttttttccttttcctttcttaagctaccagaattgcaggatccctttgttacagtaactggcattaaccccactgacacatatgtataactctgtgtgctccaaagaaatataagcattatttgatggtggaaagaagagaaaaaaatatactgaagaggaaagtattctgactctgtgttcaattttaaagcacagtataattagtaatattgtatgtttgttgcagttttttggaagaatgttgaaatctctggcaactgaaatacattaattttcaattctgtgtttttttttttaatctgcaagttttggtaacactgatatataccagtttatttgtttctttcaattctcaaatttaaatgtgcaagtttgccttccaggcataaattaagaaccattgtggaaagagattatatcaaaacttcacaaagatcatttcagttctttgtaaccttaaatgaagtaagccaataaagcattaaattaacatgttgtacaacttcctgaagttttaatatgcttttaaggggcaactctgatcttattacctctaaagctaaagtcaaaattggtgtctttcagtttataaaatggagataaaacatcattttacccaatttaacaaaatattctgtttctgaattataaaatacagattgcctaacaattcccaaataaatgtgcttacccagaaatgatttttttttctaattagtagccctggagtctttggaccataaatatgtttttctctcaaatgctttaaccatgacattttccttcagactagctcaactatttctacagaaattatacacttcattgattcagccaa

SEQ ID NO: 52848 - DNA, 795 bp, Bovine  19866881214122
  misc_feature (1)..(1): n is a, c, g, or t
ncaatgcatattttggattagatgctgaaataaagtaaatgttatggtaaattgacaaattcacactgctaatgttatgaaaaaatgatgtggcaaaagaaattaagatgtatttctcatttttgataagggcactctttcctatgctctattaatagattacgtttttaatctgaaaaactaaccactggggttagggaagcccaaaggtaggggaaactgcccactttcagaatgcagattagaactttgaaattgcacccagatttttttttccttttggttagtaggcctctgttgttagagtagtagttgcaaacacatataggtttgccagtaaccaactcacaatttgtgcaaagttgagtcttcgaaactgagcaaatttgctctcaatttcccgccagcgcttgctgagctggatctgagttgactccactgccattgctgccccatcctcagacaagccctcagcttgcctatgcactgcattcagctcctctttcttcttctgcaactcacgatcaatttcctattgagcaaaaccaatacagggcccagggcagttagctaaccacatgaatcaacctatcccagcacatacctgtcccagaaatttcacaggctgtcttcattttattttcactgttcataagttacaagtatggaagccaacactgtcatcttcaaggacccaaatattatttcagcttttatttgaatgctcagttttagacactctaattgagaaaatattgaaattgatctaacagatttctttgtcaattcctctag

SEQ ID NO: 52849 - DNA, 1100 bp, Bovine  19866881352996
  misc_feature (1)..(1): n is a, c, g, or t
ntgaagactaatcaactgcatgcaggtcaactgaagtcagaaaccattcattcaggaagaaaactttaaaaaagaagagctaattcttggaaaagtaggctctaaaagcaactcaagagcgatgcacagattagccaggcagaaaatagactctgtgtcaccatcctcaccctgggaaaatgaagtggattaaaaccaaactaattggcttgttaatgtcattttgaggtcataaatatttcttgaaagccctagtgttcatcaaattttactcctgtcattcatttttcattctaaagtcagtctggtaaaccatggatgatgtgagcatcatcttgcacatcccagatggaaatgacttactatagtcaaaagtcatctagaactggcatatatttttatccctgattttgtttttttttttaatttctttaagaagagcatcttcactttgctattcacaaggaaaagctgacaaagcactcttttaatgcataaagtattgtgtggatctgcaaacaaaccaatttgtttgaaactcagggaagcaaacaatgcatatgaaacccacaaagcactactgtgtgtgtcttatagggaaatcataagagaaaatgaatcgaatgactcacaataggatatgtttggaaggagataaaccttttatatctatgagcataaagacgcataaagtattaaataattttaccttagtagtacttatttttgcatatgttaacatttaaactaccagaaacagctcctgaaattggttatgctaatgcctattgctactcattttaaaaggcaattccacttaaaaccaaacctcaggcctcaaaacaatagttaaggtcaaacgaagcataccaaagtcgatatacacaagatatgaaaagctccaaattatatttcaatgacttgtttaatttgtaaatcaacccaatcaacaaagcatatgtttaaaattctaaagacatttttggggtgggtatttctttaaaccaaatgtaacttcaatcccccaataataaatatctccccaaatgcaaagctgaatgtttcattagcctcctaaggggcatattagcatataaaag

SEQ ID NO: 52850 - DNA, 912 bp, Bovine  19866881394552
  misc_feature (1)..(1): n is a, c, g, or t
nttttgaaagtaaaagagtagaattcttttataatgccggaatgacacagtccttgaaaactgagtagaaatatgtgatacatttaattttaaattgtctttaaagattatatccattctatcattgttttgacattatgataatattgagtaaacacagtcttattcaaatttagtaaaacatcacagggaacttctctagaggtctctgtgagtaatgttagttgtctattcttcatacacacaattaatcagaattccttcactaagcagctctactatcttcagtaaaaatcaagcaactctcctctgccaaccccaatctcacatcttatttatgctcatttctacttctcttttggagaaggcaatggcaccccactccagtactcttgtctggaaaatcccatggatggaagagcctggtaggctgcagtccatggggtcgctaagagtcggacacgactgagtgacttcactttcacttttcactttatttcattggagaaggaaatggcaacccactcccggtgttcttgcctggagaatcccagggacgggggagcctggtgggctgccgtctctagggttgcacagagtcagacgcgactgaagcgacttagcagtagctacttctctttataatctccgtttcaggcccatatacttagggtattccctggtagctcagttggtaaagaatctgcctgcagtgcaggagacccggcttcaatccctgggttgggatgatctcctggagaaggaaatggcaatacactccagttttcttgcctggaaaatcccatggtcagaggagcctggcgggctacagtccgtggggtcgtaagagtcggatatggcttagtgactaaaccaccaccatctaacacttaaactttctaaaatagagca

SEQ ID NO: 52851 - DNA, 1296 bp, Bovine  19866880515423
  misc_feature (1)..(1): n is a, c, g, or t
ncgtttttctccttcttagcacttaaaacctcattagtttttattcatgtgtgcttttactatataatatttatttccccattataatttaagaaccgtgaagatagtaatcatctcactattatgtaccaaacacccagcacaaagccaaacacataggtgcagcataaatatttgttaaaaagatgaatacattgactgaaaaatcgtcaaaagaaactccataagcagaactatagaggatgctataatgccagctctatggaggcaagcacattttgttttttaccataatattcatttgtctaagggcattttgacattttatatgtgtttaatatttgctgaaaaatacgggagaatttagaaggcaacactttaattttgaatagcagcatcaatgttgggatctacttccaagataaataaaattgaactattttttcttccatatgcatgagtagagacacttcattttttatgaaatccctgctcagtatattcactgtcttatcagccagtgaataaaaggggtaacaagaggttttttttttgggtcactgtataagataatgtaatcaagataatgaagaaggctgaaataactgaaaaatcaaggaacacagtaataaatggactaaccattataatgactttcatagaaaagaaagaaaagcactcatatttaaaactttgattgtaagtaacaaaaggaaaaatcagaatttttttaaaaagtatacacttgatggtgtaaagcttttatacagattggttttctgtcatttgatataatagttatcaaaccataaaactttactacagtagttctggcatttattttttctcaaagtctacgctttatcctaacttctcctatcccatgtatttctttctactctctccacgagatgatagaaaagacttctaaaataactgctgcattttggacaatttacaacagagggggctaaaaagtgaacatcatgagatgcaaaataatcatctatagactaggttttacctttcaaatagtaaacaactctcaatctgatcatattttagaaaggattaaaggaatacattttatataattatgtgcccctccaattctatatgtttcataaataaatataaataggggttggaaacaattcacataaaaacatgagctaagtaataatctttaaaaaagggaaatttaatcctaattaagctacacatatcttattgtgatgttcggtgctgtgctgcactcagttgggtccacctctttgcaaccccacggattataac

SEQ ID NO: 52852 - DNA, 1042 bp, Bovine  19866880584950
  misc_feature (1)..(1): n is a, c, g, or t
nataaatttccattattatgtcattttttagtttatgctcaagataaaagaaaattctaatttattatcttgctatttgaacatcaattttgtgtttttcaaagattttttttcttttttgatgtggacaatttttaaagtctttattaaatttgttacagtattgcttctactttatgatttgttctttttggctccaaggcatgtgagacattagctcccccaaccagggattgatcccacacccccatatgctgcaggctttgaaggcaacgtctccaccactggaccactagggaagtccctggattttgtatttttttctaatcagctatcaccacatagctatttattttctaaatatgacaggctatttcttagaattgtacattgaaataggactttttctggtatgttttttaaggcaagcagctagataacagatattatgaataatgcaaatatattttaaattaaactagaggttatttttcacgtatagaattttatgtaattgaaaatcacatatatgcatatatacatccatccctaatatatatagaaatgtatataaatacacacatagacatttatcaaaaacactgtacatgtcaatacacagacattctctaactgatttttcaattctatgaaaacttgattatctgtttttgtgagtggttttgcacttgaagtgtccacttgatctgtaaaaatttataatgagtttacagatcttgccctgaaaagtgaaaggttgagtacaaatgaagaaaagatgctctcaaaatgacaaatttagtaaatgactgaatttttaatactctatagtagaatgaaaacaagtatgagatacgtttaaatcttataatcaaagtgtttgaattttcagttaaactttaaaataacaaaccaaacaacttcatgcagcacatcctatggtgagaaaattgactccattagacagtgggagccacttaagattacccaattagatatggacaggtggtgagtatgtcattcacccagatggagaaattca

SEQ ID NO: 52853 - DNA, 1477 bp, Bovine  19866880600512
  misc_feature (1)..(1): n is a, c, g, or t
nttttgaaatctttattaaatcttcatctcatcacagagaccatatagcccaacagtgttttcttttaatggtatttgttatagtaatttgaggatgtattgatgttactattatgccaaatatttatatttttatatttaaatttattctgttaatttatttttttctgacttcactttcttaaaccttttcattggtgaatgactatcatgttaacagatttgctaaatactagatgaaaagcttcgcaggtggctcagtgggtagtgaacctgcctgcaatccagaatacaccagagatgtgggttcaattcctaagtcacgaagatcccctggaggagggcacagcaacacacttaagtattcttgcctgcagaatcccatggacagaggagcctgcatggttcttcagtccttggggtcgcagagtctgacatgactgaagcgactgagcacagcacacagagcacagaggaaaacaacacttaatgataaagtatttaccttttctttttgttttcttattggaacgcactgccttcactcagcccccagacttcctcctcaagtactgccaagctgtatattcaatatactttgtggtagtgccagttcttagccagtcatgtatgtgtgtgtttgtatttctaattagttatatttttgtatctatgtctttttaagttaagagtctgggttaatgattctccctacttaaatatctgtaatttatttcattttttgacattttattttatagatatattatttcattttttgccctcttattacatttatatttaactctcctaagattattgtattattttaatttcaagagcagtaaattaaattcttaggttttgaatttattggatgcccatcttagggccaatttcttcacttgttttggaattttgcagtctctcatttttggatatcacattttctgtcttattttcttcttcttggcacctttggggccctgtctagaattaggtttgataatggcatctcagattgtctaaaaagtagattagagaatcagagaggtagcaatcggatcgtggttcaaatcatgaccttaatcgtcttctctgcttcctttcctatgtaagaacactgatgttctgtagcagctttttggttaacatccatataaaatcaggaggataccaagtcaaaaccctagcaagtaaatgaaatggaacacctttcattacgcatttgagccatattccctattttcttggctaattctgattcaataggatatatattaagattttcacccaggctcaccactttggttttgggctcttctttttccttcttctattgttcttaatttttcaatatttttgttataatatctctttattttatatctctcattgctacatgctcagaaccaaggaaaggctaaaaaacatgaacttcaacaccaccatgactaaaataatatttatggtattt

SEQ ID NO: 52854 - DNA, 743 bp, Bovine  19866880699263
  misc_feature (1)..(1): n is a, c, g, or t
nctgagtaaaatataaataaagaaaataaggctgggctttctctcctccctccccaccccgcctccccacctgctttttcctctaccttcctcattgatatacctggtttacagatgcaaataaattcatttggtaattctataaatttggcaggccaggcctgggttttattctacattttaaaaagtgtttattttacacactaccccacctcactgttccataaaaggtaatcctattatcctatttactggcctcatttctggaaagactaacctggaataatgtttaatgctttaattttccaaaactctccaaacacaatctgttacttaaaatcttttatttgctaaagctaaagttaaggaaataaaaaaagtgcattaatgattctgaaaaagtgataggatgtaaagcatattggaaactttgctaatatggggcatcaaggaccagtttcagagattagcaccatgtttccaattctaattcctataaactactatgcagtaaacaaccagagctaaaattcccaaacctatgcaatcattctcactctttatgaaattaaaattttgccaaaagcagctgaggtaaccactagggtaacaaatgtgtagctgactagaggattaaatttgatgacaattcaaaaataactgacatcaagctacatatattatcacaaaacacagtaccagcattgtcagtttccagtgtgagttttaatactggaagggat

SEQ ID NO: 52855 - DNA, 2832 bp, Bovine  19866881181272
  misc_feature (1)..(1): n is a, c, g, or t
nttttttgttgtagttggcatgggctcagttggatccccccagcatatatatgttgaagtcctaaccctcagtacatcagaatgtgcctatatttggagatagcatgtttaaagaggtcatcaagtgaaaagaagatcattaggtaaagccctaatcttctgaatgatgtctttataggaggcatcagaagaaatcaactttaaagatattttgatctcagacttctactctccataattgtgagaaaatatagttctgctgcataagccacccagtctgaggtactctgttgtggccccctaggacactagtacatctgtaataaaaagcttgctattttgaggtttactggtaactactttcgatgtaattggtccaagtatctctgtgtactcctaaactatgaagtttcagtaactgcagtcagttgtatgcacaggatttgaaacctataagattatctattccatgaattagaagatttccatatctgacacaaaataagtttattctcttttgtaaatcaatgatacctacttttagagattatgtgaaaatgaagaaaggtatttgtagaaacaccatataatcaatagtcaatattatactgagctgatttgaaaaagataccttcctacttaccaagactacttaatcaataaatgaaaaatatcaatggaaatgttaacagattcttttatacaggaaattcattgtacgatagtgtagaaagctgaaagaagttgataccaaaaaatattatatataataatatgtccaaggaacaataagagactttagactttttttagactgagagtcatgtgataggtactattaggacctatagattaggtcatcagaagttaaattggggaggcataaatgaaaaaattagaaattatttgggagaaaatatgcttctaaggagaatacatgctgaaaggagtgcttaaaaaaagatttgtctgacaatgcaggctattcattccttaatattttagtttaatgcttgtaaatcaaggataatgaaatatgacttatggggaaattgagaggattaattacagatgctaatgtttgtaaagagctttaagaaaatgttgaattcaaagtcttattgcatctcagttcacagtatttgcattcttcctcttgtgaatttctattcatattttctgaagctactttagattgaactctaataaaagtagtttctgaaagcatttaatgaaaaagaggcacctgagaagagcaattggcagtgtctgaccacctcagtagaagaaaggccggattcccaaaatgaaaggtcattagtatgggtttctaagagaaaacagacagccttctactgttttcctcactagttatcctcttctgacctcttcactttttcattctcagattccagatactctcaggtcaatccatatgataaataataattaaccatagaggtaatccataaatgattaagggatcaaaactgctcactaaatagttgatataaatttgattacaatgaaagttccacattcttttggaatgaacaaataatttttacaaggcaattaaaaatgtaatatataaactgcccacgtgacaaatttctcatatacaaattacacaaaggccctagaaaatcagtaatctcttcatgaattttgtttcattgtcatatatcatttttactaagtgtcctctgggagtgcagaaacttacatcccagctctgttgcttaatcactgttactattagtaatgaaattcctttatgcaactaatatgaagatatagtatttgtcaggcactattcttggcatgtctgattgtgactggataagtgagactaaaataaaaatataaattttttcatctttatatgtatctcttattttttatatgtttctattgcatgtatgacaaaatgtattaaaactaaattccatacaatcattcttgcccccaataagtcatttttcttggaaatatcatctttcacatcatagactgtgctaaccaaactctctgaatgcatttagtctctctactcttgccttttcatcattagcttgtatcaaaaagtcatcctttatattccatctctaattcccactaatgtaattaatcaaggccctaaatcaggcataactatatcaagtcacttgtccactttgctttctttccttcatctctcatttgctcagtctgcatcacctgtgatttttgttaaatttaaagaacaatagtatggtgacattcagttctgagtttcacaaaaaattcctcattctgtgaccttgctcagatcagatcagtcgttcagttgtgtccgactctttgcgaccccatgaatcgcagcacgccaggcctccctgtccatcaccaactcccggacttcactcagactcatgtccattgagtcagtgatgccatccagccatctcatcctctgtcgttcccttctcctcctgccccaaatccctcccagcatcagagtcttttccaatgagtcaactcttcgcatgaggtggccaaagtactggagtttcagctttagcatcattccttccaaatgtcacttaaaaacattaagttttagtgtcatcaacttggaatggaagagattttaccaagatagcactattttctcccttaccataaacatttttgaagctgctcttttttaaacatctatactggattcatgatatatatttttttaatttactttttgcctcagctttttttttcccactactccatcactgtgttcttgatctaagaagcaggttaactagtttaagagctccttccccttaatcattt

SEQ ID NO: 52856 - DNA, 1097 bp, Bovine  19866881214184
  misc_feature (1)..(1): n is a, c, g, or t
ngcagaggaagatgaatgtctcagctcaaggagagagagctaattcacccttcctctgcctttttgttttatccaagccctcagtggtttgaatgatgcccacccacactgaggaaggctatcttttttacttagtctactgattaggatgataatctcttctaggaacactcccacagacacatccagagttaatgtttccccagcaatctgggcatgccttagcctagtcaagacgatacataaaattaaccctcacagagcccaaggacattctctgagtttgaattgagatttgactgaaagccatgtatctagattgatgctttgttggtctttccactttactattgtaccagagtataagcagattgatggtgaggggatgctctctcttattccaacattcaaatttagtatgtgaaacttgctactttttcctaatcaagtctctaaaataagtagaaagttgtaagtataatttctttgaattgactatcaccttcacaacatgtgatatgagatgcctttgcccggtaggaaaatgtcaagaattcataatcattttcatgttcttgtcacctttgttatccatcaattgaggcattgtcatctcctcagcaatgtcaatccctctttttctagcaacactacaactgtaactttcccaacagacatcttagaaaattcacatacttgctgagttttagacagagtaacttgaaatcctgagtgtcaggaataagaaacattctaaaacataggggtggacaaaaaacacctgatatgctttaataacattgttttgaatagctgcacatcttaagaaaactgtggagactggcagaagcaggagtctaaaatgctgaatggagaccagctcctttggatcaggagctggattaggatccagctcctttggatcaatatctcctgctgatattgattcagctaaatagccagacacatatttcaaatcttcaaagacttgggaggtagatgaccctaaattattttaactaatgttcatttgacattcagtacatcttaacccttcttgcacttacaacaataaatccatacaacaaccatacatt

SEQ ID NO: 52857 - DNA, 1386 bp, Bovine  19866881487389
  misc_feature (1)..(1): n is a, c, g, or t
nctctgagcttaactctttgtttgtatataaaataaggaagggattcttgtaaaatgatttttactccctctggaaagaacaaagttattgggtaataggttatccttcagccagcatcagcacaactataaatctacagtgtatgaaatcaacaaaattcattacttgccattgaatatgaagcttagaaatctccatggagaaaaatatcaactatatgtacctgttctttgagacatttttctcattttgtaagcattttatgtgaaacaattttgtctattactgaatttatctttataggaatgctataggtttgctgctgctgctgctgctaagtcacttcagtcgtgtccaactctgtgtgaccccatagacggcagcctgctaggctcccctgtccctgggattctccaggcacgaacactggagtgggttgccatttccttctccaatgcatgaaagtgaaaagtgaaagggaagtcactcagtgtgtctgactcttagcgaccccatggactgcagcctaccaggcttctccgtccatgaaattttccaggcaagagtactggaatggggtgccattgccttctccgctataggtttgcaataagtattaaatgaaaaacaatcagaagagacatgaagcaaaatctcactttaatttgaaaacaggatatctgacaaacaatggttttattaggtaacaaggtacatcagaaaaagcttttaaattataatatattttgtgaatagaattagtatggtgctttgctccttatacttggatatttccctcacattatatctaaagaaaacagtatcaaaatataactcttcatattctaactcaaaagtattacttatttcatgaaactgcataaatgattcttaacaggatgactgttacttttgcattatggttgtgattctaatctacatagatgaaaatattattttaaaaatatgccatataaagccatctgatcatttataggcttcagaatgaaaagaagcagacatgacagtttctgtgagaatatagtctgtaaaccatataaaattatttggtccaaatgaaatgttatggttaatatatgaacaaaaatctactaatgtttgagtgttaatttatcagccatgatttgactacaaaggtaaaaactttagcaacataaactactggataggaaagaccttgataaatagtagagataagaaattcagaaataactgcaatataagaagtaattatgagaatgaagatgatggtaacattggataatgatgtctcttaaaataaatgtcattaaattctttaaaacttatgtacttttaaacttgtaggcagaaacatttttttaattaatttatttttaattgga

SEQ ID NO: 52858 - DNA, 1254 bp, Bovine  19866882032629
  misc_feature (1)..(1): n is a, c, g, or t
ncataaacagcatgggtttgattgaatcaacttaaagaattacacagcagtcaatgggctcatcagcaggagtgaaaaattcacgtaccacctacaaacagcttgaaatctgtatccttcaattaggcgtagcaaacaatcttttagcacattccagaaaggtgactcttttcccagaaggaaagcgtgctgctacaccagagggatatgctattagttataactagtgcagctgtcatccagtttgatatatttaacaaatatcatatcttcattattaataactgtgtcttctgtactcaaaatttgattgtaaacatgaaaatgtacttctctttttatttaaaaatcttgaattatcaagatgcaatcttaaaatacaataatgtaaactaatacatgtacggaggcagtggtggtttaagataatcatgaactaactgaagtaattgttgtgtgtctgcttactctagcaagaagctgcgaatatatatatatatttacagctacagctaaataaagctaatagagacagataaaccagagatttctaaaaaagataataatactccaaatttctaattcactctccttttaataatcctgtagtctgactatgattaatagaattgtttggaggggaagagatttttaatataattttcaccacaaaatctgagcgaagacaatcatagattcagtgagaaaaaacagggtaaatcagtatgcatgaattttcaagtaaaaaataaaataaatcacaataatctgagcatttccatttcactagcacaaagctttatacattttgatttctagacttgtaaagaatgtgttcccttaatcatatctggtttaaaaagctatagaatttagatgcaaataaagaactgttagattcttctttcccaacgtcatctaaactgaatctattccagtctttatcctcatacatactcagtttcatgatgccatgagctggattgccatgagaaaactctgtcctagagtaagtgttcagttaatgttagaattaatatctttcagatttcatatcaaactaatttaggatcattaatttcatgattggtgttgtttagtcgctaagttgtgttcgactctttcacaaccccatggatcaaacatatatctcctaaattagcaggtggattctttactaaagtacctgggaagcccaatttcattattacaagtatataataactcattccaaactcctaggggccatatata

SEQ ID NO: 52859 - DNA, 2124 bp, Bovine  19866880388673
  misc_feature (1)..(1): n is a, c, g, or t
nagggagagggggaggagaagaggaggggaaggggaagggggaagaaaagaagtggtggccccagaaaggatttttgtttaagtttccccaggcacactgagcattcccaagttatttgcagacagtttcatctggtttctgtttgaggagaagagagaatgggatgatccgtaaggagatgggcccggcagaggggggagaacgggacagggaaaaagatagggggagtgcgtttttcctaaagctggaaacatggaagttttctgatcctaccgtgagaaaacaaattctctgagagatcagggctcaccttttggaggtggataacacttttcaggacacgggaggaccatagagcaaattacttctcctcgagtgctaaatgattccctggtgccctggaaagagcccgtttacctccgaaaggtgaattgtttattgctggcaagtagaatattggctgtaatgctggctcatccatcctcttgcatccctgtgaggtattcagggtggaggtgatgctatccacctgtcactgcaggaagagggctgacagatgcctttctgactcctgttcctggggtttgaattgtcagggaaggaggggaagtgacttttccaaggtcttagagtgagtgagccactgacggaggtggaattagatttctgtcccagttacaatgcacttgttactgggagaaacaagtgtcttaactctgatatggagcctcatggagaaaggctggtaggagaaatacctcggccagctcttaggaagggagaggccaaaaggaggatgcttctgtggttgtcccaacctcattaggttttttcctcttagtgctttgggtctctgggctgtctgctcatttgtactgtctgtctcatgcattcctacccgtggttcccagtggtcaccatctcccatgcctccaaggtcaggtatatggctgagttcaggtaaacaagcatggggcgggggcgggggtggtgtgtgtgtgtgaaaaatgaggcctgagttggtgaggaggaagttaaaattgtgagatgccatttttggtgagccttaatgcagaagacagcagtgtgaaatcctgcttgatgttatggccagagatctgttgctttttttttttcctttttgatctattgctttttgctcccctaaatcttcaaaatcatagtgaactctgtgactcctgaaagcagatgctgtcacctagcccttcacagtttggatgatggagggaattgggaattccttctgttggggtgaatagggaatggatctaaggcgtcagggcacttgggttctgtttgtccttctggctgtggatttattataataaattaatggcttccaggtggtgtagtggtaaagaatctgccttccagggcaggagacacaagagatgcgggtttgattcctgggtcggaaagatcccctggagtaggaaatggcaacccactccagtgttcttgcctggaaaaattccatggacagaggaacctggtgggctgcatgactgaggtcacaacgagtcagacaaccaagcacaaaggggagagagaagccaaataaagtataaaaaagattctttgtggcgatgttgaggtttggtgatattaaaaacttctagtacatgattattattcaggttttatgtgccacaaattatgcatagtgtttctgttcatgtatgttatttcattttaaagtatatgacaatcttatgaggtggaagtaattaacaaataaggaaattgaggcacagggtgatgaaaaataacttgcctaacattagtaaatagttatttgcattatcacggaaatacagtgcatttccagtgattttttttctttttcttttttttttaatagaatagctgtgttcacagagagttttagaatcaaaggactatgttattcacgagagttctggataacttggatactgattcattgcaggctaagttgagtgaaagcttaccttttcacagattaacaaagggggggtgcgtgctttctaactatattaatcacatgatagtgttcatgggaatatttatcctgcttagcagaatagactttccaaagatgtagctgtggcatctgcatccag

SEQ ID NO: 52860 - DNA, 1252 bp, Bovine  19866880454922
  misc_feature (1)..(1): n is a, c, g, or t
ngaaaaacaactgattaatactcttcacaggtaattatattttgagagagtcgtgaaatcacctgctaacgctttcttctccaggcaaaagagtctctcttaacctctatcttccttcctcagacctacattagactgttaattgcgctggtcttttgcccaacgagctctggaggttggccatgccctttcagacatgcaagacaaagatctaaatgagatatgaactttccttcctattttgtttcaattttacatttacttttttattaccaatatttaatgtagaaaatttggagaatgcaacaaaatcacacagaagaaaattactgttaactttatgcttggcagcctcctagcattttgtgtataagtatgttttgtgtgggtgtacaaaagttaggatcatatggaacacatcattttgtaacctacttattttactaaaaatatattatgaatattttccatatcattaaacattcttctcaaacataagtttaatagctgcataagagcttgttactgggaaagtccataatttatttaatcagtctctactgtataacatttaagcttttttcttttttatcactattattaataacaccatggtaaacatcatagtacagaaaattcagtgcatattttgcattatttccttgaacaaattctaagaaatggagttgctggatcaaaggatatgacaaaatctaaggcctttgtgatgtacggtaaacttttctcctggaaatgcctattaatttatggttcccacaagcatttttgatcctttccatttcctcatattctcagtaacaatgttttagcagtctttcagtctttgtcgattatcacattatacaatgacatctcatttttagattaatttaatttgtatctctttgatttactaatgattgaacatttttcatttgtataagcagggtgacagtatacagccttgatggactccttccgcaatatggaacaagtctgttattccatgttcagttctaactgttgcttcttgacctgcatactgatttctcaggagtctggtattcccatctctttaagaattttccatactttgttgagatccagacagtcaaaggctttggtgtagtcagtaaagcaagaagtggatgttttcctggaactctcttgctttttctatgatccaacgaatgttggcagttggtctcttgttcctctgctttttctaaatctacgttgaacatctggatag

SEQ ID NO: 52861 - DNA, 642 bp, Bovine  19866880477585
  misc_feature (1)..(1): n is a, c, g, or t
ntcttccactgtctaacacaggagattctggttctgagggtcttgggctatgcatgtgtgccgcgacgaggcccggaccagtaaacaacacggcatggacagatctctgcccaaaaggagcaggatctgaaggtaccactataaagacaggtgttgggattcactgatacggaaggctgttcagctagagagttaaaaaaaatcccaccaacattaaataaataaatgaaaaggccaatacgtctaagccaaagtgacgctacctatttactgcttgaagccagcactctgccaaataggagacaaaatgattatttaaaagctcctttttttatctctgtggcaccatgcaagtctcaaatgaacctttcaccaggacaccagagatgttaacactcatcctccaagatccaatttcaaccagcggagctgttacctaatccagcaaccatcacatgtgatcaggttcctgctcccctgatgggagccccgcagcctccctcgcctcctcccctctttgctccccagcccaacagcttttactcaggtttaaagggaaaaaaaccctgtttatgccagtacatacaggattttaatactgagatttgtacacttccattaccaaaaataaaatcaactgca

SEQ ID NO: 52862 - DNA, 989 bp, Bovine  19866880479937
  misc_feature (1)..(1): n is a, c, g, or t
ntgagtcgtattccctaagggcctgtcaatttgtaaactgaaagataaaaaagacaacctggaaattgcaaaggcaaggtgcccaggatgagagagccagggaaaatcattacccttagcaggaagaacacttggccaaaagatttggatcttatccactgacggaccttccccaagtcactttacctctgtgtctcagctactcatgcataataataatatgcaggacatatgcatcacatatctctggagaaggaaatggcaacccactccagtattcttgcctggaaaatcccattgacagaggaggctggcaggttacagtccatggggccgcaaaaaagttggacacgacttagcgactaaacaacaactaaagtactaaacaacaacgacttagcgactaaacatgttgtttagtcgcttatattaaagtcgtatatattaaaatatcacatatataatacgaataataataaccattgccctacttccttcatagatatgttgtagaactgcaacgctataatgaagatgagatttcttgtcacatataaagaactatgccaatgggaaacattttggtaattagcacactaccatgagtgtggcctgtgcctccagggcaagaaccaaatacaattcctctctgtggccctagcacttgtcaactgaatgaaagagaaagagaagtatgaggagatgggtagacatagttcacggtatgcggaagtcagcgcacaacaaaatctcataaaatgtaagctgacttttcaatttagtatcttaatcttctctacccttgacaacttcctcctctcttgacaagagaaaacgggttcactggttgatgtcagatctgtattcacagaagagctattctataccacctgcatctctgcccaccatccctcaccccaaggtcttccagtgcaacctgccttcactagtaggtgaaggaccacacccaaagcaggcttttgtgtttg

SEQ ID NO: 52863 - DNA, 1372 bp, Bovine  19866880609729
  misc_feature (1)..(1): n is a, c, g, or t
ngagcccatatattagagtatgccacggatcatttcagcaaaaatcaaccagcactcttctgacctggggcaaaaaattccctcattgagatcctgaaaaataacattacatcatgttgcccgtgtcaagtttataaatgggccaaggggaggctggggtgtaacctgacactatcaaaacacaagccctcagagaagaaagaaggccattgttgcaggctgtcagccctcctcttgctggaggtaaagtgagatgcaagaaatgtaagtgggaggccatgcatagccttgttccctatctcctaagaaatcaggcagactccctgcaaaacggggctgtccccacttcctatgaggtatgtcgccttcctttctgatggtggatgagcttagtaagttttattcctaggccccaaagcaaagaagcatttaggtaagatagtgaagtccaggggccgctttttttttggtggggggaagggagcgcaggactcacatctctttaacagacaatccaggggaaacagagtcccagtgagtgtgtgtccacaaaagtaacacaaacatgtggatatggccagaagttagagaaaaaatactgaccccaagaaaggtcaagtgaatatccaatcataaagcaagaaatcctgaaatgtgaaaaaggaaaaaaaggcatttcaaagtgaaggacgggggttcggagcaggagacaataaagagacaaaaaaaaaaagaatgtggggaggattatagagctgagacagacacagaaccagccaaaagacaaagtgttggcacgaagattaaaaacagtttaatggataaaagaagcaaaggatttatggtgagagaaagctcagaaaatagaaagcgagacaaatgtaagccagcctgagtggagacagaattctgctggtcgaacatttcatttgattttctctttcctttcttcccagctcagcctggaagcgccgggaagcatgcaaatgtgctaccgcggcagaaggctgtggtcgtccaggacaacgggcctacgggccaccggtgaaccggagaaggcgaggacacggcgcccaaccgatcacttgtatttctgctggttttctgcttgcttccaccaaattgttgctaatcctatcatcactctaccaggaatttaacctcttacaaaagttctccccacccacccccagtgccttctgggcttaattcaccatcaattaagaaatcaggccacggggaccactgggttcccgattgctaaactctgcttttatgttaaccccaccccattttctttggaacacaacaggcaccccctcaactaaactgaaatggtgccccatggctcaagtgcaccgcccttcaaaag

SEQ ID NO: 52864 - DNA, 1557 bp, Bovine  19866880611348
  misc_feature (1)..(1): n is a, c, g, or t
ntgactccaacctaactatttttgaatgcactgccccaactcctctctattaccatcaatttccccccaccactaccctggaacaggactgctctctgcctccaagaccaaacagtgactgtagtagagcattcaatattttaattatgttcaatattgaactgtcacacccggcgtgagctcaacaaattgaaaagactgcttttttaggccttgtgagaaaagacttgggtatgttttgcctttccccccctttaagagtttctaactcagtaccaggaacataccaggtgctgaatagaagcctcttctcagagccgcactgcaacctgccttcatgcctttctcgctggtaagattcttgctgctggcgcctaggtgcagctccttgggccctgctgtctctgcacatgaggccttgagctaaattaccttatttttcaatatttaggtttcatattctgttcaaggggctaaggatcttattatttattaaactcacaggagtcttatgtgactgcatgtttatgaaaggttctgagggcccgaatgaatgatgctatacatgtacacagccccactgcctcttacatacagatccacgggtgatgtgctcagagtcatacatataaaaacacgacttggcagtcacgacacacaccattttcttatgatccaaaaacatcttgctggcataattcataagaatttctttatatttaatgacccaaatatgccagtcatgtgcctctgagaagcaagttagaatgaacaaaatagcaattttgttctaaccccctccccccaaataatctctctgccttggattttgacctctctgaatgcgtgttctctgaagccgagaagagggcaaccagcccttgtgggaggtcatttcatggggaagtgaagagaagagtcttggaatacaaagggccttggcaatgtgagttataggcccaaaggcccagatttttaacagactgacagaattcatgctttcaggcgaagagttgatcctggtccggatttctgagtcagaggaacagcatcagataattcacagacttggaaagaaaacatcagccccccagttcagcttcttgtgtttaaggcctgagatcatgaagcaaaagcagacctctgtctacattgaatttatccatttattgagtttctactatgatccaggtattatttaggcactagaatatagcaggaaacaagttagatgaagtccccagtcatgatccccctataagtttcctctctatcttcaggaaaaatgaaaagatcccatagcaatcctctggagagggttccccaatgaccctgctgctgagaatctcaaagtcaaaggactcacagatcactaagccttcctaaggctccataaacaaccaactgcaaagaaaacaagtaacaattctgtgactgaaattgggcctctgccgtactgaaagattctccagcagaactaccaaagacaccatcatcatttctcactgcttttcctaaaagagatttaagagtagaaggctaagaacaggcacacaa

SEQ ID NO: 52865 - DNA, 1344 bp, Bovine  19866880699852
  misc_feature (1)..(1): n is a, c, g, or t
natacattagatggggttctggcaaaagttggtgtctatcaaattaggtgccagattcattaggatagaacatagagtagtcatttttgttcctaaaatgatttgttcccaaataccttgaatttgtgttttgaaagtccagattttcttaattagaaaatttgctgcaagtctgtcctaatttgatattccattagcctcctctcccatgatgttgcacgttgaccctgctgctgacttaggcttccccaggtggaattaaatgttacatcaagtcttgctgcccaggtcacaggctacagaattaacctgaagaactgggtgtaaatgtgaactctctcccattagaggttttgggataaaaagggcatatttggctttgcagattcctgtccctgtcacccattagggtggtttctgacatcagcattttacaaagtgagtgtgtccatttaaaggctagtttgcatcagagtgaaggaggaatttaggtgcagaaggaaaattgaagcgaaagtcttattttcccacccccatccaccccatgttcgttaatgagaccatcttccaatttcactgtgcccagagataaataaactcacaaaggcgggtttcctacttaatattcacccacagtggaagaagagggaaggaattgctccccggggttaacgtggcagaaagcgaggtcagctgtttcccaagacggtgcagcctctgaacgtcttacattaaaggcggaatgatacagctgaggcagccaaagtgatttatggaaaacccagttaggggaggtttgctcgcagtttctgttcttatggaggtttaacagcaatagcagatgatacaccatggtagaaagcaccttcagagacaagcatcctccagcatttccctgtgtgagactcgttctttttaaaaagtacttttgttcaccaaacttgaaactcataggctacagtgtcctggatttggcaagaagttgaggatcatagctgataaccctggggtagggtgatctgggactccacgccccctagtccattacatccctgagtcctgggcacactggagctgttgatcaccccatcggaggtgtgtgtgtatacatatgtgtctatatctgtgtgtttgtgaatggagggggagtgaaaaaatgacagttaaagagattcattttatttctttatttttaataaggcttttttaaggtcttacatatttttctttaccagaccaactctcataattacaatgctagttttggtatcagcctgaactaattcctgtctccaccatttgtgagttttctgtcccctctggcatcctgtgcactggtctgag

SEQ ID NO: 52866 - DNA, 1836 bp, Bovine  19866880793769
  misc_feature (1)..(1): n is a, c, g, or t
ncccacatctccccatgcatttatccacacaccctatttgatcactttgattctattatcagctgatgcttctctttctcccaccagtctgcagacttctctcatttctggtcgagtctcccccagctgaaataggatccagtagagagtagatactcagcatatgtttgttgagtgaatgcttgaccaagagaccatcctgggtccttgtcggggtggcagtgttggtgaaattgtgcaggccagcaacactttgtgcaggctaagagatttttattttgacggagctgtaaggctgtcactaaacataagtggacatgactagtctggcacagtcagagtgccactggaaagcaagcagcctggaaagaaaaaagcaaagttggcttctgagattactctgtgtctgttaccccaaagaacatgagcccctgtgagggttccgatgaactggggacagccggggtcttctctctgtcctgccgggacttactgggcagtcagccctctgcagcagtgtcctcagcaaaacagatgcaatttgccagtgacgtaccatcactaaggggcctgagaaagggccacgctaacatccgcctggtggaacagttgagagatattttgtgggttggagagatgtcagctcattcagtggaggaggaaacaagatacctcttcagataaatatagtaagaatcacagtaaataaggcccagcctcagggaggcagatctttaaaggaaaattaagatccccatcatctgtctctctgtcaaccattgatgtatttagtgagcgcctcatggagctaaatgctttttgatgaggatagttgtgatgaccaccttacctccccacagggggagggctccttctgcgtgagagttcttggtgaggggttgtgggcggggctctatctctggcacacagaaagaaagaatggtccagggaaaccttctctcccctttcccaaatgtcctggttttaccaggatgtaaacacaagcagaggcaaataccgacaagcaaaagcccgactgaaaatcggagcctaatcgttcccatctgctccagtgctgcttcccctttctgcctgccaggatgtgtgctgcagacgctaagtagcacattattttcgataagttgcaatcatttacttgaaatctacttctcctttaagatgtccccctggaaacttgaatcggcatttgagaagcccttttcagggtggaatttgaatgcttgcactcaagttcaagaaaagttaagcctatttgatggacaggtgttttatgtttttgagatttcagccacatggaccctagtgggaagaggggacactgtggagcacagcctgggagctcagagccaccatgcagctcattccctaaggaaaggcacaggtgctgagatgggaaggactggaaatgatggctccatggattcttacctgaggcagaaacatcacaagccaaggcctctcttggtccccctgcgatgtttccctgttatgctgagacaggactggtagtgactgaggtgggttttgcaacctggagcccatcgtctcaatgccctgccctcatgccaccagcacttcttgttcagcaccttcattctcttgcccaggatgagactctagacatagcaagcatcctgtcctcccatccagccttctctcagtcaaagacttaatgctttctgaggcccaaactcaggaacgtttgaacagcagcaaaaacctcgtgcctctcctgccgcctttttgccggcagattctgcagccccccggtgtctgagaatgacttctggtgactcattagcaccaagacctgtg

SEQ ID NO: 52867 - DNA, 1776 bp, Bovine  19866880799137
  misc_feature (1)..(1): n is a, c, g, or t
ngcaagaatattgaagtggggttgccatttcaaacccttttccaggaaatcttcccccacccaggtattgaacctgggtctcctgcattgcaggtggattctttatcatttgaggcaccaggggagccacacatcccaccgaccgcccccaccccgacacaaaacctctcttttcccccacaaacacctgggcaccccaaacccttcccactccccccagctgccgactggctgtatttttcactccaccctcaccccgcaccccatccctgagggacaaatatgctaaattgcttgcctacacgaaagggctctagccttggaggggagctctctaggcacctaatttctcttagatttctttctgtcctcagaggtccccaaaggtacttgtagaatgtttgcccttaaacggttgtaaattagggactgagagtatgaagcattgatgaaggcttcgactggaaccagtctgcctccccaggctggcacatgtttagtcctgagaagttgtttctttgcaggccttgcgttccttagtatcaggtttcagctcccctttcttctctttcttcttttcttccacaacttgtttccctcccctaccttccttgtcttccatcttttccctttcttcctccaaacccactcttccccccactaagttttctaaaaggaaccactaaggatcagactgaaactaatgaggccagaaaagcagcgtttatttcttttcgaacataaggcaggggcaaaagagttcattctttttttttttttttctatttttcctttttactctttgtgtttgctttctttctttatcttgaagccaagttcagaatggatacttgcagaagagtggaattttgaatagctgcctaaggtaaacagaatgtggagaaagttcagctttgtcccatgcttgaaaaattaaaattagagaagaataatgtaactcaactcagacctcgagggacaggccagaggcagctaggggaccatcacagtgctaatatagttatacctgggtaagggagagtcacattttaagcagcttcattatgtgaaactatggatcatcagaaatatatccaaagatgcatgaagagatctttatgtaattcaatgcaataaatgcttttaagcagctgtatacaagttgtgcaaggtaatgaagtctttttagataacaaattcctgagtttgctcaaggtgtgatttccttgccctaaatccatttcttctccagtagggtacttttgacagattgtgtggagaatatctacatattcctcttcctgggatcagtgtttcctgtcacatctactcaaaggtcactttgaggtgctttttaatttagtcagtatgaactgttcccatgagagaataacatggtaattgtaaaaaaatatttttattttgtttatgtatctggctgtgccaaggcttagtttccgcacacagggttttcatcttcactgcagcgtgtgggactgctgtggcatgcgggctcttccttgactagggttgaacctgggctccctgcatggagagtgtggagtcttagccactggaccaccagggaaggtcccggtagtatagtaattttaagcacacactgtttcccagacatagtgtaaagccctttgttcattatttcactaaagcctgttatcatttccattttagaaatgaagaaactgagggttccagaagctatatgaatggcattagactgctcgaataaagctgctgatttcttatccaccagta

SEQ ID NO: 52868 - DNA, 2559 bp, Bovine  19866880801026
  misc_feature (1)..(1): n is a, c, g, or t
ncctctgaatgaaagaaagcgctctgccatgcctatcagcctgtgacacctttagctcggaatgacctcctcagacacacacctagccctaaggaacacagtcctgtcttgggaacaggccttcgggagcaagtctgctgcccatgctacaaagatcatgaccatgattctgggcctacattgggctgtaggttccctgagggtaagggccattgctggcacatttgcatttctccgtgtctttcatgcctcaaacagagaagtgtcataaatatttgctacagcgacaaatgggccaaaatagaatgcaaactctgtaatttcatcatgtcctacaggaggtctaaaatgaaatgtctaactggtattgaaaaattaaacccaagcagggcaggaatttatttttaacttttttacttttcaacctgtgggaggtaagagtttggcccaatatctccagaaatgtctgtgttcaaaaatatgtgatcaaggacttccctggcagtccagtggctaagactctatgctcccaacacaggggttgcaggttccatctctggtcagggaactagatcccacatgccacagtaagagttcatataccacaactgaagatcctgcaggccacaatgaagacctggtgcagccaaataaataaatattttaaaaaatatatgtggtcaaacttacttcaaagcaatcaagcgttcatgactcttcacttatgaaggccaacattcaggaggtgacattagccaacgtaagtgagaagaagatatattcttgtgggatattggcaagacaacccatctttgcatacgttaagtccaaatggaagacactggggagattttctccttcgtgtaaacctctacaaagttaactgaaagttgtagttaccaagatattccagcctgaaatgcctaaaaagggaagagatagtatggtaaatgagtaggagggggcagtgtccaaatcagcaacagagagaaggtaattattttcattctttattatcctcatcattggtattagtattgctactcttatattttagctataatatctataacagtcagaaagaacatgtcaactctcaacctatataataacgcttccatcttctcccccagagttacaggggatgagaaacttatcctgtgaaattaataatgggcctcattcttcagctggtggatccaagactgggctagtagaaatttatagagagaattaattcaaagattttcaaagtaatgaaggaattcaacatttctgacttctcactctcccacattcactcaatagacagtttctggagggtctaattagaggacctgatgggtgccccgggaggctgtaacagagcaatgataggaaagcacaagaatccatttaagaataataatcacacatgaagaacatctttcgtagtgtaactttctacaaagaaaaataaagtaatatggcttaggcctgagcatgacgacagccccttcctgcctcggctccagcaggctaggtgggggaggggaggcaactgtgtgtatgggctagagggggggcaaaccaccaaaattaatcctttactttcagaagacttgcaaaaagaaagcagcttgaggcccctttaggccttcctctgagacaagacaatccaagcggccatatcagcaactaggtctgcaggaaggcctccaaccttcttcaagtgttaaagaaagaccaagcttgacaaaaacaaataccaatgctgtttaaaatacatcaaggttctttgggttaaaaatctccccaggggaagatgctccctgtaagagatgagagaaagaagatgggagggtttctgcaggaacttctgattatgttacttgattcatttcaataccataaagcatcaactagattatttaccgaatacagaggaaacgacaccgaggcaactaagcaggagctgcaaattaagatgtgtgcgtgtgagcgctggcacccgcagacactcacccacgtgcttgcacgctgccttctgaatttcacttctgtatgcaaaaccaccgccgccagtgtctgtactgctcggccactgtgcgtatggaaaatgcagcacagcccccacgcctggctccctggtgacagacctccacacccttgctcctcaccagaggctctgattgctgtggcaaggtgggtccaagcccggcctgggggggtatttaataaaagaaggatggttttctccctatgataggataggattgggtcctctcctatcaccctctcggggattagagagatgatgagggcagcccagaaaggaggtggctgggaagagagggagcctggggcgccaaagagaagaaaatccgtgaatacacaaccaagctcagctccgggaatgctcggcttccttggccgctcaagagcggccggcgccgggcttgggggctccaggccgcttctgcgcggggcggcggctcctggccagtgagcgcagccccgcggggctcattggaggcctccggccggcaggggaccggagccggcgggcgctccccagca

SEQ ID NO: 52869 - DNA, 2420 bp, Bovine  19866880949943
  misc_feature (1)..(1): n is a, c, g, or t
nttttgggctgaaacagaggaatggactctggctcacctactcgggaaggaatttactggacagatactcagtgccgcacagaatcacaggaagtctggggaaccaacctcggaaaaataagcccaggcagctgagaccacagccaaagcgctgccacgggacatcagctaggagacaggcactggacggctgactctggacacagaccagccactgccactacccccagttctgtcgctacctcggtcatactgtccgtagcacatggttccaatcagccaagtgtaagtgctcatgaccctgctcctgaagaaacggaaggtgtctgagaagtgtgcaggttctgcaaaagcccctcaacggcaagaggacattcttctcagattcagctcctgctttcccagtacaaatcccaacttcccttcagccactcaaaagagccctctttgttcagcaaggagtgtgacagaatagaaataaaatatacggtatattttccctcctgtataatgtggtttgggtattcaaggaaagtatagagttgcagttctcagagaactcaagcattaaaataaaggaaggagggctatattcctaaggagaaggtggcagagaaatgcatgttccaggcttagaattcaaaaccaaaagacctgtggacacagaatctccaatcatatttcaacaggaccttcacctgcctccaaacaagatgatatgaatcaacgtgtagcttcaagtccggacatatccctgggatgtggtttctagagctaaaaacaacacacctaatttccaactatcaggggaaagaaatatttccacactgtgttgatatcacgctggtcacaggtaggggtggaggggtggggatggaagccacactctctaagtgcctcctatccaccagccactggaaaacacaagagctaagtatgattgccactggtccttccgaaagccgtgatgaggcaattgtaaagtcgaggttaaaggccggagttctggaaatcagaatcttctgctacttagtaactgtgtgcacttgattggtgattcaacctctgcctcctttgtttcctcggtaatacaaagagcatagtaagagcctctaccctgaaaggatgtagtgagcattcaaacaaataatatgggtaaagtgattataacaagtacctagtatataggcactaatactggctgctattattattatcaggtagcttttaaaatccccattttactgatcaataatctgaggttgcagaggctaagtattctgtccaaggtcataaagtgggcccatatatgcagaaatgtagccgaactggagtgccaaactcagatttgactctaaaagccaatgttatttccgtgacaccacactgcatccacacgcctagaatgtcaaacacattcaagctgctgtccagagccaaaaccgtagttccactgctgtgaatgttgaggaactgtcacagcaattatctatattaatagatctctagtatttcagccctagcgattatctgtacttgttttggtcattcttagactggaattcccagaaacctttaaaaccacagcagataaaaagcagttttcaactggttgctctacacacaccaggctgatgagaacctttagaaacgacacgttcgctttcctggcctttgggcacagggtcacttttacaagtcagctaaatcatggctacaggattagagtgggtcatgaggtcgattggtcttttttgtttccaccagttctccttctgttcttcctttttcttatctgttatttgagaaataccacaaattctgaatgccactgtgtttaagagaaaaggggactgccctctgaatttttaggcctcccaatccacctctcacctgtcaccctctcctttctcccctagaatgtgccttctccctgctcccttctcccctagaatgtgcctgacagcagggcacaaatcccaacagccactgaagctgctggggggcgcctctgcaggggcgccttagcaggtgggcattcccaaagccaccggaatgatgggatggcaggtcaggaaggggaggggcacccggagtttgtgtaactctgggactatctgtccatcacctttcccgcacagcatgcaggctgcatgggcttaaccacagcggtcgataaagccacacagatcagagtgagtcaatgaaagacagcaagacaacaaatctaaccggggaaggaaaaggagtacctctttcctcaaccaccccatcaaagtaaaagcgagcctcctttctacttgagcagcacaaaaaagacgtaacgggcacactcctcatgctgaacagggaggtgtgatgtaaatgttcctacatcccacattccacagttcagaaccaactaaagttgttgttaacat

SEQ ID NO: 52870 - DNA, 1743 bp, Bovine  19866881129021
  misc_feature (1)..(1): n is a, c, g, or t
ncatcacctacttcatagggtttggggaaggataatcataataatagtagctaatatgagcttacagtttacttaccaagcactgttattttacattcattagttcttttaatcatccctgcaaaactgtaaaggctgtagtatcagtgtactcattatattgaccagtaaactgggcttagaagtattaagtaacttccctaaaagacccaggtagtaattcacagaatgaggatttgaacctaggttgaatgactacaacagctgagcccttaatcactgaaacaaagctttgtagcctcccaaatctttccgtgaaaatcaggaagctctcgtaaaactcccattcagattaatcgcctcctctaccatgttcctggaacaaaatatctgtagttttaataagcacatattttatgatttcaatcttttattcagccttttagtcatttgtttaaagtccttctttgttcactgaattataagcctttgaacacaggaactgtgcctacctatgtattttccctccaataccttctttatacataggtgttatgtatatttgtatatttcaatgttaatttgttggaaagaaattatatgaaaggctcaactttccctaaggggagttacctttggtaccttggggtcacttttgcctgtcaccaaaaggaaagactaaagtgtcaaggagtactataaacaacactaatgaaatgtgatcatttaaaataatgaaataatgtccgttagtctgatataatccttacctcacctcctcacccccaacacacaaatgtcataaaaacagaggtgatctttgctcagtcagtaagttgtttgtgacgttcagaattgaaccagataagaaataaagtattggaaaccagttcctctttgcctccaggtgtcacacatgctatatcccatttggtcttaacttttttctcacatcagtcccttcagttggaatgcaagccttgtgctgaagctgagctgtgctgtggtctgacttcctattggtggagagtgggtctgggcagttgaggtggacataagtgaatgccattattcgcacttgagacagagaaaagaaactccatgaccgcttgggtagcagcagagggagaaggtaagactcccatctctgaaggcctttaggtttaaagtgcatgattaacagatacacactactgctgtgtataatacagataaacaataaggacttactgtacagcacaagaaacaacatcctgtaacatcctatgatgggaaagaatttgaaaaaaactgtataaactgaagcactttgctgtacacctgaaactaacaaggcattgtgaatcaattactcgtcaatataaaacaaaaacaaaacaacagcaaagtgccttttagctgctcttggttgcaaagccgagtgatgataatggtcctgttggtaaaaataatgatgcacagagcgtttcatccttatcaaggtacctcttatccctgttctttgagaaacagccccgtgtgggtgaataggaggaatcacaaaattgtgttcagtaaaaggctgttagttgttgttcttgttttgtcttctttccaccccaaccctgttctttcctgatcctgaatgaatctcgctgtagttacatctcaccatccagcacacactgttggcagccttccccatgtgaagctatggaggcattggcacaggaggcctctgtatgacccactaaaggctctaag

SEQ ID NO: 52871 - DNA, 1183 bp, Bovine  19866881183430
  misc_feature (1)..(1): n is a, c, g, or t
ntaaaataatgtcactaaaacaatcattgctgggtagtttcctagagtgctccaatagagagcatttattttacggattcagagaatgtagcataaccctaaaggttagcccaagctgcacacactgaaacctaattcaggggggaagggtggcttgaagggtggcaccctccagcagtccttcagcaagcctttccctaagctctgtttctcttcagcccatacccgtgtgcatggttataactaaccagggcctgggaactggttaggcgacttttctcccaaggccactatgaaccatcaatcagccaaagcccaagagtcctggaattagacctgaactccctctcctgctccagaaggagaagaatggggaaagggaggctcaacagattatctttgaaccaacagctttacctaaacggattaacactggggattcactttcacagggccagggagctggatccccaccacctagggtgcaaggctggaaggaggttggcacggcgctcagccaggccctgggaaggaacgaagggcagtgtttggtccgaactggcttcccttgccaagttgctctccccagaatgagctctgtggaaaatggatcccacaggctaaggggtctcatcttcaaaatatccagctcaaacatttcaagccatgtgaccctcagggaaagaaagcgaaagctccaagtgaggcaggtggcaggaattgggggtggagggttcaggtggagacacacccagccctgttccagatgacttgagctccaccttctcctaccacaacttaaaagtccaaaggctccctcattctcacttcctccagaaacagtatttctgtgcttttcccactgctgctgctgctgctaagccacttcagccgtttccggctctgtgcgaccccatagatggcagcccaccaggctccaccgtccctgggattctccaggcaagaacactggagtgggttgccatttccttctccaatgtgtgaaagtgaagtcgctcagtcgtgtccgactctgtgtgaccccatggactgcagcctaccaggctcctccgtctgtgggattttccaggcaagagtactggagtgggttgccattgccttttcctagtgagatacaaatcccaacactgaagtcctttttcccacttccgtcaaatgtaaa

SEQ ID NO: 52872 - DNA, 876 bp, Bovine  19866881183916
  misc_feature (1)..(1): n is a, c, g, or t
ncgcaataggcttttagaagggtgcaacccactgagtctatgcttccccaagcaattcttctacagaggggcaagaaaaaggcacatgtcctgatgatcaccactatcccaactggattcccagtcatccccatcccaggcctgagcccctccccccatgctgagggacagtctcactccaggcaacttctgtaagtctcaaccctcgcaagaaaaatgatgggtttgaactattaacccttccccagagaggactgcaattaagaagaggccactgccaaaatattcacaagagattactgtaaaaaataataataatgagctaaatatttgccaggagttccagacttgcctaaagaaagacaaaagagaaaaaagggagaagtgatcaagcagtagagactgggatcaaattcagaatctatcaggtaagaatcacacaatttagggaaaactggagttcatgttggcagcagaggtgagcaaggaacaggtaaaagactgggattggacacgagatctgtagaagacatgggaagggctaaaaagaaatcatattgattaggatggctgactctgctgaaaaatcaggaggaaaaagagatgaaaattgaatctggtgtaaagaaacatggcttggtctatcagcagggagaaactgataatgacacagaccaggattcaaattcaagccctgccacatacctgttgcataatgtagggcaagtcactttacctttttgagcctccatttctttttaggtgaaaggaggataatgatacctctccttccttcctccaggtggttttaaaggtcaaatctgatcatataaatgaaatgtgctgtaaactctaaggtactatacaaatgtcaag

SEQ ID NO: 52873 - DNA, 1606 bp, Bovine  19866881237821
  misc_feature (1)..(1): n is a, c, g, or t
nttttcaggtttccctacccctgccagaatatatgcatggtcatcaccaatatttactgagcagtacctgcaggtcgtggtttagccaccttggatatggactcagggaatcctcaccaccgcccccaggagctgggaaacatgattgtctccattttcctggtgaggacccagcagggagggaatcagaaacaaggtcccacagccatcagtcaaggtcaggtttggcttccaggatctagtaccacagctgtgtgaactcgaacactgtgctacctgtgaagaagagcaaactccgagaggcagtgaagctataaaaagcccagcagatggagtttacataggacaggctagattcccacctagcagtgggcctgggtgataattggcactcataatgataaatgatttgggtcgtgaagaagaagccaagttatgttcaagattcccatctatctgtctatctggatatttttcaaaagtgaaacaaagcaaacgaaaagaagctagaggaaagataacattttaagtggcttatatctaaaataatgaaaatcaacacagttttggttaaacccctaggaacagggagacgaggcagctttctagagtggtttctttcacaggagttaattttttcttccttatctactcctggcttccagaatctctgttccctgggtatcttccccagaacaaaggttatggacccatggactgcttgtacctcctccctagactcttgttccagaaaagatgacgtgaatttatgaatcaccctctgctgtgaacagggtgccttgtgcctgctgtcgctttgcttctagggtggcaggtagaaggaaggcagtgcagtaaatagcagtcctttcttaaaccaccatgaatgtggaagaggggtgggcaggggattcgagagcagagaggggaaatcaggtctttgtctggagggaaatgctgtgaccaccccttcaggtctgttaagtgtctactggataagaaggaaattctcttccttgcttccacctccccctatccccgttcttttttctccctttgtagaataatataaaataaaaaagcccagcagaaagggagctgtgatgctgtcgtccctggcgttgatgttatttattttcctcagttgctgctctggaagcccggagttgacagagcggttttgtagaatagaaacattatagactgttactgtcagagtgttaaatgtgatggatagagaaatagaggcgaaggaggggacttaatactgagagccagggtgctcatgggaaaataaaccatccgcatataagaaatgaatgaggtaatgtggcgggaggtaatgggctttcgcaacatgccggaacagagatgcttattacagggtgtgcttaacccttggcatgctgatttccttttgtgggttccccggctctccgccgtgtccctcggtgtgagcatgtgtgtggcttttcttcaggcagggaagcaggcttgtgtaggagtggagacaaacgcgtgcttaataatgcggtgttagcagcagcctgtacatcagaaagccttggcagctcccgaggggcttggaatccccggggctgcagga

SEQ ID NO: 52874 - DNA, 863 bp, Bovine  19866881307745
  misc_feature (1)..(1): n is a, c, g, or t
nctaacagtctgcattcccaatgcaggggcctggatttgatccctcgtcaaggaactagattccacatgccacaactaaagattccatgtgctgtaaccaagacctggtgcaaattaataaataaaataaataaatataaaaataaaataataaaatggtgacagcacgtactcagcagagttggtgaagggagaaataaacagtgtgctgtgtaaagcatagtatctggcagagacaggctcccaaaatggtaactctctgctgcacgtcgaatacatcgtctgagagtaatgagaatatgttggatgacaaaatcaggatccaaaaaggtctcagcaggctggactcaaggaccaaatctaataggatggcatttaacaaagataaatgtaaaggtactgcaattaggtctgaacagcaagctgcacacgtgcccagtggggagatagggcttatcaacggcacacctggaaaagacttgggggcattgcatgactctttgctcattaatgggtcaatcaggtgaagtggctgccaaaaagcaaaggcagtcttaaacagtgtaaaggctcattgtctggaacaaagggagaaataatgcctgtcttccatgaccacactcgggtactacactttaataggggtggtgataagctgggctttttccaaagacacagaatcaggatagtgaggagacagaaactcagtcaaagcaaagaacagcggaggccagggaataccacggaggcttaggataagtgcttacaaacatgagaaaggcagttttggacttgatgatgaattagagctcggtaatacaaattcctaactctttgcctgtttaacgttgctcaggggagaa

SEQ ID NO: 52875 - DNA, 1261 bp, Bovine  19866881428872
  misc_feature (1)..(1): n is a, c, g, or t
natctgaagagtaggaggaaaagctaccagtgtttgtgaacatacacatatatatttactggcaagtccatttctcaaaacatcagtctcgatactagaagatatatcaagaatttgatttagttcttaactcctcctgcctaggtgagggcagtttcctcaccctgtacaagatttttctgccatctcagataaatctaaattaaaatgaacttagagctgccccctggagtctggaatacagcatgccctaattaacaaatgattttagtggaaaaagcagttgcccataaaactaccctgcagatggtgggcaggagaggggcttctggcgatggtgcccttaaatttggtctttttagcattgcgtaggtagtggcaaaggttgaggaagaggaaatgatttctaggagattaaaaagaaaaaaatctgccactggtgagcttagaggtaattgagaaaaaagtttcacctctagggttccccagggactgggagaacgaatgccctggattgaactaagcaagaactcatgctcctgtctctcctccttcgaacacctctgccccactcccaacaaataccagacaacaaaactgctcaatactcttttcacctgaaaaattgtgagttaagaaagatcacatcatcaacacctcgctctcacacacagacacacacacacacacacgagctaaggagaaactggcatgcgtccccaagcctcacacttcaatcttaggtgagaaactttccgaccacaaaatgtatcacaggaatgcatcttctttaataaagagttcttttacaggaataattatgagtgtatgtgttagctaatgaaaaccaccagattacaaacatagctcaaaggaccacagggatgggggctgtttcaccctcagtagactgtggcagatgaggaacggggttcctgagatttttcacctgaggccatggcctccagctcatgttctcaacctgtcatgtgaagaaggccaacagctttgctcatcaaaaatgcaatttcccacacactgagggcaatagcacaaaactattttctttcattgccaaatgaattgtgtttggtaatctgaaagcatcataaattgcagagacacagacccatgaaggatcatgccttttatgcaggctgggatacacacagaaaactgtggatacaaaggagctggacgttgccagtgtacagagaaaggatgcagatccctggagcgaagttcatagtctattttcagg

SEQ ID NO: 52876 - DNA, 1777 bp, Bovine  19866881520330
  misc_feature (1)..(1): n is a, c, g, or t
ntttgagtaggtatttttatacagctaacacagttcttcattctcaacaaggatgcagtgaacatgaggtgcttgccttagaaaacaatacacatcatgagatgttgaaaggaagcaatataacaaaaaccatctgccctcaaggagctcatagtctagtcgtggagaaaggacagaatactgggtgtctgtcctttgctttgacaggtgtcactgtgatgatttgaaggcaaccagctacctcttgttcttttacccagcccagctgtttcagatgaaagaaacggatagagaggcgggcttctgctgtgacggaggtgatgttctattttaagataaagtatggaagtaactgattgatggattataaactgggaggtccaggctaaagcttcattctgggggcatcagtatatttcactgggagcctcctgggcattaattctgccgttaattttgttattagagacttagccaaacaaagggaggtggcgaagcttgaggctggtttaaccttgatgaaacagtgatttcaccaaggatgatgttcccccatctatcttcatccatcaaggcactgctgaaatatgctaatgaagcccagagataggagcccagagcagttaaatggggcgttgcaaacgctctccctacccttgtgacagggcgatgccacttactgtccagatttagtgcatgaagacgagcaatgctgacgtggtcttgtggttgaagacagagtgttggtggaggggccacttagcagaaatgaagagcaagattcagagatgcacactccggaatcgacggaaaagtgcgggttgtggtgaaggggacgttttcctttattctatttgtcgcaccttctagctaatccatagtgcagatgaggaagcattttgtttgaagttctggcattcgacctcccacttcgtgccacagcgatgttatctgtcaccatgttagctcatatcactgtgcttctttccagtgattaaaaatgagctaataccttttttctaccaaattagtttaagtaccttaatctaattcattgcttataaacacccttgaagaagtgaaattacagcatttattttactgaggaggtttaagagattaaattcatgtccagatcacatagctagtaagtgggatgtttgggattcgaacacatgtccatccaactcctcagcccttgcatgaaacctctgtgatctgatggctcttatgcagggtgtatctgggaatccttgctacctcttggtgtggtagggtagctgataattcattgttagatttggggattcttttacctaatttctaggaccacctatagttcaggattagcatcttgggaaggaagatgggctgctgccttaactgtctaggatcagcacaattttgtacacagctcctagaacagactggcctgatgatgccatttaatgagtaataattaaactttactgttatttactttttttctctggtctcacttggcttacttatatattcacatattctttgagttcactgtatctttattattctctttatagtcctttctttcctaaacagaccataagctctctgaggccagggccaggatcctcactctagtgccccaaacactggacattttgattaataatgtacctgtctactgttgatacccctagctttcatgtagagggcttaatttgtcactgtgcttttagttaatggtagaatagagctggccagctgctttctggttttcatacttcgataaatg

SEQ ID NO: 52877 - DNA, 1480 bp, Bovine  19866880746631
  misc_feature (1)..(1): n is a, c, g, or t
ntactctgtaaacctttgtcagatataactaagtacaatttctttctaaagtatgctcttcctttcaaagtattagtaagaaatctaaatccgggacaaattctagtctcctatatgtagaaaaattagaatacacatagcagcttttaagtatgtttccctattccttttccaccatcctaattcaggcctccaccatctccccatcacttggtaatattctaactactcctgctggaattatttccccctcagtaaatttttctaaatgatatcttacaagacgtaaaaagaacactagttatttctaaattaatcagcagtctctcaaattctaacacaacagggtcacttatatgtgtggggtcacctgaggtgggtatataactatgacttaggatctcacttttcctacgttggaaagctaggaaagtgcttcacacaaagctgaactctcctaccaggataggacctggactatagctaacaatcctctgatttcacatttgagaacaggcttccttgaggttttcatatttttaccagactagtactttccttagaaacatgactccatttagaatgttgttacccagagacacttaaagtcaaggaacccaagtagacacttaattcttattgccaagacatataacaatacacgtaagtcaaaaacaagtgaagaagggtaataaatctaattttcagagtctgtgttcttttccactagattatactcctgaaacacattcttaattctctaaaaattaaatattatgttaacaacacactaaaaaattcttaagatataaaaactatctttcaatatgctattatacatgcatattacaagtcacctttccaacaacagaaatgcagtgtaaaatcaaaaagacacagacccaagaaaacaatctgtatcattcatccactgatttataaattgtacagttacaggtccagggttgtgaggcaactgaattcgttctaaagtatgtagcagcaaatcagggttgtagtacaaggcagcaattgcaacctgaagacacatagtacgaagctcactagttttgacccctcgggttaatctctccaaaacaagttgaacgaagagtggaatgcactagaagaaaaaagaaaaagagaaatcaagtaacttttacagaaagctgaatgctggtaaagtgtaatcattaaataagatactcttaaagacaatagaacttgctagtttaaatcattttcagaattattaaactcagagagattaaatgaccaaaaaaggtcctagagcagtaccaaaatgtctcctttccttttaactgaagattacagttagatgaaggttgtcctacaagaatacacaatcaaaaaactgcaataatccaaatgtagactcagtcatttccatgtttaagttaaaatgactaggatggagtttttctttgataaatcaaattggaaatacacttgacccttg

SEQ ID NO: 52878 - DNA, 801 bp, Bovine  19866880768726
  misc_feature (1)..(1): n is a, c, g, or t
ncctgcctggcgcactgggaattccacatgctcagacactataatccgaagtagactgggggcaaaattgataatcttgtaagactgaaattacaaagaaatgttttattaaaaatagggcaatacaagtgaataactgtcagcacctgttcctgaatacattcctatccaaacaaaagaataactttcaaaggaaaagaaactctccaaagcaaaataaagattaataaaatacaaaaaaatttcttagaataaatcgatgaataaaagagtaagaacacttttatgtttttttagatatatattgtcaaaatgttctccagaaagggtgtagcaatttatgcttcccacagtagattatatgtgtacccatctatctaatatagagattagcattatcattcctccaaacttttcatccttattcatactttaaattacacttattctagcttgaattttttttcctgtcagttggctatttgttttcttccacaaattctttattcccctcactcttctgtaaaaggaatatttgttttattcttagtaacttctaggagctattttatgaatttaaaatttcaaatttttatttgactcatacattgtgctcagtcgctaagtcatgtctgactctgcaaccccattagactgcagcccgccaggctcctctgtcaatgcagttttccaggcgagtgacttatacaagtgtttctttccagcttatttgtgcttcaattttgctagtacttttgatgaaaagaaaacatgggctacagaaaaggaagatccaacaga

SEQ ID NO: 52879 - DNA, 1376 bp, Bovine  19866881054930
  misc_feature (1)..(1): n is a, c, g, or t
ncccttgagaaatttgaatcacatgtgtcctctgtcatcagcatgacttatcaaacatgaatatgacagcatgatacaagtgtaaaaaccatttacataaagactgtgcccaacattgatgatgctcattcactctttcaccccatctccaaccacccttctccccacatgtgtttatctaatattgccttccattggaacagtgttgtatagggataaaggctaatgttattcataatgcagaatttacttttaaaggtttatttgaattttgaacagagccttcttctcaacaaaggagatatgtgttatcactcactagaaatgcaacttgctactttcagaactgtgagaatcacagaatcctagagctgaaaggaatcttaaagccatctagtccaatccccctaaatttaaatatatggcaatctaagccttgacagatcatatatcttgcccaggtctagacggcaaggcagaagctcagtcaaaactagactcctaggtctcttgattccccatctaccctaatgtttaacaatcaacttgtttcctaatctcaaatttttctggaaaccacggttaacagacatttctaaaagtggcaagaataaactctataaaattctgagggggcaaaacctcaaaaacccaaactctgaactttaagacaaggaagtaaacaaaactatttgagaagaccacatcaaaataattatttaattaataataccctctaaaaaatgtatttttattctaaattttaaattttgttaatttaataataattttggctttaccttgtgtctggttagaaattaatgactgaagagcaagggcagcttcaaccttgacaggcatctccttatcctcaatcaggctcttctttgctagatcaactgcatttcttaggttgagctcattatgaaatttcaaagaactgaatgcatgaagtacccaacaggactatgttataaggaaaaagttagtaggaaactattaggattatggttttatgtaataatgaatataaaaacttctaggtaaaacatcattaatcctaccatgtactattcatttatttgttttttggagggaaacatattagtctcagttgctaacttctcgattccatacttcttataagaaaggcaattttattacttctaaattacctttatgcaatatcgttattcataagaaagattaaacagagcccaacttaagtgtctctaaaaaaaaatcctgtcaatgctttaataaatattatgactcacaacttattatttatatgcaaaagcactacaagccagtgttgacattcatttactggtcttcaaagcaaatgaataaaatattattttcctttacactaa

SEQ ID NO: 52880 - DNA, 640 bp, Bovine  19866881214687
  misc_feature (1)..(1): n is a, c, g, or t
ntgataagctaagtttcctgaatcaagctgttgaatttgaacttcactcttacacattatgggtttatcttgtaggtgcctaagcctatgcatcagcctgtaggttcttcctctacccttccaaaggatccagtattgaggaaagaaaaactgcaggatctgatgacccagattcaaggaacttgtaactttatgcaagtatgagtcattattaagtgaatcttaaatgctagttatggggctactagcttctggtctgaagcattaaatgaagtcgttaagagcatatattctggtgttcagaatgagtacaaatctcagctctgccacttgctcactctgacagtttaggcaagttacttaactttctgcctcagtttcttttttgaaaaaaaaaatgaggataatagttcctgttcctgtttgttgtgagtaatgaaatgaattaaacatgtaagaagcttaaagtgctcaaatgatattgctgctatagctcattagtagtttctactcagactgggagaacctgtactatgcttggtatttgatagatgccattgtgtgtaaataatcatgacatttattgtcctcaaagagtttatatttcatttgtagagttaagtcaatagttaaatgtaaa

SEQ ID NO: 52881 - DNA, 865 bp, Bovine  19866881283242
  misc_feature (1)..(1): n is a, c, g, or t
ntaggatgttttctatacatatattacctgatcaattccccttcctttgcactgaagaatgatgacttcaagaagtttggctgcatgacattctgcatcttctcctgcatctccacatagtacctgcagtaattaaaatttcactcagcagtgaacagcattgtaaaaccttaatcaagtttacataaagtaagtatcaggtaaaaaacagccattagaatcatggtgtttgcatcatgagtttaccttgccaaaccaaaaaaaagacgttcaaaatgaagtccatctatcttttttatctactctaattccttatatgagtaatgattcactttatttaactctggattaaaaagtaggctgttacctgtctatacaaaaaagcttctctttaagtaaggcaccaaaaacaataaaatgatacaatgaaatttaaaaaaaaaaaaacgaaaaccttcttaaacaatgaaacaaaccctgtatttttcgtatttttctgttctttttgaatcctgtctatatccacccagtttttcataatgaaaccataaatataatattacataccatttaatttcctcacatggactttataactcgaagtactttctgaagatattaaaccatttaggactaaacagtattacacaagatgaatataacaaagcttaccagactgttcccctaatgacaattctgtattttcactgaatgaacaattatagaaagcacatgttcatactgaactgagacctaaattagataaactgaattatgagttcagcactctttaacagagcctggtacatatctctcctaggaaggaaaacaggctggacactagctatcttactaacaactccaa

SEQ ID NO: 52882 - DNA, 826 bp, Bovine  19866881980889
  misc_feature (1)..(1): n is a, c, g, or t
nccctaacacataacccaagacatactggccaatacatacttggttcagctaacataccaatatgtatttgttgaatggatgtgttcttccctcactgatttgaaacaactttaaaaatcatatttgaaacagtaattcattgctgatcttggaggtggctttccaaaaatactcctcactgtttgcaaggcaaataaaggtgtagaaaatagggaatggggaggggaaaacaaagaaaatcactaacaaataaaaattgaggaggcatgtactttcaaaataaaccggactcactggctttaaagatcttttctagcagaaaagctttttttctgaatcactttttccattttttaaagaaaatatcacaacattatctattaggtacaatctcctataaatgttatgctgtgcttatacagactgtaccttaccagacttgaaattcaattatttttgcttttgcattcttgattcattttctgaatcatgtttgcaaataaaacggtatagatttattcagaattattacatttagtggaatatttaggatccatggccagatctatatgacacaaaggatagtttattcttggtcaattagaagacaaacatataatgattagtatgtcagaaatactgttcattcttagattcactattagttcaggctaccacaggcataaacctgagctgtaactttgtttctactcaatgatacgaaagtgtgtccttcacatgtttttacctttgttcattgctttttgctctcttaaggatgaaggcgtagtcttcctcccctgacgttcaacagctttgttctat

SEQ ID NO: 52883 - DNA, 1387 bp, Bovine  19866880285496
  misc_feature (1)..(1): n is a, c, g, or t
naaaaataaagtctgacactgtttccactgtttcctcatctatttgccatgaagtgatgggaccagatgccatgatctttgttttctgaatgctgagctttaagcctactttttcactctcctctttcactttcatcaagagactttttagttcctcttcactttctgccataagtgtggtgtcatctgcatatctgaggttattgatatttctcctggcaatcttgattccaacttgtgtttctttcagtccagcggttctcatgatgtactctgcatagaagttaaataagcagggtgacaatatacagccttgacgtactccttttcctatttggaaccagtctgttgttccatgtccagttctaactgttgcttcctgacctgcatacagatttctcaagaggcaggtcaggtggtctggtattcccatctctttcagaattttccacagtttattgtgatccacacagtcaaaggctttggcatagtcaataaagcagaaatagatgtttttgtggaactctcttgctttttcccaaccagggatcaaatccgtgtctcctgtgttggaagtgcagtcttaaccactggagcaccagagaaatccccaaaccatttatatctctacttggattgtgagaaaccaggaaaacactcaaaatctccactgtacacacccaaagtcaattaccagagctttggcggtaccaacaatcagcagccaggctgcccacaggccctcctctcttcccccagccagccagggggctgtccaccactggtttccagaatcctcgatgttactttctcctctagctccatgagcagattgaaaatcgtgtgctgactttttaattaaaaataataataattaaaggactaaacacagagttgactagaaacaaaccattattcttccttaatcacttaaggctgagcaatttatctttctatttggcaaactctcaaaaagaataaatcaatgttattctgaaattcaatgactcggaggttttggagaaaaataaacctcccaaggcatcacaaaaaggcaagaaccagaatgagttccaccagtgaaaacagatcatcaattttactagatatatacgagctaacccaaagcaccttaacttctttatgccatcttttacatttttgatattgatttcataaaaatgtccccaattattcaaaagcaagctcactttacatataaagttttctgataaaaagcagatacattctgtttcatcaccatattgtctaacatttcaagttgtagagattttaaatgcctggtacctatattcaagcacgagtaatgttccaaaacagggattatcagctggaagtctttcaacttgcatatgcagacttcaca

SEQ ID NO: 52884 - DNA, 1126 bp, Bovine  19866880355322
  misc_feature (1)..(1): n is a, c, g, or t
nactttcttgttgttgctgttcagctgctaagttgtgtcagaagaccaggaagaaaagcaaacagcctttgtaggtcaaattaaagagtcattttcccatgacctgagatgtattaataaagatgaatggctcacaccagataacattttacatcatcaaattatgtctattaagctacatttcatgcttctcagttgtcgaattaaagaggtctgttagaatagcaataacacactcaaattggttgagatacgtgcttcaacatgcattttattagagtgataacttgtgaggctgaactaatcacttattaattaatacttaaaactccctgagatggaacaagccaggtgtcccatgagaaaacttcaagtggtttgtggaacacgcaccagaggtggtaccctgttggggcacttctttcaaatgggcttccctcggggctcagatggtaaagaatctgcctgcaatgcaggagacctgggttcaatccctgggtcaggaagaccccttggctacccactccagtgttctggcctggagaattccatggactgtatagtccatggggtcgcaaagaggcagacacaatgagcaacttttgctcacttgctatgtttattcagtcatgtctctgcttacctgtggcctttccctaaaatacttgtccattatcagagatttagtggagcattacaaagcaatgaatttaccaaaaagagtgatctgtggtcaaaattatatatcccttccttttctgaagtctagagagagtagagggcaaaacagggaagcaggtggagatcatggtaaaaaggatgaaacaaagtcagaaaaagaaccagaaaatgagaaaaaagaggggacagagtttccatgctctctctgagtttaccactctccccaaatttctgcaggtttggagaaggggctctccaaaacctttccttttgagtttttgtggaggcttcattattacataggtatggttgattgagtcttctgctactggtgattgagtcaaactctgtttgctctctcccctcccagaaagggtggacttgaaggtcaaaccttctattcctggttggtttccttgacaacaagtctccccccaccccccca

SEQ ID NO: 52885 - DNA, 1154 bp, Bovine  19866880368609
  misc_feature (1)..(1): n is a, c, g, or t
ncccagtttggatagaatcattctggtttataactggtgaccctgtatatttgtttctaaagtaggcggtttaaaacaataggaatttatttttttatagctctggagatgagacacccagaactaggagtcagctagattggctttctggaaactctaagagaaaatctattccatgtctctctccagcttctaggaatcaccaggagtccttggtgcttgtggacacgtggctcccgtctctgcctccttgtttacatggtgtgttcacatggtgttttccaatggtgtctcttgcctcttataagggtgccagtcactgagtttagagccacactaactcagtgtggcctcttcttggattacaatcctatttccgaatgattaagactcgaaggtatcttttcgagaaacataatccttgtcactgggcttctttggtggctcagatggtaaagaatctgcctgcaatgtgagaccagggttcaatcactggaatgggacgatcccctggagaagggaatggctacccactccggtatattctggcctggagaattccatggacagaggagcctggcttgtcaactaactcctcattcccaggttgaaccacaagttgtctgcatggcagatcagcttcttcagtgatctatttgcctaaggtaaaaatcattcatcctttgagtaatatataatttggaattcatgtagttcaatctctcctcctatagggataatgccttggactatgacatattctgctgctttttttttaagactaaattgagtacataccatggttgttgatgtgcattcttacatccttgaaacttctttttaaatttttgaatgaagagtaggatgaggaaaagaattggaaaaagaggtgggacaatcagcccaagttcaaacatttgcaaattatttaaaaaatataatgataatgtgcttctttgggtaaatatcagaatgttgagtaaagggcactcatgatgttcttacttcaactttttagcttttaacaacttggtctagcttggtttgtgttcgtagaaatctgtgagatcatgtggaagaaggctatttcagaacctggagtgagttctgagccagagcctgtgggaggcacacaccgacgtctgtctgctttt

SEQ ID NO: 52886 - DNA, 3879 bp, Bovine  19866880385055
  misc_feature (1)..(1): n is a, c, g, or t
ntgcaggcagattctttaccatctgagccaccaggaaagacgctcatttcagtggatttcaattgctataattacccaaacaaagcagcgtgttggaaatggaatatagagtgagtgagtgagtgagtaaagtcgctcagttgtgtccgattctttgcgaccccgtggactgtagcccccaggctcctccgtccatgggattctccaggcaagaatactggagtgggttgccatttccttctccaggaatatagagtatgtatctttctttttttttcaatttttatttattatttttatttcttttgatcattcttttccttttatttgtttgaggggcatgtttgggcagtgaatagcatggagatgaggacttgggcattttgaataaatccagtgattctaaaactataaaaggagataataattggaactattcaataagaagtcattccactcttagcagactggcatagggatgcacagcaaatgacatgctatctcataaaaatcaatcaacaagaaacagaccaagacaatttcatactgaaggcaaataagccacattatttagatgaataaagtaaatatgatttcaccagagaagtggaaggcttgacagctcctttgaacagatgccgctcaaacagcagaggagcctaattatttatttgtgccttcagctcctctgtcaacaggaggaagcctgtggtgtgaggatgtcatgtctttcagtaaccagatgtgacagaaaatcttactcagcccgaacttatcagggcatattgtaagggtcacctgatgtgagaaagccctttgtgtgtagaaccagaagccaattgctaaacagagctttccacacttcaacacttaaaataggtatttgtaagagctggatgaagccatcagatcaagtgaagtcttataagctagagaactataatatgcttttctttgcacataaatctgagtatgtcacattgctgtctgtagaacctagcccttttaaagcactttgtctctgcaggtctcaataaaaacttgtcaatagaatataactatatggatggatgttcctttggaattagctatttgtaagaggaggggatcagctctttgagaggaagataaaggagaaaggggaaaatccttgatctagcactcaggacagctggttctaaacccacccagctcatttctaagcttctcctaagcattgttctccatggacaacactcaattctcttctgtcatgctaagagcttctcttgcctacaactaggagcaccaaaaggcaaaacagcttgggatgtccatgattgtttatttctgtaggactgagctactagtccacagtgggattcaaactctgatttatccccaagaactacacaactaatttatatcaaatttaaaatgacagacaacgagacaggtgaagaatagctgagtctcagccttactcacacagacagttcctttctagactaaggaaaaatttccatgtatcatctcagaaataaaaatctagtataggcaccgttcctttggaatatcagggaataaggggcttatccggtgtgctgagatgacatttctgtcctggcttttctgtttgatttgtaagttagggggctagttttagattcatgtatttgtgtatttaagaggaagtgggatgcattgaatcattttgttcttagctggaatatatttgatggatggaactggccacctctacgagccattcactgtggctattagcatctctgatgtcatcatccagtggcaatgggataaaagacaggtaacctgattccctaatagcaacatctgtcaatagggatggtgctacctgcttccaggatatgaatggtttcttaggacaaaagagcaaggcagcctctacctccaacttcactatcagctcaacttgttatcctagggtttcctgtatatggccacttggttatacttttcaagaatctttcaatgcccccttctatttaggcacaaaattccaatgcctaacatggtgtgggtgacccctcatgaactgtcctcagtacacttctgtggcttcatctcccctctttcttagcatctagtcaggtgacactaacagtaaaccttatacaattccagtgcattttgtttcacctgctacaccatcctctcttcagttcagttcagttcagtcgctcagtcgtgtccaactctttgcaatcccatgaattgcagcacgccaggcctccctgtccatcaccaactcccggaattcactcagactcacgtccattgagtcggtgatgccatccagccatctcatcctctgtcgtccccttctcctcctgccccccatccctcccagcatccgagtcttttccaatgagtcaactcagttcatgtctattaatccctaattccaaaattatccctccccttgtctttcccctttggtaaccataagttgttttctatgtctgtgagtctttttctgttttataagtagattcatttgtatcatatttttagatatcacatgatgcttacctttctctgctgacttcacttagtaagataatttctaggttcatccatgttgctataaatgccattatgtcatttttttttttttttatggctgagaacttttactaattttaaataccaacttgaaaagagagaagtaaatttagatccacctttgaaataaattgggtggatagctccaattaaatgtatttttctgtcataaagggaaatgttagtctctctatattcatttcccagggcttctgtaacgtattatcacagatttggtggattagaaaaactgaaatttattttctcacagttccggaagccagaggtctaaaatcaaggtgtcaccagagctggatcttttggagtctaaagtgtgttccatgtctctctccttgcttctggtagttcctggcagtctttggaattccttggcctatagatgaataaacacatctaaaccttctaagaactgatgcttttgaactgtggtggaaagattgaaggtggcaggagaaggggaagacagggtatgagatggtggacatgagtctgagtaagctacaggagttggtgaacaacagggaagcctggcgtgctgcagtccatggggtcgcaaagagtcggacaggacagagcaactgaattgaactgaactgaactgaaaccttccaaaccttgtctaaaccttcatatcattgtcagtctataatcagctttccttttctttctttaataaagagagcagtcattgcattgggggtcaaccctaaatctaggatgatcttttctcaagatctttaacttaattgcatctgccaaaacactatttccatacaaagtcacatttacagtcacatttacccaggttagagctctacacatctttttgggaactactgttcaacccactacaccgccatgctagaatcaggaatttttataaaattattaatattctaatggaatcataataattgactagacactaaagatacataaattagctataaattgtcacaagtgcaactgaattgtagaggaaataaattttatgtatgaaatgattgggtgttcaatagagcatttaatagaattctaaattatctagaccaaggaattatatacaatgtgataggtgatgtgttccactcaggagtcaaaacagaaacattcaaatgaaatttagaaataacatttcaacctatttcttaatcttatcattggagctgatataagagaaacaaaactcgatattatatactgtatttgaatttgcttaatttagtgacatacttgtttaatgaacagaatgtggactgtgcatttcaacag

SEQ ID NO: 52887 - DNA, 1262 bp, Bovine  19866880506680
  misc_feature (1)..(1): n is a, c, g, or t
ncccctttcagggccccaaaagccggctcttgtttgacactcggaaaaagaattgtctgaggagacaacgtgctgacaaagcaagagattttattgggaaagggcacccgggtggagagcagtagggtaacgtaacccaggagaactgcttttgctacatggctcgcagtcttgggttttatagtgatgggattagttttccgagtggtctttggccaatcattctaattcagagtctttcctggtggcgcacgcatcgctcagccaagatggatgctagcgagagggattctgggaagaggacggacacgcagtgtctccttttgacctttcctgaactcttttggatggtggtggcttagttccatattccttaccaggatctcctgtcataaaacaacttgtgtgaatggttactaaagggcctggccagggtgggcggtttcagtcagtgtgcttcccctaacagaacctgcattcagagatgctcaggagcatggatgtgctggggttagactgaacgcagtgggaaaccattgatcccactccctgggagccccgtgtccgctgcagaaagaactctgcatgtctgaatagcctgtgtgtgtcttgaggagtcggggttcctgattcctaccttgtggggtatggtcttcactgatgaggcaagaaaatttagatctatttatgtacctaagttttccaaagactattattttggagaaacacaaaaacatgtcagtggcttatttatttatttatttttccttaggcaaagaaattgaatctgaaatggccaatgaataagccaaggcttggaatagagtgcagttctatttttggtgttttagctttctttaaaatgaatagcattgtttcttgaaaataggaagtcagttatttccatcctcttagaacatgaaatagattatttctgaatatatcttttcagttaccgatttttctcttagtttttctgggtttaaaaaaaaaaaaaagaattagaggttgcccttaaaatttaagatgaggtgatctgaagatttcatgttagatggagttaataagggaagtgaagttgctcagtcgtgtacggctctttgtgatcccattgactgtagcctaccaggctcctccgtccatgttttccaggcaggagtactggagtgtgttgccatttccttctccaaaagtgaaagttgctcagctgtgtcgactctttgcgaccccaggactgtgcagtcctggaattctccagacca

SEQ ID NO: 52888 - DNA, 811 bp, Bovine  19866880542586
  misc_feature (1)..(1): n is a, c, g, or t
ntaatcatcaatgctaatcatgagagtataccaggtggcactcaagtgtagaccaaatcagattcttctaaaacttaatacagtgattcctttttaatgagtaagttaaaccatctcagaaaaaaaataacttggccaagggtcatattctccatggctaaaatataacttgtcatttgacttcttcagagcattaaaaaaaaactcatctcctacttagtcatgcaacatgggcaagtcacttaacccttactaattgcttctattttaccatccgtagcattaaataacaatgaaagtccaaatatctgaaataaattgtctcaatttgtcatctctatcatggaatcacaatgcaagtgcaaatggctacaaatgaatgctcaagcatttcaaagctatgagggtgacttcatctttaaaaatacatattagtttcacaaataacaatgacttttgccagagcagaaaagctaacattaccatctactacttttgtgttttctccctcttaattctccatttattctccttgcttgcctctactccatgaaaaattttagtgtgaattagaacaatgttcctgaaagtgtattatgttgggattctcgcatttcctaccagaatgttatgaataataaaaatattagttaagataagctggatcatgttgcccctaagttccaacagtttggatgtacaaatgtttactgttccttcatactgcatatccagcatgggtccatgggggctttgattcacataatctttcagcaactgatgctgttgaagattccagcatcttgagatg

SEQ ID NO: 52889 - DNA, 3114 bp, Bovine  19866880561182
  misc_feature (1)..(1): n is a, c, g, or t
nctagcaccttgggcttgctctattcacagaaagagagccttcaggcagaacatcccttggtacttgctctcagcatgtgcaggtaagagctgagaggttatggaagggcttctcacagtatctgccataggacactgggtgacatgaagattaaggcaaacctgaaccttgaagcccttgggctttgggtttcttgctctcagcaattcaagcacatataggatatatatatatatgtatatatttaattgatcggaatagacttcaagattgctgatgctctgaagggctggctgagccatctgatggtatgattgatcttcaagcagaaggtaggaatgtgtgaagacatagaattcggtgctatgagaaagatgacataaagggaagagacaaagccatggcaactggtgaaggatggtggcagcctgggatcattttgcagagctgatagtagctggatgtacacagtgggacactttcttgtaatgagagacttacggttttactgtttaaaactcagagcctacatggaagatatgtgtgactaggcaccagggacaactctgctcacccccaggatataaccaggtggtaagtctgggctcccttgcttcggttgctcagtctttatttgtaagagagattctctgcatgagccactgatgtctagtcagcagcagcaattgtgttagcagcttgtcacagtgcccttgttctatttccgacccggttgtttgattgaagtcctgtcagctgatttaagactcacgtcaaagggtgtgtttacaaaacacaagtgttggcctgagaatcaaggtcatgtcctaacacagaagttaccttttctagccttaaatactgttgaatatgcccaatcttattgatgagaaaaacagtcatctgtagggtataaaaaagcagactgaagtataaacaacacagtgacatgagaagcacagatcatttgctgctaatggacgtagatttgccgacacttggacctacattgctgtttgttcaaggatgtcaatatccatggtacccaacattctgcaattaaatgctctatccctgagctacaccgcactcaaggcacccaaaattatgaatggcaaaagaatctcttgaacattcttgagataaccatatatttctcatcttaaaaacaaattctcttcttacacaaatggcaacacaccctacatattatctcttttttttgtttttctaacttatcattaattcttgatttttgatccaaattagtacacagaagggctcctcattcttctttgtggctgtgtgattttctattctatggagaagacactggtcccttatttatgcatatttaagatgcccccaaccttgcctaattagaaactatgttgccatcattaactttaagcacatgccattttatacttgggaagataaatatgaatgatatttcctagagttacaaccccatggattgtagcttgccaggctcctctgtccatggaattttccaggcaagtaggctaaggtagatagccatttccttctccagggaatctttccaacccagggatcgaatccaggtctcccacattgcaggtggattctttactgtctgagccactagggaagccctagaatactggagtgggcagcctatcttttctctagcagattttccagatccaggaattgaactggagtctcctgcattgcaggtagattctttaccagctgagctaccagggaggccctacagttaggaagacattgctgaattgaaagatgtttgtattaggattttaatagattttgccaaatttctctctgttgaagctatatcactgatttcccgtcttagctgcaatacatcagagagctaatttcgaaaatttactgtgctttccattaaaatgtgtcgtcagattgaccttttccactttaacaggaaaaagagggtaattggaaatttaatatgcatttctcttcccgtgcacaacactgaggattcttcttgatgtcttaagagctgtgggctgtggctttctattccttagactgtgatgagggtggttttccactttgtggatcccaggaactcactagaattgtatctggaacaaattgaggctgacttagtcagaagatattgaggacagagctaatttgagagtcaagcttatttgtgcgtgttaaagccacaagaggagaaactatggtgaaaagatggtgctataaatgcatatttaattacatggaccatatatttaaaatatagtattaaaggaaacaaaacaagttaaaatatacattagtgtgatccctcttttttaaaaatatgtgcttgtaaaaagatgattataaggatacatatgaaaaattaaccatgattatttctgagtggaaggactattgtagtttaatttgtgctctgttgtatttttgaattgtcaattattaattgctgccttaaataattaaatatattatattcaaataccttctgcctcattgacagtcatacaaaatacacaaaatgatgagaagaccacaagaccaggaatctggaaactcaattttttatcccagttctgccattaatgtgctctgagatgtggagcttatagtttaaattttctgggccttgattttataatttgtgaagtgcaagaactggataaatttatcttttaaaatttttatactaaatcatctcatatggaaacaagtggatacttttaaactaatgcttctctagtcttttacagacaggtgtttaaactttgaatagcttcacttcataaagtcaaggtaattccatgagcacctggtgttcttatgtgaacatgttgtctgggaaccgcatctatgtgtgatgcagagcaagtcttcacacagagtaattcttctctcaaggcttcttgaaagaggttaccttggaaacaagaaatcagacccacctacttcatcttaggggtcagaacaaggttctccatgtaatcatcatttttactcttcgggtacaaactgtgaaccaacttttatgaggatattcaaatattagtaacatgcatttttttttctcaaagactcagtgtttgaattattct

SEQ ID NO: 52890 - DNA, 2001 bp, Bovine  19866880566234
  misc_feature (1)..(1): n is a, c, g, or t
naaatcccttcccacctccctccccatcccacccttctaggttgttaccgaagcctggtttgagtcccctgagtcctacagcaaattcccattggctctctattttacatatggtaatgtatgtttccatgtgactctctccatacatcccaccctctccttccacccccctgcagctgtgtccataagtctgttttcaatgtctgtgtctccactgcttgtgcagtagacactgttttaatgcccttcctatatcccctctccttgccctggagatcactgtagaccatgtctctctgtgccaaagtcttcatgcatctctctgctgagggggttctctgactgtggatgcatgcttggtctgcttggggtgggcagaagtacaagggatttgctgcccctcaggtgtaatctgatgaagaataggggctggtggctacattttctggcttactcctccttggatgggataactcagagttgctatagctcccagagtgtcctgtaggagaatgttgcagaagtggtcctcattttttttttttaatgtggaccattttttaaaagtctttattgaatttgttacaacactgcctctgtgctatgccttggtctcttgaccacaaggcatgtgggaccacagtcccccaaccagggattgaactggcactgcccgtatcagaaggtgaagtcccaaccactggaccactgaggaagttcccctcactttgctcatgtctctctgtatcagttcctttggatggttcccttccacactgactttgaacctgaccagatggctttctttggccaatgggacttaataaatgtaacacaaccaaagattcaaaaagtgtttgcacacaagagtttgacctcttctctatatctgaaacctttcttacttgtccccaagtccatgtcttggggtctgatatcacacttgcctgagtatactaggcacatgtttattgaatggactaaaccttctgcttgtatgcttaccctgctaaggctgtggctcctgttactttctttgtccattggtttcaaactcccataacttttttttggtcctttcctcctttctaagttcatggccagaatggcttgtttcaggcttcagcttctgggtccaaatttggctctcaccttgcctcattgcagacacaactctccaaggttcccttggcctgattctgcatcccactccctgatggtactgctcctggactccaagagaccaacagtggcttgtttcccaaactcctccccacatcttgggctctgcaaggtcttacttggtctcctattcttggttgacacaggcaacaagaactgactagaataaactttcatgccaactacctttttacatgcaaactccatcattttttaagagaactgatagtgtcctgatgaaactgcatttgctccccccatccccaacccctgccctcagagatgtggagaacaagctaagggcgaggaaacagaatttgtggatctcccttgctgttttctgctgctggcttcttaatttctccttaagtcccaagattttagactatttaatgttaattaattaattgaacacaattaggcacaaattaggatattcttataactgttcctaacatgcttgattttcctgattacagtatctcataacacatctgtttatcatttactgagtatctaatgctattgcgaaatttttgaattttttctaaccacatattttgatatttattgagtgcttgctaaatgtacagcactgtgttagacactaaggaggcagtcaaagaaatacaaaattcttattctaccttttatcaagtataaatccaatagatcattgttttaatctctgcatctatgagcagttttgtttgggaacctggaatccataaaaaatgtaggagcaaaactgaaaagcagaccaggaagacctgaaagaactggcaaacaagttggtttacatgcctacatcactcaaag

SEQ ID NO: 52891 - DNA, 879 bp, Bovine  19866880582439
  misc_feature (1)..(1): n is a, c, g, or t
nctatgaaaactaaagatgcatccctttgtgtaaaaaaataaaaaaaaaattagaaatgtctctgccaatcagtcggcttcttcccacccactgtgtgtttctccagctcccacgatggctcagagaatgttaaagaaaaattactttaagctgtctgtcagagtaatgaaatatttttgttgctgccggctgtgtcataatgaactctggttataaaaggtgaagggggcaggaagcttactgaggagttagttataagattgaacagtttgcctccatatttggctcatagcatgctagagagacgatgccaaggggagaggaaggttgaaaagctttggtgttcttgagaagaaggaaaatctcagatgtgagccatgtagaaagtctgagggtatcaactcacaccaaggagatgaggtgggaagctggagcagcaatgtttcagccgaatggtctagtggacgtgtccaccttggatccctatacatgctcatttatgtccgactatgcaaccccatggacgatagcccttcaggctctctgtccatggaaaatgtccatgggattttccaagcaaaaatactcgagtggtttgccatttcctcctccagggtatcttcttgacccagtgatggaacctgcattgcaggcagatgctttactgctgagctaccaaggaagcccacatttgatggaaagttatatactcatgtagcactgcctacatccctcctacagtgcaatcacttaaaacaagaagcataaatttagcccatgagtctatatgtttataatgtgtgctgtgctcagctgagtagttcttctgctatttgcggggctcactcacatgggtgggatggtggctttgctgttgg

SEQ ID NO: 52892 - DNA, 1100 bp, Bovine  19866880653989
  misc_feature (1)..(1): n is a, c, g, or t
nattgctattttggtttgctgacccttgcccactggaccacgtcccggttttaattttatacgtcaacttggctacgttaaggtcctcggatatttggtcaaacaccagtctagatgctgctgtgagagtatattttaaatgtgattcacacttaaatcaatagactttgagtaaagtgtattactctcccataatgtgggtgggcctcgtccaatcagttgtaagttttaaaagcaaagactgaggtctcgtgaagaagaggaaattctgcctccagggtgccttcagactcaagattgcaccatcaactcttgctggaacttctcagcctgccatcctgcccttcagatttaagactgtgagccccctgcatccccacagtcacgtgagccaatgccttaagataaatctctgtctctttacctatgcagcctgttggctctgtttctctggagaacactgacatatacactatgtacatgacctctccagcaaggtggggacaaaggctgggagtgctaggaagtgaggccaggacgagtctgcaatccaggaagtagaacaggtgggcttaaagacactgcaaactcctattgaatttttgacaaaaccaggatttatatattaacatctgagatatggctgaagggtaatattcaaagcattgcagcaactgttacatttttctcccttcaaatgcatcttagtggcttttcttttttaagcctaaactccgggaatggtatttagtacatttcttataaagcatctgacacatcctaggtgttaaagaaaaggttaatttcctttaaaaaaaaatattctgtgcagagagcttgctctccagtgcatggaggctgcacttaattttcccatttatcttcaacattcttcctcctgcctttgaagctctttcatttaacattagcatttgattaaccttttattcaagagacgtctgggttttgttatacactattatcctgattctggcttgtttttatttcagataatttttgagtagccgcatgtgccaggtagtgaggtcttcttttattgctaatttttggcagcggggctccagcaagcacggttccct

SEQ ID NO: 52893 - DNA, 1172 bp, Bovine  19866880703544
  misc_feature (1)..(1): n is a, c, g, or t
nttttgaatctcaaacgcctactattcattatggtccaggctcttccctcgtctctgcagaggtaggcatgaagccacatccctgcagaaactctaaatggcaaataacagaccagagtgccgttccgaggaccgtgtttttaagtttccacgtggtggatggaagtggaactggacgtgttctgggtcttcagcctctcttcggccatttggaactatgttccttctgggaactcactgtctgccagtaagtcaggaggtaacctgaatggcagctcttaagacatatcctaagtcgcatccaagcagctctcccgtggcccagtgcgtaaagaatccaccccaggttcaattcctgggtcaggaagctcccctggaggaagaaatggcaacccactcctgtattcttgtctggaaaattccatggacagaggaacctggaggggtacagtccacgcggttgcaaaagagtcggacacgactgagcaattgagcacgcaagttgtatctgaagcccagaacggacgccagagaagtctggcacatcaaaacaaattcgagtgacatgtcatgctttaaaggactgtctgtaaaatagaatcaggcaaacatttttttccgcttctgatttatacccttcatctttgtcatgggctgtcctccagctctttagtaattattcatcttcccagccatgccctaattgtccttcctgcatctagataacttttttttaaacattcactttctttgttacttcccaatatttcatgtattgtctatatgttcttaaaaaataaaaacctctttccatgtctcttttacttaagggtaatatttttattattatttctatttttgaattacttatttctcttctttcaaaaattggctgcctattgaatgcacaaatgaataaagaacaatgaacagaaatgtctcaagaggatgttggagggaacggtggggattatgttgaggtggagaggaacagatggcagctgctagtgaaagaaaaacacctctaataaatgaatatttagttacccattttctgaactcaagtttgccagtaggggcatgaatgcacacagtcagaatcagccaggcaacaaagcaggaaactacgagaaatgatgcccagaaatgtcagagagagacactcaaaggaa

SEQ ID NO: 52894 - DNA, 731 bp, Bovine  19866880749782
  misc_feature (1)..(1): n is a, c, g, or t
ngtgcaaatttacgtggagaaatgtggtgacacagaaagagactttcactgttgggcttgtgatcaaactcattctctctgtctgcctctgtctctgtctctctctttctctctctctctctctcactatattcttgtccttaatcgaaagtggtagagcatacacattcctgaaacagctctaattgttttctttggactagcctccagcaaattaagaagagggagcctagaaagccatttcagccctaaaataacaccatgggagcttttcttctgagacaatctcagcactcagcaaatccacgcttttcatcccttgcctggggatatcaccacagatatgtcatgcccctcctggtgttgataccttcatcttctctctcactttccctcctggctttaattaaacatcacactgaaaaaggttaccaaggcaaatcatgagacgagttctgccatcttctaccacatcccttaagaagcgggtcagcctgtcttcctccctcaaggcttcgctcgcttctctgccttgttgattcctctcagcgcttactctccttcatgcataagagctcttctcacaggctggtttctcactctgccattttctttgttagtcttggctcctcaaagagaaccctgtatgtttctacttggaaacccttgtgtctacttctagattcatccctatccagatactaggacatattccatctctaaaaggctca

SEQ ID NO: 52895 - DNA, 966 bp, Bovine  19866880939867
  misc_feature (1)..(1): n is a, c, g, or t
ncaatacctccagttttatccttcacaaactgattgttcaaaggactgccttgtggcattttttttcatttttgtcttgcagaggtatttgactttccctatctccctctcctatgaaactaaaagatgcttactccttggaagaaaagctatgacaaacttagcatattaaaaacagagacatcagtttgcggacagaagtccatgtagtcaaagttatagtttttccaatagtcatgcatggatgtgagagatggaccataaagaaggctgagcattgaagaactgatgctttcaaattgtagtgctggagaagactactgagagtcccttggactgcaaggagagcaaaccaatcctaaaataaatcaaccctgaatctcccttagaaggactgatgctgaagctgaagctccgatattttggccacctgacgtgaagaactgactcactggaagagaccctgatgctgggaaagactgaaggcaaaagaagaagggggtggcagaggatgagatggttggatagtatcactgattcaatggacatgaatttgaacaaatccaggagacagtagaggacaaagatgcctggcatggggtcacacagttggacatgactcagagactgaacaacagcaacatctccatctcatcttcccagctacaaactaaagcaaattctctgtccctgagtagtagtagcatttctcccatctttcagccactttttggacacatgcttaatgaacttacatatttcaaaaacataccaacagaaagttaaacatataggaaacttgcagtacttgcataagctccacgctacccacagctcaacaagtccacaaggagaaaaacaccctaaatcagcatgattcactgggtttgcacagcaggaaaacctattcatcctctctgattgcttcaaagaacttgctgaagataggtgttatattaatctaag

SEQ ID NO: 52896 - DNA, 1934 bp, Bovine  19866880940304
  misc_feature (1)..(1): n is a, c, g, or t
ngaagatgggggaggaagataaaaaggctaatatttttaaagtttaagccccttgttctcacccctgattcagagatgtcagtgtaggctgtgggatggagctggggataagcacaggcttccagatccagttctatccgggctcaggcaccgaaaatgtttgtgtgactctggctgcatagattctctgagtctcagcttcctcatctttgaaacggaagtactgttctcctcgaaaagcagttttcgaggtcggagccagttcactgaaagtgtttagcttgcagtaaacacgtaaccaattatattccttgcatcctcatcagtactttcattgaccacattactagagttttgtggatggtgcagaaagaagaaataattcaaaaagtctacaggctttattttcttgagctccaaaatcactgcagacagtgactgcagccatgaaatgaaaagatgctttctccttgggagaaaagctatgacaaacctagacagcatattaaaaagcagagacatcactttgctgacaaaggtccatcatagtcaaagctatggtttttgcagtagtcatgaatggatgtgagagttggactataatgccaaagaattgatacttttgaactgtggtgttagaggagactcttgagagtcccttggacggcaaggagatcaaatcagtcaatcctaaaggaaatcagtcctgaatacttattgaaaggactgacgctgaagctgcagttccaatattttggccacctgaggcaaagagctgactcattagaaaggaccttgatgctgggaaagattgagggcaggaagagaaacgggtggcagaggatgagttggttggatggcatcaccgactccatggacatgaatgtaagcaaactctgggagatagtgaaggacagggaagcctggtgtgctgcagtccatgggatcacaaaagtccaacatgactgagcgactgaacaacagcagcaacttggttttagagtgttgtgttgaaattaaattgtcctatatgtttgttgaaattggtaacattttgtgcactggttgttaggcaaaacatgttacaaacagataagtttaaaagaaaagatacacacacatgcagagaataagtttcttttttccctaacagttaatttttaaaatatggcttcctgttctgatgattcaagttacttaggagaggaattttctaagatgtgatagtctcatctctgtgatgggaaaagcccagagataatttgaagaccaaggaaatcagaattaaaacaagataaatttagcctaattaaaataaaggatctttaattaggttaagtggaagactgaatgttaagttagaacagacacagactttggtctgaggaagattattgacagatggattaaggatgacagacatgatccagaaaaataataatgaactaagcatgaaaacgataacctggtaattaaatagtatttcaatgttttggtatatttgattatcttttgaggcggaagacactgaatacatcttcttaatcagcttatttatttttcaattcttgtattattaatggattcattcttgttttcattcacaggtttatgttcagcaatgaatgccaggtgctacgcaggtcttggaaaaacagaccatttagacacagaacctgagctgaacagccacctaaggcttgcagtctacagggggcgctgactcatcaccagaccatcatgatgcaatatggtgcgcaaatgacaaatacttggttatactttagttcataaatcactggtatcctgtcattagtttgaaagtcttctctacaacaatccaaatcctcaggaattgctggcagttctggagccctcagggaatcaacaaggggctgcatgtacatatccttagttacaatgttaacagttca

SEQ ID NO: 52897 - DNA, 944 bp, Bovine  19866880986867
  misc_feature (1)..(1): n is a, c, g, or t
nacaggggttggtggatcaacacccagctcccacaccctcgggcagtgtaactgaagaccgagttccgccccgtctcctagagcccccaggtatgggggctgagcgccagcagcccacagtgccaacccacctggtagcgcctctcctctctgatgccctgctgcctccacctccgtctcctgccctcctgacgcttcttgggaccacgtccccagaaatgacatcagatccttgctgcagggtcagcttcttggggaacccaaactgagacagacacatttaatcacctgacttctaacaaagcacccgtcatgcaatcgtgtgcttgtgcctgaaatgcggtgaaaacaagccgaaccatcacctgacatgtttcaggtgtgaaatccagactctgatcctctaatgagccccgcgatgccccagggcaaagggctcgtctactttcttaaatgagctcagctcagtggccgttagcagggcacccctgtcctgagtgaggctggcccacctgcaagcccaaggcccctgttaatcagacaaaggatgtgcaagcaaataaaacattttaattaaggcttcattggtaagccagatgggccaaccatgatctaatccaaagaaccttgtacccttgtagcctctgttctaaaacatccaagcacgtgtctacaggggcctagaggcacctcctcccggttagctcaggcactggaggatcccttctctcccagtttcttcttgtttgccttcgtcttttcaatcatggtctccacaatgacagcagtctcttcgtacgtctggatgctctcggtggaaaacttctctatggattccatcacctccaccttctcataggccagcttcctgggagggcttctcgccagccggctgccgctccgagccccatgcccctcggacccacccagaatgacctgaggcc

SEQ ID NO: 52898 - DNA, 1575 bp, Bovine  19866881045383
  misc_feature (1)..(1): n is a, c, g, or t
ntgcccactttgggggaggtctagggaccgggaaaaatcctccgtggatgccatttctaaattacactaataaatggatatgttcttggctcagatggggtgcaggtgtgatgctccagttcttaatattagtcaccttataagcaatatgctggggcaacatcttggtaaactagagttcatcattatttgtaagccagaacaataaacaggaaaatctatggaccatgagtgggaaggaggtcatggcactcttgtttttcgtgaggcctcgaccttgataacaaacatcatcagcccagaagaggggtgcatctcccctcggaacaggggctgactctttgaaggcaggccctccttccatgacgtcaccgtgtctgcgtatgatgtcactaatgtcctcgcgcacccccggccctcactcaccacgccggccttcggggttccgcttgcgcccattactgaaggtggaggccagcgtggaggagcagctctcgtcgtagagcgcggtcctgccgtcgttgatggccgagttgatggagatggtccacatgctcgatgcgtagccgtcgcagttgcagtcatcgtagctgccgccgtcgcccgaggcccacacgtagatgctgcctttgcccccgcggccctgggggtgggggacagagagggatgtgcgggctgcagcggggtccgcctggcctcttaagcagttgaacctaaggactggcttggtttctatctgtccttgaaaaccactgtccttctggacaggcaccctgagaatttttcttttcaggaaggattcaatataaagtcatctcaatttacatttaatctgggaataacaaggtgggaaggactggaagaatctccttaaaactgacaaatggactgctttttaaacattgataatcctcatggtaaaaagtcaaagtatatggaaaggaaaatgaaaaaaacaaatccctctgcatgtaattcttacatattctttcaggcattttttagcaaaaatgcaaatgaacctgtaaatttatacttagctatgtaagatgtaaaagatatttatatatagcttccattttacaggtattatgtatattttacatgtttacatatatatatagatattgtgagtattataatacacacttacagattttatatatatatgtatatgataccgatctctgggttgggaagatcccctggagggcatggcaatccactccagtattcttgcctggagaatcccatggacagaggagcctgtagggctacagtccatagggtcgcaaagagtcagacagtcttagcaactgagcacgcacacacgtcagaggaaaggagatgtctgaattacctccaaaggtctcctgcctcctgacaatgagaagtgacattttgattgcttctaagaggacttggagttaattagcctgtgactggctgagtcgatacatcaacaaagattgatttagccactggctgagaagtgtcctcagtgtcttggtaaatctgtcctggaaaactccatccaagcaggcaactgcccgcagaaaccaagacacagaagga

SEQ ID NO: 52899 - DNA, 2395 bp, Bovine  19866881075386
  misc_feature (1)..(1): n is a, c, g, or t
ntagagcttaactgatgtaggattcaaggcacagaatcctagtctgtctggtgaaacgaatatattttcacacccctatttgggtgggttgggttatgtttaaaagagacgggctcacgtgcctccaaaccaacccaaaccacagagtatatggaatggaaggggtgactaatttgtaaatgtttgtaatttataaacagcccattgtaggaatgcatcacaatttttcccttggagtttcagagctggactatgctctaggcttcagggcagggaattctataaatccagtctgggtaactgaatgagtttatgtgtgttaggattgcctaggtatcttacaataacaaacaacccacaaatcagagtggaataacaacatcaaagcttgtttctcactcacgttatgcatccaacactttgaaatcccttaggtacccaggcttcatcttagctgcatcccaatccctggttacaggagcaactcaatggcgggagaaaagcaaatcacgcgctggctcttaaagcttctgcctggacgtgatgaatggcatgtaaactcacattccattggccaaaaccagtcacatggttctaacttccagggcatgaggtgtcatcttcacatgtgcttaggagaagagtagtcatttctataaagagcgctaataagagttgactcattggaaaagactctgatggtgggagggattgggggcaggagaagaaggggacgacagaggatgagatggctggaaggcatcaccgactggatggacatgagtttgagtgaactctgggagttggtgatggacagggaggcctggcgtgctgcgattcatggggtcgcaaagagtcagacacgactgagcgactgaactgaactgaactgaactgaatgatatttacatgtttcagcagcatcataccagctacttgtcactgtgggcatcagtcaataccagctctaacttccctatttttttttttaatgatttatctttgagagaatctccgcaggacaaaaatgcataagaagagggtagtaaacatatttgtatggaatttttcttttttccttttctttcttttttgattttttaagggggaaggcttttttttatttcttatattagaacttgcactaaaggtaaggcagctctctttaattcagttcaacaaataattttaagcgagacttggtgtgggggtattgaacttaaaaggtaaatagagcatgctccctcttgcaaaggatattattatttagtgaggaaattattcaatcagaataaagcaaaacaatacgaactaaattctgaaagtgaggaataaatacagagctacaagagttgtgagcacttaattctaaactggggagggtttcttgcaatgttggtcctcaagagtttaaagatgatgatccagtaatgaggtagggagacagaaattgcatttgaatatttccatgagacagaaaataccggtgttctgtgtatcaaaaaacagaaggagcagactagaagaggtagatggagggaacacccctaagtcctgtttcatggaagacgtgacctctgatctggccctgaaatatcaggtggctgcagagtgtgtcaagcaaatacttaccatctggtactttaccatctacaccaaactaataagagcctctgctttggcattcctgaaccagatcaataccgggcaagctgatggtactcccggtctcgacttgaatgtggcagaagcctgggagctgggatacacagggaaaggtgttaccattggaattatggacgatggtgagtattccaaaagcttcattcatctggaaccaagtgtgtcttttgcatgtctttggaacagaaaagatccatcgtttgggagtcagaggtaggagggccagaggctgggcatggtcatgtatactgtgccgacatcctcagcctcctcacgtcagtgatcctcaagcccttcaccaatatgtactgaattaataagtttacatttttttaatgaacaaatgaaagttgacaaccactgaattataatttctcactggggccactggacttcccctggtggctcagtggtaaagaatccacctgccaatgcaagagacgtgggttcgatccctgggttgggaagatctcctggggaaggaaatggcaacccactccagcattcttgcctgggaaatcccacagatagaggagcctggcaggctacagtccatgcaggtcacaaaagagccagacaggatttagcgactcaacaacagcagcaacaaacactgcttatatctcaccttgaaacagcttctaaacctgtttatatttaccacctatgtctctagatccacactgttcaatgtagtagccactagccgtat

SEQ ID NO: 52900 - DNA, 2475 bp, Bovine  19866881103879
  misc_feature (1)..(1): n is a, c, g, or t
ntgactgaacaacaacaagtataaaagaaaaatgttacttgagaaccaaaccatctgtacccacacagtgtaaagcctacattgaatgactttcatattccactgtctttatcaacatgctgtcactgtttcagataactcttgcccaagaaattacaaataacttgattggtcattccagaaactttccctaaaagattaatcaactcttcaaagaaagaaccaaatgacgttttatatcctgaagctttgaaccttacaagtttaatcgtcaccacaaattccctaccctgctgtgtttaccagttctaaagcattatgtcaagatccttataattcttaacctagctcacagcccctcctactgaaaggttcactttaaactagatttcaaatctactttaccttgccccttctgagtgctactaagacctgctaagtaatactcccccttaccgcagaagagtccacccaactctgtctcatcaataagtgacagctaacactgggccttattctcaggaatcactcagtaatgactggaataatctgaagtgactgagcacacgaatgccatcttcacagtgtacctttcccgatgactttaaagtgtgactccagtcactttaaatattaataaaattaatgcttatttatatttaaacattaatattttaaattattagggagaaaaggatgacagaggatgagatggttggattgcttcaccaactcaatggacatgggtttgagcagactccgggagatggtgaaggacagggatgcctggcgtgctgcagttcatggggtcacaaagagttgaacatgactgagtgactgaacaataacaaaattaatgttataaaaactattatttattgagtatttcttattagttagacattgttcaagtttcctattaaaggataattttataagaggtaaaatcatgacacttatacagataagaatgagcgcccatcagagaataatttaactggtagctcatgcatctgggttatgttcaccttccattgtctttgagccatgtcacaactctgcaacttgcagaaaattgagagtaatacaaatgagtcttgcccatgaaatgcaaattcactccagtgaaatgcaagtgattagtaccttgtggagaaatccatagtggctcagcagtaaagcatccacctgtgatgcaggagacacagtttcaatccctgtgtcggggaagatcccctggagaaggaaatggcgaccgtctccagtattcgtccctggaaaatcccatggacagaggagcctggtgggctatagtctatggagttgcaaagagtaggtcacaacctagcaactgagcatataatgttaagaggcatcacacaaaggcctggatcctttccatggtgtaataccaatcttctcccttgagcatcacaaccagtgactccaacaggaccatggctcacttcttgcctgttggtttagtgatgtgataagcctcaagtggccaggtgtggcctcagcttctgggacagcagaacctttgtctgatgttccctgttagaatcatttctccctcagtaacctagatttctaaaccagcaaagcccagtattgcagagacaggaacacagtttttgcaaatgggccattaggaaagtctagtcccagttctggcccttgttcctggaccagtatcttcaaaaagtctgaagacttccctggcagtccagtggttaagcttccatgctcccactgcaagaagaactaagatcccacaagccctgtggagtagccagaaaaaaaaatctaggtcctcccctttccctgatgctcagtccctttggagaaagctagaagaaatattttggagaaggcaatggcacccactccagttctcttgcctggaaaatcccatggatggaggagcctggtaggctgcagtccatggggtcgctaagagtcggacacgactgaacaacttcactttcacttttcactttcatgcattggagaaggaaatggcaaccgctccagtgttcttgcctggagaatcccagggtcgggggagactggtgggctgccatctatggggtcgcacagagttggacacgactaaagcgacttagcagcagcagcagcagaagaaacatttaccatatacatgttgggcagtgtggtccttccttgaagggacccacccttcccttcattcaaggggctctgttctatgaaccggcccaattctaggaattgaatgagggggcaaagctccttagcgtggtgactcaaaccacatccctgtccattaggagttttttcatttgtacagattaaaactttcttaggctgcccaactacatcactcctaagtacaccatgaccaattaacttctgctaaagccctctcgggttatactatcctttcactatttcagctctgtttcccaaggtactaaccacatccaccttaca

SEQ ID NO: 52901 - DNA, 1535 bp, Bovine  19866881214892
  misc_feature (1)..(1): n is a, c, g, or t
ncgaacactccggctgcttcgggagcagccgcggatgtcccagaatgcctcagggtgcagttgccatataaatctgtggttgcctggaggggaagagagtgaggaatgagtaaagaagccccattgctttaaactcaaaacaacacagagcagaagatcttctgtttcttttacttaaagtctgccttgttctgaagatgatttagatgaaggcaagaataagcttagcactcatgtatttattttgccacacatttttatctgagcttcctagtagcctatgcaaaaagggaaacacaatcagttatagttacagtgtccataagatacaagcaagtcaactgtttagagagtcaactttgcagctattctaataaagagatatttaaagtgacaagccaataccaccaccatactcaatgcaatggtggggtttgttaaaatgagattggctcagaaagcgcagggccacttcatcaacaaattattttcccttcaggaaaaaagggtggcattcctaaagaggaaaaatgaaacaagttcagctaaagtttgcctagagggacagccattaaagagaaaatgttaccgttctctacatctaaaatccaccaagagattctggaacacagtgaacaagacaactgctacatcagtgattaccccaagtggggaggttgatcagctgagttttaaaggattttacagagaaagtcctcatcttcaatgtttgtgagagacagggttttcattaagattgtttataaaccatgagaagactcatttatcttgtttgtctgtaggctccttgagtgggtctattattttgggggacaaagcatccgggcagtttaaagtcatctcctggggaaagtgactatattcaaagagaattcagtgctcctccccagctggagtagcgtcacagacagggggttgaggacagagtgataccactggaaggcccttgagccagggaggggagcttctggggggtgtttgggagaaggcttacaagcagaacaagactggggccacacttgctcgtccctttctgctcatacagctcagaagatgagaaaatgaagcctctttccacttgggaggagctgacacattttccatcctccccaagactaaggggagctgagcagactcatgggagaaattaggggggttcatgggggagccaggctaaggtctgggtctcctgcagggaagggacttctgccagctcatgtgagagctggtcgggtggagcccaggcaggaccttgggactgaagggctagctggtactgatgactgcattcttgttcctgcctttttgccaaccctggaggaggtggtggccaggcagaatgtagcccagcctgactactgagtcacccactaaattcctagcttggaggactgagaaaaggctgtatgcctagcggacttggaaaattcactgttaaacctagggcccaggaaggcagagttgctcagaagagtgcaataaatgtctatattcttaacctttggttttctcaa

SEQ ID NO: 52902 - DNA, 1239 bp, Bovine  19866881222453
  misc_feature (1)..(1): n is a, c, g, or t
ntatgttatggtacatggtgagagctaagtaaagtttctaatcgctggctttaagatagggagattatcctgggttatccagagcttgatcatcacaaatacttcatcagatggaagcagaagaggaagtggtgccatgtaagaagaatttgatccactgttgctaccttagaagttggaggaagggtttgttgtttagtccctaagtcgtgtctgactcttttgcaactccaaggactgtagcccgccaggctcctctatccatgggatttcccaggcaagaatattgaagtgggttgccatttccttctccaggggatcttcccaacctagggattgaacccatatctccagcactggcaggtggattccttaccaccgagccaccagggaagaccctagaggagggggaccatgaaccaatgaatgcatgcagcctgtagcagcaaaaaaaggcaaggaaatggggcctttggaaggaatacagccctgctcacagctcaattgtagacttctagccttcaggactgtaagaaaataaattcatgttgctttaagctactgagtttggagatgtgttagagcaagcataggaaaggagacttcagaatgagaggctgttccctcctggcatttctcagagtgcagatccaagcacatgatggtttctgtaccttccaggagcacaactgcaaagtcggtgcgtgactttcttcatttgttctgcattgctgggctggggctcgttaatgccgcgcactgggtgctctgtgcattaagtagaagaattgatcactctgacctttattctttgttggtgtttcgtcattcgtgggctgcttggcttgacatatgaattactctccagcctcctggtgcgggggatgcacagtcaccagcccccgtgtattttagacatatgccagttgtcatttctacacacatctccttttccactctttcaatctgggattgttccactggcaattaatgaaatatggataaaaggaaagaaccgacagggcattgctattgacaaagaggttagcctttgaggaagatgaaaaacacatgccctttaggaagaacccacggagaaatggaatattcagtccccccttgccaggactgaaccctgttccttaattcattggtctatggtcctaacccccaaaaaccaaacttcagtgtgtgtgagtttaagaaaaggagattgtaaattttcaagactccacttat

SEQ ID NO: 52903 - DNA, 1235 bp, Bovine  19866881250994
  misc_feature (1)..(1): n is a, c, g, or t
ngggtgctgacctgggcgtcctgggcctggctggcctccagcagggcctcgatggagcggatcctctccgtgagctgcgagttctgcgcccgggcctcatccagctgcccatggagaccacgcagctcctcacacttgcccctcacctcagcctcggaggactgcagcttgccgtgcagctctgcagaaggggtggcaggtgggtcaggggtggggggtcactgacacagacgctcccaggctgcccagcacacacccatgggctcgagacacacggcgcaccaggggcagcccaccagctagctggtggagagtcaccaccaggcttctgcacaccaggggacaacaaagtgcccccaccacttggcaaagatgggatctgaacgggtgtctgctgcagagtctaaactctgctcctgggagatcggctcacattgctgagacaaaggcgggagctcctggcgtgtcctttccccttggcgacctccacaacatcccaccatggctcagaatgccagccacgttcatctgactctgcacagcccctggcccgaggctcgccccacacacacagggctatgctgaaggtgtcctcctccccacccctcactcatctctgaggcctggggatccacatccactgctggcccaatcctctgggcgcctctgtggctgcctggcccagccctggtccccgggccattctgcgcctcggtcctttcttgggccagagccggagcatccggaaggacaagtggggggtttggtccctccacccccacccacactcccagccctcatcactccacaggatggtcacctgggcccgcctgtctgcccccacactggccactgctgccatctccagccttgcgcgccgacctcctcggtctgtttcttgtacagtccaagttcaagtttgtccccattcctcaggggctctgtgccgggcatttctgccctttcctggcctttgtgaggcagacctcttccagtcatccagacctctctccccagaggcctcccctgaccacctgaagctacaccaggcccatcacagcagggggtggcagcccagaaccctgagccatcccagcctatagcctgcttttgtcaatagagctttcctggcccacggccaagcctgtctgtcctgggctatgtgggcactgtggcagcagagctgagcagctgtgacaaacaccatctggcctacaaagccgagatcactactg

SEQ ID NO: 52904 - DNA, 1208 bp, Bovine  19866881260884
  misc_feature (1)..(1): n is a, c, g, or t
ngtccagaaggagccttgtcttggaaacagggaacaagattcagcagcaattggaatgccttgctccactgtcagcaggaacccagaccagcccacagagagctctgaatagcatttatgatccttaatcagcaagcatgcagcgttgatctggaaattaattggatgctcgggtttttcacacactgtggagagttagatattacaaagattttgacaggaatatatttagtaacagcatcactgatgctctatggcatgcagagacccacatccactttgggactcattatatcctgagtgacagtggatgcttagcaaatctctcttgattatgatgattaaccacattgctcagtgtctttaacagcgagtgaggagctggaccagagctggggttttctaaatatgacccactctactattatttatttaaccatctttacttaattgactcatttattagattgtttttaagggtaattgtatgtttccactataatggaaaaacctcacttgccatgcaaataggacagtctttaaaaacagatacagtcctcccctaatccagatcatggcccattgtgggtgcgtcacgccccaagaactgctgggctgggatgggcttgcagcaaaggaactcagaataaagagccagggtcatgtgttcccacagctgtgtgagtctgccgtacacagcaggtgatacaaggaagggataaagaaggagaaggggacagtttctcaagtgaacagaagtgaagatctgttgcagttcctgggagcaccagctaaaagacagagagaagtgggtcttctggactcacctccagggatcagaactcagttgttcaaggaggcagggacagaaatggacaggggctcagggtcgtgtttactgctgctggaagtttcctttagcctttactctgttaaaaaatatttacaaatgtacataaatgtaggtttcttcaggggcaaaacattgcttcaacttcatacattgctagtaggaaggtcaaatggacaacccctttgagaagaggcagggtgatttcttacgaagttaaacacacacacagctgccgtataaccagcaagcccccccccccaagtatttacccaagagaaaatgaaaacatatgttcattaaaagacatgtgcaaaaatgttcacagcagctttattcatctttgcaaaaagtgtaa

SEQ ID NO: 52905 - DNA, 675 bp, Bovine  19866881373179
  misc_feature (1)..(1): n is a, c, g, or t
ntgctgtacaatgttacgttagtttctgccgtttaacaacatgcatcagatatatgtacacatatatcccctcccttttgagccttcctcccacatcctcactccttttaaatcactgggacttgaatggtcccatctcccattcctgtagcttttaccagtttataccttttccttaaatgacctagccctgtttttttcttcagttgtgaaatctcagctgactcttgtatctaagctgccttaaattaatacagtggggaggactcatggggttttagtgagagttttattatcagcaaggcattaaatctagaatgggttgtattcattttataacttcatcaacaagccatcaaatttattcagactaattgactcttcataaacagaagctactcattgcttccttatttttcaggacagtaaaaatttattttttgtgctaatttaggttctattattttgctaggatttggagaagctaaacaatgaggaccaagggcctttttcatcttcttttgaaaattaggaacacattgctattcactatctttagattcctctttaggtctacaggactacaaaataatgtttgctcactggaaaattaattagttatttctcagggcttattggaacattgcttattgtctgtagaaaggattacctatt

SEQ ID NO: 52906 - DNA, 724 bp, Bovine  19866881789058
  misc_feature (1)..(1): n is a, c, g, or t
nctgaccttttaattatagctctttctctggatgggtctacccctgatgcatacccaaataacttcagtgatttcacaggtctttactgagcaccatgtgtatgcaaggctctgtgagttgtctatgaacctgtaggacaagtcctcctgtaggtaccttgcccagaggaaacttgactggcccattgggaggtgtaacaaggtgaatttagcaataagagaggctgttccccgaggtaagagggcccctcttaaaggaactagagaggaggaggagggttggctccatggattgcagaccccactccaaaggcaatctgggtccgaagaccatggctagccccctgctgggcaccctggttgggtgtcagagacttacttgagtctcagcccagctctgcccatgagcagcagtgtgagcctgagcaagaaactttcatttcatatttataaaatcagaatgttgggttcactgaaacacaccattctggtcccttccagcatggtgtgtctttgttaatttacagtctgcggatggtacggaattcacacaggtttccaatccctattctgccattttcaaatcccaaatccaaaaggctctggaaactagatttttttttttttaatttcttggcagcaaaacctagtctgaactgacatgaggctatttatagtctttattatgccacttagtgtgaatatttatacattttgccacagg

SEQ ID NO: 52907 - DNA, 1693 bp, Bovine  19866880478995
  misc_feature (1)..(1): n is a, c, g, or t
ntgaatgtaggaagtgaagaggcagcagttacttttttcagagctcaagatccaaacctttagtgtttgggaatggtgtaggaagtgatttatattgccctaaaacatgtgttgctctaaatcttagaaattcagtagggttcctccttgacaaatttatggaaaatggcaatgtgttatggaacctggcactttccttgctctgcgctcgcccagccttgcccttggcagacttggtctcttccacagaaaattgtctaatcatccgtgtgtgctgtggcctcagatacctggtggtccaccttcccaggatgtttgcaggagacagggctgtgttcaacagaaaggcaaacatctgctgaagaaatgtaggggacggggaaaggagattttacagttcccccaggaacactggtaaccacttctgtgtcttagcaatggttagtcaaatgcccagtgaccttcaactcagcccatttccaaaacttcttattttataataagttcaactacaggaagttcaattgctacctcccctataaagctatacatggctccctgtctcccttgtcttccctgacctcctttttcagggttcccactgattgttatacatggctctgttacaacattcatcatattattttaatactaacaataatgtcttttgtaataatagacaacacatttcatatttattaatgtcattttggtgatacatctcttcattatgtggtaaggtatgggaccctgtagtttcatctgtgtatctcaagtgccatctgtcatgtgacaggtgctcaaaaatttctgtgaaaaaataaatttcttgctaggcctgttctcccaaggtcgtctatggagttcaccagattgagaacttaatcatggccactgtgaatctaatgctggatataggccaagaccagcgcctagttagtttcagatgaggaagcttgtgagcttctccaagatcaggtagctggcgggtgatggcgcagtgacttaatcctcgtattgtctgtttccaaaaccgttgctcttattgtatctgtctcttcgtctcattcatcattcattcatttaacccacacttaaggagaacctgctgtgcttcaatagcacgatgtatgtacattctgagagtccatcttcatcctcaagggcccagacttccctgagctcacagaatggtggaaagaaagtccctaaaactgctaaacaagtagataaacacaatcctgtttgataagggctcttgtctgggatcgacatagtacttttcttctaaagaatataaaactctgactacctgaacaatgagaccataaagagattgttgtcatttcattcctttccccctatggaaatgaagcccattcctatacaacatcctgagacctggaggcagatcagattaagcagggtaccttggtactgctcattatcccagacctacctgcctgtcccctgctttaactgctagctttcctgggcagaaatatttctgagctgcactctgcacttttccctcctttttaacatcatcagatttgaagtagacatacgctgcaatagacttgctggaaatattatagaattccagtaggagatcgttcaccttctgttggacaataacacgtgttcacagtctcagcagtttgttcactttgtctgaggaaggaaccaggaa

SEQ ID NO: 52908 - DNA, 3414 bp, Bovine  19866880485669
  misc_feature (1)..(1): n is a, c, g, or t
nactgatttgctaaacctgggacacaacactaaattgtaaatggaaagatcatggctgccaaagatgccataaaaaatggatacagacgtttgtttgatgaagaacattctaaaattggacatacttggtaaggaaaaagtgggaatcctaggggatgccagtgaaagcaaataactccatttctcatttataaagcagtaatcagaaatggggtggggggtgaatgctgagggctaaaagtatgctggatggatgcaggtacgactgggatagtcatgatctaatagatgtataatacaagccacaaatataattcaaaattttccagtagccacactgaaaaatagtaaagttaagctgaaatttaattcaagactatattttatgtaatcccacatatcaaaaatactatgcttttaaaatgattaatgaaatatcatacattctttttcaaattaactctcaaagtccagtgtgtcctttactcttatcacttatctcaattataatttttcatcctttaaatctacattttgatatttatttaggttacaattgaaaaaggagacttccattcctaccttgttccaaatattcttattcctataactgagtcagttttcagttcttaaaattttatttcaattaactaagtaaagtataattaaatgtttggtttacatgtgactagaggtgtgtactggatactgtggatatcgaagaatgaggagcagactcaccctggggagttggagtgaaattaggaggtgatctactgcactgaagaagcctaactggaaaactttctttatctcctccaccattagacaggtgagagatattccctaaatcaaaactttagtagcaagatggaatatgggttattcatttacctactaaattattgttattttattttagctcttcccacaacttctaagttctaggacagactatatatgaaaaaaagaccaaaattatgtattcaaaatctttggctttaggacttccctggtggctcagtagataagaatttgcctgccaatgtaggagacatgagtttgatccctagtccaggaagattccacatgccttggagaactaaaccctatgtgccacaaccactagggcccacacaccctagagctttgcaagtgacaactactgagtccaacctcaacaagagaaaccaccacaatgagaaacctgcacacggcagcagagagcagccttcgcttgccctagaaagcctgtgcacagcagcaaacaccgagtacaaccaaaagtaaaaatgaataaatgtttagaagttatatctgtaaaaagcctttgactttaaattgaacacattttaaagccaaagaatggaaagaaatgcaaaaatccatctaagtaaatttatttggtagagctgcaaacattaagtagacagttcagttcagtctctcaggcgtgtccgactctttgcgaccccatgaatcgcagcacgccaggcctccctgtccatcaccaactcccggagttcactgagactcatgtccatcgagtcagtgatgccatccagccatctcatcctctgtcgtccccttctcctcctgcccccaatccctcccagcatcagagtcttttccaatgagtcaactcttcgcatgaggtggccaaagtactggagtttcagcttcagcatcattccttccaaaggagacagagacatatactaaaagcctaactttctttaagtactaaatctgccattataaactcaggatgtctctataaagcctagagtaagaatatgttaattatatgttctatctatatgctatatgtaattaatacacattgtgttaaatttatgaataaaatccctgttaattgcaatctcaattggttgagaaaatattctccaaaattgataggcatgatacatatattttcttactgaactcaaagatatttagaattaagtaagggatattcaaagaatctaacttatactattttttaagctaaataatgagagcacatttataattttataaatgtacaatgttcaagagaatttggcctcctgaataagaagtgaaatttttaatttcaatataaagtatacatttgaataacagatacagacttagaattttaaatttaaatatgcctcaatctgtaaacaatattgagattgagatattagggtatccaagtacatctatgtgtttcattgacttgctatataaaaattacataagcatatgtcagaaaatagaagtactcacaggagagactaaaaatattgaccttataaatgtggtttaaaatgtttgaagaagtttaactatactaaaattgggaccaaaaaataatcaaaagcattgaaaagctaaataaaagttggatttgaaggtttagaactttaagaaattgaatattattcttaaaacaagaaaaatatccttgtttcctcttaactctcttctatgtatataattttccttatccatttatatatcaggggatttctggactaattaacctctgctttgtatagagggcagcaaagtagagatcaggagttggcaaactttctctaaagggccaaaaaaataaatattttagaattggcaggtaactttaagaaattgaatattattcttttttttttttttcattaacaagcagcatttatttatcctctgtcatcctctgctatccaggaagagacttagaaaaagggttctttcttcttcccaaagatccaatcaagctaaatttaaaagactaatggatattcctgttataatcaaggcctaaacatgttgagatagaagggaacactagggcactgactattgtttgtttctctagcagcgtaagaaagcgctccccacacacacatttgttctccctggaggcccctggcctgtgaccttataacatcatccaggggttatgaccagacagacaaggcaaataagtgaagcacgccaggtgggtggtgccctctgtgctccaccgcgtctggaaggagcaactggttctgaaccccactcggtgctgagtagaactgcaggcccagggtttccagaacttccagtttttcaaaagatgctccatatcaccatttttaaatgtcagattatacttttaatgctatgtcagtcaaaacatacctgtgaagcaaagcagtccacaggctaccacttcgtgaccttggccaccactcattgtcatcatctattgcttttactatcaagtgtgaaacttaaaagtgggtacctcattaaacttgccagggaactgtgtatattgggttaagtatctggtgttcctctgtgaggtttctttaaatgaacaaccagaggcgccattaggttatacctctttttctttgtaacaggaaaagcataaagcaa

SEQ ID NO: 52909 - DNA, 963 bp, Bovine  19866880535535
  misc_feature (1)..(1): n is a, c, g, or t
nacaagaatgctggagtgggttgctatgccttccttcaggggatcttcccaacccagggatgaaacccatgcttccctcatcacatgcagattctttactgtctgagccaccagggaagcccaagaatactggagtgggtagtccttggctctaggagtatgtaattcttcccatctgagagtagccaacaacataatgaacaatcagaaagctgttttttatgctaccttatatgcgtgtttgatccctgggtcaggaagttcctctggagtcagaaatgtcaacccattccagtattctttcttggaaaattccatggacaagagaagtctggcaggctacagttcatggggttgcaaagagttggacatgactgatcatatacatacaaacatggcactgtgctaggcattgtgggcagagaaggcgatggcaccccactccagtactcttgcctggaaaatcctatggatgaaggagcctggtaggctgcagtccatggggtcgctgagggtccgacacaactgagcgacttgactttcatttctcactttcatgcattggagaaggaaatggaaacccactccagtgttcttgcctggagaatgccagggacggcggagcctggtgggctgccatctgtggggtcgcacagagtcggacacaactgcagtgacttagcagcagcagcaggcattgtggggggaagagcattagacagttttctcccagagaccaagaggcagaggcagaaactaggatgaagatgattttctagttccagtgacacaggtggtaaaaactcaagtgtttgtaaaatcacactctcacttctatttcttaaaatcatggaaagcaaagaccttcggatataataacttcaaatcacggaatacttaacctagtttaatatgcaattgcctttgaatgtatctgaggtttgcatgcttatctattctttt

SEQ ID NO: 52910 - DNA, 1126 bp, Bovine  19866880594714
  misc_feature (1)..(1): n is a, c, g, or t
ngcatcatcttttattggctcaaccactaccaactgactgccctacttcccccctgtacgtctagcaagctcttgttgatacagcagcaagatggttctttaaaacataaataagattacattattcctacgtttaaaatctcacttagaataaaatccaaagagcttactatggcttgaggatgctgtggatctgacatctggatgctcctctgatctcatttcttgcttatcttctctctgcccaagactcataaatccattttttgtctctgaattatactaaacaagcccagggcttttacatgtgtggctccctaaacccagaatgtttttccgttatttttgttgcttgtgaaggaaaccagaatattcataggaaacccaaaaaaacaccaaaatgcctcttgaatataaacattattttgacctgaaggcaactaagcagcagcaaatgcaggaaaatctctgcattccgccttttctggataaaggcatggtataaattctccttttactcttaactgccctgagatagcacaagagaaatctgcaaaaaaaacctttctccactggtttactcccatacatttaccttcccacagtttgctacccttggaagcctaaaactattttactttgtcctgtcatctctctacaaatttattgatctctgttggaaatcttatgtaggtggaactctaggtcactgctttgagttactgttcgtaaaggtttctcctgcataatgtgtactgcatgcactaatacactacttttctcttgctaatttgtctctttgctaaagctgaaaactttaaaaaaatgtcaaggtttgcctcccctacactctaagttaagaaaatgggtgagtgggtcaaagctcagaagagtgaatgaagcagcaaggtttgctcaggaaatctaagcaggccagcagagctgggatactggtgcagcagtcctcagcccctttgtgtctccactcatgcaaatccaccgttcatacgtccagcagaaaatcttccctgtggtcctcaagtatagatgatgcccgctttttacgatatgacaggatctcataacgtgtggatatcaggaaaaagggaaggaaacctaggaagaa

SEQ ID NO: 52911 - DNA, 1085 bp, Bovine  19866880595568
  misc_feature (1)..(1): n is a, c, g, or t
ncagtaggtttgtaagaaggcttagcatacttgtttgctcagaagcacaagggaaaaaaaattatgtaagctccaaagtacatagcctcatatttggttctatatagaacagattagaaaaccacaagttcaattttatctctacttctgtaagattaaaacaaaaaacaaatccagacccaaagttgttttttttttttttttttaatatagcaaaatctctttaactgcttgaaccacatagattggacttagttaaaacacatgttcaactatcagaaatgctgtcattcttttattctgatataaatcattattcctgcaaaataaattgattctactttaattgtctgccagctgtgactataaagaagctatgtgaggcttacacttgaatctttaccacaggtggatataaggatacaaacctctaaaatacagttcgtttgggtcattaagagttcacattctttccaatacttcagagtaaattacattatgtttatggtgctattaatcacattatatcttctacgcatccaaaagaaaagtatcatgtctctttatctatattccttacccaataaaaattgcttaattgttctctgcattaaagaaaaattacagaaggacattaattgcttacctacatgatattttatttctgaagctaaaacattaacatatgcaacaacaataaaagtggagatgagtaaattacataaaataaaaccatgctttggtttatgggctataaaacaaacaaagcctgactttaaaagctgttaatacatataaatgaaagtatagaaagttcacaaaaataaaggatgtatttcttcaaagaagaaaatgaaacaaagaatcttcactatgtatatgacagttgtatgatgtttattaaggcaaggcatttttaaaaaatgtatcatgagttgaaattttgaaaatcagccaaagcattttcagaaaactggatgctaacagtcaacaatctctgctttcagaagtatttaaatataggtagaacttttgtttactttgattattaagatcttcatcttatacatatataaatatttata

SEQ ID NO: 52912 - DNA, 2040 bp, Bovine  19866881150671
  misc_feature (1)..(1): n is a, c, g, or t
ntccttataattttaatttgcctgtctctaatcactaaataaatcaagctctttttaattccaactgctttttcagaattgaccttctgatgtgttagattttcttggcctggaaccactcttcatggtaaacaactgacttagttgatgttcttgataggttttcttagagtgtacagatttctattctaaaaattggtgtgtcatgtggacattttcctcatataataacacagttaaaaatccacaccttttctaaatgtagattttaaaatatttccttcatctcttacaccctaacaagaactttgcaaaggtgtaatttattaattacaggtgtaatagatattttttaattaattaattaaaggtgtaatggatattttattggtgtaaatggacattttatcagcaaataaaatgaatcccaactgtgatattcagatatgtgttgaatcaaaaaccattgccacttctgctcaccctcatcacagagaagggcagatacaaattcaactacatgaaggtgataaatatgtacagaggggagtctatgagaagagatggaattaggttttttggttcatgttcaggcttgatattttctactcttgtactgactttttatttcctttctatattctgattagatcaaacatatgcctgcaaagaacatttgagttttatgatgttactttatatcataaacttacttgaagaccaggtaacatgtttgatattttgtaactctgttatactctggaaaaaaaatctctgtttctggcacgtcactaaaatcccagggagtcccccataaaccaactggaaattgagaccaaaacaatgcaagagcattactatgtctgggacattggatttgtctatttactgcttttttgcagtagagaaagctcagtatctagtcctcccagtattctttagcaggacttgtaatggtgtagatgactgttcagcagattaattcccttgccattcctgctgtgggaagagtcaacttccttgctttgttgatgttgagcttggaaagttagtagatgtgacataagcagtgttcttaattatgcttatgtggtttggattgacttttggattccttgcattcttcaagagaagaaaattgccaggtggccattgatccaaagaatatgaaaattttgtgtagcacatcagaacccaacctaaatcctagagtccagagcctagagtctgacctagccaaaatgcgctgaaactgactggcaaactcccaaaagagaaataaggtcttgagattttaagacacttagttttggtgtggtttggtagtcagcgttattaaggaagaagttgactgagacaagtttctgagtttgttgtttaagactattgatgttaaagtcctccagtataaatccttcacttactaatttagtccaaaaatatacatgtatttttgaatagttgtaatgtgccaggccctatgttatgttctagggaaagataaagaaaatctatctggggaaaattgataaggtaattataatacagtgtgatctgtatctgatagggatacccatctattataggctgatttagaaggaggaccagaactggttttgacaattcaaggaagttttgtcagagatgaagtgcgagtaggaatcattcacattattgtaggtagaggtaataacatgttcaaaaacttagaaactagaagatatgttcatctggtggcctaaaaagaatgttgtatgaaagggcctggatggagtacaaaggaaaaaaaataaatctggaagggttaagtagtttgagaggtagcaggtagaatatgtatctgaggcttctggtagccatcttgcacactaaatgtaaagagtgaaaaagctcagatgacatcattggtttttaagattcaattatgcatgaaaccaaggctaggtttctgggtaacacctacatatatgagacagaaaaaaaaatcaatggttcattaatttaacagctattttctgagtactgggagtgtgatgacaa

SEQ ID NO: 52913 - DNA, 811 bp, Bovine  19866881215333
  misc_feature (1)..(1): n is a, c, g, or t
nttttcccctaagattaaggctcggcttgcttaggattcaagggaaatgtatcctggtggttaatttcacagtctgaatctgtgcgtgctcagttgttcagtcatgtctgactctttgtgaccccatgaactgtagcctgccaggctgcctctgtccatgggattttccaagtaagaatactggggtgggttgccatttccagggaatctttctgacccagggatcgaacctgcagctcctgccctggtaggtggattctttaccactgagccatctgggaggtccctgatttcacagagcactctgtaaattcccattcttgttactttcaaccagctgctgttcttatgttcaacgtgcactgtccctagaagactccatcaggctaatctttgctgtcaggttttaggaaatccaagcgttgtacattttcagcagctggcgcctgtgtctgcaggctggcagctgtcacatacttgcctgccggtaaggtttggaatgggggtcaggcagtataagctctgccaaagacacctgtctgatgatttctgtcacttttgctttttgtctgcccttttcctttcttctcttactgtgtgtttgtacctttttatttagaagaaatttcatatgctgacgggaaaatgctgatcgatctatggctagaagggacaggaggggttttgatgaagtcttaagttgtagctagaccttttccacgtgtcacttggcacaaaattcacagacgttctaactgctagagaagacagaaagatgctctcattggtacatagatgatttattttaaat

SEQ ID NO: 52914 - DNA, 859 bp, Bovine  19866881286995
  misc_feature (1)..(1): n is a, c, g, or t
ntattattaactttccaataaaagagtacttcatgagaaaatagatggggcattttgaagtgaaagctatatgcagtttattaaaaagtaacttgagaataattacatatagtaaactaaaagttataagtggcacactcttacatcgccttctgtctttagtattatccggtgaatccttggccagctgggaatgctgaggggcatggcttctggtttggtgtactttagaatttcttccttccttctctgagcagaacttgttaatttcccttgtgggtttcatcctgcctcttcccaggggctgggatgattgctttttgtattacaatgtttgttgtaatttctgagatttttcctctctatagctagaaccagtaagatactttaagcagcaaagtctttaccaggatttctaaggatttctaagactagagcctgcagaaagccagcctgcctgctgtaggttattcaatggccaggaatggcctcttctactgctttcttgagccagtcagtgttcttgttcttttggcctcatatattcactctgtgttctgcccacttgactccatgatgttcttaaagctgtggcagtgaggaggctcttaagatccatgacactttttttttttttcccccttttggtatgtaagaggaactttccaattagatcattactaaatattgattctccactaagtagaaacataaataccactttatttcctgtgtaacaccattaaatgccctccctggtaatagtagtccaaattttatgatgtttattatttattacccagtggtcatttggctgctgaagctcccaggatagcacagagtcggggggggggggggg

SEQ ID NO: 52915 - DNA, 955 bp, Bovine  19866881316208
  misc_feature (1)..(1): n is a, c, g, or t
nattttcctgatgattctcactaattccctcaatgtgtatctggcacagagagaactcagtaaatctttcctagaaagaagagggagaaacagagagggcagggaggaccatattttaagttttagctgaatgtatttgataaaaaattcaataagtaagagatgttaatatttttcattcactttacactaactccctccaagtaacctattgactagtgagttaaaatatttattaagaataatttcagaagtccataattacaaagggcataaactggggtggctgcttagaatggatttctatctattcttccctcagcaaactctgaacaaggaaggagtcaacatgattagactcctcagtggatgtcatgccctcatctaagcatttgacttcatgattaggaaatggaccatggttattgagtagccatggcagtccagctgaaggatgatcaatgaacttcaactcagatgcatagtttgagtgacaagaagataattctcattcaagctaatggggaacttgaattagactcatggtgttaaaaaatcagaaaatggtatctttctaaatgaggaaaaagaatctccttggtgagtccatccttttagcctgaattcttttgatagtccatgatatagaagtttgcattttcaaatgatcttttccagtttagagtcttatcactgttctctgtcggtataacttagtgaattttctcagaaagaggctagaaattgccttctttcctccaggagagagtgggcattataaaggttttctgccacaagcatggaaccttagataagtaatctcatccttcatccatgataaataagctattaaaaatcaaggagaaaaaaaaaaaggtagcagttggaatgtctgaaatgcatagacagtgttgtgaaaacctcatttttatgagtcttctccattgttcagcca

SEQ ID NO: 52916 - DNA, 902 bp, Bovine  19866881532900
  misc_feature (1)..(1): n is a, c, g, or t
naaagactgttacacttctcccttaaaaactattgtggggtagatgaagtctgcatttggaaaacgtacagaatggtagcagtctcttgaaaaataagccaaggttgccatgtgcttgtgctgataataagtagcatggcgcaactgcctcttctacaaaaccctaggatttatgtccagtccgcctgcatcagagactagagaattaactcatgaaacccatccatcaacacgtagaaaaaggaatcacagtatcaaaatgaaattagcataaaattagttagctgtaggacataaatagaggtgctgacattttctggcatcttctgtattaagtgtctttggagaactcaccaagcttggactgtggttgatagcctctgtgatttatttcaacaatttctaccataggcagattgtttgcaaagtcattcaggtatcattaagacaaatcaggaaacatggataattctacaagagaagaatatgatcatgggaagaagacactgctcatatcaaatatccacaacatgtctttgcagcctctagaacagtgcatcactgtgtttattaaaccattgctacagagagtgcagcaatctgacatggagccctaatgaatttttggcaaatttggaaattgtggctcttgttgcccagggagcctcttaaatcaacctcccttttactgcagttgccttttcacagtgtatatcgcattgagaaatggattacgcaatccacagctttaatccccctgcattagttgattgcataccatgagtgcatactgcacagtatatgaatcacagggaatctaggatataggtgaaaaaggttatttaaacacgaaacaaaatgggtgatgcctgggacctgagaaattctggttttttggtggt

SEQ ID NO: 52917 - DNA, 756 bp, Bovine  19866880439428
  misc_feature (1)..(1): n is a, c, g, or t
ntcttcctgacccagagttggaacccaagtctcctgcattttcaggcagattctttaccatctgagccaccagggaaacccaaggtctgctcagagatgattcagatccaacagaagtttggccagaaaataggagcaggtgaagagggactcagtatttagacagctttgtgcataatctacaggtgatgaaaggtgcctggcgagagcttcctcctcatttaaatatgtgatttggactctccctggatccctcagttgtttgtttttcctgcttcttgctacatcttaaatttgagcattattttaagcaaagttgttgtaccttaatttactttaccaaacacacacagagtcgtcttgagagctgacatgatagatggtaactgcacgggctagggccccaaaggcggtaatttgtgttttgaaattccttaattatatatgtacacagtgactctaatagcccccacagaggcactgggtccagccgtagtccctaaacactgtctcagaaataggaataaaaacttgtaaacgaagagttttaaaccagggctggggataaatcagatataaaaaatctgcaatgtgatatacaagacatcctaatcaccacgtctgtaattacaaagaagagtaaatcacttttttaaaaactgtgttcttgatgcaataaagaagaataattaactcttaactcaaagctgctgtcctgatcccggatgactgtgctaacccttgggaaaggtaagg

SEQ ID NO: 52918 - DNA, 1539 bp, Bovine  19866880485468
  misc_feature (1)..(1): n is a, c, g, or t
ntgagtgatggggagtattatcatggaggtccatagatggaatattttagccaaaaattaagctttcaagtttctcatgtttctttatttccccacgtaaggtcaagaggcaagtttcatcagttgaaatctatcaaatctagtcccttttcctattcaatagcccttctctgcaccccattgtttcttttgatgcaattaatcccactcaccttcctggtgtgtcctgagctctccagctatactcatcagaagctctccccaggaacagcccaccagcagtgaagtaaattttcaagttgagttctgtttcccgcagtgcctatcactcttgtgaggggatttctttcccttttgattaatgatgccattttgcttggaagagctgacctactgattcaggatgaggaattcaggagctcacattgtagtgaatggttttcaccttttgggtgctctttatttactcttcagagtcctgttgatgtttgagaatacaaaatgctccccgttcgcccatttctcatctttctgagctattgtttcactttggaagcatttgtgaagccattcaagccacagtgatgctgattttataaataaattgggatcaaaatatgaaggagtatgtccctgttagggaaaggggaaaagggccatatatttttagatccactctaatcaaccacaactacctggttaattcaggtagaaatggggtctctttccaactaaatgatccaggtaatttaggctgtgaactttggtgtgctctgatagacactgattataaatgacttatacattactaaatgaccaattaataaatgactcatccagtgataactaaatactttgaaaaaaattattcccaccagaagtcttgatttcttactatttatgatgatgaacataaactcatcatgaaagcactcgaagtatattgctacatggaagatgcaagttgcagaataatgtacataatatgctaccatttatgataaaagtaggaggaaaataatatatgtttgcattggattgtaaatgctttaaaatctctgcaaagaaaaggaaacaaaaacagggacttccctggtggtctagcagttaggaccctccgctcccaatgtagggggcccgggtctggtccctggtcaggggaactagatcctgcatgccaaccaagagttctcgtgctgcaactaaagaccccacatgttgcaaccaagacctggtgcagccaagtgaagcaattaattaattaaaagaaacaaaaataaatgcaaatctaataatgcttatcctctattgggagcgatgaggaactggcatcttttaggaatttttttttttaacatttgaagtatatgaatgaataatttggcaaaaaacaataattttttaaatgtaaagaccttcatgcaaagtaattggtgacgagtgactaaacgaaggagggtcatctttaggtactctggcacttgttctttgcccaaaggggaacaatgaggcagaaacaagggctaatgcatttgcctt

SEQ ID NO: 52919 - DNA, 760 bp, Bovine  19866880594921
  misc_feature (1)..(1): n is a, c, g, or t
nggtatcttttttacattccgagtatctcactgtttgggcagaatggttctcttactggaattgttcacaaagcaacctattatatggtgagaggtaccctccgggcaccattgaaattaatatgaaaggaacaatcaagaatgccaagtgcagtgcataaaacgcaggtaggtggtggaagacagataagcagcctaggaggtttaagttgcggaatctgaagctgcagagagatgtgttatacaatttacattacaaccagtcacgattttagaatgggcaatgaaaagctcatatagttaagtccataaaaaaaaaaaacaacacacaaaaagcttcataacacaagggaactaaatgatgggtaaatagacaaagaagataatcaagagagcagggggagaaagccggactcgctttcacaaaattcctctggttttggcaacttagcccccacatcacaggtagcactgtctctacagtgggattattttaaaaggggctttctccaccttggaactggtgacatttggggccagataattctctgttgtgtgggctgtgctatgcatcgtgggatgttagcagtgtccctggcctttgtccattaggtgttgatagcacctgcttcctccgttatgacaaccaaaaacgtctccagacattggcaaaggcccccaggaggggactgcccccatttgagaaccgctatcttagagaaaacaacagtatgaactactccgtgaacttcagattcca

SEQ ID NO: 52920 - DNA, 2671 bp, Bovine  19866880643454
  misc_feature (1)..(1): n is a, c, g, or t
ntacagccacttatttgaaggcacataataccatctggaagggtttttccaggcagtagtaattgatcactctggaattcaactattaaaaaaaaataaagacatggctttaatgtttagctcttgtctctcacgcttgacaagaatcctcttcatcctgtctgtgatgtgcttctcttttgtgtttcagtctgaaagaataagtcactttgggtgaaaggtgtctagacgtccagaaacttccattcatgcagacttcaaactatcacttgggaaagttgccaacattatttgctgtgtgtgcccttatttcagagtcacgggaggtctgaaggagcttccagtgtcacatccacataaccgccgcttagtgagcagagcttccttgctgtgagccacgtgctggattcttcttatgagttctagtgtgttcccctcgttagcctccctgaatggaaggtatcctccccatttaaggaagagaaggttaagattggggcttccctggtggctcaaattgtaaagaatctgcctgtaatgcaggagacccaggttcggtccctgggtcaggaagattcccctggagaagggaatggctatggggtctcaaagagtcagacatgactgagcaactgagcgtgcacacacaaacacacacaggctgaaatttagagaggccaaataactcactaaaagctccccaggtagtgagtgaccgaagtggaccccgtctggcagagtcgcaaactctgtgtgctgcctgcttcttcagcatccacccctgagtgcctgggggccaggagccccgcatgaccagggacacgtctgtcatcaacaaagtcaggtctgggtctacttatcctgatgcagcaagggaggacgttcatgcctccgaagttcggggaacctctcaacagggaaagatgagcttatgctgggggactgtaaagatggattacaaaaggggagccagcttcaggcgttcactgtcaagatacggggcagtcagcagctagtaccccgcccatctttgttcagcggggaaggactaaagtggggtggggactgtcagtagcaagagagcagcaatcccccagaatcacccagcagaagtcttgggggctgaaatacagccatggatagaaacctcattatgcagcgttgtcatgaccagttggaaacgctgcttgtatttcaatggaaacttcacagtcttcccatcacagggctgagtttcactttcttaagtaaaaacggtatgacttaccccacagtaggtattgggaatgtagcagggaacatgacatgttctcctcctctcaaaaggttagcaaagagagggccagggaagggggacacattaccgaaggtgatttgtccccactttgtaaccaggctgtagtcctaattgttaaaatctgctgcaccccttccacccatcagaaatgtttgtgatggtgaaatttaaaaggcagccccacgaccactgccctggttatcaactgaaatggtctctcaacagaactaatggagcagtccagctctatacacctcccattcttccttactgtccccaggatgagcttgctaatatccaaactgttgttcaattgctaagtcatgtccaactctttgtgactcccaccgcccctggatccttgcaagaaggctgtctccccatcccatgggctcagagcaccagccacactcagtggctcagaagcgtggcgtcatttgtttcgtgtctgtgtctcatgcaggacaccttcacatgccccatgacgacagaggtggtctgtcgtgtccaccccagtcccctgatgcccagcatggtggggacactgcctgacactcagtcgatgcctgatgtagatgaatgtcttcttaactgcgtgctcacctccccactcagatgcctgcccgtaagcattccatgtattttcatctctatgtccagaaattagcccagaagtgggtcatgtagtaggtacctcttatttcctataaaatgagtgattgaacattttccccctttgatcgccccaataagtcattttagaaccatgaaaagggagtaaaataatcctatgttcttttacttgacttgaatagaaatttttagtctctccaaaatgtcatcgtttcaagtctcagcaggcatacaaaacttttggaagctcactgctttgagttttcatcacagttcaaatcaccgtgctccatgtaaaatggaatttgtatttcttgatcagtatggggccttaggctctcaaaagaaaaacatggcatctctcactgaagacgctttaactctacatctgagcggaactactcctctcctctctgaaggaagtctttgaaaagaagtcattgaaattactgacctagcaaataaacagagctaccctagacttaaccttcattactgggcgcataaaacctgcataccctattttctgggaagacgcacaggatgtaaatgcccttccagctgtgagccctctggagagcaggccttcagctgttaatctctgcccactgtctccagcatcaaaacgcagcctccgagacatcttgaacaagtaaattactggggagcttgagtatgttctttaacaactacttgctctaaagaggcgacagttttaaacgggtgcatttccaaggacct

SEQ ID NO: 52921 - DNA, 2063 bp, Bovine  19866880815038
  misc_feature (1)..(1): n is a, c, g, or t
ngcaggctcgtgctagtacacacacgagtcctgccgcccgggtcagactcgggccccagaggggcctggaacagagctgcagaagctgcatgcttggtgaggcaggagggggaccatgactccaggcttctgctgccctccccggctcgaacaacagcagcattttctaccctgcgttcagggccctgggcctctgagtgaaaacagggacagggccatgaggggttgggagaggcgtttcccgggttaggttaggtggttctgaagaccctgccccccctccacacacacacacaatgatctttcctttttaaaaagtatttatttatttatttggctgcacctgatcttagctgtggcttgcaggatctagttccctgaccaaggattgaacttgcgctccctgcatcgggggctcggagtcttagccactggaccaccagggagtgcccacatgatctttctctcgtgttcctgctgaacctagaatgctgcttccctgcacacacagccggactgtggccagagcagcaagtattaagtccacactccagtcagagcagggctccccggttcctgaagccctcacagtcttggggtgcgggggactgcacccctgtggcaggcctgacatcacacctgacctccacagacaggtgactttgacctcacgacccgcccggctcccagagactccagcctctaatggaggccttgagtctgggctttgccattggtaattccgccccatcctccccttgctgaggccggggaggatggtggtccagcctgggcccaggtgacagagtcaaacccacactgcgctcccctgagacacgtcaggccttggaaaagccgtttgggggctttgtttatgaacttgagatgatcccgtgacatgactcaggggacagaggtggacgccttactccttgcgttacgggcctttccagcaggacgggcaaagataaaggccagtccaggccataaagtccatttatgtgagagagatgacaacccttaaagtcaaaggcgagtactcgactcagatcaacctgcagcttaacaggctgaagctctcagccccaaggaccctgggacacagaccggaaagacacagccctctgggatactccttcaggatgccccctcgtcctgacgcttccacggcctcgtcccatcccccaagcccggcctccccgctccttgatcaggaagccagaattccagatctcaggtgcatccttgctgccaatatgaggttctcggtgatctgaaatatccccgcaaatatttcctatttttaataacatggtatcaatttgcaaacagagtaatgatctctgttacttttcaggaaattatgtttaatatactttactagagcaaaggaagaacaatttaattgaaagagctgctatgaaccatatttaacctcagatgtactaaatggagtgtcttggagataagttatggtttttaatttaacgtaaactattctgtgcagaagcacggtgtttttgccactctaataacgactggtttgggtttatgaactattttttcgatcgtctttttcctctcatgaacaccgcttgtgaatgtttaagtccaatccggaggctttcccacataaaatcggaagcgaaaggcgctacaggctgggcgggctccgccgtctgcggggacagctgggcctcaaatgggacatgtctcacactggagaggacccccgggttttgaggagcgcccgtatttcatcaccccagccgatcctgcgcctggctggctccttcgtcactctgatggatggattccagcccccaaatgaagtttcatgctcaccaagattaattgctgaaggaaaaatattgaaactttattattcatataattcatttgaggggatgatcccgagaaaatgtacatgcagtggaagttcatcatttgacagtaatcagagggaggggagacggaagggatcttgaggcaacacctcagcgcctgatcccccaccttacaggagccacgggcaatggcccccgggtgtgaggaaaaagctg

SEQ ID NO: 52922 - DNA, 2711 bp, Bovine  19866880948184
  misc_feature (1)..(1): n is a, c, g, or t
ngggctctctggggtggggctctccgggggcggggctctccaggggcggggctctccagggggcggggctctccaggggcggggcagatgcgcagctcactggatccagcgccaggtgcagccagtctgcacatggccctccgccaccaccatcttgaattgagggtcgtgtgcagccttgagggctgaagtgtcagtgcagcccgtttctcaccaggagctctggtctgaagcgcagattctgaggcctccgcacgtgacctgctgtgagcaagtgatagcagactgagcacaaggaggaaaaaaaaagttagactttattttattacccagattctagttttattttctaggaattgttaatgggctttgctggtgacataaccacataggagcagtgggaagatagaatgagatattctttgtccaagtgcctagaacatgccgatgctctgtggatgttagcttgttctgtgcctttcctagtcagagggtttccgtatttctccttccactggaggagttaagcaattaatgtaaggctacactagtacatttatagaactgttgctgccgtgagtcactgtgaagaatcgtttatgctattaacctgtgtaaattttagactttttaaaaatagtaagttatataggtcaccacattatacctgtaactaatcgcaacattagctatcaagttctcactgttggttaatttatctttaaagactcaagaatgcaattcacgtaattactacctacgccgtatttcatttatggtctctgtgagtcacggatcttctttctataactgaagacatttgatgcagttaattcaagaggtctgccacatgtgttgtataaccacgcttaactcaaattgtagaagcgtgtgttgtgtttgatgcttgtgccctggaattctcacacaagatatgacaccccctagttacactggttggaggcgagaaatagagaaggactgtgttcttctttcgtcatctgaatgaagctttcattaatttttttcttgaaaaatctttgcaatgcatttccctattttttgagcttctgaattacgtaaacaccccttgcttctgtttgatttcgattgtttgcttggcctagtttccctgtaagtatttggtaaaatcggataattgtgtgtgtgtgtgttgcacagtgtctatgctaatctactcacccttgggttttgaagtgttgctataatctactgtctatcttttgctgaatttttaaggggatattttattgcctgtcattacctttcatagtaacttccgggcactgcattccagcagcctctcaggtacccagtgctactcacccggccctctgtgcttagagagaatctcatgccttccccgcaagccacatcttacacctccagcagctctgccttttggcacactttaaatgtttttattctagatgagttgttaaagcttcaacatgagagataatgccttttaagatgaggataaactccccgatgcctgtgatgatataatttgcacagtatgttcccagcctctgcctagacgcagcaccgcgacgatggcccatcctgtatgggtggctgttgtgggccttgagaaaattctccagtggggtgaccatgatactgagagaccagatctgcctcgtctctcagaggggtgacaaggtcaatttgcaaggcacatactgaaatctttccatacagatgtcttgatttgtttcctcatggtggaatatgtctttgtattgtacttgaacagaacctaatgcatgagcatggtcaccagattcaggtagcccacctgcctcgattctgtgctgccctgatgggctttgctgccctaaaggtacaggcaggcacctgacatccagataagttccacaaacattccttgaccacctactgtgcaccaaccaccacagaactgtggtatggaaataagaaaagaccccctataagcagctggcatcctaatcctattagcttgaaatccggcatttctgtcttcattcattcattcattcaggaaacgtgtcttgcgtccttgctgtgggccaaggccctcggctaggtgttacggatgcagtggtgagcgaggcacactagacatggtccccacccttatagagttgaaatctagccctatttctaggttaggaaaagatccagcagaaactagcttaacttacaggattaaccatgcaagcagcatgcagttttaaaaaagtaaccttcaaggaaaaatcaaaatgactccttcctatctctaatagcctgatgaccatgaaactgttgctgctgcttcagtgtctcaaggtaaatacaaacctctctccctcagtctctcattgacagattatacctgaatttctcttcatatctcatcaagtggaaagagtgttgaactactatttagctgctatatcctaggagggtgcagtctgtggtttaattttgtgaccagaaaatattgctcactgcacaaatggataggaaactaaccactttcccagtttttttttttttttttttaagatagattgagggagaaagcagcagagagactttttagactgcatggaacttggttattttaaactactgttaggtttaccctccagattaatttggtgtgtaatagggcttttggccaaagttggcatttgtttataaataatgctctttaaagg

SEQ ID NO: 52923 - DNA, 1617 bp, Bovine  19866880988434
  misc_feature (1)..(1): n is a, c, g, or t
ncagagacttgattgggagcttgtaggcagaagcctcagagtgctacttcccaaagcctgaaaagaaaaacaagcttgtttctttagtgatatcaaatgagacaaaggaaggaagaaaccgcccgaggtcacaggcaaccgtcagagtggaagacttccatccaagcgcgatggaataatcaagatttattttttaaatattgttattaaataaacattacagaaacttttgcatatccaacttatttatagcttaaggcatgaaaacccacattagtgtgttgaattataagaattcactgcagcctgctagctgacagcacgtcaaattatttgcaaatattttctggaacagtaaccttgaaggatgccagccccattcagtgtaaccttatcacaagacaggaaccgagcgaggagatgagttccaaagcaaaggatgctttagttcctggaacctctgtcagctgtttgaacaaggagtttatcccccatctcagccaaaagcctcgcttgtatctctcgggcatttacatctctctctccgctgcactttaaaaagatggtatgcagaaggcccccttgagaaattgtgctctgggcaggaatttgtgagtacattagtcacatttaagaggctttatatcctccagtctgcaataacgtagttctgcgaaaattatgtaatcattttaacaaagagtctctaattgacatgaaaaagcaaaatcaaaataaaaatgaattttaatgtgagcagtacaggctcttcgtttttactcaccatcatggaacacggtctaggagagcaagaaaccaggacttcattcctggcttctggccttaggaaaaccactgtggtagattcctccaggggggtggtttttctttaatatccaatatctctaccttacaaatgcctcagatatgttgctttttttttctaattttcaacattattttcagtactttaaatatctttctttccaccaaggaaaatattcttttgatgaaaagctattatggcccatttaaaaaattgtgaagtggttgggtggtttaaaaattatatctagatcatttagcaaggttggcacaacatctgacttctgaaatcaacattttgccaaatattttagccatatcacagttgctaagctaacgagaaaatgctaatcatttggcataaacgtggccatgttaaaattaagcaaaattgattgccttcaaaacaaccttttgtttttgtctccaaaaagctgctttgcacatttgatataggtaagaactcattgcttatcctgacactaccatctttcatgtcttgaacaggctctgtgtttttctttgttgtctcatcaacgagtccatcttgcaccctattcagtgaattcaacagttgtttaagcacctactatttgctcagtgctgtgctgttcaggctggtaatagtcctctgcaggctccaagcactaccattgtgatagatcaggtgccaccagagaaaagaaaatagtgtgtctagcacatcatagcaagattataacatttccaaatgacctcgcaaaattgcttcatttagcctatcaattctcctaggtctcaacaacatattat

SEQ ID NO: 52924 - DNA, 1173 bp, Bovine  19866881006413
  misc_feature (1)..(1): n is a, c, g, or t
ntgccgcagggtgcagccaaaatttaaaaatactacattataaatcaacattaaaaatgaaaaaaagacaactgtaactaactgttaaagctgtagcctctgtgatacctgcgtatcgcatataggctttaccctctgaaacttcattctatctgattctctcctttcctttattcattcaatacctgtttttgtgctactgaggcatggtgaaaaactcaaggttgaatcccattgagagcctgctttcaaataacttagtgttacctacccaaggggatcagaagatggcacagaggtcaggagtcacgatttgctcaaagtggtgagctgttaggaagtcaccagaaaacagcgactctttgaaggagggcaggtttgcttccgctgtggtgatccaacatggctcccaagaggagcctgcacctgaggagtcctcgaaggagccctgggctgagatctgcagaggctgagggtgggcattccaatctgagccaaggaagcttggagcaccattgtctttcactttctccagccaggtcagctcctgagggaactgggagatgcctcagcgatgctggtggggtgtgctccaggcacaattcccccaccacagctaggttaaaaaaaaaaaagttgaaagctgacacagatagacaaaaataaaacaaaaaatgacctggatttgaggagctttaaaaagaaagatctctaaaacaaacaaaaaaaggaggtgccgtgtagtatcggtgcctcatttggctgggttctaaacccgtgcccgggtgcccctgagccctggcttcgagttgctggaatgctccttacgtctgagagagtctcagaaacaacaacaatagattctcagagagccctgccctggaagcctctggagagggagcgtgtgtgactgttttcaaaacaaaagatgattcctgagcatcagagagctgcgaatgctgtgacaaactcacacctcgggttccgtatgaacaaatctcaacctgtgactagaatgttctcacagttatttaagttccccgagtgtgtcgcattttcctcctcaccatatcattatcgttgaaatgttaagaaaaagaaagctgagtaacgccgtcttctgagtaagtgtcagagagccaaaaatgtaacagtccatcgcaggcatttcca

SEQ ID NO: 52925 - DNA, 995 bp, Bovine  19866881215665
  misc_feature (1)..(1): n is a, c, g, or t
ntggtgggaacaggcctgggctgctggatgagctagggatttgctctggacatctccaagttctgagctgtctttcttcatcttggtcaacatggggatgagtgaacttgactagcagctgcctggttggatctggaaggtctccgacggtgggattacaagggctgaagcctgagctaaggtggaggaaacctgagggcctgtcccccacttggataggacctgtttcataaggttcaagctttgctccaggtcaaagtgatgcctgtccctggctctgtgtgcaaaagcccattgccagcctgggttttgtaaatcggtgagagcagtgtggtagggtttgggggttccgggggtctccctcatcttgtcctggggggcctttgctacatctgattcttctcagaggccacctaagtaagtcaacagtcccggtggactcccggatattttctgagcctcaccttgataaagaataaaaatgttttagtgcttgatttgatttgtttgctggaagattagcacaaaagcaggaaggaaaaagaatgtgtggtggaggtgattgctggagactggcagagggttatttacggatttttgctgacagtccttgtttaaaggaattccctgcgagatttatgaagcctttccaatttattgtctttccaagtaaggtaagcaaataaataggttattctcttttattatgaacctcgccaaagtaagattaaaaataagaggaaacagggctccatttttttttttttttccagcccagtgtgtttctggaatttggaaagcatcttgggaaggctttttgttttgtttttggctcgagctcattgtgcatttaaaagataaagtctgacccttgatattgtgtgtgctgttccccatccttgagagctggctgagctcctgcaggggaccgtgggtggggggggtgcttggcagttgagcccaccacagtcagcaaggcctcacaggcccctgaa

SEQ ID NO: 52926 - DNA, 1152 bp, Bovine  19866881217091
  misc_feature (1)..(1): n is a, c, g, or t
natgtttaagaacaggcaaaataaatgtgcaagagaagaggtcaaaatagagattgctgtgagtgtgtgttgtttgtacagtgtgactggtaaagaagaatgtgggagtattccgcggtgtcataaccatttctatttcttgatcaggggttgatgattacttggggtgcagaaatacataaaacactagactagaaatcagggtggaaatttttctccacagagggttggttgttaagtatttgccagcacaccactagatcccatttcttttccatctttattgtaacgttacatatatatatagtaagagaggatgcaaatcttaagttttctctcagtggactttttttatgtattttttgagactcaggaattgcagatacctgtaagaatcatgtgcatctgcttttagaattggtgagtgttaaaggcagaagacagggaatattttaggtaactataatgcatgataatgaaaatttgttcttgttgggtttatttgcaaaaagcacctgcatggttaaaatgttaaagttttttaaattcactttatatatgtcttaacataagcatcttataacacactcagtctctgttagtttatttaaaaaatccttctccttcttataattgccttgcttaatataccgtatattttaattatccaacttagagggtttgggaagacctaaaaaattgtcatgcatcagaacattaacaacctatttagcagtattttttaaaaccaaaggcctagaggacaaatttatcaagtgtatattacacatatgatttctttaagtgtttgtttctgcttcatttcaaacatcctcattgtctaagctgatggatttttattttaattagttttaaattccaggagagtgatcttaatgttttaagatgttggcagttgaccaatgataaaccatgagcccagttctgtcagtgtgaagctgacagccacacaatggtctctggggacctagcctcagtctccgatgtgtaccagatcgaggccaataaaaaaaagttcttgctttggcaagaaatgggaagagcctggcactttcttcaaaagggctttttttaaaaaaggaggcaagtaaaaagaaaaaaaaaaaacccaaaaaacacttgccgggatgt

SEQ ID NO: 52927 - DNA, 851 bp, Bovine  19866881352435
  misc_feature (1)..(1): n is a, c, g, or t
naacgatggccttttctttctcttccttgctgtgctgttatttgtcagtcggtggaagctggaaggtgctgctgtttagcatgtaaataaaccaacactttttccactaaatagctctgcatggcattgtgtgccaggaactctcatccacacaatgatgaattcagttcctgggttgtgctttcctttcctgtcctttcgcagaggggaaggtgatcacactgtaattatagaagtcctttttactttatttttttctgattgtgcccctagttttttgcaggctcctagtagatagcacttccctttgctaagataaaattcctaaggcagttttttggaattaatttacttcctgtcatccagtgttttatagatgatgtaaatgaaggatgtggcttacagatctatttaaagagacgtgcttatccttcatggttctaaccagatgagtgggcacatgcttttgcatttttatttaaaccccactgaagttggtcattatattttgaatgccacagcacgtctatacctttatttaaaggatcttgttcattcatccatataatgattggcattggctataacttgatgcaatgttacactattttaattctttctcaggcagtgttatctttgatcacttcctattcactgggaaaaacccccatacaattgcaatcccacattatgtttcagtgatgatgccaagtactccctggaatatagctattcaagacactttctccaccctcaggctgctcattaaagggatggcagtttctaactttaatgaataaggtagagcgcaaattccactcttctttcaaagagactctcggttttcaaaa

SEQ ID NO: 52928 - DNA, 3023 bp, Bovine  19866880359195
  misc_feature (1)..(1): n is a, c, g, or t
ngtcatgctggaggaaaggaaagggaaaaggagaaagggtttcatgcttaattaaagtataaaatcatccatcatcttgggcagaagcagtttacctgaatgtcagctactcttcctcctcggtttggttcaaggtctccaacattcgtacagcaccaggtatcaggtgggatcttcttcagttgtgagatgtgtatccaaggttcaagtccctggagcttgactgtcatctgggtagttgggacgacctggtacagtctcttccaaggaggttaaaggggagtctttgctcctagtggtgtcaaatctcctgatggaagacaactgggactcagtttggtgagtcacagccaaactaagtgctttccagcctcagctcaatcaatgctcatgacaatcatataaaataaggcctgcaatatgctacatcttgcaaatggtgaaagactaaaacagtgtaggggagcaaaatttgccatcccaaaatgtgtcacttggacatgaggattcatttaggccaaatctttttaagaacctgaagacctgaagtttttcttgttactcctcctcaactgctgcaaagaatgtagataaaggacctgttccaataatagagccgggacctacgatatctacagaacatgggccgaggtgtgctgggtgaaacctggagaggtcagagtccactctgcatccagaaagctcttatttgccaagcatttgtttatctggcttcttcctcattgaaatcccaaccattgccctcaacatcctcttctgtcttagctcaaggtggtatttaaggtgagggcttcgaccattttggtgagttagttcttctgggtctctcccatgtatatatgttactaaacttttgttagattttctcctgttaatctgtcttctttcaatttaattcttagactggccagaagaacctagaggggtagaggaaaatttcttccttcctcaacgtcatcaaagttcacacatgctaaaacctgagtcagaattcccctccttttcaaggctgaatgccattgtattgtatgtatagaccacattttgcttatctagttgtcacgcgagtgtatgttccttggttctttgtctcatcacaacaaaaatttggagcaacggacattaaagccctcggcgtgtcacagctctcgggtcttggacaaaccgtgctacagctcttaggcaaatcagtgttacagctctattttatttagaagatagcaggagagagagtgagagagagagagagaaagaaaagagcacacgcacgtgggagagagagtccgagagaaagagctttggctcctccttttatatgtttttttcctccacctgggcctgccctatgcaaattgggcttagccaggagtgctgtttgttctatttgttcttcctgaagtcttcactctggtctttggaccttcctgatatacattttggaaataataaatacactgattatattcacaaagtataaactgctcaaccagctaaaaagcttctttttaaatacattcattacatttaatacattcaaaccacttatcctgacatagctggcattttatcagatataaaaataataatgtttactatatatttccaactagaatatggggtattgtgttttcacttagttcatattatttttaggcaattatttctctttgactgaagtaaacaggcaattcattgtgcttgtgattttaatcacattgattctgctccccaaatcacaaatgttgagataccacacaatatttccatacaacatttgtaactccccatttggaagtcaaattttttttttataatcatcccaggtgcctcagtggtaaagaatcttcccaccaatgcagtaggcacagaagacatgggttcgatccctgggtcaggaatatctcctggagaaggaaatggcaacccactccagtgttctagtggaaaatcccatggacagaggagcctacagcccatggagtcacaagagtcagaaattgagtgactgagcatgcaatgtttatattgcagattcagagaatcccttgagttctaggtaaataagcgaaaaatagctagaattggaaaaaactcagaacatgttggacaaatccttcttttcataggtaaagaaaccaatgcccacaaaacaacctgagatcatggagaagctcaaggtcactgtctttaccacacagaagattcagatttttacttactacatcccactactcagccctgtcctccaattataaccaaactactagaagcagcaaaatggatttgattctaaaggcattattatggtcttttacaaagttgtattgagatctgcagaaagctgtctttgattccactaaggatatagcattattagcagacaacaaccaacaaaatggtaataccccaccatctcatctgaagtttgtgatggaatcattatgttatcctgattaaagaaattgctctcctttggtcaatctgccccggctattatctgagaacatctaatcaaaaagtgctggatggcatgttctaacaagaaaagaggcaattgtaagttattagaaaatgttggttgaccctttatttacagtaggaagaaaactgcaataagatattcttgaatcctgacatatttctcggaagactcacaattttaatcttttagtcaattagaatatttgtataatctatcttcattttactttatacacagtgacaattagagaacaaccttttcataagagtaaagaaaaaagttatgcatccacctaatgaatcatatgtgtacaggtaccaaaccctggaattctgtgggacatttcacttgtttttcaattgctatttttcaactgaattttctgattaattgccttaatctccaaacatctttgttgataaaaattcaaccacagaaaggtcagtaatcaaagaattattaaaatgggaagaatgtccatatctcttgacttcaatttttaaaaagtaggtttcttttt

SEQ ID NO: 52929 - DNA, 1676 bp, Bovine  19866880385368
  misc_feature (1)..(1): n is a, c, g, or t
ntctatctctgaaatttattcatagcaagtgagcaagtgagatgtaatgatggggttttgtaaacagaaaaagttaatattctgattttacttttggatttggtttatattaggactctgaacgtcgcacaaatactccaaaagataagaatatttattgtcaccaactactcactgttgcttgatctaaagtcctcatatattctataagcatgttgaattcattgtttgactctgacactgttccttatgtactcaaaataagtatcaccagaaaatctctgcaactttatatggtgtctaaaactattcatgcattttaataaaattgagtcattcttaaaatatgaaattttagtataaattcatacatcaactgggaaggcacagtttcaatacagctgctgtacattttcttcacagcttatttgtaatgtcattagtcattgttaggtctattagtcagaagtttcaaatctataaggtggttgtcatatttagtaattatttttttaaatactgacatataattaagtgtcttgaaattcagctttattcagattttcccttcttttgcaaaatcaatttggataatctcaaaataacagtgcctctccacactctaagcattttagatgtgtcatcatattaattttttgccctttactacttccattaattaattttgccctttaacttttgctgatcaatgtggactaaattgtaattgcaacatttctatgaaataataccaaatcaagactgatagtggcatgctgtgaattagtgaggggttttaacatttttgagcttggtgtgatgatttaatactggacagacttaaaaccaactttaaaatattttttgatttgaattattttaaaattaaaaaatttttgaagtatagttgttcaaatttatgtgttacaggagtacagtatagtgagtcacagtttttaatggttatattcaatgtgtagttattataaagtattgtctatattccctatgtagtacaacatatccttgtagtttatttcatacataatagtttgtatcccttaatctcctccccatattgcctctcccccttctttctccccactgataaccccaagtttgttctctatatctgtgagtccgcttctttttaaactgagaaccaccatttgatttacatttaaattctaggtgtgatgaattttgaagattatattatggttaaaattcccttgcagtgtctgctaaacactggtggtttggagacatgtacctttatgtgatcactagcccactagagttaaaatgtatgatgagggaatgaaagaattaaatatctcatgaatgtttatattcatgctcacaaatggatcaaaatactgattttaatctagattacccaatatgactgattttttattaagtgaatatacaattattacttattttgcaccagataatgtaccaggaaatgagggtagagtgatgaataaaatttaatttctactccaaaagaacagtctggttgaggagatgaacacatagtcatatgtgtgcagtaaaattagtgccacattggaggtatgcgttgaatactatgcaagtgcaaaggaaagtcacttagatcttcaggtttaggaaggatatgacacccaaactccttcaaagagtttttt

SEQ ID NO: 52930 - DNA, 1915 bp, Bovine  19866880451980
  misc_feature (1)..(1): n is a, c, g, or t
nttctttaaagttccctgatggtttttgctgaggtgctccctgcagtcatagttaagaaccacagggctgttccggccacgacattggctctggtccaggaaatgtctggggctctccacaagtaacagggacccaggcaagtgtctcaggcattcctctccagcatcatcactatgagtaggctgagatggacacaacactttcccaaaaatgtttaaaactatatattgaaagagcagggacttgtgcgccagagaataacaactcagaataaccaacatcaatatgtacttgtaaaattaccagattttaaagagggaaaaaattcctttgagcattttggcaaaaagaccacattacttataaaggagagagaattagatcattattaggtgttgacagcaacaccttatcctagaagaaaacggatataaaatatatttaagatagtcaaggaaagaaaatgtgaacaaaaggttttatatacagcataactaacctttaagtataaaggcacagacaaatctatcaacatgcaggaactcagaaaatattgttcctatgacaccttcccaagaaatttagagaatgaactgataccagaatggaaagcatgaaatagatatgaaagatgatgaaaatactaactatcaaacccataggatagagcagcagctacagaaaaaattaacttttatagtaaataaagatttaaaattagtgtacttatggtgtagctactctggaaaacagtgtaaagtttcttcaaaatgttaaaaacagaactatgatccagcagttccacttctggctttttatcagcaggagtgaaagcactaacttgaaaatatacatgcaccccatgttctttgcaacactgaacatggaagcaacctaagtgtccatcagtgaatgaatggaaagaaaatgtgatacatacacacaatagaatattaatcatccataaaaaagaagctttgtcatttgtgacaccatgaatggaccttgaagattatcatgccaagtgaaataagttggacagagaaagataactattgagtacgatatgatcttacttgtacatgggatctaaaaagacaaaatggtaacaaaaacctaaacatgcagatacagagaaaagatttagtggtttccaaaggtaaggggttagggtaaagggtaaaaaggtgaaggtgatcaagaagtacaacttccagttataaatgtcaggtctagctgccatcttgcatccccacatgcatgcgcctaatctcagctggtctgcccaagaccacctgagcaccaaacctagtccccagcgcagccccatttccgctccagcaagatgaaagaaaccatcatgaaccaggagaaagttgcccacacaagtgtgcactggtgggaaaggaactgcttgcagaaagaagaaggtggttcatagaacaaccacggctgatgacaaaaaacttcagttctctttaaagaagttcgggttagacattatccctggtattgaagaggcgagtaggttcacaaatcaaggaacactgatccactttaacaacgctaacgttcaggcatctctggcagcaaacacttccaccgttacaggcaatgctgagacacagcagctgacagaaatgctacccagcatcttaaaccagcttggtgcggatagtatgactggtttgaggagactcgtcaagctctgcccaaacaatctgtgtacggaggagcaccacttgccagagaagaaaatgatgaaggtacagatctagtggataattttgacgaggcttccaagaatgcagcaaactgaattgagtcaacttctgaagaagataaagaagttactgggagctgctattttatattatgactgcttttaaaattttgtttatggatctgataaaa

SEQ ID NO: 52931 - DNA, 718 bp, Bovine  19866880464462
  misc_feature (1)..(1): n is a, c, g, or t
naatagcatcatttgaaaaccagagtcccttcactacccaacatatgtagtgttatatagaatgtggttttctccagaacagcaaaaagttttaaaaaaaacaaaacacttaaaatcaaaaaaccagtaatgttaaattatccctgagtgcacattatttagttcttcattaacttaattgttttctagtaaaagtgaaatgtgcaatatgcaaattaaataatattatgtgtcagagtttgaaagaaatattcatttaacattggaaaaggtttttttcttttccctaggaaatcttgttcatttattttgcaagaatttttgtttgtcgctatttgttcaaaacataatacaattgtgagacccagtgcctgctggcaaagttggaatagctgtcagcaggaaatggcaaactaataataagtgctggtaaaatatttatattatagtttactgggaagctgaatgtagttttgtatttcattagagcttgaggcaatacatagtaaaatagttgtgctccaaaataagtggatagaattctaaatactatagtaacttgtctttcaactatctgctgggaagaaaaagaattaataataataaagccttttacaagttgaaatttaagaaattttacacgaggtccataggggcagtaattagcagcatctcacattcagtgttattagacactaggctgctggatcaaccactt

SEQ ID NO: 52932 - DNA, 2114 bp, Bovine  19866880613328
  misc_feature (1)..(1): n is a, c, g, or t
ntcaaactcatgtctattgagttggtgatgccatccaaccatctcatcctctgttgccctcttctcctcctgccctcaatctttctcagcatcagggtcttttccaatgagtctgctctttgcatcaggtggccaaagtatccaggttccgcttcagcatcagtccttccaatgaatattcaggactgattgcttttaggatgggctggtttgatctccttgctatacaagggactctcaagagtcttctctagcagcatagttaaaaagcatcaattcttcggccttagccttctttatggtccaactctcacatctgtacatgactgctagaaaagccagagctttgattatatgaagctttgtcagcaaagtaacatctctgctttttaatactctgtctaggtttgtcatagcttttctttgaagaagcaactgtcttttaatttcaagagactagttctaaaaaataattttatggattgtgcttttatagctaatattccaaattaaaatcaattgtattactgcacaaatacttaataaaattggaaaaagttagaaatttccaatatttccttccatttggatcaccatttagatgatttcagattgctgtctagtcaatatcatggaacacactaaaaataactccctcctttaagtcaccatatttatatactccgtgtatatcaccttgcttgaaatatttttaaattcaaagaaataggattcccattactagatagtcttcatctctttttgtatcaaggattatctgggcacaggtgaagtcttagtaatggcagagagactgcatagcctaagacatttcagagtaactatgttagcattttcttggcatttcatactttagacagaggtaaagaattcatcttattctctgtgagcttataagctggcaatgtgtgtgggcatagtttgttcatgcactccgtgaagtgcgtgtttcaattcctaatagcaaagcagatgatgactgctggaatgtatggatccatgttttataactttaaaggaatccaactttgtttattatattttactttgaccagtactttctgcgcttttactatgtaatttcgccactgattgacttagtagatattttagccaggtagtatctagtctaataagacaactagacacataattaaccccagggagaacttaagctagtcacaccactttctttctttctttttttttaaattaattaattttggttgtgttgggtctttgttgctgcgcattggctttctctagttgtggtgagtgggagctaccctttgttgtggtatacgggcttctcagcgtgatatcttctcttgctgcagagcacaggccctggagcatgagctcagtcatcgtggcacatgggcttagttgctctgtaacttgtgggaccttcctcgaccagggaatgaactcatgtcccatgcattggctggtggattcttacacactgtacctccagggaagtcccatgccactttcttgaccttagcttccttaattacaaaatgaggaggtcgaacatcccatgtcccttattgctcaaaacaactgtaaatcaatagctctccagtcctcatttgccaggaccctctgtgggtaactctgtggtcatttgtgactctttagtatagattctgaattctccagttaggcatcttgtcagaaatttcaattaaaggaactgaggaatcctagttcttcatgtcctgcccatctccccctttgtctgatttttagaaatggcaaaaatattagactttccagtcaacatttaccaattcgttggcattcactcagccctctgctgtccatccagaaaaatcacagtgtgggaatggaacaactgaacacaaagctggggcagctgtatttgagtttatctaacatgttcccatatcctcgtggtaatgattatttattattattattagccagagccaaagtattctggctgcaagcagcctacatttccttcccgtttctgtggctctatgaatacatttcttcaagagatggcagtaaaatgtctcccatttctgtgggctaaaatatcatcacacgatttctcaaggaga

SEQ ID NO: 52933 - DNA, 1244 bp, Bovine  19866880648117
  misc_feature (1)..(1): n is a, c, g, or t
naactaaaaatgtgctgtttgtttcattcttggatatctcctatttcttgtttgtttctctctagacaacaggctatgagctccttgagggagctctggcttctagaactcactgttatattcagtaagcactcaattcttgttgaataaatgaaaaagcaggtatcaaagtatcaataattctagcaggtatggcacataattttgaaggaagaactgaaaatagtatatgaagtgtcctaagagcttattggcctagcacttatgatagggctaaatgaagatatgctattcttggagaagagcatgaaagagggaggatgaaaatcataaaagcaaattctaaatgcctcacagcttcacctttggctaaacatggggctgagactagatttaagggaaaaaatagcaactattgaaattttggaaaaatatgaattattagtagcctagatttctataaattattgtagttatatatatatatatatatatatgatatatctgccatgttcattacctgccaatttcttaaagagataataaaaaccttcattttccactttgacaccatcaaaatgtagcatagattcatgaaggcttatagatgatgctttccaataatatacacatagtaggtaaccctgaatcttataaggaagacttttttttcaggtaaaaatatgattaaactagattcagcctagagcaaaattccatttctgatttattgatatttttggttggttaaatcaccacaagggaattatgttagaaaagcaatatgtgtcatcctagtgaaacttaaccctgtatccaataaatgacaagcagcacttatattttgctttgctatgtaatgaagacctgggaacatataaattgtcctgaatatagatttcttttacctggggcattactgaggaacataaaggcttcaaatcactaaatataataaaatgtgaggttctactctaattagggatctgctattatttaaaatgcttttatgtcaaagaataactgcatataacaatataaataatgaacatctttcttttgaaatgttagaatagaggggtaaaaataatgaagacactgtcatccttcactgttcttcctacataataaagttgaatgaatcattatctgtgaattataaaatatacacagcatttttctacactcagtaataataaaaatctttaatgttaaattaatcaggatgtttttattttagataa

SEQ ID NO: 52934 - DNA, 1643 bp, Bovine  19866880656373
  misc_feature (1)..(1): n is a, c, g, or t
ncatattgaaaagcagagaagttactttgccaacaaaggtccatctagtcaaggttatggtttttccaatagtcatatacggatttgagagttggactacaaagaaagctgagggccaaagaaatgatgcttttgaactgcgggtgttggagaagactcttaagagtaccttggactgcaaggagattcaaccagtccaacctaaaggaaatcagtcctgaatattcattggaagaactgatgctgaagctgaaactcaaatactttgtccacctgatatgaagaactgactcatttgaaaaggccctgatgctgggaaagatcgaaggcaggaggattttgggatgacagaggatgagatggttggatggcatcactgactcaatggacatgagtttgagtaaactccgggagttggcaatagacagggaggcctggtgtgttgcagtccatggggttgcaaagagtcggacatgaccgagtgtctgaactgaactgaactgtactgatgcataatgtgtctggtcttattttttgtttgtttaggttgtcttcatttttcctttccagagactagcatagctgacttaatactatctttgtgtttgtacaacatatgttaaagaattagtctttatttttgaaaaaataaggccaaataagtatttttagaaaactgttattgttcatttcactttcctctgtgttttcacaagaaaaagtcatgttataattaaaggacacccttccttggcatgtttcatggtcccactaaacatagcactatattgttgaaggtgctgatgggtaacaaaggcaagtattccttaatgtcagatttaccttttcatctcctggatacctggggggataaactttactaaacgcaaatgtcagagctctattctgcatttcagcatgatagctcagcaatgtgcagttgtacacttcagcagaaatgtctgcctggccagattaatggtcagattaatagtatctgtttattttaaataaatctattttgaggcaatgtctccaggtgtttgcctagttaataacaaaaggctccctagagggcctagaataagcataaaagaaataaaggattttttcaaggtaattatctctagtcaataataattagtcaatgagtagagtggacaaatgaaaaatgatgttttaaactttttatcagagtagaaaaagttaagattagatgactttctacttgtttttcagtttataagtgttggggatgctgaacaatgtttagatatgatgttctgataaatgatgaaatgtttcattttaagcagtaattatagtagatagtaagaaggagctctggggatctttatttaactcttaggtgtgtctttgaatccaaatctaaaagtaccataccaaatttaccctctgtaatcttccgatcaactcagaaatgtcatttcagcttcttttgcaaatgttaccacttggttctgaaatgataaatcatctctttggttcttgttccattttccttttctgtagttttgacaacattgaacatcattacctataaaatttctgcttattgagtttttcagattggttgagcattcttcatctcaacattttttttttcttctgcggagttggga

SEQ ID NO: 52935 - DNA, 1100 bp, Bovine  19866880939214
  misc_feature (1)..(1): n is a, c, g, or t
nccccatcctccatttttatggagtgtgatagtcaccacaccctttcttcaaaggagtattactcataaatattcagagtgtcattaaccaccccccccacagcccattttaaaaatatttattgtgtcacttgtgcaacagatctacctgtatctgccttgaaaaattctttgttggaaaaaatgttagcatcatttgaaaccactccttttctgtgatataatagttttacttgggcttacctctcttgtctttgaaactgtatatatttcttttatttaatagtagaatatgaatgtttaaagaatgaaatgactacatcttcatttactgaaaacataaagagatcttaactccactcactgctaagttcctcactcctgcataccctgaacagaaagaagcctatatttgcttcacagtacagtccaagcagaatgtcatggttctggctttccttcagtgtttacaaatcacaaacaccaattattggtggttaaaagttagaaatactaatatgtttagttcttagtttctaaagtgtacatgtttaaactatattcagcatagtacgtatagaatatgtgcatacgtatttatatttgttggctaatgatgtttttaagatactgggttatagaagcctactaattttgttaaatgggtgcataaacagtgcaggtgaatgtctgcataacttttactactttttgaaatgtctgcttttattgtttctttactgtcaaatattcccattataaatgtattaatttagtttattttagttaggcatgtctccaatgactcaggttctcagatatgtacaattaaaaccaaattgtttgaaaataaattcttaaaagccatattttgggaatgtacataacaggattgagggctacttttactgacgttgttggtttcttttaattttctgactgaaacaaatgatagctgtcttttaatcaaggaagaattcaaatgaataaaaacaatcacaataactgagaatattttccataaaatgttttaattagagttggattttataggaaagctccagttgatttcaaattgcagagtgtacttccagaagagg

SEQ ID NO: 52936 - DNA, 895 bp, Bovine  19866880975203
  misc_feature (1)..(1): n is a, c, g, or t
nttctaaaaacaaaataatcaattttagaagtttgagtccaaggaactgtaagctttcatttggttatatattagatgagcctcacctttattatgattcctatttattttgtgcatccttcagtgtaacttctgggaatcaggcttttttattttctatcctcacttttcaaattaatataaggttaataaagatgttcacaaaatcccagttctaattatttagttatcagtaccactgatttccttagaggctaccaagctatttcctttattttttcattaaatatcattacagtttttttaaactctaaactgtagtttgaacaatttctagcacttcatctattctttttcaaaaggtttggaacttacatgtaaagtttaatgatcttattttaaactagtctgaatattttagttagaagcgcaccacatgaacctaagaaatttaactaattataatattaactaattgtagggtatacaaattagaataattttctctccatgtaaaaatttcaatttgaataccaagtgtacaatgcattttacgtcaaaatattaaacatcttcataaaaatattattcatatgttatgcttctacctaaaatattcagactggtttaaaataagatcagtaaactttacatgtaacttccaaatgactaagtgactaaacacagcatagcacctctaagaagaatatatttagtacatacttgctgattatttaccgatattgattaaattggataatccaagccaaaacattcatggtaaagtcttatattgctgtaattattcatatacacatacatttgtctgcctgataatctcatcctattttcattaggttgttgatacctggtaaatttctttctttgacatcta

SEQ ID NO: 52937 - DNA, 1438 bp, Bovine  19866881096724
  misc_feature (1)..(1): n is a, c, g, or t
ncgggaagttggtgatggacagggaggcctggagtgctgtgattcatggggtcgcaaagagtcggacacgactgagcaactgaactgaaatgtccttctaattatgtggttttctaaaatctttaggtcagagacccatgtacatgtgtaatagttcaagtagctagagaaaagagaatgaacagtgggttgtcttcctaaccttcagtgcccacaaacccatgttcctaatccagaacaagatgtatacggagtgacaaaactccccaatgtaactgcaaaagtgagcaaacgttctctgatgttagcagtattaatgaaaatagcacaagaggaaagaaccagagaattaaaaaatatatatatatgtataccctgtgcacacttgaaatggagaagaagaattcctccttctgaaggaagaattagagcacaactcaattcatggagcactttttataaccaagagtagctcacactattttagagaagtttgcacttaataaaatgtgatatttaaagaaattttgaagtaaaattttccataatagaatattttgaaaggtcaactaacaacaacaaaaatgagatgaatattttctgtcataattaagtattatatttaaaaatggaaccaattctcttctgtataagcaaataaaaatttaggtttgtaagatcattagttcaaattcaattaaaaataagtaccagttattaaattggagattttcctttcctctttattttcttcacatttgcctatctttaaacctagactatatagctattttctcaaattgttgctgtgtgatgtatatacatggtagcaatttgtttcagatacacaagagtatctgaaggtatattgaagtgcaggtatattgaagtgcactgacaagttttatttttaacacaaatgaataattctgtaaatactggaagaattaatttcctgagcctgtctttacagccttcacattagcaagcacagtattctatacatggtaggtgatcagttaacaactatgagatggttttccattttgattaaaattgagaaacttatataactgaaagtgtgaattttgaaaggctttcttaaatatttgcaacaaaatccttatcaatatgtaactctcttgcatgaacatatgtatcacatgttataaaattgaaatttattttgctgaaacacttaattggcattcatataaattatagggaaaaagagaaacattatttatggagaaaaagagataacctcatttagggctgtaaggtcacctatgagtttattagtggaaagattatcagagctttggatttttctcatcgactctgaccaacatgcctgtggaatagagtgttttgatactacatttattgttaagggacattgggagtggatttcattttactatgccagttatcagca

SEQ ID NO: 52938 - DNA, 1860 bp, Bovine  19866881178564
  misc_feature (1)..(1): n is a, c, g, or t
natgtctgtgaaaaaaagacacacttgaagtgtaattaattaaaaaaatctctaatgaaaacatgttcttaatatggaagtgttcgaatgacaaaatatactgttgagtaataagaaatattggaagtgggtagtaagagcttttcaacatttattcagctcctgtatctgattgacaccagcattaaaaatctccaggctttaccaccacagatgggctcaaatagcagcaaagtggttagactaccttttgtcctgactttctacacacataactactttatagttctaagtttgatattttttcaggggtcttaaattttagaatagtgtcatagaaaattaaattgaggtattttggtaactagaaatatgtagtccatagtctaagtggaaaaaaaagtcacaatcaagtgtatgaatcaatattttgggagtttggttaatgtgactcacttacctacatttaaagcacttcatggtaacgaaacagcttctgtgataaaattgagaatcaaacttagattgtatagtgcattactgccacaaatacttcatgaagccttttttttttttttttcttctctcttctaactaactgcctgagtgtcgaaactactctctaatttctactggaggttctgaatactttatgagcagtttaatagttataaacagaaataagaaataattttcttttgtaagtagggtcataatgccccaacttctactatgaatacttagaacttactaatgttttatattttccttcttttgctactttggatatcaaaggatcaataacatgaacaaaagttttttatgtatttacaagacacttttctgactggtggtaataaaatatgaaaagcagtatgatgataaataatatcatgcttttcaattaattagatagcaatataaatcatagataatctaccacattatttacccaaaaggtatttatatgtgtggtattactgtgcatatgagataaattgtagtgttttccctttgcttaaaggtctgaaactaagatttcagtaaacccacaccaaaagtatcttagagatactggatgaaactttactttttccttcttgtattcttatgcacaattccaagaattgtatggaaaagtcagctgcccttttaggtattttcttgacccagtatagaaagatagtatagattgtttattacagttcatactataagaaggtaaaaatctggtcttcatgtcgggagagtggaattcattattatttctctaccaaaattaatttcagtgcactttttaaaatttaaaatcttaattcccattatgacacttttttgatagactttcactctgttggggagggaggtctttttctttttctaaccttttttccttgaagtgatttggttaagcaggaaaaaagaatgaaggagttttgacaccacatcccctattctattaaccaaactacataatcttctcctttgctcagtttgattttcctttattgaattttgctttctgcaatgttctcatttcccttattagattaaatcagattgttcttacccatccaacattatccctttgggagagcaaaattcagtctcccgagagaaaaatgtaaagaaaatctacttagagaagattactcagctactgttattatccgtttccaatttcctttctgctttacagagtaagtttgactcattccctgatggcaaactttccttccttctactatgtaacaagaatgaggacagggcatctataatagatgactcttaatgtaaagtgcagaacctcagaattgataagacttgttatatacaataggtcagggaaattcttagatt

SEQ ID NO: 52939 - DNA, 2249 bp, Bovine  19866881207956
  misc_feature (1)..(1): n is a, c, g, or t
ntgatagtaatatttgacttctataaaacttcattttgtatgacaggtgttttagtttaggaagtctctttatacttaaattcatctttaatacacaaatgtgataacttctaaatatttaccacatcatgcttttttcagtgtagtcatataaaccacatcatgctgttttcagtgtagtcatataaaccattttatagcaatttttatcttctatcttatgtcttgctttttaaattatgacacgtgtgctgttctaagtcacttcagtcatgtccgaatccttgcacctctatggaatgtagaccaccaggctcctctgtccatgggattctctaggcaagaattctggagtgggtttccatgccctcctccaagggatcctcccggcccagggattgtctcctgcattggcaggtgcataatttaccactatctggaaagccccaaattatgacataaaattgtttatatgtgatgtatgacaacattttcatgatttgtctctgaaagttttgtactttctggaaagccaggattgtatcatactggaaatattttcccttttattttgttcttggatataacccagtggactctgagcacagcatgacaaattgatttgactcctacatttttcagggagagggcaggggcaccaccttgaagcacctattctcctattctgttcacaaaagtagggaagaagaaaagtaatatgcaaatcacaaggtcagcatagacaatcttctgctcagactttccaagagttaagggcaaagcagcctctactcaccaaggtttctcactccacttcagggtctgaagtctagattatcagtgctgaactaatgtttgcagaccacaatgattatactaaacccaagcttgaaggctcatctcatctatttccattgttttctctttccgcagatgaagcccaaggtgggacaaactaactctcaagaacatatattctacaacatgctctccaaagttaaactagtctcaaaaacacaatttgcaaatggtcagatcaaagaagaagaactagtctgaccacttcaaaaatgtaatatgagaaagagttcttttttttttttaatggcaacagaaaggactttgaattgtcttataatagcagttaaatggtttagttcaaatatgaccaaaacttttctaagaattagcagttagttggaattagtcatctatctctgccccaggaaacaattggttaattgaggttaagaagcatgttgccctactgtgtgactcttccatgtgtactcaactgtgtatattggagactggcaggaagtagacactcatgaaatctgggtagactgaataaatgaatttatgaaagaataaaagaataaatcagtctagacttgactcaggttagaggcaaattgtccttgttttcctcaggtcttacagtgatttatgaatgattaaattgatgtattagaatttccctgtccagtgtaatagaaagatgtgtggctgggtaatagaaaagtcagagctttccaatttgatagtgaaaaaaagtgctgaataattgagttggagttgaaatggtgttacacataactagagaagtggcacacttaaagagctctttcttggaaatttaagtgatcccttggtcagtacaaaccttaatagcttttaagaaacctgctgtggctgagaatgagttggccatccatgagcggttactagtggtctttctcacaactatattgcactgacattagctacaccctatgatggtagattctgcagacagcctgtggatggagcacatttggtaactgaaaaaccctgccacctgcggagtcaatccctacagtgcaggtttagttgttagattggcatttcttttacaatacccatcttacaaactgaatgattgtccttgtttcagctcacacatttattgttcacgttaattttattttaaaatcctataataaacataaaataactgcaaccaagtagctcacttcagttttaatatctaaacacaaagcctgtatacttaaaaaaaaaatcatttcctaatgcaacttaatttatttttcttatgttatgttagaaatatgacatacataaagcagtgttttaaatcttacctatttaacttaatttcttttcttacccaaagatgttcaagacatgaaaaacattaattctaattaactcacattcagacagtatatatttttttcattttccta

SEQ ID NO: 52940 - DNA, 1243 bp, Bovine  19866881216027
  misc_feature (1)..(1): n is a, c, g, or t
ntagctttgccttttccaaatgttatctaagttggaatcatatagcatgtatagtcttttcagattggcttctttgacctggtagtatgcatttaaggttcctccagatcttttcatcactagatagcttatttctttttattgttgaacaactttccagtgtaaggatgtaccagcatttctttcttcattcacctcttgagagatagtttgcttgcttccaaatttggcagttatgaataaagctactttaaacatttgtgtgtaggtttttgtgtggataaatataagctttttatgaatgatttcttctttccatcttttaccagaatgtcaaattcagttacaatcactgttacatgaaggtcaatgtataattatcttctgtattaaccttatttgcctctcaggacaaagtctaattcaggtgacatagaacctgaatctgttgttttggcttttctgtcagtcttgtaatgtgatgcagtagttctacactgctgttttcatggcagaataaaaagggttgatatctttatttgggaggggagagaagtggaaggaacggtttgtgagtaaccttactttagatgagctatgtgagctcttgttaccctttctataccatgcctaattggatcagtaaatcataccaagctgaaagctatatatctatgatcaagtgtgttttaaatatcttattcataaacagagatttattcattgaggctgcattatttggtatttctatgtgttatataaagtagaacatcaagaaaattaagtcagaatcagacaactgttcaaatactagaatatgcaaatgttagaattattcctaataaagagctccgaatatgagataatctccatttttcatattaagataattatatactgcatttgtggcttttgcaaacatagctgtaattacccctggcattgtattgcttactgtcttttttccccacttattaaagctatttatttaccacaaatgctttgtatgcaaacattagtctgctgttaacaaaagtgaagcccaaatttgtaattagctacagctgtacatgctgcttcctttattcaaaagactcctatcattgtgaagctggttagttcattttattctttgtgggaaccagtcttgggtacgtgataaagaccttctctctgtgtgctgagtttaaatccactattatctgcttttagttgggatgaggagcacagtttacagcactag

SEQ ID NO: 52941 - DNA, 1476 bp, Bovine  19866881383744
  misc_feature (1)..(1): n is a, c, g, or t
nccgggggtaacacaagcaaggataccttaatacgattgccaaagaactagaagatatcaacaggtaacacatagaaccaaaggaacctcacagatccagcagtaaacctgaaaacgaacaatctgaactttcagtgtggactcagtaagatacaattaaatgggagtagaaagcagactaagaggaagggaaaacagtaaaatggagcttccacaaaaaataatatttttattcagagtgatgggagcaatgaaaaactgaaattagttgaaaatatcccaggttagagtgtgggcctacttcagaaaatataattacatgccatacctataaagattagattttgttaaaaaggaatgaggaaacatctgaggaaattaatggagaacaaaagcagagaactataaactcccatgaatttttacaaacgtaaaaaaaaaaaaaaaagtagaaaatacagcaatagaaataaaggagttaaaggaaaaaacccacattacccctgacactcaaacacgcacaaaatatcttgtagattatagagcaaaacaggagcatgtaaaataggttaaatacaaagaaaaatgaagaaattgccttcatgattagaggaagaactggagaaacaggaagaaatggatggaattaagtctattgtttataagaagcactgtgatacgattaaatgcataggtaaatttgtttggcttttacagtgtcaggtttaagaagagctgtaaatgagtttcataaacatggcatttttattttcaaaaatatactgtggaaaatcaaaggggataatgcaagtgaaagtgttttgatgaagttaagtgctttatatgtggaaggtgttattattattatctttatcttatgattccagtgatggttttcagtccttatacccttgctcatatctaatcaatctgaattcattcaatggctaagatgtcattatcttgagtctaagtcactgctaaagtctaaatatatttcactttaatgtgtgccttctgtcaactcatttgcaatgctaacaagaaaatccatcaatttttctagcataacttacttttgattaaaataaaactaatttttccatatactctttcttaagaatatgcttaattttaaaataattgtattcctatttcaacaagaaaaagaagaggttatacaccaaaggcactgctttacttgatttaaaaacacaataaatcaatattttgcatttggaaattttgttgtaaatattccttaccaaaacataactctatctcccaattagtattaaaagtgaagaactctgtaagtgataatgtgaaacaataattatgatacaataataattacctcaagaaattataagaaaatcagagtggtatacatatctgtgctacattttctgtttccttaaaatttaatttagaagactgtcataccatacaaattgtaaaaaaaaaaaaaaaaat

SEQ ID NO: 52942 - DNA, 1082 bp, Bovine  19866881616755
  misc_feature (1)..(1): n is a, c, g, or t
nctgggtcctatgtttcctgctataaaaactacacgtagtgctggacttctgtggttagtaatactctggtaaatcgtttggaaagttagatgcagtgttagtggagaagcagaaggcttgctagccctagtggctgagtgccagtggagggcagcagagagctacttcagacaaaataacatttaagaggaagaaaacagctcccagttgagagcagggtccttcgccagatctaccacctgctactgaagaggcagcccatttggaaagccagcccacagggtagccagcaagaatggaattcccaaatacattaatgtatgaagccaagaaggaagggagatgggcaagaaacaaggccagaacactcagaataattcaaactgggactcagcacagatcccaagagccactgattaagatagtgatctctctccagagctgctgaatcagaagatgtattacatttgttttaatcccaaaatctaggatcctaagtcattaacaaacatgttttgagtataatctttttgcatcgattgtccctcctgtagaaaatataaatattatgtttttacattattttgctatctttttacaaagattatccctcaagaagaaaatataaacaatatagataatataaaattgttagcattaagaggagaaaatcatacatgagtgaacagtagcaagcacagattctatcatggtgcaaggttcccaagaatcccctaaaagttgagacttctcaaatatatgtggtaggatcttggtaaggcctaaggaacagcagcaggccagtcagtaacctggtttccagtgtgaggacctcaaccctgaagaccacctgcaggaagatgcaacctagtcggggccagaattcatgctgctgctctgggtcttcctagaggtacgagatcaggtgagtaatttagtctctctaggccaatttcctcacttctaaagtaaaataatacctgtctcttgaatctgagaggaattcacagaagaaaatatgccttgctaattttatacccatatagggtatttttattaccagtctgagttgtataaagag

SEQ ID NO: 52943 - DNA, 1067 bp, Bovine  19866881826708
  misc_feature (1)..(1): n is a, c, g, or t
nccgtgggaacaaggaacagtaactctcttgaagccagtttttgaatattcacagctttaaatattgaaaatattttaaaatattttgaatattttttaaaagtaataaataaaatggcacaaaccaacacaatattgtaagcaattatattccaattaaaaataaataaatttatttaaaaatttttaaagttaataaactggcattactgttattagaattacaatgcacagctctgttcaacattttattgaaatagttactgtggtaagaaacatatttagacaaagcatttagaaaaataatgttgataggaagtagttagctttcaattaagctggcagtcatgtttcatagtgattttgaatatcaggaaatcacattaaataagatagtgggaggagtaaattggaaacttgttaggtagttaatctcaaaaagaggtgacactttggcccagttttggtttcatctgcatggctgtaacatagcaaagcctgaaggactgtccctgttcctgctctaccctggctaatcctcttatgttaccctttgggcactgaataaattacagctaatctacaaacaacaggaggatctgtgcgatttcagcttttgagaacatttttctagggagatgacaagtaaggaataatgaacaccagtctacaatggctgttttgttttttgttgttttttttttaagaaagatgaaactatatattttggccacagcaaaggtttcaggggaggaaaacaaaacaaaacaaaacactgaagaacacagtttacttggtcatgggtaaatgtaaatattctgttccttaaaatgttaaaagaagaaaaatgtccatcccagagaaaggagttgatcggactaatacagatgtcactgatgtaggtgggtatcagatatcttcctgagatggcaaagatatgtccacatcaaaagaaaaacttgtcacatttaagttgacagctgggatagaaacttctccaaacccaggaaaaaaaagtctacccctgtggaattatttaggactctgggtgcctcctacatccacat

SEQ ID NO: 52944 - DNA, 800 bp, Bovine  19866880903915
  misc_feature (1)..(1): n is a, c, g, or t
natcctctacttttgagacagttgcctcccccaggaaaacctcagctaatgcatccaccctgaactgggcaagtgcaggaaccttccaggcccaagtccttctcacagcctccctttcctttgtcctcccttctcagatggtgtgggcatcttccaatcggctgggctgtgccatccacacctgtggcagcatccgcgtctggggcagcacctggcgccaggctgtgtacctggtctgcaactatgccattaagtgagtgcagctttgagatcgaggggactctggggcaggagggtggctcacaaggtgggcaggattctcataaaaggaagacacacaggacaccttgccctcctctgttctaaatacaccatacagtttggtacttttagaattgatcgagaatcctttttctttacccaagcttcacagtcaattgggtgatagacagaggaccaaggcaggtggatagtagataggcagtctccctgatgaagccagtagtggagaatgtgttttagctctgccagccaagtgggcttgcaaatagctcgctgttgaattaaaccttcacatccattaacaagcaacactggacaaccagaggcctcttctaagtacagtgctggcccctttaagcttcccacgagaaacagagccaccaaggacatatgctccctgcagggaggcagatcccacaggaaagaaaggaaggatgcagtgagcatgctcagctgcttcttccagactccagtcagctaggtgggagagaggtcaagagaagtctttagagcagaaa

SEQ ID NO: 52945 - DNA, 734 bp, Bovine  19866881231301
  misc_feature (1)..(1): n is a, c, g, or t
ncccactggaccacgaaggaagtcccaatgcagtagcttttgctatggggtgcccagatccttgctgtgatcctcccaggagggcaaacgagccactgtccttgatgtatgtcttcctgtttccttgcagaatttgcaaggcccctgagtaccaagctgagactcacccagccttggccactctgaaaaacaggacttggttctggagatgatgggggaatatctgcccctctcatagctccctctgcccagctaatcagggtccacaactgttggacgcatcctaggaaacagccagtttcttcattccttcccagagaaaactgaggctagcgatcgccaccacggggaggagcagacccttgttaaacaactctacgaagtcagtgtcacaactatccctaagttacggatgcgaaatgggagttccaaaacagcaaggaacttgcccaagttctttgaggggggtcagtagcacctgggtttagctgaggctgaagccctggaaagatccctacaaggctcacatccttttctgaatataaaccaccaagagagcagggcctctgagaggtgacttcctgcccctcctgcgtcctcactctttgcttttctggcgcagacacatccccatcagagggtgccaacctcaacgcacccaacagcctgggtgtcagtgccctgtgcgccatctgcggggaccgggccacgggcaaacactacggtgcctcgag

SEQ ID NO: 52946 - DNA, 923 bp, Bovine  19866881311371
  misc_feature (1)..(1): n is a, c, g, or t
ncaagaaaggtaagacgggaaagaaaaaaacccaagcctctggagtcagtgtgccccgtcgtcacatcagtcatttgagccttgattttcctcatctgttaaatggagctgataaagatgtcctctcctgattgttgtactagagaggtggggtggtaagcgtggggttcatagcccagtgggagtagtccgacagagggtctggagcatcaggggagtgtgggaggcgtgggctgtacctgggtcaaagaagatgatggctttgaggcaggcgtactcgttgtcgtcaatctgcagctcttgaaagggcagcaccaactcatcaaggatgcgcacggacactcgactcatctctgccagctccgggcagtgccgagggacgatgtagtcattgcctggacgggttaggaaggagaggggatgggaagccaccggggtgtacctctctcctctagcttttgctgtttgcagttataatgcagcagctgctcacggaaggaggggctggtggggactgtcacacccatcttacagatgaggaagccaaggcccagattaaaggaatgagtgacttgcaggcattggagtgggcccagagcctgacttcttaggaaccctttcatatcacccaagctccattcttcagtggcgacaacagaccacaagactgatgacaatcaagggctgcttgggaggcataaaagcaccaagcataagggctcaggttctggaattagaccacctggactgaatcttgctttttccattgattagccagatctatctggataaattactttctgtgcctcagttttccatcagtaaaatgggaataaaattatagtgcttatctcattgggttgttgtactagaggggttagtatttgtaaagtattcagactagggcccacggtgtgccctat

SEQ ID NO: 52947 - DNA, 3424 bp, Bovine  19866880494238
  misc_feature (1)..(1): n is a, c, g, or t
ntgagaaaataattctaccaaaagaataaccatctgataattagtgactattcctaaaaggtgtgggcttccctggtagctcagttgataaagaatctgcctgcaatgcaggagatcccggttcaattcctgggtcgggaagatccactggagaagggataagctactcactccattattcttgggcttcccttgtggctcagctggtaaagaatctgcctgcaatgagggagacctgggtttgatccctgggttgggaagatcccctgggaaagggaaaggctacccactccagtattctggcctggagaattccatgaactggatggtacatggggtggcaaagagttggacacaactgaacgactttcacttcactttctctttcctaaaaggcatggacttttagaaatgtatgtcacttgagtaatcagagatgtaaacaagtgtgtatttgtaaggggaatcaaacctcattacttgtgataaaacattttaaatggtaactgcatccaccattaaagggatggtgagttacctcagcggatctttagagggagttctctgcagacacaaagcaactctctcagagtgtatttttgtttaagggagaagcctcacagtaacatggtaaatggttaaagagattctcaaaaacatgttcaagaaccagatatacttccaaaaataattatgagattttcttttgatggtatatttaataattacaattgatttctattttcttctgtatactttatttgcattctctagatattccataaagaagatgcattgaatttatattgagaacagaagtagtctgagtgactttgtgagtggtggggggcctacccagtgcctagctatggagagaaattgatgtgacattgataagggagaaagtagagacctcacaaagatgccatgtcctgaacagagaacagacgtgactcataccagatgcacaggctttgttttcctctaaattttaaatgagaagtggaggtaattttcctgctaggagattaagaaaaaaactttggcaagacagaaataaacattttgaccataatactgaattacagagaagactaaagcacaaagaacatcccaagtgccatgcctgtaataaaaaagaataattaacaatcacagatgaagcttctatcttaatctctgacgatgcaaagaggaactgaaagagttgcttaaccaactgttaaatcaactcaaattgttttaattatagactttatcttatgacaactttctaacttttttatttccagtgcaccataaggaagagatgaagatgctttcttcccatctgttttcatgctatcaaacaacacacttaatggaaattaccttagggattccaattgaacattcttcttcttgacttgagctctcaaatcatgtgtgaatttccaaggaacatttaagttaaatttgaactgaaacagaagagcctcattctggaaatgggagagagaggggatatacagcatctatggggcaatgatcctattcaagggacagtttcaattcttcatccttagactgacaccacaggtctcactctcttcctgataccaagatggtgcagagtctcaggacgccacctgtccattcagggcacaggcgtccctgctttgtgccaggaaccgctgagggtgctggaggtcatgaacccacacaaagatctctgtccttgtggggattaagtccttgtcacctctgaaggatgttgatatattaattcaacaggactttttacaaccgattgtttgcatcacgtgttcagagatgtccagtccccacggtgcactcggccgtgcagtgtaagcaggagcccagagctaaaggtcatagtgatgcccacagacccaaagagggtcccatcaacaaagctggggtaataggccattatggactaagcagagcccctgcggaataaacagggcttccctggtagctcagttggtaaataacacgcctgcaatgcaagagaccccagttcaattcctggggtgggaagatcccctggagaagggattggctacccactccagtattcttgggcttcaccgatggttcagctgataaagaatccttgtgcaatgtgggagacctgggttcgatccctgggttggaaagatcccctggagaagggaaagtctacccactccagtattctggcctggagaattccatggactgtgtagtccaatgggctgcaagagtcagacacgactgagtgactctcactttcagggaataaacacgatggtggctcccagtcccccatggaagacggtggaaagtaacaggaagtaacatccagatagtggtcagatttagctggggggctgcaaatagcagactcatgtgttagcttgtctatatatattgtaagtttgggagagagaagagagggaagagggagaaagagagagagagagaaatagaagaaacacactcacagcaatgaaatggaacacagttgcacatttattttggccacctgatgccaagagctgactcattggaaaagaccctgatgctggggaagattgagaacaggaggagaaggggacggcagaggatgagatggttggatggcatcatcgactcgatggacatgagtttgagcaaactccaggcattggtgatggacatggaagcctggcatgctgcagtccatggggtcgcaaagagtcagacacaagtgagcgagtgaactgagctgaactgcacacttactgatctctgtgaacagaaataggaaaagtggagaacaccttaattgcatggaaaagaaagatttcacattaagagaggctttaaaaatctgaaaatgttcagagtaatttccgcaaatgaactgtttgtcgtctgctacaacaggaaatccaggaaatatcagaacccaggaaatgggcctgaagttggctcaagcatgagtctgcggatcaaggttcatagctagtaacccagaatctggttccaaattgagtgtccacttgggttgtcacaacacattccaatacacatgagaaaaatgaagagctgagaggatacagggaaaaaaatagtctttccaaatgggagaaatatcccaccataaaatggaaatggcagaacagtctagaaatgctgttgatagaatgtttgaattactcaaaagcaaatacgtggaagaatgctactaagtcgcttcagtcgtgtccgactctgtgcgaccccatagacggcagcccaccaggctcccccgtccctgggattctccaggcaagaacactggagtgggctgccatttcctcctccaatgtggaagaatagcaacatgcacaaaagaaattaaaatgaaaagaaagaatctatttaaaatcctaaaattaaaataggaaaatatatt

SEQ ID NO: 52948 - DNA, 1109 bp, Bovine  19866880501826
  misc_feature (1)..(1): n is a, c, g, or t
ntgtggtcaaaatcatgtccattgaatcggggatgccatccaaccatctcgtcttctgtcgttcccttctcctcctgctgccagtctttcccagcatcaggttttttcccagtgaatcagctcttcacacccgatggccaaaggattagagcttcagcttcagcatcagtcctaccaatgaatattcagggttgatttcctttaggatggattggttggatcttcttgcagtccaagggactttcaagagtcttctccaacaccacagtttgaaagcatcaattcttcagtgcttagccttctttatggtccaactctaacatctgtacatgactactgggaaaaaacaccgctttgactatacagaccaatttgttttaaatcaggagaaatttatacaaaagtccatatagtgatgaattctatgacatctaggctgcgcaaactttatttaaatgtagtgtcccaccttaacacaagtttcgcatcatacttttaagggttttatggttcatttcatgaatattcatttttttagtccattttctttagcgcgagctctgccacaggtcttgtgtgatgactttgcttttacttcctctccaaatgccccccctgtagacatgcccaagcctcccaaagaagaccttttcatcctgccggatgagtataaatcatgtgtaaggcaaaagcgctcccttctgaagtcccataggaatgaagagctgaatgtggagacgctggtggtggttgacaaaaagatgatgcaaaaccatggccatgaaaacatcaccacctacgtgctgacagttctcaacatggtaggctcgtcctgctctctgagccgcgtgtgtgattctgcctcgtgtgggtgtagtgtgtgcgtttgcctccctcttttacttgtggatttatgtttcatactcaagaaatatttcatccatgatagctccttcacttttactatgctccaatcagaagagccattttcaatccttcagagaataaaatttggaggatgaacaatttggcatgaaaaaaaaatatgaacaatatttcaagtttacgatgtctccatttatcagaaatctccaagaggatgctgagac

SEQ ID NO: 52949 - DNA, 2036 bp, Bovine  19866880525244
  misc_feature (1)..(1): n is a, c, g, or t
ntcatggccttgacactgagtgtgtgtcacctgagggtgctggcacggttctttccctttttctaagtagtgactgagatgaaacacacccgcctcttgcatctcacgtgtgtctgggtggtgcacagcttggaggagcagctgtgcagagggcaggcgtgcagagtaagttggagccgaaatgccaccaaatcccggaggtaagagaaagggcttcaccctgccttccagctttacgtcagcagcagagggagaaagggggagaggcattttagacaaaggcaggaccagggctggggcccagaaccagcttgcatcaggccacaggccgtggcaaaagtgggcagctggtggccgcaggcctgctggtctgtccgtcactgcggcccaggtaggtctggtttgcccggtgctcgtgatgtaaaatgctactttcctttcttgtttggtccctgtgctaaggctcacaggacatgactgctgcaattaaacacctgagtttagactgctcagtcactcacgtgtcctcccctaccctcttcctctacgtgctcgtgagcactctctctctctctctctcacacacacacacacacacgccttgccctgccttctccatctcagtaaatgagtcgtgattgcttatataggcttaatagttcacaaggcaaacgccttcatcacggcacatccagctgccataatggggctgaaaaggacgccaccgaggtgttaagacacaagttccgccgagaatgatgccagcatgagggaccaggattcattaaatcgggcagcctttctcattaaacgtgcagattgacagtcgtgactagctgtcatctgtggtttccctcgcgtccccctgcccgataatatacatatagatgtttttgcacagttgctattatatttagaacagaatagtgaaattgtgactattcgggggttgcctgctttgtgtaaaaacagcagtgttctttcttcctttgttgcttctctgaaagaagaggaaccctaaaaagaagtaaacccaattcggaggctaacccccaaggcttctagttaggtcaacatatcagataaaatggacccatgttacctggaagagatttaaaaattaaccatgaacccaagacactcactactctggctttctgttttctagccacttaattcctgcatgtgtttcactttctctacatccaataaatcctttatggaaaattcctcataacacgacgaaggaggaagactcccaaaagccatatccctctatgtgtagaaaagtgaccggatgaaggaaaggcacaaactcattacaaaatatcgtttttcctcaaagatctgaggcccctagaggacactgttttgcatcttaacataaaatatgtaatgtagaaccttctggtattaacagatagcaccagagtactctgccctgggcactttgcaaagatgcaagatagctgcaccttgagggaggtaaagaaaaaaaaaaagaaaaaaagaaaatatttcctccataaacatgggatctcaatcatcaatgaacaaatatcctggaaggcactgtcaacatgaaatgtcatctaggggcaaagatgcttccctgattaagaaataataattgtgtagatgtgtctgtctacatgtataggacatactcctcaaaaaaataaaaaatgtaattttccagagaacaactcaaggacctgttcattactgagagatctcttactgagaagtggcttgcacagctctgtgctctgtttttgttcacttcctattatccacttccttaaatgtagcctctatttaagcaaacaaaaaacaaaaaacacgacactatgagagggacacttctgtctatgcaatgcctccttctttcatgcacttctgttctagaagaagtgcttcagtttataataactgatttttagttcacagcctctttccctcattctgtcaggagcttggatttctctcttaaggtaaattctctaaggcctcctgagctactacgaacttgaaag

SEQ ID NO: 52950 - DNA, 735 bp, Bovine  19866880591046
  misc_feature (1)..(1): n is a, c, g, or t
naccccttcccctaatatggttcatcatcaacatctgttttcacctttctttatctcagactctctttaaattccatttttattggtttgttcaaaccctgtgtataagtcccttgaaatcaaaatagggcaagcttgctagccttcgccttgcatgaaattacaagcaggtgagagttgaacaattaatacttctttattctcagtggtggtacgagcagtgccactttaatgctgtttaagcttattatctaattgcatgcttgtgctagcttcagagacggcatgacgtgaaggcaggcttgtgctgtgttccctccgcagtggaatattcaattatttgttctgactcatgtaattccctgtattccaagcttgttaatgtcattacagagctgaaataaagtgattactcttaatgagtatttatccgataggtaatgcaattcctgcacccgctagctgacagtgtacgattatggatttttctccttagccctcctctcttcccactccaaagacaccagcccccatctcctgactcccctgtcaggaaggcaacatggcattgcagtgttctgtgaaatactgtcagatgatggggaaaaaataaaaatcctaaaaaaaaaaaggaaaagaaagaatcacagcatcccccggtagagctccggctaatgaccactgctcccactggctggcggtgatgacagctcttgctaaatgataatggcatgc

SEQ ID NO: 52951 - DNA, 2890 bp, Bovine  19866880692105
  misc_feature (1)..(1): n is a, c, g, or t
nggaaaccctttaaaatacatgacctccgtaaataagcaaaaaaaaaaaaaaaattgctgcataaatgaaacaaagactgcagataccatgcttcagcctgaagatctatgattccctttggataacgcaggaggtttttgtcggatggttcactctacagtacaagatccctctgaagcctgagtgtgggggtgccccaacaacatcatcatcaccccaaacacaccttggttcctggcttgctgcattggcctttctggcttactcccctaaaaacacttgggttctgtgagcactgttccagattcaagcccatctcctttttcccttgggttcactctgggtggcccagaggaccagactgtcaggcaagagtgacctccacccccccacccaaaggacttctgaatgttcactgaccaagcagtcaagtgtctatgcttgtttcatttataattcagtctgaggcacagtattctgtgtttaaataatccccatgttcattaaatacatagaataaaataactgataacactgatattttgatattccttgataatcaatacacaacgaaaaatacaagaggaaagtgaccccactgtcttgctgcattattagtttgcaagcttatttaaatgattatgtaaattgtggaagattaatgttttcttcttatcaaagcttttcttcactgaatcaagaatatttacttggaggctcataaaatgtctggtgtacacctgcccacagtcaccactgggaggtcagctgggtggattattaaccgggcttcagaaaaggccaacatcccccagacatcacaggggagctctccagatgcctgcatctctcatcgccagctctgtaaatcatttggcactggggaactcaacactagcattgcatttataagaagaggaagagtaagtgccttgtcagtgatgagaatgggcagctcctcagactcacagacacaaacaacaaagttgtggtttgtctacaacaaagtagacaagcagtgactgggaggggcgatataagggcagaggattaagaggcacaactattatgaactaagctatgaggatatattgtacaacatgcggaatacatccaataatctataacaactataaatggagtataaccttacaaattgtgaatcactatactgaacacttatattgcacagcaactatatttcaataaaaagaacattttaaaaaaagaaaaaagctgcttctgagcaatgtgagtaaagaaaaaaatattgaagcttgaaagtaggatgtttactgtgttatacttgttgctattcgcccttaaatgttgatagacctttatttaagcgtgcttcccaggtagctcaaatggtaaagaatacacctgcaatgcagagacctaggttcgatcccctgggttgggaagatcccctggaggagggaatggcaacccactccagtattcctgcctggagaattccatggacaaaggagcctggtgggctacagtccatgggttgcagagagtcagacattgagtgactaacacacacacacacatacacagacttttattaatgtatatctatttagaaaagttgtctgtaaaagttgtgtgagtcaaaaaataaagtgtaaattaggaagtgatgagcttggtggggcgttcacatcgtgctgtcgtgaaagggaattcccactgaactggggccaagcttgtctcgggtggcaccatgctccctttgctcgagagctagctatcagtcaacacagggaaaaagtgatctagctcattagaagaaatacacatttcagttccaattcatttcactttttactcaacttctttgtcatttcttccaaaatgtggtttgtctggggactactctactcactctagtcttcttagtgacgtttctaaagcacaagacaaatgcagcgtttatagatctttcacacttactttgtctcgggcactgtctatgtggctgctaccgccctaggtgttttgctttatttattatcttatcctaagtactcttgcctggagaatcccagggatggagaagcctggtgggctgcagtccatggggtcactgagggtcagacacaactgagcgacttcactttcacttttcactttcatgcactggagaaggaaatggcaacccactcccgtgttcttgcctggagaatcccagggacgggggagcctggtgggctgccatctctggggtcgcacagagtcggatgcgactgaagcgactcagcagcagcagcaacaacaaacatacgaagtgagaatcacaattcccatttaaaggaatgggacactaaatgcagacatttgcccaagacggaaaagctaggaagtggggtagctaagagggaaattgagtctgagtaactcagatttacacgccactgtcagcaaaccatgttacttctctaccaccatgtaccctggagaataataccaatggttgtggtcactgagagtgaactcgacttagttgtaaatgtatattgcaaacactagagcaaaaaaaaaagtttttttaagtataactgatatgctaaagaaggatataaagtatgattataaaaatgctaaattaaactcacaaatagcagaaaaacagttgaaggcaaaatatgaataatgaacaaaggcaatggtagaaaactgtaacatatatagtagatattatttcagttacatccactttgactgtcaatggttcaatgtaccaattaaaatacatgtaaaatatcatgtatgaaatgagatgccagtccaggttcgatgcacgatactggatgcttggggctagtgcactgggacgacccagagggatggtatggggagggaggagggaggagggtt

SEQ ID NO: 52952 - DNA, 749 bp, Bovine  19866880762743
  misc_feature (1)..(1): n is a, c, g, or t
ntgtacagaagaacaaaaaccaccccagataatgaacttgtgtgggtaaaacctactgatgggcaagggtggagagtaagggcttacctgatgttaataataaacatataactggactgatttttcaataaaaatatgaaaacttccaataaaatgtagaagtatgaaattagtttcctcacctcacttaaaagttctgggaacttgaaacccagcaagtgagtgacctctgaaataccttcatgggattctcactgagacctcagctgagctgacaaacagaagcttgggaaatggatgtctgaagggctattatagaattcttccttgtggatggaaaattggataatccagggttctgagcctgaacttcaaatactcttgggaaaagtgaccagtctataaaagaatgtaactgtcaattcccatactgcagtggaaatatgcccactggggaaagttcagcaaggaccgattagcatcttacaatgaattgcagtttacaaatgcattctaaatttgtctatcacccagggatccttgtaacccaagacggtgaaacagcaggatgccttctgcttctgagacaacccgcggtcccttttcctgacttgggctcctgccaagcaggcttccataagcagcatttatgctaaagcaaatggctctgagtccaccagcccagctggggtttgtacagcttctctactttttaagtgatcaccacactcacctcatacacactcaca

SEQ ID NO: 52953 - DNA, 1325 bp, Bovine  19866880804799
  misc_feature (1)..(1): n is a, c, g, or t
ntatccagatacagaggtgaatgctggtgtttctactcttgtgaggagtgagcagtaggaatatgaacggttttctggatctaaggacaactcctcagcaaagaagagctaactgcaggctcagactctctgcctctcccaactgcttcaaaccttccccgggttggacctgaatctcaggctcacggcccatagaaaggcaggcatttttttgtgtgggcggctttgcggagacagccacacagcatgaaatgtgcaggcctgagccccgtgatgctccccgggaggctgtttgtctgttggcatgaaggagaaggagtccagggcaaccagctgcagctcccaccagggagggcgtgtttgagtgagaacaggaaacaaataagcccagagctcctctccatgacaaatccccaaacatagcctcccgttaggaggaaaatgccgaataataactctgacgctccccacggagcagtgtcacaggtcttaagcctctgcaactgacaacacgggatggtgacttcatgctaagcttggactttgtaacgttaagtaacaacacgatattgaaagtgacaagcagacgctgcctggtccccaccggatactaatcgctgtggtaggaggaagcgtccgggccataaaaactgtcatctgttggcgtgcgttcctgttgcaaccaagtcggccacattccttgtccacacatgtttcaaatcaagcaagggatataaatgaaaaaaaatctaactctgattctctttcagtttggcagagtgacagggacagtcagctgtccctgacagtccaataccagctcccttcagattggtgggcgttctgggtagaaggaggctgcagttggtgcgagtttactttgctgaaacctaggggaggagggtggagacgttgccgagacgtgctttcctctcccacctggtccacacctggctcctttctctggcccaggaatgtgatgtcccaggaactcccacaaacactctttccctctttcccctgcagggatcagcctcccgtccaccacgagtctcttgggccattgtacccccactagaatgagtgcatctgctcaggggatggttttcttgcatttcctctgggagatagcctttctttccacaccctaaagcagaaatgagctgtcttctcaagttggttcaacgtcaagaggaacgtgccacagcgaaaattacttcagagcaaaacctgtctgattctcctcccccccttttttttttcttcttcttttgccaaaatcttgttggctttcagtttttatgtttgtggatacaggtgttggg

SEQ ID NO: 52954 - DNA, 1261 bp, Bovine  19866880908248
  misc_feature (1)..(1): n is a, c, g, or t
ntgctgcagtacatggggtccaaagagtcagatacgacttagcgactgaacaacaacagtaacaagggtttctctagcactgaattaaagcattctgttattttagagggatgtaattgtgaataatggtagaatgtttcttagttatgaatccaagataccttttcaactatgcttgagtaatgctcatttttaaagtctgaactgattatttagacacagaaagacaatgtagcaaacatttgtttcaactaaatgtttaggctgcatgtcagaaaatattctctgttcactgctgggaatttattgacacttacctatttcttctaacagatgaactcggctatgaagttatatataaatagatgctgttggaagttttgaaactctaaataaggttcataaggacattattatttttctttcaagcttagagtatgaaacagcctcttttctatatagtgaatgcacgctttttcaaatgtttccattgaattaacaaaagtatgcattctagcataataaatacctccttcagaacttgatttcaaaagtatatctaagtaacttaaaatctgtatttattatcttgaatagagacacagaggattagcattcaaaaatttcacaatatgctctgctccatggtgtatccataacttacactgggccttttattagagatcatccttccaggcacagacacgaatcctgacttaaaatggagggtggatcgtcgtggtaagacactgcctgtgtagactccatcctgaacataagccagcagtgtggctctcttcatggattttcttaatcagttcatctccattcaggaatgtaaaaggactttaaagtagctttacttggactgcaaaactgggcaagaaaagattatagcaaatcttctcagcgattctattatatttcagttggtcttttttttttttaaatgggatgggtgaaggtaaagagaaaacttcaagtggcacttaacaagttttcaaatttgactgaatataagtttttgtcttagccccaaatgcacttagaacaagccaacaaatatgttttccttaatctttgaaaattataaaggcacacatgaaagcctatttgtcagagcctcatcactgcagttactgggggaggatagctaattttaataaagctcaactcttggtggagtcgtcttctggaatggtgtgtgaggagctcttcaaatcctctgccacaaagccaatgatcatagtggacaaaactg

SEQ ID NO: 52955 - DNA, 1175 bp, Bovine  19866881042220
  misc_feature (1)..(1): n is a, c, g, or t
natgggaaaaacagaaaaatatataacctttgttaaagattttaacactcatctctgaaatcttacataacaagtaacaaatattgtagaggctacagaagctgtaaatactattggcaaacaaactaacagaatctcttaccaagcaaggaccaagaggggacctcagtttgataaaaggttaccaggtaaaaatttaattgtcaacctaaaacaaatgcatttccctgagtgtaaaatttcctcattaatagaaagatgtctggaaaaggaaatggcaacccactccagtgtcttgcctggagaatcccatggacagaggagcctggcaggctatagtccatggtgtcacaaaagggtcggacatgacctagtgactaaacagtaacgacaatagaaagacatgctgcatttaacttactccctgtatttcccaaacattattagtttaccacggatgacagcctacagtctcagcaaaacagtgtggaaaccaggagtatgctgtagaacactccacctttgaaagaaaatgttagatgtgggctccttttccttagcaaacagaagagtaacacaaaaaattctcagggatcttacatattcctccaacggaaaaagcaacactgggaatactgtgttgatgctagctgatttactattctggttccaagctgagattacccagctgaggagataaacatccagttctggcagacagttgtaactgactctacggggagacctacttgagtttagaagaaagaagatgatcatgttggatttaaattgggcatattcccaacgtgttctgaaatgttggagatttctggaggactatatatttttgtccactttacttttgattttattataaactaggataaaagaaaaactcgtgtgaccccatggactgtagcctgtcaagctcctctatcccgtggggatttcccaggcaaaaataatggagtgggttgctatttccttctccagggaatcttcctgacccagggatcgaccccaggtctcctgcattggcaggtggattctttatggactgagccaccagggaagcccccaaaatcactactttcattccatttatggggtggctttgatagcagtttagtagagcgagttatgaaatcttcacattcccttgtctagcaagacca

SEQ ID NO: 52956 - DNA, 1252 bp, Bovine  19866881140843
  misc_feature (1)..(1): n is a, c, g, or t
ntcctgacttgtttggaatatctctcagcaattgattcccattctgctggcaagcccctgttaagctaaggcagaagcctagaagaggagggaaatgggtggagtcgattatgttttaacatgacttcataatactgcaatgtgagcttttaactcctgagtccacacattttttcatagggtgtgtagttgatttattaatgccattcaggtcaagcaatctcagtattttttttttaatttaaaatttaagaaaatattcttctagagaaatctggaatttgggatactcatttgtgatgtgagtgaagctaaagtgggcaatatcagtgagccttgtttaaggagagtgtcagtgctcacaagcgagtattaattttgcttctgtagtatcagtgcacatctaggtaaaagtcaagacatttatttttgctctaagatttaaaatgtaactgtaagaccaggaattgggttctgtttgtttgtttgtttaaatgctttggtggtctccaacagcgagcctacatttcttgttgggttactatgaaagtctgagcagaggtaatccatgctcccgtggtatctctgttcacatggaagacagtggagtgagtggtccccaccacacctcactggaaacaccagccacagcaagtgagagatggtctagatcagcgtgtctcagagtgtggtccccagaccagtagtatcagcatcacctataaactagctcatactcaaggttgactgaatcacaaagcccagggatatggctccgtggttttgtcctcaggagcctccaggtgattttcctctgggctgaaacctgaggatcactgatctcgtcacactcaccagtggaccgaaccattgcactgggagcagctacgttaaagatgaatgcagaaaatacaaatgtgaaacactgtcagcaaaacagaaatagtggaatctgcttttcatgtacaccaaggatgaaaactgactcctacactttcaatattatttcaaatccagaaagtaatttgttacagattgcgttctggattgtgcgtgtgcgttcagtcattgtcggactctctgtaaccccatagactatagcctgccagactcctctgtacatggaattctccaggcaagaacactggagtgggttgcaatttcctcctccaggggatctttccaaaccagggaccgaacccacatctcctgcattgcaggagtatgcattatcatccgagccatcgtgatt

SEQ ID NO: 52957 - DNA, 1061 bp, Bovine  19866881216847
  misc_feature (1)..(1): n is a, c, g, or t
ntgaaagttccagatttcaagttaatgtgacttcccgtctagtgctagacttatgcacagaagtggtcacttctggtttttaaaccagtcattgtaatcgctaggaaggttctaatctgttgggaccacatcgtcctcccaaacaagcttctacctgcagaaatacactgatgatctctctcgtatcagaatttcttgatcttaactcatgtataattctctaaatgtgtctggctaccaaaagttaaagatattattccatctctcggtgagataaaactgaggaagcgagcgttgagtctaccgcaagggcatacgtcgccttcacacatttcttaaccaaagcaatgtaggctacatgagctaaatggtgttgtacgtggcccacatttgcatatgcatattgtccagtgacactcataattgcatcaacaaagcgaggcagcatccgtcagccagggttcaagccatcacgaggcactcacactgcagcccccgtcaatctccaggtctgctttccctcagtgcgctgtatctgtattccatatgcaaattctccagtgaatgattttcctgttttgtaagctagactgcacctgtaacatgtgggattgagttaaaaatgacaagcagacaagcacaggcacattatcttgacaaactcagcctccgaaaattaccctgggcctgaattattaaaataacaaggaatatttcactcagctgtgcagaaatgatcctaattgtccactttagctaaatcctttcagtctctgagatcggtcaatttacattggtggcttgcaaattcctcaactcccattagaggagaggagctgcagcccaatgcaccctcatttattttaatgacctgccaagcagacatgaaaatgttaaagttggaaggctataacatgacaggatcctgacttgtcatagccacattataatctagttaaaatactttctttctccttttcatgtcttctcaggtaagtggggaactaattgtcaaattactaattttgttggcattaataccaatacgaagacaagaggag

SEQ ID NO: 52958 - DNA, 1024 bp, Bovine  19866881398966
  misc_feature (1)..(1): n is a, c, g, or t
nacacgtgtgtgctgtgccctgtctctgttttcctatggtgcttggcctgtacgttctttccatccatttgtctcgtaggattcgcacccatcagtggcatgtgcagtaaataccgcagctgtacgattaatgaggacacgggtcttggactggccttcaccatcgcccacgagtctggacacaagtgagtgcatctccctgggagggcggagcctggcatcccctctgggctggatgtttgtcttgaaatggtgatgggtaggtcacgtctgtaaggggacatcccagcaggaatgccatggaccataggagatgatctcgtaggtgcatctattccgtttgaatgcctcgctgtgctcgatctcaagcggtggtgatccacgcgtttgctctttgctccctctcttcatccgtccctgctcacacatgtgcaaacaaccgcacactgcagacctcgtctgtctgtccctgctcctctgtcctgtgtcttgagcttgtcctgtgggctgactgcattccctggttagctcctgcagaaggaccccacgtagctgaggatggtaaacgttggtaacttactgttcgaaagtttgcattctgatgtcactctgatcatttgtagagatgggttgtggttggtgtgcagggtttggggaatgcagacaggacaagagatacagtctggtaggagctggttggcttccacatcccccacgtgcccacagttgtcagttgtaaagtgaagcagcaacagggtgagtggggagcctggggctttggcggacggatggacagtgcaggaccaagcaattctcagtggtggtggcttgtcattagcgatatcttttcaagtgagaagcttacctttattcctgtaaaaatgaaacacttctgtcagttatttctagcagctgttattcttaaacaagctttcttactctaataatctataggtcgcctcactttgaggcaccatctacttaattttttttttttttactcaatggggctcacttgctgcaa

SEQ ID NO: 52959 - DNA, 1061 bp, Bovine  19866881411408
  misc_feature (1)..(1): n is a, c, g, or t
naattcagcttcatagcacaactgagctcaggctgtgagctcagaaaatcctacatcactccactaactgcaatctaacttaaaactccacatttttatgttaaaaaaaaattaccaagaattaaaaaaaaaaatcttgcccaaatttgaagaagtttttctcagtcctgaataagggatagtagtttattttctatgtttttgtcacgagaactctaatgatggagggtaatctgtctgagtttcaggtgtggagaagagccaagaattactaacctgggtatatattcttggtttaattgtgtttttcttgatttctttgaaattcactctcttttttcccctaaaaaaactatcttttcaacccctctggtttgtgtctgcaaatctcagtgacctgagaacataaagggaattgattcaaaagttttagaaaactttgcaaagaggctatcattccgctggattcttttgtaagatgcctgaacctgatcccactctctgaaaggagcgtgagggagcctctgacccacgtcattttcagggagtgatgttgaaagaacaaaccctaccgttctcaaattcgtcattgttttgcagagtgcttttgcctacagtttctcataagttctttgtatgtaaacttgcctcaccagccaaggaactgttcaatttccatgaggttaaatgatttccccaaagactattaaatcttaatccaatctcagtagaacaatctcgttctattgaattcatcacagaaatgtttccaagctttaattgtaggtacctatggagcaggatgattttctgttcattgagttgaaagaaaactctttcaatttcaaaatgttggaaaacatttaggctcttcattcttatcttatttagatatgtaatttgtgggtatactgtgatgctgaagctagtagtaaatcagattaataagttccaggccttaaactaatgtaaatattaaaagtctatttttaaaagcctatattgtatatttaggacatagtgtttgtaaaatacaaccttgagaaagggatgactgcatt

SEQ ID NO: 52960 - DNA, 1166 bp, Bovine  19866881418458
  misc_feature (1)..(1): n is a, c, g, or t
nctgaaaggctgctgactgaggctgcaaggttgactgtgcatgccagaggggtgagaattatgctgaaaacctaaaaaggttatgttttaaataagatacacaatggaagaaaacctagatacacgaaatgaaacctaccagatataattttaattaaaatgtatttgaaaatgccagaattaagttcgtcatcatagagaaaaaatttcagctcctccatattttagcttgagtgattattcaggcaaatattctgaacttacatttgaaagccattctgaataaattgtgttttgataagtatttgccttgaataccaagtttcctcccttaaatcaacacaaagtgaagacagcaagctcaaacaagaggagaaaactgattagcgtggacctccatccccgagccatcttgctgtttacgatatctttcctacctttatgtcagtgtagtgtgaagaggaaaagctgcctagctgaatggtggatatgtaaagagaatgtcaaattcagcttgtaagatcctcagaatttgggtagtctaatattaacgaaggtgccattaggattttaatctaaggaattttaaaacatatttcagagttagttttgcagtttctatatggttgcaagacttttacttgcaaatataaaatacatttaggagtatgtggtgagacaaggaaatgcattgtcatgattttatgtctcctgtgctagttaccaggcttcccaagtggcacaaaggtaaagatttcgcctgccaatgcaggagatgcaggaggcgtgggttccatccctgagtcgggaagttcccctggaggaggaaatgacaagccactccagtattcttgcctggaaaattccaaggacagaggagcttggtgggcttcagtccatggggtcgcagagagtcagacaggactgaagcaacttcgcacagaacgcacgtgctggttaccagcccctccaccagtaagggccaaggaagtcagtggtaacccggagaaggccaacggtccgctgacttaggtagatttgcccacaaagacatttgaacgtcattaggtagtatactactgaagttcctttgaagatcttaattgaaagtatcatttcaaaaaaagttaaaaaatgctttttctgtgggagagtgatagatcaga

SEQ ID NO: 52961 - DNA, 1635 bp, Bovine  19866881475797
  misc_feature (1)..(1): n is a, c, g, or t
nggaaaatatctatttagagatatattttaatgtggaggaaatgtatacaaatccagataggtatacggtatgggtaaagcagccaagagatcatttattatgtgaaatgatgcccctacctcctgcatttagctgatttgttttcccacaaagtgtcatagtttccaaattccttgctagaaaatatttacattctaacctaatataattaggaactcattgagctgaaacattacataggttggttttcattataatttctgcataatattgcacacattttctaggtagtaattagatacattaaggatgaatgattccttgggggcttattctagagatttttcttccgaatttgtgtcaggggtcacccagggtagaaaacaataactgtcactgaggagaatgcagataaaagcttctgaaatgaatcaatggccacggaccaggaattggacatttaaattatccaagccatcagacttccgacccttgagctacacctgaagcagaacacagatggacaggaagttacctgcatgcgttactggtgctttgagaaaagaaaatgagcgtatagctttcaaataaatgtaagtttggacaaaacaactatttaattgatgccacaaataaagtgttatcaacctaattaacaaaggattaacaaaggttaacgaaggattgcttatttttgaccaaggtgaattttatttagctgtcttaatcttttagaggggctcccctggtggctcagacagtaaagcatctgtttgcaatgctggagacctgggttagaggtttggttcctccttcacataatggggcattattctttataatctttggacttatccaagctaaaaatgtggagaaggaaatgacaacccactccaatattcttgcctggagaatcccatggacagaggaggctggtgagctacagtccatggggtcacaaagtgtcggacacgactgagcgactaaacaacaacaacacagctaaaaatgtccgatatttgtaaaacgtgtgttgttttgtaatttttatatcgaaagtctatttaaaatatctcagagtatctttaattttttactttttacttttctttttagaaatatgtacgttttgaattcactctatggaattaatgttcttggatcaatttcttttaaaccgagttttctttggtacacgagtcctcattttcctccacaatgtaagtgctatttggaacaataatgtaaaataccatactaaactgatttttctagatttagcaaatgcagatataggacactcaggtaagtctgaatttcaaataaacaaccaccagtttttgataccagcatgttccaaatactgcacagagcacgcctatactaaaaataaatgtattccagcggattcattttgatatttggcaaaactaatacaattatgtaaagtttaaaaataaaataaaataaaaaaaaaacgcacattagagtatgaatttcacacctcagtttccttctttggagaagtaagcgaatgaagcatcttgaacaggttgagtgagaggtactgaattcatttttcagtgcacacactgggctgaatgggaggtgattcacactgagacctgcaagat

SEQ ID NO: 52962 - DNA, 2219 bp, Bovine  19866881590876
  misc_feature (1)..(1): n is a, c, g, or t
nacacagagagaaacatcacttggaaacgtggagaaaaactgaccccgtcccattcagtttgctgtgtctcttttcacacggagaaaggatgtggctgtctctgctctcctaccccacgcttacccttcagaataaacccgcacggggtgccccacctctgcccagcgtagacccaggatataatgagatcccatctactggacgcgtggagtcgccatcacggccatcgccaggctggcctctgcccgactgcccaggactaaatgcgccatcctgggaggtgctccctttactctgcatggcgctgacccttggatgggacccaacaaggctgccattcccacaggatggctttgtcttccagctggaatatcacccctgagcttcgtcatcaccctacaaacttgcctgatgccatcgccgcgacagccaccgaactcattattacattctggggactactttacagcgatttccagcctgtagaaaggggtacttagtagagttccacaccgtgttttctggcttggatgtatcttaactccattttcaatacacaaacacctcattagcagaactcctgcaagaacaagggcaactctacctatgacccgattagtaaaaggtgttcttatttaagagttataacaagttactatgaatttttttctttacttaaaaagattaaaatcgcatagacttgttataaagaaagcaaatctgaagaactacatgaagcaacgtattagctttgtcctcagaacctccccccatcctgtttctcagaggataccaatggtaatactgtgtttcattctccgaattggaactgttgatgaagattccagaaaccttgtcaaaactgcacttaggacaatgtcaacagtccagaatgttcctccacccaagctgcataaagtctcaaggtaaagaaacaatggccattttcttgagcaaagtatttctcatattcccaacacaaactcatcatcatctctacatcttttagatacacagtagggaaaagtagaaatacgtggactctatttcacttgatgacacacacaaatctttcacccaacgattgatttttcttcacagatctctttttgatgtagaaaaactggaaaatatttccatgcaaagcaccagttaatttgtattaaagtgaatgaaattaaagatccatataagaacatcttgtaaaatggtataaagcacaatataaaaaatacaatataaagtaaaaatacattttccacaaataaattatgtccccaaagattaagtgtattcaaaatgcaaagaacagctaaatagagtgttttatggaagctgtaggagggttttaagaatgttttttagtgggcaaggaatcctattttgcagagctataaaagttgctttctttttttaccctcagaaaagttctaaaaaatctttccagattcttgaacctgctgagagtctgcaaaaatccaaacaaacattaaaattgccctcacgttacatccatttttaagagtttatgataaaacttactcaagagacaaataatgcctatcctatgatttatgtaggtaaataaatagcttaaaatacaaacaacaagatatattagaaagagaattgggatagttctgattcctgtagctattgcagaaaataacatttgccatattttacacattaaaaatgttccctattattttaggaaagaaaaacaactcatctgagctttctttatttaaacattaccaacagaaagagggcatctgggcaagtctgtagaggcactgaaagaaatacgaagacagaattaaaaatgagaccactgagagccaagggacaaacacaggtaaaaccaagcatcaaattcaggttaagggagtcttcatttattattgggatttcttgtagacagtatttcagaatactttatatagattataagattaattgctgtcatatttagagagttaaaaggcaagaacatattgatcacttcattttatagatgagaatactgaaacaaaaaaagaagagcccttctgttcatcgcatgatgctattaagagagaaaaagtaaagccacagagtggcagaaggttttttgaagtctatatatctgataaatagctcacataacttcttaattcagtaagaaaaggacagactatctgattccaaatggataagaaaaagtagataatcataa

SEQ ID NO: 52963 - DNA, 844 bp, Bovine  19866881834949
  misc_feature (1)..(1): n is a, c, g, or t
ntaaaaatggactctgtttatgatgagcttccctaatggctcagatggtaaagaacccttttgcaatgcaggagatccggtttccatccctgggctgggaagatcccctggagaaggaaatggtaaccaattccagtattcctgcctgaagaattccatggacagaggagcctggcaggctacagtccatgaggttgtaaagagtcagttacagtcatggttgaatatttcacaccactctacagagggcagtttatcacaccaaatttttggatgagacacttgagactcatggagatgggatgattcatctccagtcactcagttagcaagtgttagagtcacctttcatgtccttgctccaaagcttatatgctctccctttatgctgttcagactctcagaagcacataagatcatttcttgactggcttcttgagttgccatagaggtttgttctttcaaagctggcaaagagctttttggaatttgagtgatgagacaagcctcctccagagcggttggccatcagtctaagaggatggccttgtcctgcagagccctgacaagaaggccaacaggtattgtttacaatgtcttctcaagtggaaccagtctgctagttattaagtgtctggaagcatttcccagtttttaagtagccagaacatgctgctgatacagtcagagccagcatgacgctcactgctcataaatgacttacttagaaagaggcaggactgttgtgacttggctgtctttccattcttcagagataaggtagaagttcctagtaacgaaacatgaaaacaaacatattacagttctttaacatatgttacaa

SEQ ID NO: 52964 - DNA, 952 bp, Bovine  19866880528134
  misc_feature (1)..(1): n is a, c, g, or t
nactttatgttcttggttaagtatgcagattcacttaataatttagtggagccctgaggatttcagagaccccagcccctaccccttagtctgtggcgtgaggttgccaccttttgggtcagcaagcacacaactcctggagaccctgacactatgggaggatcccgcgctgctgacaagcctcttggttttgcagatgtccccctggggcgcaccctccttggcctggcccccgaccaccaggtcaggctgctgccggtcgccttctacaggtaaccctcagggcctggaggtcaggggagacacagcaggggtccttcaagacggagaggctgcgcccctgctgcctgccaccagccccagtcagacgtgtgaggtcgtcacctgacacctgtgtctgccttcagcctccttccctactttgacgaggatgccctcctcacagaagatgccttcctgcacgttgctctcaacatgtacctgaagctcgttggcctctttgtggccggggagaccggtgcaatctggactgtggcccatgatggggagctcccaactcaggcaggtgcagggccaggccccatctccagacagaccagggtgatgctcctggcacagttcacagctgtgggcaccctgaccttggcactgcccatcttctttctagggtgaccccgtaagcctgataacaaatgcccgtctgtttctgctgcaattgatacctcggtgcccagaaaggagcttcttgcacgtggcagaggtaacccccaggtgctcaccgcggtgtctgtgtttaggtccatgtcaccgtgtgacgtgaggatgctggacgccttggggaaagctggcatccagcatccaggcccgggagggacgggggcagaacgggcccagcatgtgggctttgttgcagctgctggctgagagtggagattgtgacccggaagtgagt

SEQ ID NO: 52965 - DNA, 872 bp, Bovine  19866880706253
  misc_feature (1)..(1): n is a, c, g, or t
nctgtatttagagagcgtccccgcctatatgcaggcaggtgctggctgctggccggccttacccacgaggtcgcgtgccgtctcctggtcctcctgaaagcggcatgcgtcgctgagctgcaggagcgagtccacgtggtaggggcttgactggagcaggacctatgggggaggggggatgcgtgctgacaagatgacacccaggcaggccccgggcctccggacgcccccaggaccacaccagggtaccaacgcaccacaatattattgggctccatggactcgacggcggccaggaacttgtgctgcgtctgttggtactcctcgctgtgctcaaaggcgaagaccgagcggcctttcctggattccaacagccgcatcgacagacctggggtgagggttgcccacatcaggatgcccagagccgactgcccgtggctcaggccacacctctgacgccccttctaccctttctcccccgagaaaggtggacaacagggggacatgcagagcccgccccaaccccccaacctggtcagccctggacatggtttgcttaaagtcagaatccagatgccacccccaaggcgacagggactgctaactcatgacaccctctgctcctatgctgacgctgggtgccaggtccagggtctgagaagcctgacaacttcatctctttcggcaccttcgtgagacccgtcagggtcgggggatgcccttagccacagtctctgacaaagtctactccagcccaacaggaccccgtggcactgtgtcctctgcctgcactcaggggccgctgttgcgagcgtgggagggaagggccagggggacgaggtgtccaccaggccctcactgggcacaagggg

SEQ ID NO: 52966 - DNA, 1279 bp, Bovine  19866880957561
  misc_feature (1)..(1): n is a, c, g, or t
nagggccggcataggacactgcagcactcagggctcacccagtaatagcagcatgtttgtcaagctttcgtggaagggacagccatagctgaggttcatgctccctcatcccaggctgtctctggctctcagggcagggtggtggccggtgggtgccctgtggaggccaggctggaggagaggaactgccagatgcaaagcaggggcttctgttcgcaggtaccgagcccctgaactgctgctgggaaccaccacgcagaccaccagcatcgacatgtggtgagaggtggacgctgctcccaggcctctcagacagtgggggtggtcttgtgggacctggggcggggggggtggacagctctggggcttggggtctccccagctcccaagaagatgggcctatgcctggggtcctgagaggcagagggagacagccccatcactgaggacctgccctcgtggccataagaggcctgctgaggccaggtcacgtggctcacctggagaccccagtggtcatcccatcatgacctcctcccagctctgcccccagcctccgccccagcagctggggcactggtccaggcggagccagggagctgagaggagaccccgcactcctctgcagggcggtgggctgcatcctggctgagctgctggcccataagccccttctccccggcacttccgagatccaccaggtggacctgatcgtgcagctgctggggacccccagtgagaacatctggccggtgagtgccagccccgccctcctccctcctgcccctgctggccattggcctttaccggcccctccccacagggcttctctcagctgccgctggccagccagtacagcctgcggaagcagccctacaacaacctgaagcataagttcccgtggctctcagaggctggcctgcgcctgatgaacctcctcttcatgtacgaccctaagaaaaggtgctgagagagccccacacgtgcatgagtcaggcccgattttgtggggttctgttggtttacccaactttctcttgtgtggaggggaaccagggggcgctctgcggggcagctgtgtgggagacaagcctgactgggcctgggccctgtgaacagtgagctctcctctccagggcgacggccggtgactgcctggagagctcctacttcaaggagaagcccctgcgtgagtcttccccgctggcacctggccgggggcccttgtgtagggtaggggttaaggcaggtgggtggtggggcccaggcgggtaggggc

SEQ ID NO: 52967 - DNA, 2234 bp, Bovine  19866881023849
  misc_feature (1)..(1): n is a, c, g, or t
ntcagcatggggactggaggctagccctggaaatccaaagaaactacctcagtgtttaaagaaaaatgagcgctgtgtatgcaaaaggtcagaaacatcactgaccagtgttgtcttttcttccagggtgtctggtaggaagagtgaaagcaaagaagccaagaagtcagaagaaccaaaaatccgaaagaaacctgggcctaagccgggctggaagggcaagccacggtgtgagaggtgaggggctggagcgggggttacacagcctgtgggggccgtggctccacgtgtgctctgcattgcagggaggaactgcccaccatctacaagtgtccgcaccagggctgcacggccgtgtaccgcggggccgacggcatgaaggtgagggggctcccaggagagcgcacccccagctctgctgacagggcctgcctgggtctgtgccttcgctgggaggaggcacgtgcgctgctctggggtgttggccatgccaggggactcacgcccctggtccctcccacagaagcatgtcaaggagcaccacgaggaggtccgggagaggccctgcccacaccccggctgcaacaaggtgttcatgattgaccgctacctgcagcgccacgtcaagctcatccacacaggtgtgtcccctcccctgcagatggggctcccgggaactgacactgaagaaaccctggtgctgtcctgtgagtttattgtggtctgttttacatcattgtgtgtgtcagttgcttagtcgtgtctgactctttgcgaccccatggactatagcccaccaggctcctttgtccatgggattctccaggcaagagtactggagcgggttgccatttccttctccatttacatcatcactggaagaaaatggtatatgcttttcagattataaaagtaacccaaagcacagggaaggtggcgcccgtgatcaccgccttcagcgtgtgaggttgctaccgctcctctctgaacacgcgtccacggccttggactcgtgtgtgccaatgctcgtcactgctgttctgcccagaaggcagctctcccgacctgcagcccccatgtccagatagtccatcctaaacgatatctttgctctgttgatctttgtacaaacgactgacttcctcactctgatttgcccacttaatggctggctcacagtcccttggtttcacagcatttcatgctgtgagtgttcttgtctgttagtccagacacagtaattccctggtgtcgggtcaagctgttgtaactcagtctgaccacagtcgtgaccacgagcagtttttattttcagcacagaacagtctagacctcacagtttcaggacgattgctcctagtcacggaggagcctgcctgtgcggctgcgtcacatgttggtaggcgtgcagtgacgtaggagagaagcatgtggtcttgctccaggtgcatggctgggggtgtgacgttcaagttttgttgaaaagctcttgtaagactgactgccacagtgggtacccctgtggtggggacagtccttagagtaggagtagctgtaatcagtcatctgtgaaattgcactgattgggcttcctcttaagaattggtgctccagaaaataggtttagggaaacatgctacagccaagtgacgtgggtcagagctgtgtcacctgtgagtcaggtgcttgggcaccaaggggacagtgtcagggcctgtggtcactccctatctggtccccagaggtgcggaactacatctgcgatgagtgtggacagaccttcaagcagcggaagcacctcctggtccaccagatgcgccactcgggagccaagcctctgcagtaagtggggggtggtggccctcccactggcagcaccctggccctggctcactgcccccatcccataggtgtgaggtctgcgggttccagtgccggcagcgggcatccctgaagtaccacatgaccaagcacaaggctgagacagagctggactttgcctgtgaccagtgtggccggcggtttgagaaggcacacaacctcaacgtgcacatgtctatggtgcacccgctgacgcaggccccggaggccccgccccggcccgcagcagggcaggtggtgaaggctgagcccacctgagggcctgcctgccccaagctcgggtggtgactgaggttccggcctgtgcgcagagtggtgccctgatgtacccccactatgcgtgctggtggtga

SEQ ID NO: 52968 - DNA, 1106 bp, Bovine  19866881168123
  misc_feature (1)..(1): n is a, c, g, or t
ntgctgagttgtcctgtctagaactttacagtgcaatgctcactggaggcagtaggaacagacactttgtcctggtcctggtcttgggagaacagttttcagtctgtcatcattgagtacaatgtgaactgtgggttcttcataaatgccctttgccaggttgaggaaggtcccttttactcctagttagtttatttttttagtcatgagatggtgttgaacttaatgttttatctgtgtgggttttggttttctattttactcacgtttattgcattaattgatttttgcatattaagccaacgttgcattcttaggataaatcccagttggttgtgtaatcattttgatgtgtcactggagctggttgctggctttgtgctattgctggggcactgtgcgtgcgctgtggtccctgggtactccctggccctgtgactacaggccatactggaggcagaagaagaggtagcccagcatagataggagacactaaggaggctttcagtgtgttttcatttcagttcgaggagtcatcatcactcagagaattctgatttggttctcagtggctgcaaaggaaatcgggacattttttccagattgcaggtgagttagaaaatgcaaaactcagtgtgtccactgcatcgaagccatgtgctatcatgatatttattgagtatccagtgagtccagatgcctgttctaagcagaatgaaagcctgagtcacagacatggtcactcagaccagagaccatgtgttctgtgaactcatgtcaccatgaacgtcaaaggaacacaaaaatgaaagatgaaatacaggaagcatctccaggctttaggacatttaagatttgaaaacaggaagtaaaaatatggacttcagtagtaacttggttgctactcccattctctgctctttaactctgggtgctgcgctaggaggtcagactcttgagaactgatataaataaccctccacttggctgagtattgagagtttggaatacagtcccttctgtttcctgggtcacttgtcactgaggcaggaacactgagaagggtgcagaagcccttcaggttctcgtcctgcagtgaaaagtgc

SEQ ID NO: 52969 - DNA, 880 bp, Bovine  19866881217566
  misc_feature (1)..(1): n is a, c, g, or t
ncaagcttatcctgttccccaggaagccctcggcccccaagaagggagacagctctgtgagtaaccggctcccacagcgcccagcgggatgagggtgtggaggtctcactgcgggtctagctgggctgcaaggacaaagtacttgtctgcagcttcctatctaaagcagggttgccacgcagaggagtagagagaagataaataatgtgggagaaagcctctgaggagcctcaaactaattgcctgaaatgtcgggattcactaagggcaggagttggagccagctttgttaaaattgaaagtgtactgcgtgttagtaatctttgtatgagatcagcagtgcccatctatatgggttgctggcagtcattctccctgcatccctggttgatgcgtgggtgtctcatctgaccctgcctacctttactcgatatcgggcaggaatccacaggccctcaggggtgacaagtttggggctccttgggagatgagctaaactcacctgactcccttctcattgacaaacaggctgaagagcttaaactggccactcagctgaccggacctgttatgcccatacggaacgtaagtgggcatgttgggagaaccatggatctggggttggattggagggattctgtgtggcagccggggcccatgttgagatttactggtttgtgaaagacctacctgccctgaggagagtcagctgcatccagacagatgggctccttgaggaaagcttagtcgccctcagttgtttccctctatgtagagtcctttccactccctgatgtttgggaagcccaggctggaggcagctctccatgcatgtttggtgatcctatagcctgaccagcaattgacaaggcccttgagg

SEQ ID NO: 52970 - DNA, 1784 bp, Bovine  19866881247351
  misc_feature (1)..(1): n is a, c, g, or t
ntgcagcttccctggtggctcagatggtaaagcgtctgcctgcaatgtgggagacctggattcaatccctgggttgggaagatcccctggagaaggaaatggcaacccactccagtactcttgcctggaaaatcccatggatggaggagcctggcaggctgcagtccatggggtcgcaaagagtcggacacaaccgagcgactccactttctttctgaacacatacctgatgtgtcccgtcctattgcagtgtctgtgcgccctcccagaaacccagggcaggggggccgcctgcgtgccgtctccacctggagcagggcagggcagggcctctccctctcctaaccccatgccagttgccctaggactgctggcagcaggacttaagaggtgggctcatggagatcagggtggagagcaagggctcctgctgcagcagacctggcccctccatcctggccctcctgacgccccctctggcccagcagcatctgttcactcaggcccgcttaagggctgtgacccagtcccacatcccaactggggactcccaagccaccgcctctcttgtctccacccacaaaggaaaaaaggaagttgtgcctgcttctccattttgttttgcactttcctggctgatggtgtggtttcattctacatcaaaggcccaagctgggcatctactaacgaggcgtttgggtgttcctgggcccagggtgacacagtgataaccagcctcctctgccagcacccacagagcaagaacacaaaaccctgtgggaggtgggctgcctcaacaagggatcagggccagaggtagacccggagcaactgcagggccaggtggccatgtcgccaaggccctgggcacagagggcagaaggcgagtgggggaccagaggcaaccagagcagatacaggtgggtggacggatcacattcacagtgctgcactaggccaggtccctgtgctgaactgggaaagtcctgggctacccagaaaccacccttcactgggctggtgaggtcaggccattagagaagcagagcgtgtgctgaccaaggcagacaggggaaagctactgtctggtccccgctgcccccggggcaggctcagatctccaggtcacccactggacacctcccaaaccccggggagctcatggcaccaccatccccttacttctttcctgggtacggctcaaaggactcatccgaggactgggtgttctgcttcttgtcattttcatcttcactcaggaaatctctaggaaagaagagaaccttcagcaatgctctggagcaggtgacggaggcagtgaaacttcctgtctaacaccatgtggatccccacactacatgttttacttctcagaaggcctaaaatccccaatactctaataccatctcctaaaagaaagggaaaaccagggtcacaggctgaggatccctggtaagccatgcctctcatcacaccaggaccccaaactcagaaagtcagcctacggggccccaggcagaggggaagaccctcacaagaggtagcttcgcagaaactgggcttttagaatgtcacctcactcccgtaactagaaacacctgcccaaatgacaggccagctgtcagtgatttcaaagggtaacaaagacctgaaaaagatctgcatgtctgtaatctctaccctaaaatgtgagtcacgacataagctctgctagtctgcagacagagcctggctggcatgcctcagctgcccctataggctgccaccctccccacagagaaagg

SEQ ID NO: 52971 - DNA, 1063 bp, Bovine  19866881336065
  misc_feature (1)..(1): n is a, c, g, or t
ntggctgttggagaggtgggagaagctgatgtggaccagctgctgcagtcccatgaggagggtctctcaaatgaggagctgatgcagctggagcaggagcccgcaggagaggaagaggagggtgaagaggctgcccctgccctgcgccaactaaccacacgggagctgtcagcagccttctcacattttgaggctggcttgcaggtccttaccagtaacagccctgatgctgcgtggaaactgcaagtttcaagagaaatcaatgatgcaataagctgctacagggagctgtacagtgagaaagagcggtgctccaaacagctctcctaggtgacctcagtgcacaacacactccacggcaggaagaccagacacaacagggcaacctcctgggtgacgcctggccaagtcttggcctccagatgtttaacatccttggaaaccctgcttctggtacattcattttgacactaaagaacatcacatcttgttactgaaattgtgcttaaatatgtgctttaagaagattgaaagaaaaatccaggaaaagttatttaaaacacacgatgagaccagccctgctagacattgaaacacactataaaacctctgattgaatcaaggaggtactcaaacgtgtagaatacaatagaaagtccagaagtagatacagataggttgtttttttttttaatagtgcaggacagctagataaaatttggcaaaagctaattagttcacacctcacagcatacacagaaataaacagatgagggatttgaatctaaaagctgaaacaatacaagtgctacacaacccacggatatatgcctcttccccatgggtggtcagaaagatcttctgtaactcaaagtccaggtgaaatttaagattaatcaatttgatgatatgaaaatgtaataaaacttttccaagaggataaaagaggacaaacagagtcaaaggcaaatgatacactggaagaaaatttctcacagataatgagttaatatctctgatatgtgaagaactcataaatatgagaagaaaataccaaaaaccc

SEQ ID NO: 52972 - DNA, 853 bp, Bovine  19866881821188
  misc_feature (1)..(1): n is a, c, g, or t
nctgcccccacattaggccctgccagccccctccctacttcccttcctgctgcccaggaggctcccttggctcacctgggaggaggtgggaggtggcatgcgtttctccctcttactttagcatcttcctggtgatgggctactgtgagcaagacctggccagccttctggagaacatgccaacacccttctctgaggcccaggttggaggcgtgggctggggtggccgggagtgggggctctggtggggggcttcccaagccgttgttaggcacattgtgccaaaagcagacctcctggccttctgcaggtcaagtgcatcgtgctgcaggtgctccggggcctccagtacctgcaccggaatttcatcatccacaggtgggcggggcttgtggcttgggggcggggtgaccactagactgactcagcaccaacacgcaggggagtagagcaacctcaaggcagtggagctcctgtaactggtcccaggggagggcgggacagcatagtacctgttttcccctctgccaggcagatggccggggagggacctggactccctgtgcagggtggctcgtgcggccctgggggggaccaggggcaggactctacctctcaggaagtcactgagagctctctgctgtttccagctactgaatggccttgcattacctgtgctcctcctcctaaaaagtacaaacaggacgagatgtgtgggggaagcgttctgagtgttgctgcagcggtaacaaccttgttcctgcatgcgagtttctgggaaccactggtgttatctttctgtcatagggatcgaaggtctctaactgctcaggacggataagggctgcgtaag

SEQ ID NO: 52973 - DNA, 2822 bp, Bovine  19866880153164
  misc_feature (1)..(1): n is a, c, g, or t
ngtgatctgtatggatgtgagagttggactgtgaagaaggctgagcaccgaagaattgatgcttttgaactgtggtgttggagaagactcttgagagtcccttggactgcaaggagatccaactagtccattctgaaggagatcagccctgggatttctttggaaggaatgatgctaaagctgaaactccagtactttggccacctcatgtgaagagttgactcattggaaaagactctgatgctgggagggattgggggcaggaggagaaggggacgacagaagatgagatggctggatggcgtcactgactcgatggacgtgagtctgggtgaactgcgggagttggggatggacagggaggcctggcgtgctgcgattcatggggtcgcaaagagttggacactactgaactgaactgaactaagtaagtaacccagctgccagtgattaaatcttaactactaaatagttatttaatggattgttacttgctcatttgtccatatttttctctcagaaattatgtctgacatctgtatagttattttggtaagttctcctgaagcatttaagcatgaaagaatcagcctccaactttctcaagaatttatgtccatggtatacactttccagtgtatttatggacaggtactttgctgacaaaggtccatatagtcaaagctatgatttttccagtagtcttgtatggatgtgagagttggaccataaagaaagctgagtggcaccgaagaattgatgcttttcaaatgtggtgttggagaagactgttgagagtcccttggactgtaagcagatcaaaccagtcagtcctaaaggaaatcagtcctgaatattcattgaaaggactgatgctgaagcttcaatactttggccacttgatgctaagagccagctcattggaaaagaccctgatgctgggaaagattgaagcctggaggaaaacagggacgacagaggatgagaaggttggatggcatcaccgactcgatggatatgtgtttgagtaagctccgggagttggtggtggacagggaagcctggtgtgctgcagtccacagggtcgcaaagagtcggacacaactgagtgactgaactggactgaatctgaattcttttagtctaactctcagagaaaaaggtagctggaatgggaggcagtcattaactgtaaattgaagtgaaggatgttgaagaagacaaatgtaaatttttaaactcattggaacattttacatggcctaaatttttaaggagctgtgacttagatttcagcttgctggagctgaggtaacagatcagaaatcactactgcgtatataaaattgtatttcccaaaatatggcagtttcagttcagatccattattttctacaggtagtgctactaggtaaagtaaggattgatgactgttttcctgcaagcaaaactaaaatgagcaaggaagtaattacatggattgtgctttgtaccattaacagactagtgcaactgtaaccataaaaagttgagactcttcagaagtacagataagtctagggaatgcagaggcaataaaatcattagttttatataaagagtaagcagagccttaaaagcttatactttccactactctatactcagtccctagaatagttgccaacatctaggagttgatcaacaattttttgtttctgagtgaagaagtaaagacccagaatgttaatattaggtaaaacagtgttggagagatggttttaggactcagactaaatgtgtgaataggtgcatagttgagagagacttatagtagataaatgcataataaaccatcaggaagtcaaagtgatgcctcaccttctgaatattaacttttagaggagacagctacttaattctcagaatctctcgtgttgccattgtgagaagcagcgcataatagagtgaagtctgttgtactgacgtcctgtagcatttctggtaggttaagcattttaagaagaaactgcaggtcttgtgcatataaacactagtcctggaacataaaaggagaagaggggacaaagtacaagtaaacccatatacttatgtctgcagccaaaaggtttcttgggaggaaaaaaatacataaccaaaggtttagaatcctgattcatctttctctattatgggtatgtttgtgagaagtcctctgtttcgtataaggagcagaaattcttaactcattttaaatttgagagtaattttctgatgttaatttaatttgttatagtttataaagaatgtcattgtaagttaacctgcagtgttgggacccatgtttccttatcagtcaaaagaaaaactgaacaatctttcctagtttacaggaatctgaatgtaactttacttttgctctacccttaactgtatgacttatgttgcagaaattggaatgggattaacaggatttggagtgttcttcttattctttggaatgatcctcttttttgacaaagcactactggctattggaaatgtgagtgtttcaacatatattttaactacattcataatgaaattttaacttaatacaaatgaattattgccagctgtaaaaccaggggaagataattcactgttactcatatgaagattcctgttacattttctgtttccatcaggaatgaaacttgcaagcttactgtttaaataaaaggtaaacacttaatgaggttttctaatcccataactgcttggttaaatattttgatatgtgatttacaatagagtaaaatcaagactacctctgagtagttcaaagtagagacttcaaagcc

SEQ ID NO: 52974 - DNA, 1658 bp, Bovine  19866880476988
  misc_feature (1)..(1): n is a, c, g, or t
ntttgtttctcatcgcagatgacgcagtagcactagatcgtgcactgctctacgtttgtgttccgtgcctcaaaaactaacagtgcctcctcaaatcaagaaaacgcccttgccccggtcctgtgttgtgaatcgtttccgttcctcagttacttgttcctcttgtctctgtccttcctctgggcctccagttctatcaggtctttactagtaagctccttgtgttgcacagcaaggagttcagtattataagaacaagtgacttctaccatctttaaacctcactccactctcttaattattttcacttttgtttccatcgttattgcttggtgcttcttagcagtacaagctacatcatcgctgctcttacgcttgcttccagacatcctgtgctcgaaataaacatactgcactattgcactctgttctgtactgtattgtattgggcttcccttgtggctcagctggtaaagaatccgcccgcaatgcgggagacacgggttcgattcctgggttgggaagatctcctggagaagggaaaggctacccactccaggattctggcctggagaattccatggagttgccaagagccggacacaattgagagactttcactttcacagtaaagtgcacagaagcacaaccacttgtagatgatacacacacctgacagtgtatgccagacacatgagctaacttacatgatcgggtatgtgaacgcatactgacatctttgaaagttcaaaacttgaaggtttgcgtgtaggggacttactgtgtatgctcacttggtttacattttacatcctagctcttatttgaatgcttaaagcattcctgagcattgatctttagcttcatagcaattgacatgattacttaacttcatttaaaactatctagactgaaaaataatactatcgactgagcataaagctggcagttttgatctcaattatccagtcaattgttttgctatttttttctttctttctgtgcatatgctcctgtgctttcggtgttttttacatcctgacagctttttaagaagatggaatggggcatgttttattgcttacaaaatgtcacttaaaatcttggttggtgatcaaaatagaatataaattttgattcttattaaaacctgggaatgtaagaattcaaaaaggcttgactttattctgtttgtgaaataagctttattttaaacaaagctttgtttattggtaagtatctaaatatttcaattgggcattctgaagcaaattttatttgtcatatttagcgtctgttaaaatagtgtgtgtttgtaaaaagcatgattttaggacagctgagttattgcgaatttatttaataaatttagaaagaagtaccatttttaggaaaccacccttctatgttttgtcacacactataatcctgagagagatcataaaggatatgagaataaagggagtaaacaacgtctctcttgatctaactgggaaaagaaaatatttaagattttgtgttcaagagtttccttccttacataaggtaatacattattttttggccaggtgttccaaaattgtagctgcattcaaacaccaggaaattatcttgcagttcttgggctgtgtgacaaaggaaaagactgttccatgatg

SEQ ID NO: 52975 - DNA, 4785 bp, Bovine  19866880543047
  misc_feature (1)..(1): n is a, c, g, or t
nccaattaatagaaaagtacccttttattgagaagtaagacaagtgtatttacaatattcaattgttagatcatataatctgtgagacttttaaaagcagcagtattccaggaattacaatgtataaggggaaaagaaaaacattccaaataggtttctgttacagaaaatagatttgaacaatgccagaaacacttaaggctaagtagtattagaccttttcttccacctttatagcaataactgatgctttttttttttgggtcacagacagaagactaattttggaaaggaagaaacaatatgatgtacagtgttttctgtcagaaaacaagttatgtttaaaagtagagcctcatcaatggttctaagaaacatacaatgctgccaagcagtcccaaactcacatttgataaaactgaaaactgctccaagcctctcattcttattgggagattatcacatcttttatacacttctgtctaatcatgttttctgaaacaagattgttgaaaaagagatctctgctacagtgcaaagaacattttgatagaaattcatgtctacaagggagttaaataatacagatgctccttacattaacagatactgttcttgctctaaaaaaaggtagacttatctagccactgtaaataatatgggtcagtcaaaaatatgtataacagagtcccacagggcaacttatataagtcagtcccccaagtatgtaggtatttgacactctccaagtaaggatagtacttttttgaagaacattagacaacaaagggtttcttaccattccatgaactattgaggtaggagtctcattttgtcagtatcatctatgttcacagattatgtcataaatcaaatgccagtaccgaaaagacagtaatccacaaggctgaaccattaagactatctaccaagtcgttctttctttagatgagcaaggatgggacttccctgtgcatcaagagacttaactactagtaacataggcaataatgtatcttgtagacatgtttgtaaataaaaaccacaaatttcaattatgattttatgtattaaaaagctttgcaactgttaaaaaaaaatgagcaaatagtacaatcattagtagtaaaacaaatagtactatgactcttgaaatggcttcctaccgctacaaaagggtgcctccctggaaaactactactgaggaaacacccccagcttcctacctactgcccgtcgagcagcaacaggggagaaaacaacacatcatttttgtagtgtcatgtttttcagaaccatagccagtttaattatggtaaagtaacttttgcgtgtgaactcagatattctctccacgaattcaagatgaagagcgagtgtatgaaacacacattatgcatactgatttttatattaggaaaaagctgaaaataagggaaaaattggcttctgtgaacagccctttaaaaaacagctgtaaatttaaccttataacgtgttacatcttaaagtaaaaattacccagtagttattccaatgtatgaaaagcaaaataataaaccactgctaaaatttaaaaaaaataaaaggaaaaactggatcatgacatggaaaaatctcacttgggttgtatcacttagtatcttaaagaacacaccattcagtgaaacaagctttgtaacagactgtttcatggccgagatggctttctgttaaatgctcatgtgtcatgaaagatacagatgctcagatgagagtcccaaggaatatcaggatttccagagtgtgttgctgaaggaaaaagtgctgaatgagctgtaacttaggaaactgtaaggctagtaaagaatgacctttgcaacattacaacaaagaatatctaggtcggattttcatctggttttaaaatattaagattcagaagaaccatgaaagttttattttaaccatattcttaccaaaagaaaaaaaaaagggattcatacatcaacactgggttttcctggttttaatagattaaaataacataatccaatctaactcatgcatcattttcagagacacagtgcaactggaaatatttttgccattgcagtggagacttctaaaaagcaaatgcctatggatatgcttgcatcttgaacataagaaggaaagaaatagggattacagtcctctaaggatggctgtgtttcacacactgtggaaaaataacaaacatggcctttaaaagtttcaatatgcatgtaacatagatttcacctccttcggtttgcttgctgacctcttagatgacttggttagaagcctgttttcatcgcttctttgttaactgttgttggtactttgtaggctatacgttttaaacttctgtaaagaacattacaagctatttcaggtaatttaattttgtgctgaatattcttcaaaggattttataaataatacaatattttaaatgagtcttcaattcaatggttgttataccatattgttgctttctccgactttatctacaaactgcaaggagaagaaaaacagatagttaaaagaaagcctagagcacttaaaaatatcacatcaacactttaaatgttgattaaaaaaacccagctttgtaagatttgtggaaatttaaggtatgaccgacaatgactaatccagtactactcaccatcttctgacacataaatgtatataaaaaatttttttctacaagtttttgcatgacatgttatacatatgactttaaaagtgcaacatgagaaatgcaacacaatgaattaaaaaaactggataaaatgaagttaacgcttctagcttaacaaaagaaaaattaaaaaaaaaaaagctgaaatgtcagccattcatgcattaatgaacccaataatattatttcaactgaccattattgtggatctcttctgggcctatgtagtctttgaacaaacagatttagctccattaagttcaataattaacaacagctattgactaaaaatactttaaatgtgtattctggacttcagactgaaagtggcaatgacattaaaaagagacttaatgatgcaacataaatcggtaattacagaacttaagttttaacacatagtaatgtaagtggttatttacttgattactccaccccaaatacaaagcaattgggctttcttcagcattccagatggtgatgcaaacagatgttaaaacaaagtaattagtgaagatattaagttacataacccaagtggctacaatactatcaaaatgtagcagtcatttacccctttttttttaatcactgttcatacttttacttaataataaaaaaataataatattaagaaatgcttatttattttaatgaagcaatagtagaaaacaaaatttatagcactgaatgttcatttatgcaaatactgaagaattcttaaattagggacatgattaataagtacaactctatataactagaagttttagtacattcaaaagacattctaagtataaacaacagtgactattgtatgagtttggggattaatgcaaatgaaatcaggatatacccctataagcctaggtcccaacattttatattattgcaaataagtgactggcactcatgaattcactagaattttatgacaaattcaggtggagagaaagcacattttctctctaaaggtaacttcaaatatctaggttatctgagctgtgagattctgactctaaaattgaaatgagatcaggcttacagtggtacctattccttggtgggaaagccatcctttagctctttgagaattcaatacatgctatggagtatctctagaagcatctatgcaaatctgcaaacatctggtaagaagttgatggcctgccctggagatacagatttgacaagactgttctaactgtggacagaactgggaacagaattttatcatctgactctcagtatcacaatgctttatttaattgtttcaacacactccatttggtgatacagtctaagagagaacatatttgtaagaaataatggtgttcttttatattattgcttctaaaattagagctcttataaaagttaattgaaaggtgctttgaactctcaaagagaaaggtaacatagcaatccaagtcacatgaaaaaaggaaaacaacattaaatgtggatacagtgaaaccaaatttcagattttataggtttagtaatgattatattgttattcactgtaaccacaatttatgtgatgcaactgtttatatcataataaaaacatatcaatcatgttatcaattcaaaaagagcatcagagaacaattatttatctttaaaatttttattttatttaaacaatttaaaaattgtagttgatttacaacattgtgttaatttctgctgtaaagccaagtgattcagttatacatatatatacgtatattcttttttatattcttttctgtaatgatttatcgcaggatgctgaatatagttctctgtgctatacagcaggatattgttgtttatccattctaaatataatagtttacatctgctaaccccaaactcccaaaccattctttctcccagagagcacttattttaatggttcaaaaaatatgttgctaaatataggattacttaccgatctaattccaggtaagttcaagagtgatccaaggactggcactcttctaataaagccaacaaccacaggaaagaagcccctgggagagggggaaaaggtcttagaacaaacagattctctatcaccaaaatcg

SEQ ID NO: 52976 - DNA, 651 bp, Bovine  19866880695650
  misc_feature (1)..(1): n is a, c, g, or t
ncggcccgggcggggccggctctcccttgggccgccccggagcccgccttcccgggggcggagtgcgccctcccgacccgcgcggtcttccggcgcccgcggcctcctggatcccgcgcactcaccgagcggcggccggtcggagaggtccttcctccggctctggtcggaaaggaagcggcgcccctctgccaaggcgagacaagggctcagcgcccgcccggcccggccggtgggagtttccggaccaggagcgggcgagccggggcggcgaggcccgtgctcccacccggggcgcgcggggctgcaggccttcgggcccccaggtccccgggtccccagcgcggtagggggaagagaccaccgggaaagccgcgcgccttccccagcgcttcggaaggggcggcggtctcgctcaccagccagggcggtgtgcctgggaaaccccaatcttgctttgagcaagagccaactaccttccggttttggttagaggatttcttgttattcctccccaccccacccccacctccacccccgacctttctccttgattaactgagaccaggatgacctcaattatttatgggaacaacctcgatagtattctctctcctcaggtctccatctgtcccacggattcatgcgccc

SEQ ID NO: 52977 - DNA, 1870 bp, Bovine  19866880945269
  misc_feature (1)..(1): n is a, c, g, or t
naatgagcaagggctagtctctagttgcggtacatggatttctcactgcagtggcttctcttgctgcagaacatgggctcagtagttgtggtgcatgggctttgttgtcctgaagcctgtgaaatcttcttggaccagggatttaccccatgtcccctgcattggcagacagattcttaaccactggactccagggaagtgccccctaggacttgatccctccctcctttcttccagtatattagctttttgaaggtctttcctgaccaccttctcaaaaatagcatgtgccggccctctctgggcttccctgatagctcagatggtaaagaatctgcctacaatgcaggagaccctggttcaattcctggatccagaaggtcatctggagaagggataagctaaatactccagtattcttggggccctctgtatactcttaaccttacttatttctccttacagtggttatcattccttaatatagatcctcttgctcatttatttattgtcttcaagctccataaagtgtcaaagaatagttgttattctccactataaagaacatagaacagagcacccagtgactgaatgaataaaacatcccagatttgaaataaataggaaggacaaaagagaaaaatctagagatgtagaagacgtcttctccattaaaaaataatgaatttgcccatgaaaagtttgtaaatagatgtcacatactggaagctaacaaactttttacccaaagttttccaggagttactctttacagaaaggctttattagggtatcatttacaattagctagactttacaactgaggttacttaggtgcatctacacaaaagaccctttaatagatgcattttctaacattcagtttccaacatcagtacaaccaaatctaggttatacagtgctttaggccaggtctggcttggattaaacccatattttaaaaatccaggcattgatttatttcatgcctaaggccaatgtgattggaacatactccatgcttcataagtaaaatccaaagtagtgaaagattccaattccaagacagaaaagcattcaggaggtgaacaaatgcatctgtttttgccttattaagaaacacatattttaaaaaaaagcctaccagaaccctggccattttgaaagtatatagtttactgtcattctgaaatagcatttttgccattctaaatctgggtcgagatgacctgggagttgaccaagtaccatatctgtactttgctattgttcagtcactcagttgtgtccaactcttcgagaccccatggactgtagcccaccaggctcctctgtccatggaattttccaggcacgaatactggaatgggttgcaatttcctcctccaggggatcttcctgatgcagggattgaaaccacctcgcttgcatctcctgcattggcatgcagattctttaccactgtgccacttgggaagcttcttagttccctgaacagcaaacccatatttcctgcattggaggtgaaatcttaaccactggaccaccagggaagctccctccttcatttctatttcttccgagtttatgttttttagattcatgcttccaccctcccctaagtgatttcttttgtatttaaaattttttttctaccttgtctcctaaaagtgacatttctaatctagagctgtctgttggacacatttctaattaatcacagatatctgaaacttaatttgcctgtgaggaaattaccccgatgttaccagtgtatgtgtggtttttgcaagtttgggaagacctactggcatcccactccagtactcttgcctggaaaatcccatggatggaggagcctgatgggtta

SEQ ID NO: 52978 - DNA, 822 bp, Bovine  19866881028920
  misc_feature (1)..(1): n is a, c, g, or t
nttattactgtcaggaggacactgccttcctctgcctgatctgctctctcctatcaggattaacatttgagaacatggagaatatagtcaaaatctcgagctctagcatcctccggctgtatggtttaatctgggcttgtgtgcatgtgtgcatacatgctcagtcatgtcatcctctttgtgaccctatggactacagcccaccaggttcctggtttaggcacttgtaaactgtgtgaccttgaacaagttacttgcctgatctgagcttaacttttttccactttcttccccagggcaatggtgattttaaatgaggcactttacatagcctccatctgttggggcctagccttcagtgagtgctcaataatttagagacttggagctttagttgctgagatctgtcccagggaagcaaaaggacggaatctcttcagaatggctgcagaaaaagattatggtgggatggagggagtaaatgataggctaaggcatagctcattacagcttctcaaattattatagttgtgtatataagcaaattctttccagtctacttttagcctggtgctggtcacactgctaactttaacagcattgagtgtttatgtgagccaatgaaaatgaactgtataactcgggaaacagtagaagagatttagtgcactattgtaatgcacatactatgaactgttggcttttttctttctttgaattgtgttctcttccttgtgaaatacagaaggcaagtttctaggtaattagcaacaactttaacctctggattcaactccttacttgacagtagaatccacgtta

SEQ ID NO: 52979 - DNA, 1059 bp, Bovine  19866881071920
  misc_feature (1)..(1): n is a, c, g, or t
ntcaattaaaaagagtttaaacaaataagaactctgaacaacaaggctcaggtgggcttccctagtgacaatattccatgtgttgcacacagatcccaggaaaataacaaggacaagattccatggggagaggacaacgggagctccatatttattaacagtacttttcctagactctgccttatgctgttcttctcttggttgattttaatctctgtgttttccctgtaataaaccataactgtgaggataaccaaaaagagagaggtcagaggcaaattaagaggaaaaaaaacgattcctagctggcttccttggtacgtattccagcagaggtcactagatacatttagaaaaccacacatctgctttgcaattttgcaatcttcttggaagtctttaggatttcaaaggcttgattagccctcacctgcatatccagaaggatcctattaacatatatatggagcacctactgtgtactactattgtaggagctgaaggtattttctataaacggtagacaagtccctgcctttgtgtgaatgctgctgctgctgctaagtcgctttagtcgtgtccgactctgtgcgaccccatggacggcagtccaccaaggctcccctgtccctgggattctccaggcaagaacattggagtgggttgccatttccttctccaaatgcataaaagtgaaaagtgaaagtgaagccactcagtcgtgtccaactcttagcaacctcaaggactgcaccctaccaggctcctccgtccatagcattttccaggcaagagtactggagtggggtgccattgccttctctggcctctgtgtgaatagatagacattaatcatgtaagccaaagtttccaaagaagaaaaaccacaatggtagagggtcccatttgttagaaatgggtgcttcagctgaagagggcaaggaagatgactctgaggaagtgttacatgaattgagacacaaataatgaaaagaggctacacctgaagatctgggagaagagagaataatgcttttaagtcacacagcaacagaacga

SEQ ID NO: 52980 - DNA, 1007 bp, Bovine  19866881217610
  misc_feature (1)..(1): n is a, c, g, or t
ncttttggttagtcaaagaagggaagggaatccagaggaaatctctaagtgaattcattgagcagatagccatgctaatgctaaagtgagtggagcatagaaaaatgccacgggaaaatgatagtctttatttctacatgtaagggcttcccaggtggcacagtggtaaagaatctgcctgcaatgcaggagacctggatttgatccctgagttggtattcttgtctggtaaattccatggacagagaagcctggcaggctacagtccaaggggttccaaagagttgaacatgactgagtgacttatacacacacagacacacacacacatttctatgtaaggaatttcaggcaatggtgaaaaggtgggggaatttttggaaagaatggatgaatctgtgcagcttttaaatagataccaaatcacttaaaatatgtttgctttggattttttttttaatcactttccttggaaaacttttatttttgttttcttttctctttacatttacttatgtaaatccttggctcttctgtattttgttaatatgaataatttaaatacacctagggttgcattcttctttggtttgaggctaaaggtataaccattagaatcacagactactttgagaagaggatactgaggtagaaatcaattgatatgaaatgttttcttctttgataactttatgatagaaatgagtgagcaaaaagtgatggataaaatgccaaagaccagaggtggggcttctgtgaaacttatgaactgaataattaggccttgaatagccaagacttgagtatgcaagaaaatttgctaatgctcaatgtgttactagcatacaaatagttgttttaagaaactatggtagtttttaaatttttgaattcattaattttttaggtgtgtcaagcctgaagagaagtctcttggtgtgggattacatgcattttgtacacgagtattaggtaaaaataattacgtttcccaatatcacatcaga

SEQ ID NO: 52981 - DNA, 2979 bp, Bovine  19866881272699
  misc_feature (1)..(1): n is a, c, g, or t
nactaaagggtgaagtgatctcagcagttgctaagaagtccacagcagtgaaatattttgtagctgtaaaacaataagagccttggaaatcagtctttgttaaatgagccaagtctgttctcaattcctgaaaggatggcagtaggatttcttcacattccttgcattacctcaagatgattatgccttgcttaaaaatcagaaaattaagagcatctctggcaaagtgggactgtgtctaagaacaaatcacagagctgtatattggctgtgtgtccccttgaccagtataacttctttctgacgaaaccaacagccataaagggtgtgtaggttattgcaagatataaaatacagtttgtgagtctttactgcttatctattttatatatagcactgtgtatcttttaatcccatactcctaatttatccctacccaccactgtttaccttttggtatctctaagcttgtttctatgtgagtctgtttccattttgtaaacgaattcatttgtgtatgatatttaaatttcccttataaatgatacctgtctgatttacttcacttagcatggtaatctctactgcatctatgttgtttcaaatgacagtatttcattctttttatgactgagtaatattccattgtatatgtatgccatgtctttatccattcattggctgatggacatttaggttgcttccgggtcttgggtattgtaaatagtgctgctatgaacactggggtgtgtgtatccttccaaattagagttttcatctttatcagacttatgcccaggagtgggattgctggatcctatgatagctctatttttagtgaaacaaagtaactttaaggctaagaaattggtgccttgcctagtgttagacctggaattagatctgggtcctcagtgtgttactaaatttctatttgattctaagcaaatctcttcttcccccagtcccatattcttaataatatacaaaataagatatattaaaaataatattaataatataaaataatattattataatataaaatattgatgtatataataataatatatcagcaaaaatgtttttggctctaagtagcagaaaatccaggtaagactgacttaaaacatgaagtcattacttttaatttaaaaaagaagattgtaagtggcttgtcccaattgattcagctgctcagtgaaacttcaaaaattttattgctattaatcattcattcattcaatgaatatttattgagcacctactataaatttattctaggagtcccctctgtgaatgcaaaaataaatctgatccatactgaaaaagaggattaagccataaacatatgggctttatgaacaggaagctaaattctagaaaacccttatagttgctaaatctgcatggtttatatttagattccttttaattgtgctaaaatttacaagcataacaactttccttattctgtggaccatgagcaagatcaaacttcatcctgaacttttctacaagcttcttttctgacctaggtgacggaccatgctgatgggagacatgtcattgtccagttccatgaatggcaagctgggattggactgatcctttctcgagctcggaaactgcccattgctacagtctttaccacccacgccacactgcttgggcggtatctttgtgcagctaacatcgatttctacaaccaccttgataaggtaattagctcttccaccctcgccacctttctttccgactcttgaagctgaaggatgggaagtattgatcttcacctttcatctgtcatccagatgccagaaatgcccttttgaccaatcaatattcatgacgcagcttcccctgaggggactgagagctcataaaatttaactttgttcagagtgcatcagagtgtagcggggacaggccagacatctgtccactttgaagtaacagaccccaagatccaaaggggcctggaagacatcagccactgtggccctgaggttgggctgcttgggaaatgctgtgaggaccccgggatcctcacgcagctttgagtggcaggtaccccacagggacgctaggcatctgcttgtactatgagcctcacttccttccatcctccaagtgaacgaaggtcagatttctgctgtaactctgcagtgagttataggtggagttttgtggggagtccagttaagacagttaccaaaaacaggaatatagatccctggtgatcaaacagctgggtttgcttatcttagaagactgccctattctatgacctaaagttttgacttctttcttccagttttcatcagtttagattaatgtaactatgtttttcatattatcctgtcagtagtagtggtcaagcgaccaatataacactgtaaagcaattatcctccaattaaaatcaaacaaattttaaaaataaataaggaaagaatgtaaaaaagttaaaataaaaaaaccatgattaagcatttgagtaacatacagtcaggagttttgcagacgtggtgtctatattgccagtcaagtcaatttagcattttagagttttgtgtcactatcgggaacattaggaagttgaaaaattgaccccccctcccgtttaaaaaaattctaggagtctatgcaatagactgcatacttttctgagtgtatttttgtgcctatttgtaatacatgattaatactactcagagaatgagagcagaaagttataccaccatctcagaggcattttgaatgcaggaaagttctttgggacaaaacttaacatttgcaaaacagtgagtggtcctaaggagagcttgcctataaaaaggtcagttgaacctgaaggtcaaattgtaaacataagatgtatattcaaaataaagtcaccaaggaattcagaaaggtcaagaggtcagggagatttcctaatagtagactaataagggcaaaccagtgatctgtgata

SEQ ID NO: 52982 - DNA, 1399 bp, Bovine  19866881549648
  misc_feature (1)..(1): n is a, c, g, or t
nttgtgtctctttgtgaccccgtggactgtagcctgccaggtttctctgtccaaggaatttttcaggcaagaatactggagtgggttgccatttccatttcctcctccaaggcacctttccaacccagagatcaaacctgcctctcttgcatctcctgtattaccaggcgaattctttacccctgagccatcagtaggcaattattgcgtatttgctgagttaaggtgggaaaaacccttacatcaaaagaactttatatcagagatgagaagaaatgaaaatctagctttatttttaaaaacatccagaagcaggagtattattccagaggaataacacacaccagcagcatctcagattagaagagtggtcctctaaagttgacctggaatgctaaagagaaatgtactactactgggactaaatttatccaatcaagagcgtgagagtccaaagggttgaagacggccaggtttcagaaataacgcaccctctgtgtgcagaagtctttaagcccggaggctagcagtgaccgcggccgcggccgccttagcggccagaaggtgacctcctcaattaggccgagggagggcgtgggcacacccgagcccttgtccttgaagaggattgagcgagccgaggggaggggtgggcggtgctcgggtttccaatcacaatagaggaagctcggaggcggccagggggcgggtcccgcctgctcttcctccctccttgcggatcctgcgccggaggagacgcacgctgctgactttgtcttcgtgcagcccttatcactctctggagaactttctctcccctggtaggtttctgctgggaccctgcatcctggctttgcggaaagacctggtgggacttgtgcagcaagactcagcgggggaaggaccaggaaggacatctgagctcgcgggcctggagccctgagcatccggatcgggttggggcgggggccctgtcccggggctgggggacccgacggagccaagggcctgcgcccgatctctgggctgtgtcggccgctcatcgcagctcccggccagcctgtgccctcccgggggacgagtttgttgcacttgcggctacatcccggttctacgtgtccttgatgggttcatggcggccgcatcacccttggtgcctgctggcgggcgcccggacacgtgccggaggagccgggggagggaaaggcggccaggcgacccgtgaagctggggggtggggtggttgttggcgctcaccaccttgggcctggagaaaggcccggcttttcggggatgagagtgaaggatgatcttggccctgcccttagcctctccccagcccttcctggagcgatgggccggctcgtttcggcctttttttccccttatgcttcggatg

SEQ ID NO: 52983 - DNA, 1036 bp, Bovine  19866881713904
  misc_feature (1)..(1): n is a, c, g, or t
nttgcctgggaaatctccatgtcagagaaagtctggtgggctacagtcaatggagttgcaaagtgtcagacatgacttattgactaaacaataacaaaggtatctatttactatgaaaaatgatttatctctttattatcaagaacaaagactagtatagagtctcgtaggaggcacttggcaaaggtttgttgaatgacaaagtttatctctgaataaatacagtcattcaaaccaaggaaaaataagcctttgtatcagttaaatcaatattttggtaaaaacagaatttttgagccttaatccctcaccgtatcagagatggtcatgtcattagctaactgaacatagaaaaatggaattgtggaaagaactttctaaatgcaagactgagttaatttttaagaaaggattaacatgtacttactacctttaaaatgacatttaaatacactagacactagaatatagataactttttgatcttcctggttatattttgttgacatgaaacatattagttaacttttctgttaacagcaatgatagaaagaaggtacaaaaaagagttctactcagtctaaaacctgcataaacatatttgccttctcatatggcctatgtaaactaaatagattacatgaaattattgtcttcatagatatcataattctatttcaaccactatctcaggatttcctaaagataaaacatgaaaatgtttgtaaaactgtcttgaacttgtaacagtgaataagtaaaggaataataactattaatgtcattcagatgtttgccttcgcttgagggtttttattcaatcataaagaataacactgaaaaatgctttaatattaactcagttggtattttaggaatgtttaatgtttctttgcctttatcttatttcagaaatgttgaacctgaactgaaatcacttgccatgggtttccattcactaactattcgaacgctaggtatgataaatatgtagatgataaattccagatataatttttcatgtcaaagactaaaa

SEQ ID NO: 52984 - DNA, 3495 bp, Bovine  19866880394260
  misc_feature (1)..(1): n is a, c, g, or t
ntcaacagtacaaatggcacgcagagcataagtgagtttctctcctatcatctcccacccgtccaatcccccactcctccaccccaagaagtagccactgaaacctgttctaattgtgtacatgggagtcatctgttggaagaatcccaatggaatttctgggacaagaaaacccatgcattttaaatgtggaaaataccacccaaatgttttccccaaatgctgttactagtttgcacctggctagcagtatatgggatatctgtttatataggtatacaccaggtatacagccactgtatattatcacagaccaccctcaacctattttcaaagttttgacttctacccaatcaagcaaaaatcatttgtattttttttttctgttcatatgttttgggaacacatttcttattgatttatgagagctctttgtatagcaaaggaattaacttagcaagatagcatattatttttgcagcttcaaagcctttttgaaatgaaatgaatggatagatacatgcttagataagtaaaataaatagataatgaccacttaaaacacatactggggaaagcacaggctagtccttgagtcctagcaagaaatttttattttctcactcttctgtctccttccttcctcttcactttgaagtcatacattttggtgctttgttctctcccacacaagatgggggcttctgcggtggcttagtggtaaagaattcacctaatgcaggagacatgggtttgatccctgggtaggaaagatcccctatagaaggaaatggcaactcattccagtattcttgcctgggaaatcgcatggacaagagtcaggcggattacagcccatggggtcttgagttggacaggacttagcaactaaaccaccaccaccaggctagacagagctccgcattcagtaagtgaaaatgggattaatgaactctctatgggagaggcaacttcttcaacacgtgttttgcaatgtgtacgtttctgaacatttgtcaaatatccaggataaaatttacatttttattcatcaaaacccaggtacacagaccccatagtaagccaaacggtatgtttctaagtagtatgtgtattcagtcagtttctactttgccagcaagatcagcctcaatatgccagtaggagaaaggagaaaaatttctgaatgtgggcatgcaaatgccaaacacatctgcctgctgtcctggctccagttacatccaagtgtccgtgtggtcatggccaattcacctgaaagccactgtgcttccaacctcacattagtaagagaacaatgttcccagtccttccccagtttgaatttggagcagttttgttgttcctattgttgtgtaaataagaaagtctcttgctctgacttgcttttagaccacagctgttctgaggttagttctcccagccccagtttgcttttgtgccagttcagaaatcttcagacctcctctgttcttccaaaaatttaatcatctttggtgccttaaagtgaaacaactattttcagaagtgaaaaagaggacttttgcaatttttctgttatttttaactatctacacataagttatggctgtttaaaacaaactgaaacatctactactgcaaatacttgagcaaattatgaatggactattgtttttcagtcactcagttgtgtctgactctctgcaaccccgtggaatgcagcacgccaggcctcgctgtccttcactatctccagagtttgctcaaactcatgtccattgagtcagtgataccctccaaccgtcttatcctctgtcgtccccttctcctcctgccttcaatctttcccagcatcagggtcttttccagtgagtcagctgttcgcatcaggtggccaaagtatcggagcttcagcttcagcatcagtccttccaatgagtattcagggttgatttcctttaagactgactggatcaaacccaggtctcccatattgctggcaaattctttactgtctgagccaccagggaaaccaggaattgcctattaacagtattaaactccacacactgccttcaatgcaggaaatgcagaagacacaggtgacatgggttcaatccctgggttgggaagatccagtggagaaggaaatggcaacccactccagtattcttgcctgggaaatcctatggacagaggagcctggagggctacagtccacggggccccaaagagtcaaacatgacttaacgactaaacaacagcaatggcaaatcttgcccgaggaaaaaaaaatcagattggcattgtagaatagccatagctaaggttaaagggtcttgccaagtgcatcaagagggtttctgaccattttaatgaatgtaatagcctacctttttgtttctagatcagttagacattcttttagtagaattcaagatgtcaaatcacatttcaccctatccagacagagctcagtcaatgtgaagggaggattgtatgcatcctctggcccgtccttaagtggacacaggagtggataggtcccacttctgtcaggggcaacatctaggtggaacctggctacaaaatcaatgtgtcgtacttttcgtttaattttttattgactaaaaaaggtgaaattgcagtttccacttttaaatcttaaaaggacagcagaaaaccaatatagaagcatctaaattgcttcagacagctagtaaacaataaaagcaaaattactttttactctttgtgatcctgaaaaattggttaagtcattttttgcaatgttctctgtactttgaaaatcaaatacaatctttcatggaattttacatgtatatatacacacacatatatatttcataaaattaatttagaaaattgaattcacttcatgaaaccatatgaatatatattaaaataattgaatatatgcatatagtatatgtacatattcaaaggcaaactctcctatgtatacaactatctattggcaacagaaaaacagcaatttttttcccttaactaaactttaaaactagacttcacctgtcagaattttaaagacacatgtaataagtcacaaaaagccatgaatactggttggttttagaactaatttattaacactaggtcaaactgaaaaatgggttattgcaggtaagaaagatgtatctatcatcactaacactctgggcatggatcattagaattttaaagttaaaaggggtttcaggaatcatcctgaacaaccttttcctgatagtgaaacagtctatatttgaaaattccatgtttaaaaaaaaaagaacttaatgttcaacccttaagagcttacattcagaaagaagacctgggactgcagttaccacagccatggcgcaagggtcagagaacacatgacattgttctactggtgtccaaaggccccactttaacgtactcacacccaggcaagaccctcgagccacaaaagaagacccaagcaag

SEQ ID NO: 52985 - DNA, 758 bp, Bovine  19866880624641
  misc_feature (1)..(1): n is a, c, g, or t
ngcagttagagatccggcctttacggagaggattttcctgataatataatgttatcgtgagtccccattcactgcaagtgaatcatctcaccaggaaactgggagcaaggcaacagtttaccttctatttaataaggaacaaagttcacctttactcaatacttcagctgactctttcacctgaatgttgaaaatacacacttttagaaggtttctcttcaaactgggcatttctatctgctttccttgtggtgcagtaagcactgccatggagacaggaggaccttcaaccctgttcagcccccaggtggacactgacctcactgtcctcagatgttagccctaaaaagtatggaaagaacatggtgcctggattctgcaacactcttctgagtggcccctttgacagtgctagagggagctggcagagcataacctttcagtgaatgcaggggaccaactgcacgtgactctgaaaattcatatttggaaggtggattccatcctggagatcttggaggggactcgtggcctctccacacttaggaagggcagtgctgggccagggtgtgtgatgacaaagattaatactatgacatggccatctccccaccatgtcactcatccttaaccatatgatttgagaactaaagcaaaatcacatttaaagttctcacccctgagaagccctcataagcattatccttgtttgatgattcagggtctgaggctcaggtgggctgagctattaagaaacg

SEQ ID NO: 52986 - DNA, 2294 bp, Bovine  19866880632625
  misc_feature (1)..(1): n is a, c, g, or t
nctttccatcagatcggtccctgccaggtctgagaccaccctctggtgcattctgaagacacctgccagtccaactggcgacgttgagtcgcaggtctgcacgcgtacacctgggggcgccactgagccaggtctatatcagcattcttttgggggaaaaacaaaaaccaaaaccgataggtgtcctcaccgcctgctcaggctataagtaatctgtatctccctcgcttgcccaaatctgtaaattttgcagacagcataataaaaatgacctgatgttttcattattgagaatgaaggggttttacgtgagatttttttgttgttgtttttctccaagcacagagcaaatcccgaaattagacacaaacattattcctattcagataagtggacccgggggactggaggctgcctaactgggagaagctactgagttggggggggtctctatatcactgtcttcaggagaaactctcactcatgagccccaggcaccaagcacatcataacagacgggggcagtcaaaagtccattttctaaacagaatgatgggtgagtctgaaggaagaaagcatttctagcagccttaatttcactggaagtaatgtgcatatggtatccttttgataagaaagctattcctgtcacttggacttcttttttcatggcctagaaaacatttagcaatgattatgaccttcatttttcttttttttttaacagctctttatgatttttctggactttcacttgcatatatgattttatctcctaaaacatacatgggctagtatgtgattgaaatgaaagtccccaaattaactgactaagcttttattatctctgaccctacacttaccattccttgactgtctttcagagggtgagctagtctactttaaacatctggacaccctcctttcagtcttcctgaaccatgggaagcataaccgtgtgatgtaaacaggcaactctgagctgttctgagccgtcaatcattagtaccttaagtttgtaaaacctttcctgatgcacctggttcagagaagttacccaagagctaaggcggggccctcttcttggggtcctcacgcatttttctgaaataaaaacaaacatcgccaactccatttaaactctatcctgctattaaactagaacaatgactgtatccatgctgtcatggccttctatttctcctccccagtttgaacaaatgttaccagctacaaggcttttggagttattaccagataataatttcaccagccctctgggtttagaaaacaatacttggggtaagcccgttctgatcacctgctaatccgagataattgcttgcgggtttcatggggaagctgagattcttaatgccagattcactgaatggctctaagggaaggggtttggggcctatttggcctctaccggcaaacctgaggtttgaacagaggttctatagcgaaattacctcttcctccagtaaagaccaaccatcaacttcctgtaaaattattgcattcactgagcaattctaagctactcttttataaattccccactttctcctgccctctcttttcagcttcctttccttttcttctttatttgttcctatagctgttgttttccaattgtttaacaggcatctggttaaaccctagacagtggctgttgaggatggctcgctgctgcttggaggatttgagtaggtttgagtggcaaagggcaccctgtcttggcttctctttcctgggaggaacatcaaaattgtgctggttctgggatttccctggtggtccagtggctaacactctatactcccagtgcaggggcctgggttcgatccctggtcagggaactagagctcacattctgcagccaagagttcatacgccacagctaaagaatacacatgccacagcgacgatggaagagcttaagtgccacgactaagacccggcacagccaaataaataaatattaaaaacaaaatcatgttggtcccaccaggactgctggcaaatccccaggtgctctgccagtttggtttgaattctctaaccagccacttggcagtcgattctaagtatttacattaaactcagacttcatagcctcaaaccaagaatactggaggccaggacctgatgacctggtgcccggagactgtgttttcaggaatagagcagggggggctggaagttgaaagtgtgggactcacatggagaagtgaatctcctaggatcacgtgctctttgtgaaagtgcaaacccagctgttctccagg

SEQ ID NO: 52987 - DNA, 1191 bp, Bovine  19866880677278
  misc_feature (1)..(1): n is a, c, g, or t
ngtgacattgtggacagtgtttatctttctaggaggcctccagctgatgttgtaaccagggcagagttgaagcgacagaaagtcctcttgacggaggcttgggttgagcatccacccgatgtcactcttcagagaagcccgtctgcccttccaaaggctctccatcatcttgacagcattcttggtcagcaggtattattatgataataccttgagtttatttagcgcccagcaccctttcaggcgaggtcaaagccagttgggcagtcagtcaacaaaagtgattgaagtctcttggtgtttagagctgtgtattaaatcactgtcaagcccccaccagccccatcctcaccacacaccaaatgtacctcggggcctgccggcctgaacccacatggccgcctgcccccccaggcttcaccccatctcattctcacttatcggcttttattgactcacgtttacttagcgtttgtacagacctctctacatacacacttggagatttctcccctgcacattctctctgtgtctgacaagccacaaatatcctctctagctgcctaagctgcccacgtagttaaaagcaggaagcacagaatgcccagaaacgaaaaagagcaaactggcaaagaagttaacttgctgttttaagccaagaaaaggagaaggctgctttctgagagcccgtctgtccacccgtgagtggacggtggactttggcccacatgctctatctttcactgcttctttcatgggataacaggaaagggccggtctgtgggggaaggaatgcaggttgtgagacttttcaaatgacacaggaaatacaattgccccaaaatgagacaattgagctgggcaaaaaaaaaaaaaagaaattgtcaccagtcatacatagtcaaaggacatctgtttccatttttacgaacttctactccatccattcttcctccatgtgtgtttcctatgtttttaattattttttattggagatagttgctttataattctgtgttagcttctactctacagcaaagtgaatcagctgtacatatacatatatttcctcctttttggatttccttcccatttaggtcactgcatagcactgagtagagtaccctgagcaatacataggttctcatttgttacctgttatgtataatatcaatagtgtgcattttttgg

SEQ ID NO: 52988 - DNA, 1969 bp, Bovine  19866880779627
  misc_feature (1)..(1): n is a, c, g, or t
nttaattaaaaggagagaatcccagctgagcctgactttatcaggggagctctcagtactggggacagagggctgtcccttgctggtttggggaagtaagctgccaaagtgtgcctaccgatgaagaggcccatgtgccaagggcttgtggttcctggtacaggtttggactaagctggggggtgggggggatgttggaccagagtgggtggggtgagtgggagacttcagggaggcctctttctgaagtggctgtcaccttcccggccaccccagaagtcaactggccaggctggggcctgcctgggtttgggaagaccagcggtgtattagaagacctgacccacctgaggtggctcctcaggtctgttttttctaggcaagtgggccccaccacatccatttcctggtcaattcttggtagctctatagcatatatatccataccctttccagtggtcatacatttggggatgttcgtacgtgccttaggctctgttgagggtcttgaggctcaggcctgggctaattaattcaactttatgcccagacacaggtatcagttcaggggtgagctctgaatccatgagaccctcgggagacacgtgctgggagcaactggaaaaagaactgctttgctcttctgagacgcgatccccgccttccctccaggatgcgagggaagaatgatcatcgtgagagtctccaggagctgttggcagccctgcatgaagctgcccactcagcgtaagataaggaaagcaggatgaacccagggtcttgctgttcttgttgtacccctgaaccacacaaaccagaagcttgtctctctctggacctcaagggatgttatctctgcagtccattctggtatgagccagagggcttctgcttggggatggctttttccagtcaaggtttagttaggtctcctaaacttctagcaaagtagaaccttattggcagaaaaaatggccctttgctgtgtttgtaccattcaaagacctcactgcccagtggacctcgccaatgctggtaaatttccctcaaactattgttaaataaaaaccatcatttccaatttgcaaaatatctctaaaagccttggaggcttacaccaaagtagcatttttctcttaaatatatctacaccaggattccaaaaattatcaagattactattaaaaagaaaaattcctgaaactttggggactgggttttgcatttgcaaaatgatttgcaaccagacctgtcaggtagcacttcatggaaatcaagaagttaggttttgaatatctaggtaattttcttctcaacatccaaatccatagtaaaatcaactttctagctgtctagactcagtggggctagataatcaggttagcgctccatcaggtgctgagtaattgtgataaaagtaggcagagctgggggcttccctggtggctcggtggtaaagaacccacttgccactgcaggagacacaggtttgatccctgatccaggaagatcccacatgctgaggagaaactaaggccacgtgccataactatcgagcctgtgcttgagagccaggagcctcagctgcggagcccatgagccacaacgtctgaagcccttgtgctttagaacctgtgctccacaacaagagaagccattgcaacgggaatcctgcacaccacaactggggagtagcccctgctctccaaaactagagaaaagcctgcatggccatgaagacccagcacagccaaaaatacatacatacataaaattatttttttaaaaaaagtagatgtagctgggaaagcagtcctattgaattaacttaattctttaaatccatcatttttttttttttttgccccagaaactcctcaatttcggttgttctgtcctgcggccaccttctgtagttggcaaacctggcccctccaccctaaataactctgaacctgtggcattggat

SEQ ID NO: 52989 - DNA, 943 bp, Bovine  19866880790909
  misc_feature (1)..(1): n is a, c, g, or t
naggaggttctgtcagggctgtgcttttcttttaatctaaattgctgtttctttttctctgatatggccatcggtcataaagagttgaccatcattaaaactgtttgatttggaaccctgtagtgtttggctaagagggtaaatgcaaatttgatgaaagaataaggataaatttacatatcagcctcagctcacatggagagagtaaacattctgtttatctcaagtgtcgctttatgatttcaggagaatataaaactgaccttggcccagtcattgcaaaaggcccagatgaaatatgaggttgtctaaatacgatttactcgagtagaacttgtgggcaaaccctgcggaactcagcaaacaaggccagagagaacagaactgaaagcattttgttctgataaattccaaatggaattctggaatgaggggttggtgaataaaaaagcataaaaaattaaaaaacaaacaaacaaccacttcatgaatctttgtcaatcaccatgaattaaaacctcctttttagccggtagttttcatcttcattcatctaaaaatgaaaaagcataaatgcttaaaagctggcattagccctttaaggtagagtgagctttcatcaaacctttgtttgatcatttggagataagagtaagaccatcgtctgtttggtttctagaaaatataattttttcgaggaactttcagcactccatagccagtttataatgcaggaagatgcctccttctgaaagctgtctggggcaacacgcttgcattttctacacttttaattagttttattctgaagctaagtcaacattcatcagtgtgtgaaggaacatccaacttttgctccaaacgaaggcttttgagtgtgcagaaaaatactcagatgtttgcaggcaacggattttccctccactttctcacacccatacgt

SEQ ID NO: 52990 - DNA, 1248 bp, Bovine  19866881031331
  misc_feature (1)..(1): n is a, c, g, or t
naaaagccacccacatgctccgatctctagcttgaacccacccagattcccaaggtgcctttccagaaggttgtcttcatgccctggcagaaactaggtgtcaggcaggggagccagtattcagatgtctgtggcttcctttcactgcaaaaatagatttacaaaataatccagtctttggtcaggtctcttccaagacggggagacctgacagcccccgtgtgttgggtgttccagctgccctgagcccacatttctgtgagctcatgggttgcttcaaagctgttgaacgcagttgaaacagaatattaatacatgtgaactgagtctatgcggtttattctcttaataacgtctccaggtttacagggagggtcctgttaagtgattttctttagctttaaagaactagaaagtagagagaaagtgtttgggctcttttaaccttcaaacatgaccacactgaggacagagattgcccaagaaatgccagtctctttcctgagacttctgaagggtcgtcgtcacaagtcctttcttacgctcatcaaggtctcaaaatgcgttttcattgtgcctgatgcatagtgtttctctgatcacaattccggtcttactaagcaaagtatggggcaatttagaggggaagagggacctttttaaaccttaatggggcaattgccaagatcatgactccttgtgggtgttggacacactgccctttagtaaatcttaaatgaccacacttctctcttctttccctccatccctaagggtttcattcctaatgtctgacctttattctggactcaggattctggattctttaagtagattcaacctgggaagagtttgtaaagattcagatctctgcagtgtaaaaagcccagataaaatttttatttattaaattggacaaagttttacacttgttagtgtgcagcactggccaaagtgtagctgaaaatgctaattcttaggttggctgtgagagtaaaatggctgcaacctctaaggatggattggtggcactatctaccctacgatttgtcttttagttgtttatcctccagcactgaaagtgagcagaggtttatagattgcatttgtgttgatagcaaaacaacttctatgctaatcaacaggggctccaacgcatatagacacacaaaggaatattatgcaactgtgtaaaagaaaaagctgattgaactgtggtatcattaagaccatttctaagacagggct

SEQ ID NO: 52991 - DNA, 2590 bp, Bovine  19866881103924
  misc_feature (1)..(1): n is a, c, g, or t
ngtagaattttagttttggtactagtgtgtgtgtgtgtgattggtctacaatatgtccaagattgtaactctcaaagaataaggctaaataaaccatttattgttgttgtttagtccctaagacatgtccaactcttttgcaaccccatggactgtaacctgccaggctcctctgtccactggattctccaggcaagaatactggagtgggttgccatttccttctccaaaaatcttcctgacccagggatcaaacctgcttatcctgcattgcaggcagattcttacccatcttaattgtggaacattaagaaactgttaaaagaatgatataaatctctctaaaattatataaaaagtgtatctactttatgatgaaaggttaaatactcattcgactggggtaattttatttaatttttgtaaagataattctgactctatgcacagaaaaggtttgaaagttgcacacaaggctgttaacaattacacccccagaagttaggacttggaaggcttgtgagaagacttgccatttttactttatattttcctctattttaaaacaattatttcttctctttttgccattaaataatgttaagtaaacaaacattgaaaagtgcagtctttgccactgggtagatgacaggctgcacagggtatttcttgctcctatgatcaaacatatatttttctgcctcttggtttggagaaaatgagtgagtctgctgaagacatttttgcaagaaaaggatcaaactgggaacacccatggcccaggagtgttaggtaagaaaaataagctgataagactgaagaaatctgttctaacttaaaaaataaaaagcgaatgtcccagggcagatcttaaagaactgggcagtgcttaaactgctgtgggtcttaatcgctgatggttcttaggaaaggaaaggattgaaatggagttctctgcggttcagcttaattaatatttatggctacagaagaaaattaaataaggcaaatggtgtaattttaaacagtctggtgctggtagcaggactcacaataaattcagaagcaggaagagagtgctgaggaatggttcctgagttcaagcttcttcccctcccccgcctcccaggcaacctttttttttttttttggtactgcagcatacttcagtactgacatctctgaacactactgcctggttcacttctgttttctgtatgtttttgtctttgtgactgattatctgcaggaagattttctttcatggggcatgctgatgggaaggattatgtcctaggatgttagctctggcaccatctctaatggccccactgagtgtttctggggcatgtacctgccacttactgattctttccatggtttgatgagttgagcttttctatcttgggggtggagagctgatgagatagcacagtttccctatcatggggaatcctgaccttagatctgcttctgcacactgacaaacatttattggatggatggatggaaggatagttggatgaatggatggaaggaggggtggatggaagaacagaagacagttgttatgcaactctaatggaaaaactcatagtttacccatgaggactggcattggagggataaaatcagattaggacaagttgtgggcaaatgcttttcaaacttcaattgatggctcatcagtgtgttggggcggtaatctacttcactgaaatgatcattaaaggaagggagtagaatagaatctctctgtgcgtcgcacatagaaaaggcatgtgtagtcctgaaaaacttatttttgttataaacgtgtgtgtatctgtagcaggatggaaaattcattctctactgggttaagtgttagtcatgtccaatgctttgctaccctatggggtgtagcctgccagcctcccctgtccttggaattccccaggcaagaacactggcgtgggttgccattcccttctccagaggatcttgacccaaaaatcaaacctgggtctccctcactgcagactgactctttaccttctgagccaccacttcaaaaaacctgaaagaccaggtccactgggagctcagggcttcttagcaaaagagcttcagatttcccatctggagtagagataacagcaaaagccacagaatgggtgaggatgaaatgaattgaggatttgatgggtacctggtattttgagaacatctgatcactcttactccccactcccccaccacccccctctcccagcattgcgcaccagggggagttccaaccctgcccagagagacgtgtcatgccgcatcttacagtttgtcccctcaaatctaaccaaatcagccttcttaaaagatagttaaacctgctcaaaatgatgccacatatttgataagatcattttcatttctctggatgaggtcagagctgtgctgagccctgggtcaaggaccactccagaatgatcaaaagtgttctacccacttgcaactcttagcaagagctagaccttggtttcaattccatggctttctcttccttggaaggttaaattcagcgctgacagtaagtccagcaataagtcctgtc

SEQ ID NO: 52992 - DNA, 1095 bp, Bovine  19866881136489
  misc_feature (1)..(1): n is a, c, g, or t
nctgagggtcaacttactctatgtcaactataacaggcccctgaggaactccttgttaaaatggtggaaaaggaggtgaaatcaaaaattacatggcactcttaaccaacagcatctaatatgtcaagacatacagtggctggaacatgggggtgggttcctagctttagaaagacacagctttcccctacctctgtttataagtcctgcttagggcagaccaaacacaactacttaactgaaagacacttctttcaagccttcaagaatcttattaaagagattcatagtatttcctggatacgaaaatgaaataattctttcaaaatagcattttgatgagttgagtgtaaatgaattagaaacacacggattaaatttcccttgaaatacacatgggcttcaaaattaagggaaattaacttctctgaatgtgttttcaattttgcctgacctcagaagtttgatgcatggtttgatacggttggcctgatgccagctttgcctatccttaccatggattttgcctgagaaaatgttctatttccagctccctagggccttctgagggtcttccctagtggctcagatggtaaagaatttgccggcagtgctggcaacccaggttcggtccctgggttaggaagacccctggagaaaggaagggccttctgatggtttacagtattactaatcttatctgtaggatctagcccattttaataaatattatcctagtgaaaaactgcagttttagaatggtgaccaagcttagccaatcaccctctgatttaatccagctttggttggtaaagaatcccaaggcaaccgatcagtgattttatgaaatctctgaaaatgttttgagatatttgatctttgagaacaagtgattctcactctctctctctctttttaaaaaaatagataagaggaattctttttttaaaaaatgtatttgtttttggttgcttcgttgctgtgtgtggctttctctaggtacagagaaccggggatactctctaatggtgcacaggctgcttctcattgcagtggcttttcttgttgtggtacacaggttcattgcccgcagca

SEQ ID NO: 52993 - DNA, 3924 bp, Bovine  19866881163655
  misc_feature (1)..(1): n is a, c, g, or t
ncttcctggtttgcagatgactgtcttctcctcctataggaaacaggaaggaagctctctcctgtccgtatatggacactaattcagtccatgagggctccaccctcatgacctaattacctcacaaagaccccactttcaaatactatcatactggggataagatttcaatacatgaatttgggattgagaacacaaatattcaatccctctcaggggcctataggcagttggcatttccagtccttctatatcccaaattcttgactgactctattccctaccctttctcttgcaaacttgctaattcatgctgtggtggtctctttcttgtataaccttgctgaatgaagccatttatagacacacactactaacattctgttttccaacaacatttgaaaatttgaatgagagggataaatttccaagaaaaacataatttataataagttgttcacagaaagaagcaaataacttgagtgaacaaataacaggataaaataatagttttgaaataaaaacattagaaacatagcattagggtcaggtaggttttgtccaaatgcattaaaagccataagaagcaattactctaatactgtatatatacttacagagcagaaaggaaaaggaaactttaagtgtttttttttaaataagctattagaaccttgattttaaaacatgacaaagagaagatgcagatacagaccagcctcacatttgaataggatgtacaataaaaaattggcaaaaatatattttaaatatagatgtaaatattctaaaatattagcaaagaatcctacaatatgacaaaagaataaaactgcgtccccacaggaagtatttatagttctgtgaccatttttctgaatattcattggaaggactgatgccgaaactgaaactccaatactttggccacttgatgtgaagaagtgacatttgaaaagaccctgatgctgggaaagattgaaggcaggaggagaaggggacaccagaggatgagatgattggatggcatcactgactcaaaggacatgagtttgagcaagctctgggagttggtgaaggacagggaagcctggtgtgctgcagtccatggggtcacaaagagttggacacgacggagtgactgaactgaactaaactgattacacactgatgaaatttgagtgaattaagaaagagagcattgtatctataagcactcaactgaatgctttgaatagactgaattaaaacaagttattaaaatgccttcaatttagttgtgcctgaaataattaatgctgaggtggagtatgcatcacacaaaatataaaatgatcctgcacccatatctctttcagttcttgctctgctttagagaaatccaaaccagaaattggaaaatatatattttggggtatagtctttgcaagaaaggcaaaatggaattccaagcaactaccacacccacaaagcaaaggcttgatcctatatcaaaagacagataaatgggtatgtggtctgatgctttaagttaaatgaaaatattagaggtatgtatgtatcatttttatgtccaccacccaaaatcaaatacctgaattaactaactactactcttaactctatgaaataaggtgtttttctcctgtagaaagataactggatctttatgaaattcagcaactctgatcactcccctagacacagtacattacttcttttttgtttggggttatcattggcatattgtaggggcttgcctcgtggctcagacagtagagaatcttcctgcaatacaggagactgggttcaatccctggttcagaaagatcccctggagaagggaatggcaaaccactctagaattcttgtctggaaaatcccatgaacagaggatcctggtagactacagtccatggagttgcaaagagtaagacacaactgagcaactaacactttcacactttggcatattatacttttgggaaaacacaatctgaaaaaaaaatcttgcagatgggttatgttctaggttataaaggttctccagggaaacagaggatataggatggtcctacaaaagttgcatctttccatccactccaacccttacatttggagaatatacttacctggagtttaaccactgcagctatgaaacgatgctcaaaagtaaaaggaagtgcaggcctttctcctcacagtcccatgagcccagaaacacatggtcctattctggccatacttctaacacctaagatgaagcacatgaagcaccaccaactactttcagctgttccccagtgatgaaaagtttcagacatatggtcccagagattaatatctgtgcagcccagaagtcactgggaacatgtggcctgagacaaacataaattctgagcctggtgttttcctctgtggacctctccctccacacctggactcttggaatgagtcaccggtagtctctgagagtgaggaccaagaagcagggattagcacgtgttgaaattctgagccaccagtcatagactcctggaggggctgttcatcttggtgaaccccaaataaagtgggcttcaggggagggctgttctttcgagggatcttcccaaagcaaagagtctccctgggcagtttgggggcctgtgttctagggatagtctcatgaaataggtgataaaaaaactttttttctagattcttccactctcaggagaggatacattatgggctgcaatcctgcatctcctccagctatttcactatctctcaaacaacattgtcccagctttctgtgacattagcctaaagatgttccttgagaaaaagaggggaaaagctagtacatagcgtgccgagaattttcatggctgcctctaccaagagttttgaaaagattcacagactcacggctccaaaaacactattcttaaatggtttcagttatggttaagaaaactgctttgtattttttagaagcacaagccagaaatgataagtcaaaggtggcatttccaggttaggcttgaaagttggatatttattaccttgagtggaaaattttttctacctggagaaaggacatatggccttcaggcagctcatgaagacagagagagagacacacacacactagaaaattggtttaaatcaagggtaaaattatcttataacaaaagattcatatttgtgctggtttaaaaaatactttaaacaacttcaggtaagtttttgcaagactgctaagctgctaagtcactttagtcgtgtccgactctgcgcgaccccatagacggcagcccaccaggctcccctgtccctgggattctccaggcaagaacactggagtgggttgccatttccttctccaatgcatgaaagtgaaaagtgaaagtgaagtcgctcagtcgtgtcagactcctagctcccagtcttccttaaaaggaacaaagtgcaagcgaagaagtcttttctttttcgctgacattttcttccaacaaatgacgggttgctcagaacacactttgctacccaccttgcaatgacacaagaactgggaggccatcagagccccaaccagtaaatgttagataaagttcttccgtttccttagaaaagaattgtaacataagctactccaaactctaaaagatccaccaatattaataaactcaggccaatggtctatctcatcattcaccaaattcctatgtccagggtacgaaaaatcttgccctgttctcagacaaagacaactaacctgaactttgtgctcagtaaatcggcttttaggtaacacatttgaataaatcatctgggtctccgtcatcttgttttaagaaaaatattgaattattggcaaatccttaagaagcaactctggctagaacccaggaacgacacaagtctacagagagcagt

SEQ ID NO: 52994 - DNA, 1287 bp, Bovine  19866881166572
  misc_feature (1)..(1): n is a, c, g, or t
ngagcggctgtcagggagaacgtcacagaaaatattttccttcagggattaatagcaggttaataaataaccgatcagacccagttgaaatgcctttgggtaagagtggttgatctgcatacaaacatgggtctcttcttattgctttagctttatttttttttaatgtttcaaaagagcaaggaaaatgttcgtgaatttctcagacatcaaatagctctcaaaaatgtcaacaacatcagtgtaaaactaataaaaatatggcacagatttagcacttgtactgaaaggaaatataaaaacagggaaagagaagcatatggaaaagcatgtttggggcttgaacagatcaacctcacatattaaaacaaacagaaaccagagcatttctggtgggaatgttgaaaacggatgacttactggagaaacaaatgatgatgtccccacaccgccttgcttttcctccaacaacagtgaggttgaaaatggacttcaacttcaagccagtacttttggcagtctgagcaggggagggtttcagaccttaatttctttcccagccttcaatgtgggggaaagtcggctttggcgccgagacatgctgtcagtgcaggcccatccgagagggatggacatgcgctcaggagagatgtctggaagatcttgaggtgatattggctgcctctgaagctcaatttctgcatctagaatgtagagccaataaacccttgttcccaggtttcttgtgagaattaagcattgtaacacatggaaagcgcctgcacacaggcgacacgtagaccagcgtgtccaatacaaatttctgcaatgctagaaatatgccatgttctggattgttcagtagaacagcttccagctctgcatactcctggggcacttgaaatgtgactactgctaccaaggatacacagtttaaattttatttaattttaaataatttaaagagccacacatggctagtagttatcctattggatggctcaggtctggaccatgtggctaatgttgataataatgatgatcgtatgggttttgtatcctcaaattggagcctcaggtttcgtgctcaggggggctgttggcatatctaaagctcataggtggagttggaggctaaatttttccatgacaagttaagtcctggtgaggtctctgtgcatgtggctacccgtgatcaggttagctgagtatagctgttcttgagttctgtcttctcccaaccagtcaagaagaaggccaagagaagcaggtattctatgtacaaga

SEQ ID NO: 52995 - DNA, 967 bp, Bovine  19866881206202
  misc_feature (1)..(1): n is a, c, g, or t
natgtgccagcaagtcttttgcaggaaggtatttgctttgaatgggccacatttcccctgtttgtgtgccctgtgattttttgctgaaaacactattttgttaaccctggaaataaattctctcccttctccagggggtgccatttcttgttactttttttttttttaaactagtaggctatctctgtgccaaggatcaggctgaggtgtaaactaaagttctcaggtctttctgagcctgctcctttccctgaacatgtggttactttttaattttccttgtatatacagttgtttttgaatgtttttaatgtctgactcccatcatgggaaaaagaaaaaacattaagcgggtagaaaaaatgcactaacctttgaaatcaccaggaagtcaatttagccaactgaccaatttaggaggaggagtctgtcacaacgcggaggtgcagaaacaatggccaccctcctcttcacaactctgggataagagcagatcccagaggtacggaagacagggtcctttttatccactctggctctacaagctgtgtgcaaggcactcaagaacaagtgcacagctgccccacagccctgcgggtgggagatgggtagttgcaagtgtgctgagagttgaagttgaccaaaactgactgcaatttacaattcaagccttcccctagaatttgcaattcttcagtagactccagagtcccaaaatagttacattggacaaattctgctaatgcagttgtctaaggtgtaaagacagattcctagttgccaaattccccaaattccctggttgccagatttctacattgccaaattccccgaaaattatttatccttgtatattgatcttgtcaccaattgtattccttgagcttttgaagtacaatcagagcatcacaaataatcccctatttcttcctttaaaatgtttgtatctctcattactttatctgga

SEQ ID NO: 52996 - DNA, 2536 bp, Bovine  19866881220057
  misc_feature (1)..(1): n is a, c, g, or t
ngtgacccatggctgcccagtggacagtcttgctttattaaaaacatagttctggggattaagtgaagcaacagtgctccatccatgccaccctgtggtgatatcctgggttcatcagtcaggtctctgtgctgctgctaagtcgcttcagtcatgtccgactctgtgcgacctcatagacggcagcccaccagacttccctgcccctgggattctccaggcaagaacactggagtgggttgccatttcctcctccaaataatgacctgctaatacccaaagctctgaaatgtaagtgttgagcagtctcgaggatcgtccacacccaagagcagtggggtataaagccttctcctaagagcagtctactcagaggccttagcaagacgttggagcccacgggctgggttgttccatccaggttccctctgcagggcggggctgcgtctcagatctgagtctttggagaggctcctctttgcccgggtcggacagtcagctctggagtaccccttttctgaggacgacgacgagaaacacatctgccagttgggtggtgatctggagcagatggacctggcatccgcggcagggtctggcgcggctcctgggcgttgcaggcgatccgggttccccagagtgagtgcacctccctccaggcgctcagctcctgctgcccagagccgaggctctgcgtggttcgccactgcctggtcctgcccgtgctccagctgcaggatgcacacgaaggtgtccatggagaaggccacctgcacctcaccacagctgcactgggaggccgctttgccataatcaatccagcgtggggtggcaaaattgatggtgtctgtatccaatgctaatttaaaattggctcttgaacagaaatgtgttgatttcagtgtggctgtgaccagccgtccccactgacagcaatgactttcctggctggctctcttccagccccgtgattgacttggtcagttgaaaacaaaattcaaatggcagccactaaatggtatgaaatatcttaattttaacctaaacagagggcaacaacagcctccaaagctacagaagccagggctcagcggatgatccaaaagacaagaagaaaagtcagtttaaagaaaacaatcagtggctgaaagctattaagttcactcttctagttcaaagagattcgaaatggcaatttgtcaggcaactgttgtcactttagacgcccctggttgtttgctttgaagcccttgattgactgcaggagcctgggccagattcttctaaggacaggatttccacagttgaacacatttatgtcacagtaattatgactcttcccaaatttaatcaacaaaggcataagagtgcaagtttgagaaattatgcatgtgttcagcagggtccagggaatagcctgggtgaacgtggataagtccagacagccagctggatggttttggtcacctagttgtatcaatcccaggctggagaaggttgtctgttggtgagacaacaatgaaacagacttcaacttgagaaggatcatttctacgaatgagcaactaacagagagtaatcaagtgtgctaacactgtattatctctctagccagccaagctggggtctagaaggatctcttttgctagtcatttctgaaaatagatgcaaaggtgagtgcacccctgggaagcaatgacaggcttccatagagatatgagtacaggaaaaccagcgtggaagagctgtacgtgcgtctatgctcttgactcacacttgcctctgaaatcgaacagaatggagagagtatggagaagccttctgaagcattttgacatcaagaaaattatttgcaaagttatttgctattttcaaggctgtcaataacctcctcagcaatggaagtgtgtccgtgggtgtttgcagaggaggtgtgaggggtgaaatttgtcaggcaggggtccaacctacgtgtccacaaggaaggtcaaatcagaggtttgagactgaaagaaacatggctatcttcacagaccagccccgtttccaaactcttacataccccctgacctaggcaacagcagtgtcccaggtagaaacatggagggtgatacagattaaagatgggagctgaggggccctgtggagagcgccaatgaggtagacccttgcccagcagctgtgtgccagatgtccccacaatgcagccttggggacacatccatggcaagtaactccagcagagaaaaaaaaaagtgatttctgcatacggctcgtggggccaggggcaggagtgaggtcggaaaagcaagtcaacaaaggcgggaaggacagatgggaaaaaggtgaagccaggaaagatctggaaagctgggaagggagcttgtcacagtcgtgtacccccaagtacaggaagccaggcgacaacatgtgtggagcaaaagctcatatccatacctggcaggaggttccaaggtcaaagccccaggactcttggcattcagtccacaatgtactgtgcagaccgcacaaggag

SEQ ID NO: 52997 - DNA, 726 bp, Bovine  19866881332050
  misc_feature (1)..(1): n is a, c, g, or t
nccaataatttgatgaggacacaggttttaatcaagcctcttccactaaaatagcaatttaaatccccatcgtttaaactggataaaaatgcttaagctgtgaatattggggtgaaaaataaaaatttactagaaaagaaacaagaaacacaatatctctggggaaactatgatttgacacaacagagggatatccatgctgatttaaacatcaggttggtttcaaggccagattctgggaatctgaaggtatttgtcttgcattcttgttgggaaatgaaggtttacaggtagtattgacctcagaataaaagcgaccttggaatgagaaaagagagcctctaagctgatccagaggaaatttttattttacttattaaaagaagaaatattcctcccccaactcaacagatttctatctgaagtggaaacttcaaaattgactggaggtgctgggagggggtaggccagttagggagctgggagcgccatcctgagggctggtgttccctttgtaacagataagacaatcaccccagccttgtgttcgggggaggcagtgttgctgttttatttcccttcctgaaatcactggggaaaggggtggggatgggggggtcaggcaggcggtcaggttaattaaaatgccagcccaaggtccaaggcttggaaagcctgtatatgagaaacagaacaaaataaaacaactcattctgtaattgcttg

SEQ ID NO: 52998 - DNA, 704 bp, Bovine  19866881460278
  misc_feature (1)..(1): n is a, c, g, or t
natgtaagccataacatgcagtttccccagcagtaattgagttttagtaacctctgatactggatatacggacaaagatctgcttccatcacctcctgcacttaatctgccttatgatcagttactccggaagacttctttaatgctaacgggttgcccttttccttctgatgggaagtcccattataatcttctccccaacaccaaggctcctcagcagcccttatcacctggcaagttgttagggaagcagattcctgggttcccttccagtactaggaaaatcagaattcctggggattctgtccaggcatctgtattctagccagctccccaggtgaccctgatgtttgctaaattttgaaatgatactttatgctaaggagatattttttccacatgtggaaagacatgtcccctccatgtggagggctccttgcagtttgacacaagcttcccaagcaatcaggagctaagatacggccatattggaattcccaggctggattaatatggatggaataaaaatgcagaaatggtatcaggaataatgaaaagcatacagcttaaaataatcactggaatacttgggattcttaatagaaattatagggggaaaagaacgtttgaaaaactaacttaccaggaaaagaatattaaattcggagaaacattgcagagaactagatttttcgagatgccaa

SEQ ID NO: 52999 - DNA, 1433 bp, Bovine  19866881500618
  misc_feature (1)..(1): n is a, c, g, or t
ntgcactcctgtcttatagcaagaaattcagagtactgtattacgctaacataaacatatgtaaaatctacctcaattttcaaaatttgaaagccagcaattccaatcttggctaggtatctggaaaaaaaaaacaaacaaacactaattcaaaaagatatatacaccccagtgttcacagcagcattatttataattgttagagtatggaagcaacctagggcttccctggctgctcagcctgtaaagaatctacctgcaatgcaggagatccagcttcaattcctgggtgggaaagagcccctggagcaggaaatggtcacccactctagtattcttgcctggagaatcctgatggacagaggaccatggcgggctagagttcaagggattgcaaagaatcaggcacaactgagcaactaacataacacacggaagcaacctaagtgtccatcaacagatgaacagataaagaaactgtggtacatatgtatggagcggaatactacctagccataaattggatgaaatattgccatttgaagcagcatgggtgaacttatgctaagtgaaataagccagagaaagacaaatactgtatgatatcgcttatctgtggaatctaaaaaatacaacaaactggtgaataaaacaaaaaagaagcagactcaggatctggagaacaaactagtggttactaatggggacagggaaggagggcagggcaatataggagtaggggatgaaaaaaaagtttattataggattatatgaaatcacgtgtgtgagattttgacaattgtaaagtactatgggatttaatatttcattccaaaaagtttttagaattaaaaaataataacaaagtaatacagaagaaaggaagcaggcttgaaagacactttgcacttgtcaggacttttgggaactgtctcctgggggctccccagaagcagaaaatctctgtttttccacagttagacaccgagagtccccaggaacaatagagctgaccaatgactcagtcagcagagcagcctctgggatcatctcatcaaggccctgcccagtttccatggcagcagcaagagtctgttccgctgctaacaaagcagaatcctcagtgatcagaggcctcgcctgcatagaacctccaggtgctggtgtggccagggacacacacatagatgggcctggcctgtggttcccctgtctggcccgaggtgtttaaagcctggagcttgtcaggccccgcactttggaaatccagaggggctcccctgttaatctttgggcaaatattttctctgctctgctggcttcgtggtgagttaccggcctacgcctctgtggcaaattaatggagcccagttgtccgcttggggcaaggggaccgagactttccaccagcaggcagcttcgctcacaggggg

SEQ ID NO: 53000 - DNA, 1920 bp, Bovine  19866881561910
  misc_feature (1)..(1): n is a, c, g, or t
nctttgatggcatataatgaggaagtatgatagcaggtacctccaggtaacatgtatgaaccatgtaaaagctgaaaagaaaagtcacagaagaaccagagatctaacagagcttgatttggaccagattaagacagcatgctgcccatctgcctagatccttatctacccattgaagtcctgtccactcccacctggccatccctgcatccctctgcttaagcactttggttgctggagtcttttctcctaaaggtgcttctggctagaatttctgggggcactaacagccctgaagaagcccttgactagtcactgggagagttagtgggccccagcccttcagccctcggttgggatgacccccgaggtgggctttctacactggggcctagtgtagtcccagcaggagtaagtgaattgttcccagcagggactgtctagatgacaagcccttcactccctgccttcctgctcatttctcccactccttgatctgtgtttcctgggaccacctcctaagtaaactacttgcaccttgattttggtctgcttctaggggagcacaaatcagaaagcatgacttgacccccatgtctccggggattagttctgagtggggttggtagccagggctgtggtgcaccctcagggtctgagttctcgcccggggctctctcactaatgagttttctgagctgcagttgggtgaaggcgacccacttctgcatcccttccaactcggtatagccgctgccaggagccgggagcattggggtaaacatgacatttccctcatgctcagcaagacaggaagttcattaaatttagtataaatctttgcctttaaagtgccagttggtgatttattttctccttctgtttagattttttagagcgtaggtgccaacctctggaatccaatccaaaaccccaagcgaagtcctgttgataaatcaacaaaagccatgtttgcacaacgcaagccaaatgcaaatccctcatccttgtgaggaagcctaatgatcacttttcagtgttataaaaggtgccgtgtcgaagcatcttgctagttctcaccttggcctctaaagaacatcctctgactgcctttcttcagataaaatccacagataaataaaacttctcagggaacaccagggccacaaacacatctgaggggaaagaaaattgcatcaggatatagttggctggcccaagtcctgcttatctctccatcatgttgggtagcacagttcctaagtgtgcgcttctccatctactaaggggtctcaatgtggcccccacacaagaccttagagaaacctgcatagcattgctgaaacgtggctcacttctacacgttatcagctgaggctcaggcatggatctgaaaccatctgacactctatttcctcatcttgggaggatggttgaaaggattaaatgcattcacttttttgttcttccagccaagaatatttatcgagcgcttattctgtgccaaaagtgggcgaggcttcgggatatataagtgaaccaaacaattatggccaaaggaaagaagttcaggtacaactgaagaaccaaaaacaaagagatgaagaaaaaagcaggccaaccccatcagcaagagccaaaccatgccaggtctcaaagccagtgatcaggaattaggtctttgtgcaaagagtgactggaaaccattaaagtgtattgagcaaggcaatgggtggcacgagaataaattagggacaagaagagaatggatgagatgagagtaatctcataaagcatccatactagtgtctggcccagtacaggactcagtaaatgctggttcttccccctcctctttgtgtctttcccctcagacacaggagttactacccagccccttaaacacctcccccaaagcaa

SEQ ID NO: 53001 - DNA, 782 bp, Bovine  19866881792300
  misc_feature (1)..(1): n is a, c, g, or t
ntgaaaaaaatcctgagaaaaaattcactaaaactgaaaacaatttaaccgtattttaaaaatataaggatatgtgaaatgttacaccagtatgcttttcaaatacaagtaggttacctataagcactcattatgtagtaagttagcctatttaaattatgattgccaattcatgacaggaaatttaaaaagcaagaaacagaggtaatccagagcagtacatatccaaatgaatcatgaagcttttgtagtcacctctataaacaaaacaaattgtgtgcacacacatacacacacccaaacaaacaacaaaaaactcaagacagtcaagaatctgtctgcaatgcaggaaacccaggttcaatctctgggtcaggaagatcccctggagaagggaatggatatgagttacattactgaataaacttttcatagcctacactctgtcagttgttcagagaatctgattcccatcaccttggaaataaaacatcaaggtttttttgtgtgttataaacatttatatctagataagggcttaactatttcattaatggtaaaatttaaggaaataaagttatagcttccttgttgcaaagacgctctgtggtaaaatctcaataattttgaatattctgatgtctgtttgatctaactcacccctcccccattataacatctacagtctgttgagaaactctaaatcagatgacccctcgttatggtgaccacaaatctcagaatttctggagcaggatcaattcccaatattctgtcttttt

SEQ ID NO: 53002 - DNA, 833 bp, Bovine  19866881859672
  misc_feature (1)..(1): n is a, c, g, or t
nattaatgatgcatagtccaataaattcctccagctcagatgcaagagagaagaggaaattacaggacagattaactggtgcccactatttccatgtctgtctgtaccattacacaagtcagcatgtataatgttcacaaggttgggattttaatccctggttggtatttccttatcttgctgttgaaacacccaaaagttgaagaacaaaggtcaatatttagacacattatgaaatcacttcagtttttctttattggaagcttgtttggatttgttgaattaataatttctaaagttggtattcaacattgtgtaagcatgacttttaaaagtagttctcagccacctgtaatgaataattactagagggaaatgacagttgatctgagtttcattcatccacgtattagagtaaaagaaaattaagtaagttctccagatagaagttttggataagaattgtaaaaatagaatacagctgtccattaaaaatattattttagtaatgctaatagaagaatggaaattaatataaacttatattaaataatggactgaatacctctatgcaggaacatccccaatgtgtattctttgtaaagggtcggatttaatagcaaatagaagggggaaaggtggaagcagtgacagattttcttgggctcactgcagacagtgactgcagctatgaagttaaatgatgcttactccttgcaaggaaagctatgacaaacctagacagcatattaaaaagcagagacatcactttgctggcaaaggtccacctagtcaaaattacggtttttcctgtagtcatgtatggatgtgag

SEQ ID NO: 53003 - DNA, 1954 bp, Bovine  19866880410361
  misc_feature (1)..(1): n is a, c, g, or t
ntattttagtacgtacatttccttttattttactattcataaagtcattataaatcaaaccaattgcagcataacaggaaatgcttgacattttctatctcaaagactcattcataatttctcaattacatgtagtttaaatacatagcatccaatctgcagtctttgaaatggtgccaaattccatctgctttcctgaatattaccacagttatttctgagcatgatgtgagagagggcttctgagaactctaacttgaacacaagcctctcttgatagaaccttactgttaatcttgcacttttctgttcaataaacctctcttacataaatacacagttttattgatttccatatctggctgcttacttacctccactaacaatctaccagcatttcttttccattcaggcaaggatgagcccattcctcttccaagattgtctcaaattcacaaaaggttgattctgaggaaatgccaatgaagttgccaaattaagtgttattggcataacacttaatcttttgatggaattcttgggttaggtctcaaaattctacccagaaatatggagaatttatactttgagaaagtaaacctaaaactgttctacagacagtgtcactagtaaattatctgtattatttcaatttttcttcactatttcttggtttatcccctgctgatagcattgattttctagagtacttgtggtgtaatacataatgtatgcttgcattttaaaaaataggaacattgggttgactttgagaatttaatattcctctggaaaattataaatattctagtgctaaagtctgatatcccacagacacaccaaagaactgaaacaaatgagaaaaatatcttgcccttgatgcattaaggctaaatcatgatagatttattacataatctctaacacattctatgttaaaatcatagcaaaagctctatcattccttaaaaatttgacatgtgattgcttgtaggcatacccaggtattttctcattcattaaaaaatttttgtttattttgcatttgatttttatgaaaatgctaaaagaaatattaaatacttagagcacatgctgcctatatgatttctttcagtttttagatgaacttttggaagttgggcccttcatctgggcttctgttatccctctccattgatcagtatcttcatgtcttatacaagttgtttgacttttcagaattttctgtctctcatctctttagcaatatcaacctccctccaaatccctctagcacagttctttctgtagcagagaaggatggttgtccatccatgttagcaacaatctttaagtatggtgcaaaaatctctgggaacaatttatactagttagagaagttacacagtgatgattttccattacttagtcagtttggctggagaaggcaatgggatcccactccagtactcttgtctggaaaatcccatggatggaggagcctggtaggctgcagtccatggggtcactaagagtcggacatgactgagcgacttcacttttgcttttcactttcatgcattggagaaggaaatggcaacccactccagtgttcttgcctggagaatcccagggacggggaagcctggtgggctgctgtctatggggccgcacagagtcagacacgactgaagtgacttagcagcagcagcagcagtcagtttggtatagattccaaccagctatgggcttccctggtggctcagatggtaaagaatctgcctgaaatgtgggaaacctgggtttgatccctgggttgggatcatcccctggaaaagggaatgacaacttactccaatatccttgcctggggaattccatggaaaaaggagcttggcgggctacagtccatgggtcataaagagttggacatgactgagtgactagcatatatatacatatggatctcagg

SEQ ID NO: 53004 - DNA, 2626 bp, Bovine  19866880438678
  misc_feature (1)..(1): n is a, c, g, or t
ncagtaaaccatgctgttcatgtctgctgagctttaattttactttctctagctcaaggcggggcactgacaggcttaatgaagacattcacatcatggtaaattcttagggtaatccaaacaccttaaaaacctgttgtttgctctaaatatctgagtaagctagacttaaaactgaattaaaactttcaaaatatgtttttatggattttaaaatgcaaatgccctattctcagaagatttgtttacagatatgcatataaattgtggttgtatgctattacaatttttccattgataatatgatagtgctaatgaattttctaaataggagggacttacaggtagaaatcaggttgtggtacaagttaggaatctcctttgaagctatttagaatagaaagcacactgtttttatattgtatgtttatagctagggcttaaaattaactttctgggaaaaacagagtattttacaatagattgtacatttacttgaagtagcttgggaaactctcatggagacttttgggacctaattcatttccatcaggtaatgcatttgcattgcagggaaggaagaataatttttctacctaatttactacccttctaagttctcagtggggcccctctaataaaatacagattaacaagagaaaaaggagtttattgacacatgtagctcatgaatacatagaagatctgcaggggcaaaaataaataacttttagaggtggcttagaattcaggttcaaataccatcttaatacaggaaagggaaggagatgcaggactctgaagggagagtgagtgatttttagaaaagatgaatgggcctttagaaaaacattggaggcatgatggtttgtgacaaagcttatctgaatgtggtgtcaacctctagtgtcctgttttgtgataagttaatcctccttgaatgataaacactcccctacttttctgggtgggattgatgaccactgagttccttttagagcatttgtctttaatcaaataaggggaattcagagaaaacctttccctgaatttgctattttctaggtacctacaactaaaaataatcaataaaacaaagtggaatacttgagagtggcatgccttgaattcctacaggaatattttaggctggcatattctgtgacccttcaagcattaactctgaaaactgatcaactttccaatataacaaggaggatgtgacaaattatatatccattttggcctggtttataagcattccttcataggtccttctcaagtccagattcatttacattttttcaatatccagtatgctatcaaccctacatcatcacataatgcaaataattctcaacaattctttcttcaatcaacattagaaaaccatgacattgaagatctcatctgagattacaatcattaactttccattgcattatctaaaggcctggcaagaaaaatgatactaaaagtgaccaccactgaagaacatatcatcaatctggttctcaggttatatattaaactcagtcctatctttggaaccagaaagctatataaatgtaccacattaacctagacccatgcagaatcgctttccctgagttatgtctcaatattcaactgtaaatttatacctcgagaccaaatgagaaagaaacatggagcatactgtcatggaactataaaatcaaagtaaaaattactgccttttaggttattcaaagcctcctaacaccgaaaaattttaataggaaatatgatgtttgcttttcgaagtggtttgaggttagttgtacgtggcaaggacatggtttatcctagaacttatattcatttaaggtagttgcgaggactgtgatggaaagtaatagaagctaaagccctctcaacaagaaataatacatttatttttagagtttagtaccctaggtagacccttgagttaagatgacaggccaaccagatgtttgttatatcattttgcttctggaaaatttactaaattaattaagaaataaacacaataattgaaactgcatagtgacagtatctccatttcagggcacatcaagttcatttttgaggaccagtcttattcatttatttaattacctgcctgggccatagaggcagttaggtgcggcctgggtccacaaggcaagaatcacaaagagaaggaagtgcaacaaaaatgatagtatggggaaaataaaccactgcccagggaagtaggcttgaaaagatagacagttaagggtatcttcaaacactggtatcttcaaaccctaagacaaaggtaagccttgggggtaaaaataggaacattaatcaaaagtcatagcacccatctttctgttgtgatctggcacccagccagatgtctattgcttggttgataaaaaaaaaaataaaaaatagatctcttctctaaaggatttcctgagccccaggaaaaaaaaaaatctcctaatttctgacattttcaaacagttgtaacagtcatgtctgtccaattgctctaaaatgaacctatcaaaatacccaactcggcactgacctatgatgtgctttacatggctttgttcaaatgtatttaggcagtaaagcttaataagat

SEQ ID NO: 53005 - DNA, 2629 bp, Bovine  19866880461140
  misc_feature (1)..(1): n is a, c, g, or t
naaaaagcagatcaataaagggaacaagtggaaagcatctttgctcttttttcactccaaagccaccaatgtaaatccactctttccatatctccctaattctgcattctgttgctactacttagagcagtatttcaatgtctaagaattgggagcaaggacaggctatttttataataagccagagatgaaattctagaatttaacctgtctagaatctcttttccaaacgctttgggaggcacatgatcaggaagtggatttagctgttgatttagaagcaggatttcctcataaggagtaagatgttttcattaaatgatatgtctgtttatattttcaagtaatctatagtatccttagttgtagtggctcactcgttcatatcttcagtgaacttttatttagtgctaattatgggtaaggcatcatttagtaagggaaatataggatataaaacaaaaagtactctacagaaaataaagtacagtgggaactcagaagcaaactgttttttaacttgggtggtttacagacaaaaggagcatttgaatagaaccttaacagacttctagaatttgagcaatttgaaaaggaagaaaggccattttgggtggaggaaagagagtgagcaaaggcacaaaggcaggaaaaataaaatatgtgcaacaaataagatcagtctggtgaacatgagactcttcagtccaaacatcacaaaatatcgtgactagccatgcagctaggtgtagatattacgtaatcactcagtaagcagagattccagtaactgctatcagtcactgctgccaggaactactaatcaggcagcatgtttagaatgtcaagacgatgattgttaatatgtgaccaaccaaggaacttggtgcctggtagaggcatctggcccaaagtgatataataagtaatccaactgggtaatattttaccttcaaaaccaacccagtggttgggtcaataggcaaacactgttactgttcatttgtgaagaatattttggcaacttcaagaggcttgagaggaacaggctgcacacgtgaagcttcttttgctgtagagcgggatgttccttaggacattcatgtggcaatatcatatatttttttgctttctaaactcaaaatgttaaaactatatcattaacatagaaatagaaaaatcttattgacctcaacctcaagcttacaattaatgtgtctttcagctaaagagtgaattcaaatgatggtagcattgctgatttaagttttctttgttgcattcagcactgagctaaaatgtcctagatcagagaatgattccaagtcaaactagttcaatgtcctagtccaggctatgtgctttatgggccctgagaaaaaggcttttcttttattcctcaacattagctagaaatgcattttcagctaacatttgtcatgtgtttattatatacacagcaccgtgtcaggtacctcataagcattacccattttaatcttcaaaacaactctatgacagaggttaatatactgatctctgtttcagggatgaggaagctggggattagggaggattagtaatttataccctgtcacatagctaataagaggggcagggctgatttttgagtcctgttggactgttaaagcaggccatgggcatctgagcagggacagaggcctgtgtgttgtaatgagaagcaggcaagaagaggctatcgctttcgtctgcctttctgtctcttcaatttctaccctgctcttcttcctgcttcctcattttttgctatttttcaaaatcacaactcctctatttccgtgttccttgcatgtaaatctttttttcatttatgtattaatttatttctcatttcactcactgatttatctctatggtagcaggctttgtctgctaggaaattacaaggagagctagtaagtgaatgaatgagtggatacagtgcaatgaaatgaatggagtacagttgctttgagggcataaagaaggaaaaatataaaaatttgaggcctggaagattatgcttgaattgtgtcttgaaggaagagaaattaaatgaggaagcaggaagaggtttccaggcaaacacactagcatctgtatagtcattgagttggggcaatagccaaacataactgggatctgatggtcatatgggatggtggaataaatgcagagtgtttcctgggagtgttgagagatgaagctagagagaaaggcaggggcaagcatgtaaagttcttcagtgctaaattaaggagtttgaatgttaacttgaaagttacaggaaattgttgaaaggatttaaattacggaaatacatgattttttactttaaaaatagcattctgataatcatcgcttgcatagccagttcccatgcctcgaaaaggaggccctaagtttgcaccaagattgtacattactggccttgagagatttcaaagccttcatcaccctgtgatcttccctgatagaaagagtttttcaccctacttcctgattcagaagtcttgctcaggtgggtacaaggcaccctacataatttggtccttagagatgaaatttattgttgtaaccatgagagcctgcttgctaggcgcaagat

SEQ ID NO: 53006 - DNA, 1300 bp, Bovine  19866880507767
  misc_feature (1)..(1): n is a, c, g, or t
naacattgaaaacatagaacagctttagggctgtagaaataaatgaaaccaacccaaaagagaaaagaggctatttattcagaacttgctatggcatgggtatccgcaactgtcactcgcatttgtcagagactccaaggcagccagaagggtggggaaaaaaaaaaaaaaaattaaggcttcaagtatgctctgattggatgttattgacactgggtatttggaggagggcaacgagaatcacagcctagtatataatgaatttagaaagcagattgatttctagttggtcttgagttggaagcagaggcagaaattagggaaactggcagtcattgactaaatcctaattgtcctgggccagttactgaagacgttatggttttgcttcttgaactggctgatacagaggttgtaggtcagaggtttattttcctatattatctggccattgtctctgtattcagtttttcagaacagaatccaagtcgttaacataaaaggactctaatatcatacctgctgctattatagaaatattttttttaaataaatttaatgttctaacttggttttaggctagttctctcaaatattagaagtcataaaataatacaatgcaatttgaatattttcatttgtgtttagtgaaatatgagaattgtgagagaaataataagacagcccctgttattgaggtcattagacaattatttctgtatctttcggagtgcagaataaagaagcagtggggattttacagaggaaattttttgttgtggtactagtgactgaatttatagttatcactagtaaagtaagaaatcatcaacgcaaccttgaaagcagttaaaggacaattgagttagaaagatgggtcagcatgtgtagcaagttctagtctaacctattagactaactggagaaatgaaacagtgaaataattttaattaataattaatgttcaacttttgaacatttatgtactccaagttcagtcttattggctattgagtattaaaaataataaaatctaggtaagtcatcatcgaaattagtgtgatagatatacattcagtacttttatctgtatgcaaaaaaaaatctatgatttaaatatgatagtgtctttttagaaatggattgtggcagctaaaaatatgtttcaatgaattaatggctcattgtgctacttttaaaggataataagtttatgcttcttatgcataatatatgtctcacttaactgctgttaggaataccatcagaaaatgtatagattatcaacatggctttctag

SEQ ID NO: 53007 - DNA, 4842 bp, Bovine  19866880539163
  misc_feature (1)..(1): n is a, c, g, or t
ngaattggctttctttattatggaggctgacaagtcccaagattacaaagggcaagatggagacccaggcgagccgatgatgtgtttccagtctgaaaggcagcaggctcaagcccccagaagagctcttgtttcacttctaaaggaaggactaaaccagtgtcccagttagaaaggcaatcaggccttcctgggcctttcagggaggaatttctcctagtcatgggagagatagacttttgttctatactgactttcaactgaataaatggggtccaactcacattagggagggcagtctgctttacttgtgtattcaaatattaggtctcatccagaaacattctacagacacacccagggtaatgtttgaccaaatgtctgggcaaggtgtgacccagtcaaatcgacacaaaatgaaccatcacagctggtaaggttgcaaacataccatcaatatgtgtcacactactaaaagagaacacgtcctaatgttctctttttagggggaactaaggaaatgaataaatacaaatagcacacaatttgataatctccacttgaaattattttgaaatatttaatgtcttgaggtaggggcttgtaagcagggggtcctcttttaccttagctaaaaatacagatcaaatagagaaaaaacagggccatgagttggtgggcagcaatgtgcttgaaaattacagtgaattatctccctcctcttatcaggagaaacagagcagaagaagacctggcatcaaagtactgattggatctacatcctgcaggcttggcattgagggtgctgggagccaaggattggattgagggaaatcatcagctgtgacaacaggccagaagcactaagcaacataaaacagcaaagcagaataataggagcaaatgcaacaaggcaattgctgaaatctgggaagagaggcagcttctcagagggtatgagttcactaaaagtgaaaatgttagttgctcagtcgtgtcccacttttggggacccataaactgtagcccaccaggctcttctgtccattggaattctccaggcaagaatactggagtaagtagccattcctttctccaggggatcttccttacccaggggttgaacctggatctcctgaattgcaggcagattctttaccatctgagccactagggaagcccatgaattcactggtagatgacaaaaaacaaatctcctggaattgttacccatattcctcataacagtgacttgtctcctccagacgctcaaaggaagtgaaaacttgataaatataaattatactttcatgtttctgagaataccttgcctgatagcttataaaaagcactagtctctacaaatttgaatgacacaggagaactaagatagccttgattaataccactttttgcttagatagaaaagagagaattcgttttgggttctagacataatatttggaaatctctgttcaataaacttcacttaaaaagtgctttgtattcttggcaaagtaaaattgagaactcagattttctgcacagttcaaacctccaattcctttttgacctgaggatctggctattttttgttttacttaaattgccaacataatcacctcaattttctcttccattttccatgttgaaaagagaagtgacatcactcactatatggaagtttagtcaaaggcaacttggcccagatgttgacattagttttcatcaggagcttagctgttttgggcttccctgatggctcagatggtaaagaatccacctgcaatgcaagagacccagctttgatccctgggttgggaagatcccctggagaaaagaatggctacccattccagtattcttgcctggagaattccatgaacagaggagcttggcaggctacagtccatggggtcacaaagagtcagacacaactgagtgactgaactgataacttttttagcaatgcccaaagtggaatccattactaaataatcctgctggtttggctaatcaattaacactggaagatgctgggagagtttgggtttgacaatttcatgcaactcttataaaggtcctgaagctatttttcccttagtacttagttttctaactttagaaattatttaccacttggggattggaactgattttattttaaaagctattgatttgctaatatatattttgttgttcataaaccgagatggcagagaataaggcagagtgcccactgagagagaactgaacaaattttatctcaaattctctaaaggtaagtcacaatttgtttttgcatcactctcactctcaaaacgcaatatggaacaaaggttattcactatctctcattaaaagatttttcaatattttagttttgatactgccttctttccagtttgtcaacagatccataatgagaatttctcttatttcacactccataatccctggtctgcagcccttgtcctatggtccaaaatggaaaaaaggtccaaaaatagagataaaagccatacacacaccataaatactttaaggaaatttcatgaaagctgctgctgctgctaagtcacttcagtcgtgtccgactctgtgcgacctcatagacggcagcccaccaggctctcccatccctgggattctccaggcaagaatactggagtgggttgccatttccttctccaatgcatgagagtgaaaagtgaaagtgaagttgctcagtcgtgtccgactcttagggaccccatggactgcagcctaccaggctcctccatccatgggattttccaggcaagagtactggagtggggtgccattgccttccccaggacaatttcattatttcactggttggaacttagtcacatggtcacactaccaacacgggtgtcccggaaatgtactgtgggtgttcatgtgcccagctgtcgacagaggatctcacttaaacctatgttaccaaaatagtgtcattatttactcacagctttaaaacattaaatatattgatgtatgtacaaagacttttatcaccattatttttaataaaaatattagatgccacaaacatttctaaatacagaattcttagatgtattatggtactttgctgtgatttaatgatatgtaagcactaaaatcagttataaaaatcctttgtgtgctcagtcactcagttgtgtctgactttttgtgatcccatggactgtgcagcccaccaggctcctctgtccatgggattttccagggaaaaatattggagtgggttgccatttccttttccaggaaaaaatctacccaaatagaaaatgcatatatgacagaacatgaaaagtagcagaatagaatagaaggggaagaagtggaagaagtgacagactttattttcttgggctccaaaatcaccactgatggtgactgcagccatgaaattaagagatgcttgctccttggaaggaaagctatgacaaatctagacagtgtgttaaaaagcagagacattactttgccaaaaaggcctgtatagtcaaagttctagtctttatggtagtgatgtatggatgtgagagttggaccacaaagaaggctgagcaccaaagaattgatgctttcaaattgtggtgctgaagaaggctcttgagagtcccatagacagcaaggagatcaaaccagtcaatcttaaaggaaatcaaccctgaatattcactggaaggactgatgctgaagctggagctccaatacttcggccacctgatgcaaaaagctgactcattggaaaagactctgatgctgggaaagattgaaggcaggaggagaagagggcagcagaggatgagatggtaagaagacatttccaactcaatggacatgaatctgagcaaactctgggagatagtgaaagacagggaagccttatgtgctgtagtcatggggacacaacttagtgactgaataatagcaacatatataatatgagctcacacagaaaaaagataggcaggaaattgatagaaaggttaactatggtcagtttgggaaagtaattggttttgagattagccttcctatattactactctctaacatgttttcttttttttctgtttttttttttttttttcttttttgagaaagtatccagataatttaaactaccagaaggtagtttcagtggtctggtaatttggaagctgaagaaagtgttttgtctatattataattgtctatagataattgtatcaattcttgactttatttcatctactgaaaaaaaaattctttgtatgtaatctaatgaacatataggaagaaaacaaaaatccaaacctttctgagagacaatggaaatgcaactactctatttattctaaaacaattgtaacattttactcaacatgaaaatggtctgcaaagtacttaagattatacagtggaagacactaagcaaatttggggaactcaggattcctgacaagaataaatgagctgtcttacttgtttttcatttgtgcatttgtttctcccatatcactagtattcattatggtcacacagccaggctcacaatgaaactgagtttatgctctgggaaatgctggaaagcaccatcttcattatgtcaacaatgaaaattacgtttgtccgtgttctctggagctggtggctgaaatgtctgaaaacaacatgcaggcattttccctctcactctgggggaaaaatatacctactgacattattattattattatttttactaataatctgtttcccctttgccctttaagactgagaaaaactgcatgtaatgaatgctatttgtacataaaggcaatt

SEQ ID NO: 53008 - DNA, 1847 bp, Bovine  19866880540122
  misc_feature (1)..(1): n is a, c, g, or t
ncaggaaaatgaatctttggctgtggtctagatcctgatattaatgatttgttcttcagtgagcatctaagaacattcaggaattgtaaacaaatgtactcacatttgttacaaattgtaaacaaatgctgttcttgagtagctaagtcaggtccaactctttgctactgtatggactgcaacatgccaggcttctctgtccatcactctctccctgagtttccttaaattcatgtccactgagtcagtgatgccatccaaccacttcatcctctttcacccccttctcctctggccctcagtttttcccagcatcaagggtcttttctaatgagtcatctcttcgcatcaggtggccaaagcattggagcttcagcttcagcatcagtccttccaatgaacattcagggttgaattcttttaggatagactggtttgatctccttgcagtccaagtcttctccacttccacagtatgaaaagtgtcagttctttggtattcagccttctttatggtccagctgtcacatccatacttgactactggaaaaaccatagctttgactatatggacctttgtcagcacagtgaggtctctgctttttaaaacatggtctaggtctgacatagctattctttcaaggagcaagagtcttttaatttctctgtaagaagggcttttaaaatttcttctgtgataatgcttttcctataaaaactcctgggatgtgatgatgacccaaggaaagttgacattattagaggaaagagcaaaaggattgctgggaatctgagaatgtgtttatatgtgtcaggactcatagggttttataggctcatgaatcaagcctgtggcatcccgattttgatttaagattatccactggggagcagattttgttttgaactttgcttaaaccttcctgagcaaagagatccctcagatatgctctgtgagtttccctacatggcagcacaggacacttgggggttggatgttccacataatttactgtgtgcttcgactggacacacatcattgctctctgcacagcacagcagtatttagataggtgctgctggcaatctggccttctgttctctgtttggttgctgctccatattcattctgagaatcaagatagaaaatcagagaattatgataaaaaaaaaaaaaaaaaaaaagaataagctgtgtcacaaacagtcaatcttcaaaccaaaagttaatgggaagtttcaaagctgagtcttacttttgcagtggccataagtttttaacttctgctgtgtatttcatttcatctatttggtaaaattgtacatgtgtgtttgtgatggagctctcctttacaatgatgttggtgaggtaactctattatgagaataatacttatttagatttgcatgatgtataattttgagtgctttcccatcttctattggaattgatttacacattggtaatcaatggcaccccactccagtactcttgcctggaaaatcccatggatgaaggagcctggtaggctgtagtccacagggtcgcgaagagttggacacgattgagcgacttcactttcacttttcactttcatgcattggagaaggaaatggaaacccactccagtgttcttgcctggagaatcccagggacgggggagcctggtgagctgccatctatggggtagcacagagtcggacacgactgaagcgacttagcagcagcagcagcaatcaggtttcaagttaatacaagataaagaattgttttatatcattcatcgtctagtgctacacagcctggcactctccatatttattcaccaatggtttattcaataatt

SEQ ID NO: 53009 - DNA, 685 bp, Bovine  19866880541890
  misc_feature (1)..(1): n is a, c, g, or t
nattacttattcatggtcagtggctatttgcaaggctgattattataaatttacacaaaactgtctgtattctgtgccattcttcaataatcaaaatccagagtttcaataagggtgctcctcatttacaaggttaattcctccaataatgatgtttacattctcacacacatttcagagctgagaatttattgcatagggcacaaactcattggatatgctgtgtaaataaccttattaagaatgcagtgagaggatatacattatattcctttgggtcagaagggtaaacacagcaagaaaatgaggcatttaccactaagtagccaaactgatttattttactctgcctttttcattttgaaccttttgaagcacagattgcttgagtactctgccttcatataagcattcagttagaaattctagagggtgtagaaactgtcccagagaacaaagccagagactttgtgttaaccaaaactaggattgagataatgttttaggtaagggtgagttgatagtaaattattgttgttggacagtcgctcagccgtgtctgactcttttcgaccccatggactgtagcatgccaggcatccctgtccttcaccatctccaggagtttcaaacttatgttcattgagttggtgatgccatccaaccatcttgtcctctgtcatcc

SEQ ID NO: 53010 - DNA, 806 bp, Bovine  19866880546131
  misc_feature (1)..(1): n is a, c, g, or t
nacagcttgtatgtacaagtgaagtggtaaataatagtagttgaaggttttggccacagatttaatgcaattcctgtcaaaacatccatgacatttttcacaaattgctaaaacttatatggcaccacaaaagaccccaaattgctaaagcaatcttagaggaaaaaaagcacaaagctacatttctgcccagatgtatgcacctgctcagattcaggtgtggagcagacagaaaactggttttaatcagggatggagttttgataagtgagtacaataaagcaagagagcagtttgaggtatttgaagctgtatacatggaagtaagtaataattgacatggaatcagatctagataaaggcatggagaataataagcactgaaaagggagaagaatcaataaactgaaaaccgtgctgggatggagggactgatgaaatttgagtactagagagtatgacctggaaatacaggtcactaaagggagtgatcaggggctgggatatatttgaactaagactttgagggagttgtagttattgaaaataataaggcccagaatatctccaagaaaatggatagttaaggtagagtagaaggtcacattatcagcagagaaaagtttcagaagtggaaaagtcagaatgttggagaggtcatttacatgagtgttcatatatccaagaattaaggcacgaatcatactgaagagaataacaaagagccagtagctaatatcacccataaatgaatgacccaaggaggataagatgaaagagagtagatgacatagtctaaatgaaat

SEQ ID NO: 53011 - DNA, 2263 bp, Bovine  19866880589202
  misc_feature (1)..(1): n is a, c, g, or t
ntaagaaatactttatatggtaatctacatgaagatttgtaaagaaattgtttttctccacccttctaagagtttcttgtttagattcatggtagttagtctgtaaaatatgtttctttacaaatatgcactcaatttttgtagtactactgctagaaatttgtgacctaaatataggaatttttacaaatgcactgtgtatattgaatgcaaagcatggtacatttgtaattttgtacactgagttattgcatgtatgcacgattcatggggtcgcaaagagtcggacacgactgagcaactgaactgaactgaattgaactgatatatatatttactgggtaaatttctcttgcctatgcagtacaaactgtattttctagttaaaatgttacacatatgataactggaagaattttctagaacctattatttatttatatgcattttaaaacttgtatttgctttctaatatttctggagcctggatgaattctttgacctttcatctcagtgtttgtgtgctgggtaagtcagtacagtggattataggaatattcttgacattattattacataactacagctaacaaaaaattaactatacatgaaagtgaccgcaaacaacatacatacgtattttactctgcccatatttgatgcattgtcccttcactggacacaccacttcatctgcaccaacaggaaggaaattttgagagtgaagtcagagtggaaaacacaagggtttcaactgattatagtttaaatgtcttaatttcgcacattttataaaaatacatgatcccagaaatacaatggtagtgcccatgctagggctctgaaagtgagggaccctgaacttccgagtttcagaagctttctgtagatctgtctccattgttagccatcctcacaagcatacaaataagaatcataataaaaacatttaaagttttgagttaggaagaaaattctagttgtcctaactttcttacagttgatggcattttggttcatagtaaactccatcctgctagaatctagtttcccatagaaacactcgtgttaatttcttaaggttcctctaggaaaacataatttgaacaatttattctacaggcaagtatctgtatacttcgattattgaatttcttttctcttttttcccccaaaaaatgtacattcagtaaaaggattgcctagtactgtgcaaaaaaaaaaaaaaggtgttagactttattctgtagatatatgtttatgttcaaatgtgaaattctctatcatgaaacattcccttgttttatcaacaatgctagtctgaaattttagattgtatattttcttaagaaacattgtagaatgttgctgtcatctagtatattcaaatttctcttatgttttaaatgtatattagtttcataaatatgtatactcttgaatggttttgagtcccagactcttaatttattatattccttggtgaaataatgactaagtcttacttaacttcattacgatttccagggaaattcagcctctgtggagtgagtctcaggataattaaggattgtagacttaagaaaacatttggctttcagtgtttgataaaggaatccattttctggaggcatgatttgcttccccagattgtttgagaaagcattacatttcattaaccagactacactctttggaaggaaagttgtttccttattctgcttgagtgttggattgtgagaacccttttgcttttgccagaagtgacctagttgatacagttccctgtcaattaaggtgggagccaggtgtctcaggtgtcagctctgctttgataaccatataagacaatttctggcttgtttatgagactacatagcaggaaagagccacattataagggggatgcttttacttcatcataacaaaatgtcctaaaagaaaattttgcccatggtgttaatttagtaaattggttagatatttacgagtaagaaattatttgaaataattataggcaataattagggctaccttcagaaataatattagtccatctaggcaggtggaataaaattttcaagtttcaaatgcaaccccatgtggctactttagttacctgttccaagatctcctaaatatattctttaggagaataggaaaaggtccattggtcatcagagttctgttgttcgtctggtctctcaaccaagctatggcagtattaaccactttaggcaaattaggggaagatccttgttgg

SEQ ID NO: 53012 - DNA, 2643 bp, Bovine  19866880624826
  misc_feature (1)..(1): n is a, c, g, or t
ntgttttgcttggccttccctggtaactcagaatggtaaagactctgcctgcaatgccggagacacaggtttgatacctaagtcaggaagatcccctgagagaagggaatagcaacctactcccatattcttgcctggagaattccatgaacagagtagcctggttatagtccatgggattgcaaagagttggacacgactgagtgactcacactttaatatattttgctcaccttgacatgagaaaaacttcccttgattatctagactgctacttatgcacctaaattcactcagccagcatcattcagtggatcactaccaatatattggataaggtgatttctagaccttaaaaattcacttctttgtgtgcatagttctcccaatatcagccactaggtagaatccctaaggcaccatggtctgcaccatttattttgatatcttaaaaacattaaaaatatcattttacatacagcataaactagatagactgcaatacagcaatgtcagtttcttgacgtttctatttcttctctacttgatgctgcatggtgaaataatagtatttcttaatctttatttgtattgactgaaataccatgaattatgactctcctccacagctgatgaattataaagtcataattctgttcatacacaaataaaatgcttacctatatttggcctttggacatgacttccattggggaagatctcatgagatatcagatccatgggctgtatcaggtgtgccagatatacctgatgacatggtatttctagatagatttcaagtttacgatttcaatagacctgtgaactacaaaagttgggggccatgtttccttctccattaaattaatcaccatttgcaccctactggtaaagaatctgcctgccaatgcaggagatgtaagagatgtggatttgatccctgggttgggaagattccttggagaaggaaatggcaacccactccagtatcttgcctgagaaatctcttggacagagaagcctacaggctacagtccatgggattgcaaagagtcggacacgaccaaagtgacttagcatgctacttattttaagtgtaactagagagaggaatggagaaggtgatggcaccccactccagtactcttgcctggaaaatcccatggacggaggagactggtggggctgcagtccatggggtcactgaggggtcagacacgactgagcgacttcactttcacttttcagtttcatgcattgaagaaggaaatggcaacccactccagtgattttgcctagagaatcccagggactgcggagcctggtgggctgccgtctatggggtcgcacacagttggacacgactgaagcgacttagcagcagcagcagcagcagagagaggaaaaagtctccaaatgcaagtgctcactgggagaggagagaagaacttaattcttccttctgtggttgctattgttaaattccagatgaaaatggttagtgacattagactgtgaaaagtgactttggatgatgtatttagaacctgagataaacagaaatgtgatacagttaattgtatattcaaacaattgaatttactttattggattttcccaaaattgcataaacccttaacttggaagatacttgtcagtaaggttaggttcaaacttatatttcttaaaatcaaccagtgcatatgtaaaaacagtaaagaaacttctctctagttctgtctacataatttatgtttggagcatgaggttacatatatattatttgtagctggttgtatgactcataatttacaaggatttaaggtattgtgtagttaatagttaactgcctgtgaagtagagaaggctatttttatggtcctgacgtgaaagaccccagtactggtttatctgtgaggcagttgtgggaaagttataaagtaatcacaattgacttctatttcatcctttgacatcaagaccattttatagtttggtgttggtgtatttttagattttaaaggcatggctggtgtatttagtagcattaatctctgactcaaagatttattgttaacctttatcatttgtttttagtagagaagcagctatgggatggcaaaaggcttccactcctccaatctttttacctggaacgagaggtcattaagtattttactcgcatgctatggagtaagaggacttctctgatacctcagttggtaaagaatccacctgcaatgcagaagagcccggtttgattcctgggtcaggaaggtcccttggaaaagggaaaggctacccactcctgtattctggcttggagaattccatggacagtccatggggtcacaaccaaagagttggacacgactgaatgactttcactcactcactcacggagtacgaggtctttagtaattaatttagaaaaaaaatgtgactggggacaagagcaggagatgtggagtcctgtacagcaagtgcagtttactatatttacgtatattctttaattctctgtgtgtggatctatagatatttcattcaagggctatctttcaaagttatcagcttagaaagttttatacttactccagtgatggaatctttgtttattaaatatttataatagataagaat

SEQ ID NO: 53013 - DNA, 2566 bp, Bovine  19866880722575
  misc_feature (1)..(1): n is a, c, g, or t
nagtcagtgatgccatccagccatctcatcctctgtcttccccttcttctcctgcccccaatccctcccagcatcagagtcttttccaatgagtcaactcttcgcatgaagtggccaaagtactggagtttcagctttagcatcattccttccaaagaaatcccaatagagtgcgataatatgcaaatcagtgggattgacagagagttttaaaaacagtgcagggcagtagataatcataagaaaaataaagtatctgtactttgctcattataccatgataaactttaaatggattattaatttaaatgtaaaaactacagatttaaaagtgatgggagagaaaatgcaaaatatcattagaactttggagtatggaaaatcatctttagcccacatactagaagccataaaataaaacatttaaagttaaattatataaaaataaaatttctcaaacatatgtacataggcacatgcacacacagacacacacacacagtgaggactggccaaagccaagcaacaaagtaaaacaattcacaatttatataacaaacaaggaaccacatttcttaaaaaccaaggatttaaaggaatcagaaaggaaaggccaataatacaattaaaatttgggcaaaaaacataaacaaatttcagataaagaaatacgaatggctctaatatatatgataaatgcacatatccattcacactaacaaaaagctgaaataatattacatgatgatggtttattgtccctgtcaaatagggaataatccagaattttatgcatatactttgttgatatagctctgagggaaattaagtattttttatacattactgggacagtgcaaaatgtggcaatacttagggcaatatggcaaagtctgttgaatgatccttacagacatataaggatatatgtaagatatatatatataagataagataaccctgcacattttccaaatgatgcattgtaatgctgttcattattatttgtaaaattcaaaagattcaaaacaaagcaaggaaatatacatgggacacaggttttgtcaactccagcacatgtgcatgatgaaatagtatacaactgtgagaaaagatgaaggagggtctctactgatacagagagatctctaagttacattgttaaacatttaaaaaggcaagatacaaaacaatatagagagtttgctatgatttgtttaagaagaggggaacattgagaatatggcttctgtttctacttgcatatgtcctgtgaggctgcagtaacatgtgagatcacctcaggcaggtttgtgtgtgggcgtgcaagggcatggccaagggcaaagacagatgttttactttgtatattttatgctgtttggatttttcaacatataagggtatgattcctctaaaatttggcagaaatattgtaatcataaactgatttgtttaaattttatgaactatgtcactcctacctctgttgagttagcttgttttcctattacaaatctgtaacacggcataattttgttagctcttaatgtaatgggcgctggggaaaccctcttaatattgcagaaattaatgtacaagtcatgggtgggttcgtactttccagtattaattgttgtcactttctctaacatgcagctgtgacaaagatcctcaaactaccgtcattgaaaacggcagaagccagcggggccgcttttcttttgaagtgttccgatttgtgaaacacaagaatcagaaaatgtctactgtcttcctgcactgcgttaccaagctctgcagagctgatgactgccccttcctcatgccagtaggtttttgataactttattctgaactgttgtattaaactaagctgaaggttatcaagtgttaggaacttatttctacatagaaagtgaatatgcatcaggtcagatagtttgaagtacaattttttcattcatccagtaaagatgtcttgaatacctactttgtgccaagcattatactgggaatacagagatgcgtgcatgaattctgaatttaattagcttaattgttataagcatgagatagtcaaggaataaaatatgacaaaatgttatgatgcaaaggcaaacatatatatgcattgtagcaaaaggcactattcatcattgtgagagaggtgaaacagaagaagatgagagacttgattgaagagatgtgattttgaagacagagacattctacaccaaaggatggtcaaagcacagacacaagaaacagagtaacctgcgaacttccagtctcagtagggctacggagcagatcagaggatgatgggcaagcctgtggtgggggcagcactggcactagaaaggttgattgaccagatggccagggaatccctggtattaaaagataaaaactataaaagatgtggatctgtactacatatctgttagtcactcagtcatgttcgactctgcaatcccatgggctgtagcccagtaaactcctctgtccatagagttctccatgcaaaattacggaatgagagccatttcctttttcagggggt

SEQ ID NO: 53014 - DNA, 1102 bp, Bovine  19866880766212
  misc_feature (1)..(1): n is a, c, g, or t
ncaccccaaataccttaaaccaaaagaggaagatcaataaatgaaactttgcataaatgttttcttaaatttgaatcaattattttatgttctgttctttaattttattgacaactttagagaagaatatatatacattcctataaactgttcacatgcaaaaatatagttatctattctacagaaatgatatagcagtcaactgctaaaagttataaatgaaaaagccatccaacttgatatctcatcagcagagttaatataaaagtatagtaagtacttttaaattttgttggaaaaaatgaagatctttatccaaagcagaggttgttctctcagtcactgctggctccacaattccttgaacagcatctgtcaagagtcactcaataagtcactcaatattgaattaatgaacatctagctcacaaataagggtcacgtggttaaactgattttactttattcttattcatccaattcctgaaaataacataaaaaaataatgaatgttagacataacacattcattatatatggccattacatttttacagtgtcactctgcttctagctttttgactcagctgagtaaatacagaacacttctgtctattactcataacagctttgaaaaacaaacaaataaacaaacaaacatttccctgagtgcactagactattactctatcagaagtcaagagtgcattagtatcttttatataaactgaacttccaagtagtttgacactgatcaagttaaatgtgataatggcaagagtgatgaaatgatagtagaaatgatgtaatacaatagaattaggaattctggtgtgctaaaattaattgtccaagggagtactgtgctcacattacaaaatgttctgaagataaaatttccaaaatttaaatgaacaagtaataaaatcagctttccaattgagagactgtgttaaaatagctatttttataatttctggggttttttatacatgagaacatccattttatgtgccatgctactaataaaaaataaaatgcaacttaaaggctacagttaaaaatggtatgccaaaggcatcacatttataaaatgacatca

SEQ ID NO: 53015 - DNA, 1372 bp, Bovine  19866880777993
  misc_feature (1)..(1): n is a, c, g, or t
ntataggttaggctgtccctttcactaagcagcaaggcttttaaattctcacacttactgattacacttcctctaaaggtatttgttaaacctttgaaagtgaaagtgttagttgctcagtcgtgtctgactctttgagaccctgtgtgtggactgtagcctcccaggtcctctgtccatggaattctccaggcaagaataatggagtggatgccattcccttctccaggggatcttcctgacccaggggatgaacccaagtctcctgcactgcaggcagattctttaccatctgagccatcagggaaacccccttaaaacctttacttgttccaaaggtatggcaaaccaaatgataatgtccctttagcattttttgcacagttgagttaatgatgatgaatcactttcaccttagaaataaatgcatgtttgaatgcactcacacatgctttatagacacatacacatgtaggtccagcaagagcaaagaggaatagtctggagccatttaaatagatgctttgactttagaagaaaattggaaattagagacaaatatcaaagaaggggaaaaatgtaggaacttgggagaaaccactattttcactattctctgacctttggtacattatttatctagtaggttgcaatgagctttaatatttgaaaaaggtcagattcatgtaccatatttgaataatgtaggcagcagtggtctagagaattatcatacttagatgaggaagtgtgattttccaaccttctgcccctgatttgtttgacctgaggtgagtcattctcttctttgtctgttctcatggtgataataagatctctttttttccctttctaatatagatgttgtgaaaaatgcaataatcttctaactgacctttctccttttacactgtcttctgaaactacctatatatgaacttctgaaaacactgctttacactcactcttcctattcaaaaatccccatgtcttcccatggtatggtattcaaagtcctcccatttttaataccaagcaattgctgattatcttcaatgtgctgtgcactattaataattttaatcttcagactatcatgagcatagctactaatgctcacacccttttaaatataaagagactctttaataacacaagtccgaagacaagcccattggattcttggcttttgctttttctacatgcttattcatgctgttgctgtctagctctttacaaccacacacacacacacgcacgcacacacacatgatcttttctttagaactttatattcccaaactactttcaaaaaggatacgagatgggacaataaaattcagttatacaacaccattacattataaataaa

SEQ ID NO: 53016 - DNA, 1037 bp, Bovine  19866880806226
  misc_feature (1)..(1): n is a, c, g, or t
ntacaaccccaataaaactttagtgtagccttgtagctgcttgctaacttaccaaccagaaatttatgttgatcaagaagtaaggctaatttatttggcttttagacttttgagattagaaatatttggttaaattacttgttgaattgggaaatcaattgcacttatgggtaaagcttgtttgggtcctctttcaagtgtgactgaatctgtatttataatttgtctatagtgttgcatggcctgaaatcccattaggacattagagctacagcggcttctgttagtacctgagaagcctgttaccactcccacagtccagctcgatagtaagaaaactgccagggtgcatctctgagatgcctacatgccaaatgaaaatgaatagtaaaggaaatctgtgcaggacactctctgatgtcaaaaactattttctggctgctggtttaattgattgtatatcaagaaaagtttaaaaattaatttggggctttctggtggtccagtgattaagactctgcacttccattgcagggagcccaggttccatccctggatgggtaactgagattccgcatgctctgccatgcagccaaaaaataagcagtcagtgtgtgtatacacatatttttatgaggggtcatttatatgagatcaagtccatcttaaaacaaaaaataactctgaaaatgagactaaacatcaaactttatcaagcacagaggttatcacaacaaaattcttactttataatacagtgctatagtgggaagctagaactttaatagaaaattatgctaaaactagtctttcttatcttttcctttaactttgagaaaaacatatttttcctactttcaaatacattttctgtaattcatcactgtctttcttcattcatttgtttattcaaaatatattattgagtgcctcatgtaggccaggctttcttctgagtacttagagaagcattggggaacaagaagaatccacagcagggattgcattcaggtatgtgtcggagggagaagacttat

SEQ ID NO: 53017 - DNA, 1289 bp, Bovine  19866880824444
  misc_feature (1)..(1): n is a, c, g, or t
ncctgactcctagtcagataagcctaaaccctcacactaaaggctccagttcccattaaccaatacatcatgttcagctttcaataaaaaattacagggcatgccaaaaggcacaaaacaggacatcctgtttcccccaagtaaaacagaccaaagagttaaaacaagcatcagaaccagactcagaaatttggaattgaagtgcagtcccaggaggagcaacatctgcttcccatgttagaactgcagatttttagatcctcccctaaatgtgttggatcacaaactctggatggaggaccccagcaacctgttctttaatcagccctccaggggattgtgcttgaagaccactgcagcaagcatatcaagcagatgtagaatttgtgaactcttgtgtttctttagattcttagaaatagaatagtaaaatttttgctatgctaatagcaaggtgattcaaaaataaagaatccactaaagacattgtttataactttgactttcagttttgccaagtaatgttgttgctaatgaattgttttggatgactgtatgcagtttagagttcccccagctgtgtgtttttgtgatacttactacctgacctgggagccttaccgccagtgggcaaccaggcagaggaagtttaaatctggataaagggtacaggatcttgggggaattttcaggacaggattatcacatccctgtggcctcagaagcttttacctatggttagttttttcatgaggtgggtttaggaaaaaggagaggctgttaacatgtgtccttctaaaggaggattatgcttttatttagctcttggctaattcagtgctcaactgccctcgggcctgatcagggttctgcagtcccttgagagtcagttgttaagcctactgttcatcactttgaactcccctgagactctgatttcaaaggtctgcttttaggtttttgatcacattttttcatcctaggtcacctcttatgtggtcatatattgctgcattcctgctcacatactgggagcctgtctcttcttggtgcctcctgttaagtgatgataaatgttttctgtctagccccaaaagaataaaaacttgctattacttgtagaggcctcctattttaacactggagaaaagtaaagcctacagaggtatggtaatgttacttcattcattcatgtgttcaaaaatacttattgaacacctactatatgccaggcgctgtttaataatgtcagtaataatgacaaaaacctgattagaataaagatatca

SEQ ID NO: 53018 - DNA, 1643 bp, Bovine  19866880913566
  misc_feature (1)..(1): n is a, c, g, or t
ntttttagagtgtaataataaatgaaagttgaaaagtttattagagaatgtagtgaaacaatttgtctacattgggaataattactggtgaggcacagacttcatgtatggaaagttttttctttatgcataaggaatatttctatcctttctagccaaaaatagtatataaaagcttcagatttctttgtctttaaagaaagaacttgccaagcaagtaaataacaacttagtctctatctaaattatttaaaatcttttaatcttaactgatttgtttttcttatgtgaaaatgtcaaaggaatagtagaaataattccattgaaagagtctggttacaccacacatatttttagttgtggccctgtagccagttttagaattctctgggtatcttcacacttgtctgaaaatgagattttaaaatatgtgatctccatgtttcttttcatcaaaaataagaagagtgtttttgaaatggaaatttctctctaagatgagaagcttcagtgattgttgaactacaccaaggggcaatttgatgtttctccagtagtttttgggctatgtcaaaccttttgaacctttaaaggtgatagaaagaaaatgactcaggataacaatttcaaaatctgcctagctgctggcatgcttggcagaattattttaaccttaaccttatcagaaccttcttttcaacaaagcacattcctttgctatcaagttttcctctatatgccatataatcacaaaaatatgttttgaccttgactccaatttggggaatatatttcatgctatagtccattttaagtacagcctattataatggaagctgatgcatagttaatttctgactagtacttcataaattacttagaccaccttttcctgtgaattaaaagaatgtccattaaagtttctcagagattatgctagcattggctgtgcattttctgcttgtttataggttttgtagtacttctgacagaatgtggtccactggagaggaaatggcaaaccacttcagtattcttcctttgagaaccccatgaacagtatactgaaagaggaactccccaggtcagtaggggcccaatatgctactggagatccgtggagaaataattccagaaagaatgaagggatggagccaaagcaaaaacaatacctagcggtggaagtgactggtgatagaagcaaggtccgatgctgtaaagagcaatattgcataggaacctggaatgtcaggtccatgaatcaaggcaaattggaaatggtcaaacaagagatggtaagagtgaatgtagacattctaggaatcagcgaactaaaatggactggaatgggtgaatttaactcagatgaccattatatccactactgcgggcaggaatccctcggaagaaatggagtagccatcatggtcaacaaaatagtccgaaatgcagtacttggatgcaatctcaaaaatgacagaatgatgtccgttcgtttccaaggcaaaccattcaatattacagtaatccaagtctatgccccaaccagtaacgctgaaaaagctgaagttgaacagttctatgaagacgtacaagaccttttagaactaacacctcccaaaagatgtccttttcattatcag

SEQ ID NO: 53019 - DNA, 1720 bp, Bovine  19866881006190
  misc_feature (1)..(1): n is a, c, g, or t
ntacggagtccaggggccaagagggaagtgcctctttgctgctttcttgggtaatggatgagccaatctgaagtcaattcccccaataactggtaggctgggtagtctccttatcccaccccacttttcccagcaaagactgctgctgtgattccttcctgctatcagccattcatagtggggtgtctctccaggaccgttttgcctcagacatgtaaaaatcttctattaaaccactgatgttgaaggagaaaaggaacaggccaagctcactccatcttgaaaaagaaggaaactccatcttatattcccagtgaagtttgtactatgtgcctggtagccaaggagatcatatacctatggccaaacaggcttccctgactgacagacaccagactccataccaagatttcccttcgccagaaagaaagtaataatcccctatgtagtcaatcacctttgtaaccttgatggcacccactggtgtaggttacaatgtacaaccagctgacccttctgattatgaatcatggctgtaacctgactgtatctccccttaacattttccaggctaggtttaaggaatttgggggtgtgggcttaaacacatacacttaaaacatataagagaagtcagtcatggttcctggctaacgaggaaactctgcctcggactgcagtgtaataaactgcactccactatccacactgtccttctgaatgagtttgtatcccggagcgtttggctttaacaatgtctctgttgctgactccaggctctttcttcagtgctggggctgggtaaatacagggcttatggggtatagcccacacaaagcaaaaaagcaaaagaaaggttgtatgaaaaagggtagcaatttgtttatctgaggtttcgctgaatgcctctcatttccttgtgtgtgtgtgtgtgtgtgtgtgtatgtgtgtgtatgtgtgtggtgtcacattcctcatgatggcaagcatttctggatctcttcactgctagataccatttgactcatcagcccaacctggaatacgtttaccattttacttaccatacagtgttttcttggtaagtattgatattcactttgtcttccctgcaagaatatgagattaaggccagaaaggaatatctcggtcctgctcatcattttatcaccactgccatacagaagacctggcacagggtggcatttacttaatttttaccatatccatgaataatagggtttattttattaagatgatttcctctcttatgtacgattgtaatagaacaactgagtttacaaaaaaaataaataaataagttctccatggtacacctccctgaagtggctcaaaaactaaattgaactcagcattcatgaatctgaaattccactggtggggttaaagttctatatcctacattcaatttcaaatacaattgcaaagctaatagctagagtgtgaagaagattttattaatcacaacgttcagttagagcaagactctgctgaaaccaaagcaaataaattataggcatagctaatagggtcaagaagctgctagtaccaaaatcctgggaatatcctctaaatctccaaattacctttaactggcttaagtaactgctttataaatggatagtcacctatgaatagttattctagaatagatgtttccatttctcctctgagaacatgagctgtgaatttcctcttg

SEQ ID NO: 53020 - DNA, 1199 bp, Bovine  19866881021169
  misc_feature (1)..(1): n is a, c, g, or t
naatggactggttggatctccttgcagtccaagggactctcaagagtcttctcccaacaccacagttcaaaagcatcaactcttcggcgctcagctttcttcacagtccaactttcacatccatacatgaccactggaaaaaccatagccttgactagacgaaccgttgttgacaaagtaatgtctctgcttttgaatatgctatctacatttgttattaacttatatcaatacacagtcacatctgagcaatggaaacatctgttcgtttataactattaagttataccgttatctgttatgttaaaaaaaatactgacagattaaattatttatcagaaagccttaatcattgctttttgacagtgccatattatttcctctgactttgaagaacaatggtacatgaatgacataataagatttaaaagcaaatagtgaattatgtctacatacctaaatccctaataggaggaccatttgtgcactgtggataatactgaggtctgaaaacaattgatccttgaatggcacattcccgaaatatttggttaagaacatattgtacggaaagaattcaaactgtcaacagatttgattccttgatgacttttagtcacatcattagctttatattgatataacttttatgttttaacattctaagggttttacacctattaaaataggtcacacatgcaaaactttcaaagctcaacagaccaggaaattcaaactttggttattggagactttattacttcaccataattcacttttctgtcattccataaaatcttattacagataaagtcataataagtgtccacatgagatccaatataatatactcacaaaaagtaagttttcaaaggagagcaatacaaatgtgtcttgttataagtcttttcacattactttactaattactgtcaccttaacatgtataatgtctaccacattatacaaaattattccacgtacttgtgtcatgaaataactatttttactgtgaatatatgtctttaattgatcttggtaaaaatttctggtcaaaatactagttatataactatgaaaaaatatcctgacataaaattcagtattaattatttatcttctaaggggaaagggctgtgaaatgttcttaatcatacacaaattagacatttttacatactttaagtgaaaatatgatt

SEQ ID NO: 53021 - DNA, 1378 bp, Bovine  19866881044886
  misc_feature (1)..(1): n is a, c, g, or t
naaaaagtttaaactcaactttcatttctataaatttatttataaactcttcttccacttccctaaatccattttttgggagtttacatatttgatataggtacaactgtacaaatattctgtattgtgcattattcacttcaacaatctcttttgaacttttcagtgaccaaaagaaccccccagagcttttatttctagtgactttgcagcagcattccattttcttataataacttttttgattatttgtttagttattactttattcttaaacacttgaattgatctcagtcttatgcccttttcaattcaagacatgtctgtacaaatcactttttagttgtttcctttatttccttgaggcataggcccaaggttaaaggttataaacagctttacaactcaagcgagtagcactttcggtgaaacaactgtggtctcatcatgtgatttcctttcatcagagtcagtttcattagtattaatgaaagaataaagaagaatttctctgttgggaaccactcagttgtagccaccacccgtggccactgccaaaaacccattgacattttgctcaaattccctcagatctaggtcctgcaaacatttctcaacggtgagtttgacccattcattcagaatgaaagagttcctctgtgggcagctgtcccatttgccaacctcggcatgttatttgatcataaggccttcaacagactaactgccttaaccccaaagcagacagcaggcactgccctgcagttcctggcccacactcactgacatcaggatgcactctctggagggtgctgtccttacccagctcatccatgagcagtttggctaggggcgtggcatttttggaatttgcatattccattttgtgaaggctgacagcctgacccacccttcctataatgcccaagtccagacagcgtaaactccacttcgctcaaccaataaataccttttgggagagtttactgctacacttggcccctaataaattctcagcacagtagccaaagtgatgtatgtaaatgtaaatcagatcttgtccatcttctgctcagaacacatattgtctccttcccaaagacttcccaaccaaaggactttcagtggctataaggccctctgcagtctggctctctgtgttgtatttgaccacttctcctacctcccacccactttgatctagatacagtggtcctcttgcaactctccaaaacttaagtcccactccaatttgggctttctgccctcattgttctctctagctagaacacacttctttgagagagcaatcagcatacctcactccctttctttaggtgtttggccaaatgccgtatctcagtgaaccttctgtgaa

SEQ ID NO: 53022 - DNA, 1987 bp, Bovine  19866881069355
  misc_feature (1)..(1): n is a, c, g, or t
ncttctccaggggatcttccccaacctagggatcgaacccagatctcctgcattgcaggcagattctttaccagctgagtcacaagggaaacccaagaatacttgagtgtgtagcctatcccttctccagtgaatcttccagacccaggaatcaaaccagggtctcctgcattgcaggtaggttctttactaactgagttatcaggaaagccctactgctagtgcagacatgatataatatgcatatattaaatattgcaggtttttgtgttctgtcccaagagtggtttctcttttttggttctggcccactgttttttttttttttttgtagttataaactgtttttgtgtacaaatgttatcatagttattgttgaagtctaaagtatttctagttcagcttgtttagttgtgtattcggaagatgctaaattttctgaaatctattaatgttatcatctacttaatggactgaaaatcttgtatatgagttgcactcttcactcttgaatattggaaatgtgcatcaagtaagtatgatctctgtgttgagaacttattctctgcaaggtattgtgtcaattctgtgatcacaagaggcaacagctgaactcagttggctaaaagtagtttaagctgaatgtgaagtctcccaaaggagtaaaagaaaatatcttactcattttaattttaaattttgtacagttttgtcacaattcccgatgctggaaacatttttaaaaattatatgtcagactgcctagttgagacgtcattttctttttgatgaccagtaagatcttaaaatacatttcattacatttttttctgatttaaatttaaagtactaatttacttcttcagagttaatatcaagaattcaatgtaagttaaaagtttttccaaagattttgactaagtccaagcatttgctctcagagaggaaaggccaagattagctcaatctaccaaaagtaagtagtgtaacaataaaagaatccaaatgtacttgcttatctgaatcaaagcagaaagttgctaatgtgagtttaacttcgtaaatattactacagcacaatatttgaaaaactcaattcaagcacttaaaactgtcagtgaaatcatgtaaagggtccatttaatttttacagagtcaaataatgtttttacttattttcactactgaatagagtttctgttgctttttaaaaattttttattttggaaaacttttacaggtacacattttgcgagaatattctaaggggtcctacataccctaatttttgcttcctctatggttaccattactgtggtacagttgtctcaaccactaggctagtactaatacatgattaactatagtatatattttgatttttgttttcttagttttcacatcttgtcttttctctgtcccagtatccatcttggttaccatgttatacttagtcatcatgtctctataggttgctctacattgacagtttctcagactttccatgtttttgatcactttgacgttttttgggagttctggacagacatttttttaatgatgacctttaatatgtttttctcatgataagaccaagtttattgttttagacaatgtaacagataaagtatcattctcaccataatatcgagggcatatgttattaaaatgtcttatcagtgtctacaatagaatttttctttttttcttgcttccttccatactatactcttgagaaggaggtcattacatacatcccaaggttaagatttgggaagttatattctacctccataaggatggagttcccatcactctactgacattgggaatatggtacaacttaatgtgtcttccagttcaaataaatgatcaataaaatactttaataggtacattttaaatgattgtggagctggtgcaaaataaaatagtttgccaacatgagattcaaaataaaaaagaggacattagttggtaaggatat

SEQ ID NO: 53023 - DNA, 1314 bp, Bovine  19866881069813
  misc_feature (1)..(1): n is a, c, g, or t
nattcactaggaatcatgatgtgggtatagagagtaaggcagtcatgatttcctggctgcaaaaattacttggcaatatctatcatatctggccagatattagccactgttctaccacaataggcagatattacctttgaacaagtgtcctactaaacccatacccaacactagttggtatattatccaaatcaagtttgctacttgtaccagctcctagtgcgtgattagtatttgttctaagaattaacactgatgcctctagaaaactttaaactttacttctttcaattaattatggttgtgtatattttttattgaaatatagttgatttacaatgtggtattggtttaatatatgtatatatttgttttcagattcttttcccatataggtttctacaaaatattgagtatagagccccaggccatacaataggttcttatcgtttgtctagtttatatatagtgcttttctggagtgatgtttactgatggccattgaaaaagctgattttgtgtcttattcatcagatgtatgttaaaatggtgtgggcaattttggacagaaaggtagaatttttaattactgtatgtaattataaaatgttgtggagtatatactttcaaagatttattatgaatcatttcagctctattttgaacctaagggacaatattgtacatttgaaacagaaagtgctgggacttacctgagaaagtccctctgtcttattgctgggtggtacctgtgatagaatttctaagatctggcgtgcaagttcaatgttcttcgcattggatgtaaatctgtctaaaaaaatccatggcttctcatatcttaaaacccttttcattgaggatgagtgtcttagaagtcacatctgtgccctgacttcattaatactacctctaacccttaccagcttgcagctcctcacatagccctgtttgctcacctaagagagaaaacagcagatttctggatttgtgtgaactccctatgaagataataggatttacatgtgtatacagaaggagaaaacaggttttgttttactgctacattaactgttctctcattttccctgaaataaaattctatgatcatttccctccagttctgtgggtttgcactgttggcctaatttaactatctttgctttggggctgaggtcccctatgatgcttaaatgcaaaatcaatggttgatgacagatactttgtgttcatttaatatatgaattatattcctctttgcctttttaatagatgagctgtttgccatccagagcatcttcatttccattttca

SEQ ID NO: 53024 - DNA, 1011 bp, Bovine  19866881170552
  misc_feature (1)..(1): n is a, c, g, or t
natttaagtctgaatttgacaataaactcatggtctgagccacagtcagctcccagtcttgtttctgctgactgcatagagcttctccatcttagctgcaaagaatataatcaatataatctgtcatcaatgtaatcaatttataatcaatatacactgtcatataaatgcaaccaatatgtagagccagactcaggcttaaatacaaaactttttttccaagggtttttttaggttttgcctgaaactctgaaattaatatttccagtaactaaaatagggcataatagcaacacatttttttaaattcaattgttcctatccctctatataacccatctttcctagatgtaaatccatagagtgactattacaacagcataactgaatgattagaaaagaaatcagcttttactaatagacgggtagatacagtcataatctatgaccaaaactttgttattcaccattaattgagataaataacaaataccaaatatatagagaaatcaaatatattgagggtaaagatatataagactaatgaacaacagctgcttaaactgatcagttttattacatatttctattttctgttgtttatatggaccagacttagtatataaaggtataattgcctctctctttcattaaacaatagttttacaacattgagaaaatttacgaattacaagtatttggttcttcaaactgagtctcctattatttgtctattctccttaggatggcatttttccatttctgaacattactgctgctgtaggccattcaataaaaatattatttctaccctgtaaatgtctattctgatttacttttacattgtttctttaacctcgatttagttttatcctacggcaatgttttgagctgaaaagggtaacttaacttggcattttacctataagaattactgacgtgaagatgtcacagttttaaaccaagggcagcatgattaaaataaaagagtaagaagaaaagagttagcgt

SEQ ID NO: 53025 - DNA, 1002 bp, Bovine  19866881223896
  misc_feature (1)..(1): n is a, c, g, or t
ngggagcgtgaattctaaaatgcatgtgtatgttttctgctgtatctttttctgaattatccatatgtttttgtttggcctatgagaatacttgtttcttatcccagcctgtggttaaacaaatcataatgccctgaataattacatatgcagtacaatttcaccttcctcagacaatagattataaattgacagtatcatatacttgagattgatcttgagttgatctcgaaatgtcccataaagtataatatcagaacaacccaaattagttttatatggatacttttccttcttgtttctttgagtgagcaccagatgaagcatctggcttatttttaggggccatatgatacaaaacaaacacacacagaaacatatagcaactttaaacactagaattagaattaacacaggtcatgtgtacaagacgtgacacaagggacccagactacactgggaagggcagcttcttgtcaaatcatgatcatgctggctgatcagttttgagtaaaagagtgacagggggtcacttgtattatttaaatagttatttctttttcccttttttgtttcaaaatgaacagaattgaaccagcctaattaaatgtgtaaacgttaccagtctactatatgttttcaaaaagaaaatcaccccgtattactctttatgtcaacaagtactaagtgtaaaatgaaatactgactaggtataatattttgatggtaaccaatatggtccgaaggtttgtgccactctgcaattcatttattaaaatcctaacctcctaagacaatggtattaggaggtgggcccttgagggctgcttaagtcatgaggttgaagcccccatgaatgggactggtgccttattacagaggctccagaggtatgtctggtcccttccaccatgtgaagatagaacaagaaatttatgactgggaagagaatcctcatctaaccatgctagcaccctggtctcagactttcagcgtctagat

SEQ ID NO: 53026 - DNA, 1021 bp, Bovine  19866881269027
  misc_feature (1)..(1): n is a, c, g, or t
nttggtacactgagtttgaagaagcaataaaaacaaccccaattggtcagaagaggcaaaataacaagactgatgggtatgtctggagaactcagtagcacgcaggatgtggattcaccgtgcagcgcatgaggcgaatagcctctctgtcactaagattgtcatcatgggtataactcactgagaaccgagaaccccctctgctgtctagtatttcaaagccctttatttatttgttcagaggttcatcacataaatggacagcttataattgtaggtgtagtaccaaccattaaagcaaatatatttagagcccctgtaattatattctggtaaaagttgttctggatgacttagcaggactcttctctgggtagtatgtttacttgggtattttctccaatgatgcagaacagcttctagtccaaactttctcctgatgatacatttatttctggcatgaccttctctttcaagttcaaaagaaaaaaaaaaaaaacaatttatagaaacatgtagagtggtagataaatgtaatatactccaggaacttattgatttattgagcaacagtcacattttgaaagatctataattcaaaggtgatgaaagaaggaaggcacagtaaatatgacgttaaataaagtgtatgttcgggcatgatggttgaattcttaccctgatgtccttgttcttagacattcttggacagatttttctattgcttaagcatttatgtagaataattgagtcatagatgttatgtaacagaaatgctgtattacaacctttctgttcagtgacaacatgagctttctcttgagagtgttttaaagcttaattaagtcatttttgggcaaattgagtttcaggcaaattgaaaggtatctaaattctttcagatcaccttggtaccgattagtgtcctggtgtgttaatttgccaaatggacacccagggaaaagaaataattaagtcaataaagaaagtaagtaaacgcttacttatacataagaacatc

SEQ ID NO: 53027 - DNA, 893 bp, Bovine  19866881284554
  misc_feature (1)..(1): n is a, c, g, or t
ntttagagtaagcatttgactaatttaaataagctcaaagctgaaagctgagatcttatacagtccagatttttattcagtgtgtttctgggagaagtcttttccagacaatatgggacaatcagagtgggaaggagttttgctccctaggatccttttccaaaaggtaattgcagaagaacaagtaaaactctgttattcttctacatagttcaataatatgaatctttgaacatatatcagtgatagcctttcttttatttcaatgcgttcatcaagtaagaagaaaaaaagactttctgagaatatattaatatatcattaatttcattcaaccaatgttttctgagtactcttcctatgccaggtactgctcaaagatctagaaatcatatttctcaaattttgagatatattagtgaacagaagaaaaaaattctgccttcatcatgtacactaagctgaataatactttgtgataatgtgacttcaaactatactgaaagagtatcatgaagaagactttttctaagtaatgacataaagaaagtgcacaaaatcatttctaactttgagggaataaaacaacatgaactaagtgataattgggtccttttcctctgtcaattgtgtggcataatatttcagtttccaaatgtagttcctgaattatgtttccacactataaagtttacagaacaatttgtaattctctgtatatcagattctttttggctctgtccctttacacttgtcctgatactcaaataatatagctttcctactttcaatcttacctctcctttacgtggttaatgattattatttttcagaactcagacagcaattccttcaggaaacctactaagtcctcaatattccccatcatacca

SEQ ID NO: 53028 - DNA, 1256 bp, Bovine  19866881310412
  misc_feature (1)..(1): n is a, c, g, or t
nattgatatgagaacttaataaatgtaaaagcttagatccatacacagttgtttttttttttttttattcttgtgtatttaatcttgacactttaaacaatatgctaaaacctgaaactaacacacagaagaatgtagaatcaatacctgttcacagtttagtggaaaagacagataaatagatgattcctataagcatgttgtttgctacagagaatgttactggaatgtttaagaggggcatgcaatccaaagcagaaggcttcctctgagaagtaatatcacggaaaaggaagactccttttgggaagatcaaattccagttatgtgggccaagatccaaagccagaggttaacaacactggtttcttctttccatctccaacgtagcatgctgtgaaatttatcttttaattctgcgttaaagatcccagtttctgtatccatttctagtattctatctgatggagacattaaatgcttcctgtcttctaggagctatggagaaattataataatttttttataaaacacactgaaaactcatttgtaaaatctccattgagaatagaatggctaatccttgaataagtaacttcataagccaaaggaaaaaagacaaattttagaaagctattctgtaaatcccagctctggcttttattggccatttattagactttttcttgaaaaggggaatttttaaagttttaaatggaaacctttgaataaaagagataaagaaggcaaaactaatttctgcatgcactgagatagcatttaatagtttaattaagatgcagattaagtggtagatataaaaccttactattctgggttctaaccggggagttaagaagattgtattttcattttgagcaaacagatgcaaacaaaggaaatcctagttgataaagagtggtgttgccagaatggtaaattacctgtaatatgtacaatcgtcctttgaccatttttttgtaacttcagagcttttaaaaaaaatttgtagttcatatctaatatatttttgaggtctttcataatttcagatatagcaaaaaagtaaacttcagagacttgcctttaactataattggctacaaattattttatttatagatagagtacttacatggttagcccctgacttttttcaaagtttttccttgtcttcaaacacataataaatttatcatcttaaccatttttaagtgtatgcttcagttatattgcatataatcatattgtgcaaa

SEQ ID NO: 53029 - DNA, 1050 bp, Bovine  19866881359441
  misc_feature (1)..(1): n is a, c, g, or t
nataagaatgtaatgtatagtgtaaggtatatgatcactagtataatagctttctataaagttatatggttattagaagtcatgatcagtttatattttcataggtcaaattattatttagtatactacaaactgacaaaatactaatttcaataaaattaatttaatttttacttctttttaacttaaaaagtgaatctgcaagtcctaagtcctaaaaatttcaaacatcacagtccctttaaagattctaaactagtagtagtcaggactaactaggaaaaaggcatactcagccaacacctgtggcttttgatggaaaagggctgtttcatcttgatcctgaggtggacagagaggtatgtttgcagaaagtcaccagtgatcagtacagccctttataacctcccctctattgaagacaaactgacaatatatctaaagacatagactcgtgggttttcatctttctgctttctttctctcagttttacctctcctccatgcagcccaatgcagcctctacctggatcattccactgtagtctgggtgccagcttcagctctacttatacgatagctgcatcaaagtctaagaggaactatgttggcaatgattgccaggccaactgtagcagctactggggaaagaattgagagctaaatctaagcccatagaatgtaggaagacaaaagttaggtgcaatcctaccagatggagcaacagagctaagattgaagagcagagggtagatttcaacaaggtcagaaataaaatccaactatgacaacaatataatacatatggagaaatggaaattttggagggtcttaaaagcagccagagccctcaaagacccaccatcaaacttgatttattataacaaatctagtttctaggttatgacagacctgagcaaacagtaggttatccgtaatcattggtaaagcattctcatactattcacccatgctacttttctaaacaatatgtatctacaaataagctcttttgggagtttttttagaatcatccatattgagaaaaaa

SEQ ID NO: 53030 - DNA, 1005 bp, Bovine  19866881399800
  misc_feature (1)..(1): n is a, c, g, or t
ngctagtcttgacctagttttcagaggagccactaaaaatgattaattgagccttctttatagagtactttaaaagtatatagttgttctgcatgtaggaaaaacctatcacaatttttaaaaagatgtttaaaaataggtgggaaatccaagatgcaaatagggacttgctaatgctgaataagacagaaggacatatttttctcagtcagttttactagattttaagtaaagcttatttaattatgaaaatctatttaatcagtgatggaaacatttcattttagtgagtgtctaattgtagggaagcttcacagcacaatcatgacctctttctgctgtgctcagctcaagactacctttaatgaaatgtgacgatggagcagttcccttgattaaagcactttgataaataaataagtagctagacaaatttgccagctagggggaaaaaggaacaaatggagctgtaaatcctagaagaatagttttattgtttcaaaaaactttttatggtttatttaagttgtgcttctctagttacaatagtttgtagcattccattgtgtttaatagcacttgctttgattgtatcattatcatagttaacaagttgctctaatatctaccttacagtatctttttaataatgtgaaagataattggaagctgtttgcttttctatccctataaagaggcccatagcagtcagaatctgggagaagattcatttctagaaaatttatattttatagcccctgatctacttataactacttataaatctatttcagatttatgtaagggcggttaaattctgcacagtcacccattctgattgccctctcagaaattttaatatttgcattccgtgtgggcagcagagagagagaaatttttccacttttgttcttggttagatccacagcattgaagagaaaatttttgaaagatttcagtcttcttgtataccagaatttgggggaaacctctgatcttaccctg

SEQ ID NO: 53031 - DNA, 1250 bp, Bovine  19866881410608
  misc_feature (1)..(1): n is a, c, g, or t
nattgaagggcttcattgtcagaaagtattactaatgcatataattatggctttagattatcaagaaggtctaaagacattttattttaatacttgctattcaattgcattggtgacatttgctaataacctaaggaagttacctactgtgatggtgagttttgagttgtaaagtttagcattttgacatgcaatggcagtaatgtgtataatgcacataaagagagcaagaatcaataaacacgccaatttaaaaatgttaaaaacctgaaatattcctcaataactccattaggaaagacaaaatataatggacagtagcaattatttcttgacagactgcccaatagcttctgtggcaaaattgccacaattcacacttaaaaaattaggagaatcctggcagattgaggttggcaggtaaactaattctgcaaagtagtaaacatggctgggttaattgctgtagcttcactatctttcagagctgtgttttcttacttggtgtactgattaaaaaataaaaatttcagtatttttccagtctttagagaactacctggtatgattcagaagatattggatattcagtctctgatatttttcagttattcctcaagcatcctttctggacagtgagatgaaaagcctagtgtcttactaccagatgttaggttttttatgcatacaattaaaacacttggtggccagtttattttgttatttggagaaagaagaaagatggctcagctttagaagtttccatctactccagtatggggctttggctcaaagacagtggtctcaagattactactgaagttaatctatttattgggcagactgggattttatgaatacacattgaaaaagttgctttagttttttcctcatgaaagtaacaaatgttcattatagaaaacttgatttgaagaggaaaactaaattaaaaaatctcttcataggaagaaaactattgatattttaattttattttaaaaattttttctgtgcagagactttttttatatacagttgtccatccatatgttccattttggacatttttttttttcagctgaacattctgacctaacaatgtctcatgttaattcaaattacagctattaatgagtacgagagttcttttgagtggggtgtttcctgtcttacttagccattatcatatggttgaatattaaaattttcaatcaaaaattttttcacttttcaagtgaaaagtttacaat

SEQ ID NO: 53032 - DNA, 1165 bp, Bovine  19866881659024
  misc_feature (1)..(1): n is a, c, g, or t
ntgatggcagaagaccttgccgaaagtatttagaagcaaaggaagcctgggctccatgggagaactgcccatcaattgagcagacgacggttctccagtcgtgctggtcaggtatgtcatgagggctccaattggagctggcctggcccaatcacctttctcaggccaataggtgagaaggggcagctatggtctgatggctccctaacgttagttggcttgctcagtccaccctgggccagggcattggtagaatgggctttctgaccactaggaatcaaagccctgaggaaatctggctcagtgtgaatgaaatgattgactttgtcctttaatcattattataagctactactttgtatatagttcttggtatgtactcacttcttaaagggatactcaggagccataggatctttgtttttgaaaacaacatgtttttctttttttttaaattgaagtatggttgagccacaatgttttgttagtttcaggtgtaccacaaagtgattaagttatacatacatgcctatctatttttttacatttctttatcccatagattactgagtatatttgcctgtgctatatagtaggtccttgttggttatctatcatactgtctaggttttgaccttgttctgccacttaccaactatgtgaccttatgtaaattacttaatctctccgaacctatctcttcatctataaacttggggtgataacaatactggatacctatatatttattgagcagcttaagtgaaataatacaggtaaaatggtgaacagaaactattgcaaaataagcacagtaaataatagttttaatacttttatcatatataatgtttctttctcatttttattatttatttctttaaaagttattagatgtgtgtgttatgagaaatattgtataaactatttctctgataagaagactaaagttgagagaaattaaataatcaaatgaaggtatataatattggaatatccttttactaaaataaaaccagtcagttttgagtaatatacaattttctggactctataagaaagttattatataagtctgtccattaataacagtctgtgttgtatggtcagcattattttttatcagaagtcattgcagagttaatcagggattaacctgtatgtg

SEQ ID NO: 53033 - DNA, 681 bp, Bovine  19866881682006
  misc_feature (1)..(1): n is a, c, g, or t
ntgatgacatgccacactattttttcctgtaccagaaacaccagccatcttaaatttttatcgttctataaaatttctagtgtgttgacttgatgctgaattgtatttgatattagattattgttatcatattttatgttatccctttttaccagatctatgttacaaagaacagttttcttcaactgaaaggctaaaataaaacttgatatgttcatttatgttgaaattcatcagaacataatataccttgattgggaacttctggtatataaagcattctacttggtatattattactgatatgtgagaataggagtatgaaaatgaacatgatataaattccactctaaataatgttaaattcaatatggccaagtgagtaacagtactaggcagccaataatataatgaaggagaacaatctgaaaactacagacagcttggattccataatgaaatatatttggaagctgcaaactaagaatttgacatttatacttgataacatttctgttcttattgccttctatatttcttcaataatatgtttataaaatctgtgcaagtgagttaaataaagcaatgaatttgagatgttttatataggtaatccaaagcctaaatccactcacaaggagaatgaaggcaaaaaatcataacttctgttttagcattcag

SEQ ID NO: 53034 - DNA, 1016 bp, Bovine  19866881694155
  misc_feature (1)..(1): n is a, c, g, or t
nattgttttattaattcctatttaagagaaaaattaatatgacataattttgtattagtttgccagtgaaatattcttacataacattcaatccagtgggaaaaattctgtgtagaataagacaaactaagttgctacaaagactatgagagaaaagaagaaaaacagactgtataattctatcaaataaaatcctttacttaaaataaaatccttgacttaacttctataacctatttcttcaaaacattcagaaacagaccctacagttgatggatagaaaagtgttaaagaaatgtaacagtgtctctgcaggtaattgatttactttagtagtgaaaaactatcactgactttactaaagtttcaatttgcttttcagccactgcaattttaagaaattaatttttcactgcagttttagaaagtataactcagaccaagagagaaataaagaagtaaagatcatgctttaacaagaatatttccttattttgacatatacatctggaagcatacatcaccctgcttagaagagtctgtctctgatttaggagaccaactctatgatttggaaagacgcaagccctatagcaataactctaatgaaaataggacttgaaactagaatgaaaaaattatatacacttctgtttgagggttatgattattgccataaacaaaaatagctaccctgaagcatcaataaatgtaaggagaaagccaagtgttcaggggtctgaaagaaatcaacaggtacctaatgatggccttgtatagacatgtgaatgttattgttttccttctaagtagacagacaatgctgtttctttatctattaaaatggagagcttcaagaggagataaatctatgaatgcattgaaaacatgaaccatgagatattaattgctatatttaatgtctaaaactaagggaataagatatcactttaaagaaaaatttgtgatcagcttggtttctctgggttccaagacttatgcaaaaatttaggcaa

SEQ ID NO: 53035 - DNA, 916 bp, Bovine  19866882024376
  misc_feature (1)..(1): n is a, c, g, or t
naattaatgacttaaagtatcaccctttaatcctataatttatttctatttattaggcattcctaaatgatgcggcaatgacaatattttttttatgaataagctaactttatgattcatcaggctttgctgctgctaagtcgcttcagtcgtgtccgactctgtgcgaccccatagacggcagcccaccaaggctccccccggtccctgggattctccaggcaagaacactggagtgggttgccatttccttctccaatgcatgaaaatgaaaagtgaaagtgaagtcgctcagtcatgtccgactcttcgcgatcccatggactgcagcctaccaggctcctccttccatgggattttccaggcaagagtattggagtggagtgccattgccttctccaacatcaggctttaggcagccaaaatgtattaaccaacaaaagatgggagcttgaaattacctgccatccagattagtggcttgtacagctgcaaatactttggttttcaaaggtagtcctatacttgggataattaactgctgattgtaggtcgaatcctaataataaaaaataaataagcaattaacccgtcattgccttcccaacaacagcacgtttacttaagacaataatggcctattaaaaaaaagagagagcaaatcaacataaatttactgaaccatctcctaaaaggacctagttaatcctctagtttttggcagaactgttcttaaatcatatccaagtaacaaactcacttccatgcataaatcttttcatgtccatagtttatcatttatgatgatttatgttcaatgtgtttaaattacatgcaatggttactagtaagaggttagtatttagtttggctaatattcaactataactattcagttatttaaattcatatttca

SEQ ID NO: 53036 - DNA, 1007 bp, Bovine  19866882028256
  misc_feature (1)..(1): n is a, c, g, or t
ntgttattatgagatccttgatttttgcatttcctgacttctgtgtttaaatgtataaccttaatgttgcattattgttgtgtcttacattagttattgatggcttgtaaatgaaatagatgccttagcaggtcttttcttcttccaacttccgtagataatttctgcagacattttatgaaccaatattacagaggctctataaaaactgtaatggaaaacaacgcaatttttgctgaaatgtatgggaggttctaaaaggtttttcactttgtaacaattatgttgaatctctttgaaaggttgttacttgttttgcttctttatgtcatcacatctattttatcttttactaaaaacatatttcaaaaattaaagttccacagcaatttccaacttatcaaggaattaaatgcagccttataagatctgcgttatgttctctctaaaattcactgaggcccctgacaaaggacagagtgagccagtacttaaaagtatgctaattgtaaaatcatttctttgacacgtgattttctattgacacatttcattggtaaatggtaaaatgatgacagattaaatgccaaagatatttctaattaaaatttttaccaactcaaagctctagctttcaaacacagtaagtaatttaaccaaaaaaaaaaaaaaaaagaaaatccacagaacaatgtgtggatatgaatctatctccttgtggatcaagtaaggaagattcctgccatgtctactttttcccagacagctccccacccactactgccaccggtaagcagaattcaaaaatctcaaaattacactgtttttcctgtccaaaatactcttattcttcagagtacattgataaaagtttcaatatgagcagtcattgaatataaaattagagatatactggaaatatctaatgtaaaagcaactctgagcaaatgatactttggccagattctatgattttacaggcacattgagctcatggaacaacacca

SEQ ID NO: 53037 - DNA, 2549 bp, Bovine  19866880752293
  misc_feature (1)..(1): n is a, c, g, or t
naacgctggagtgggttgccatttccttctccattgcatgaaagtgaaagtgaagtcgctcagtcgtgtccgactcttagcgaccccagggactgcagcctaccaggctcctccatccatgggattttctaggcaaaagtactggagtggggtgccagtgccttctccgtatatatgcgttagtatactgtattggtctttttctttctggcttacttcactctgtataataggctccagtttcatccacctcattagaactgattcaaatgtattctttttaatggctgagtaatactccattgtgtatatgtaccacggctttcttatccattcatctgctgatggacatctaggttgcttccatgccctggctattataaacagtgctgcgatgaacattggggtacacgtgtctctttcaattctggtttcctcagtgtgtatgcccagcagtgggattgctggatcacaaggcagttctatttccagttttttaaggaatctccacactgttctccatagttttttaccattgttaacgaaagtttgtaagaaagccgatgttgttctgagttgcccctaaaatgtgtaagaaatctatttgctgtcatactgacaatgacagtatagtgttcatattgtcacaatattcctggtagattatacttgtcatagtgaagtctattttgtcataggttaagaaaacaatacagggcacatgaatcacagaggatgcaaaactggtcagcatagttcgtgcagtgttctacatgaccgtctactctggatgaatgtgaggatgatatgattgctaaaatccttttaagttgtgatatttgatgatttcatacatttttgacatggcagaaaatactaaaggctttggactgattgtcatcatttccttttcaaaaaaagtgtttctgtgaacaatgaagttaatgctggccaagtgccgtttttctaactgagggcctatctcaaaaggaagagacgtatattgacatttttcaaccagccagccttccagcccatgaaatagaatcaatcatattatgcagattaattgagccctggaacattcgtaatctgagaattctgggtgaaatctttagaagcctttccagtcattttcagacaggctgggacccgggacttgggacattttactatggtgcttgcatctggataaacttctcctgggatcaacagaatacaaaccataagggcctaaaaataaccgcctgcatgtgcagttgcaacaaattatgaacaataagatacaaaaagaccaaaatccaactgccatttctgaggttccaggagcaaaagcaaaaatgatccctgcacacagcaccaccaagcgggtgggaaaccacccaagtcacccctcctgccagacccctggacctgctcctacccttaccccatttaagggaccagctcacccgcttctcagggaagaagcaaaacctgttgtctcagggaaaaaacaagcctgtttgttctcgctccctcgtgctgcagcacaagtcctggtaaacccttccctggatttctcctctggcctcctctcaatttctattaattaaaaagcccaggcttcccaggtggcacagtagtaaagaagtcgcctgccaatgcaggagatgcaagagacgtgggttctattcctagatcgggaagattcccctggagtaggaaatggcaacccactccagtattcttgcctgggaaatcctatggacagaggagcctggtgggctacagtccatggggttgcaaagagtcagacacgactgagcacacccacacgcacaccaggaacctaggtcaataacagtttgggtcaatgtgatagtaggctttatgagtcccaacctagagaccttagaaagcatttactttaaatctgccattttatgtggaaatcaaggcagaagaaattctggagatttgattaaagacccagaggaagcaatatgctgacctagaaccatatcaagtcccattttgcctcctgcaccaagggctctttccaatctccatttcccccaaattcctgaacacaacaacttcccttcactgtcaagaaatgaatggacttaagtggctttgatcacagaaaaaaaaaaaaaaacaaactctaagacaaaaactctctggactctccaccaccagctcagaatggacagccgccctttgttcctcccttcctgctagagtggagaggaggcccctgctttcctaggtttatatcttcacccgtgcttctcctcaaaacagttttctcctcaaaactgccatgaaccaccaatctcccttctgggaattttggtcaactgattatccccttgctgtactgaggcttttccacactcaaggaaatttcagctttatcagttatgttttatgcctcttagtaaaaagaaaaaagatttgaactaaatataagtaagtgttcagatttgttgattctagtgatgggtacaggaaatttattattttagcctctatactttttctatctacttttttttccttca

SEQ ID NO: 53038 - DNA, 703 bp, Bovine  19866882158678
  misc_feature (1)..(1): n is a, c, g, or t
nttccacacatggttcagctatatttatccacacataaatctttgagtgagtaaacaaatggtcaaaaacacatctaatcatctgattacagcacatgaaaacagttataaaaattgcaatgtttctgagcatttatttacttaaagttcagaataggaaacacatgtttaattcaacctgtgccgaagattctaatattcagtaaacaatagtttaccattgtaaacaataatttacaggtctactgcataggagccaaactttaggcaccatattcgaatctagctccaccatctctcagcttctgtcttaccttactcttctctttaattcttagcacagttagaaaaaattctcttcatgtcctatacttggaagctctgtcttcacttggaccttcttcagatctttgtttttcaaatggcttatcaataaatgtcttctgaataaaaataaagtgctctcaatgaaagattccatgtaatttcttccacctcatttcaaagcacattcaaatcgacagagcaatataaagtatagagctttatatccagatattgataatgattgtcatcagaaaaaattttaaaattttaggcattgatcaaagatgtaggaaaactttggggggggcctctaaaaaagtcacaccacttattaagtagaatctgctttcatgtaaataacatggtccagaattcc

SEQ ID NO: 53039 - DNA, 1899 bp, Bovine  19866880370033
  misc_feature (1)..(1): n is a, c, g, or t
ngctcctatcggccaaggaacagtgctcgcctgcctcttgctctctgactgttaacttcattattctccatcaacacatcccagcaggaagtaaaactacttctatacttgtaataaatacaaagaagagagaatgtcaccactaaatatcaagttccaggcatgtgagattttactgagattttatttcttaaaagtcaataaattttacaacttataaatattaatgagttcgtcgcctttgcttaagcctgacctacgtgggcgacagtgataaacactgaagaacatttccatcttgtaaacaagagagctaaatataaacaagacttgaccctcaaaaccaggaaatctgatagggaattctctgtcaggtgtttgatatactgtatattcttctataatctcaaaaattatttggaggggaaaaaagggaaggcaaatatgaaagagaaaaaaattttcgacccaaatgatcaaactgaatgtgttaaattgtcagcaagactttgaactaaagcaatcattctgctataatagagcattagatgacttgaaggcttttgattttaaattttatctaaagcccgtcaactttttctccttgacacttctggtgtcctttcatctccaagggagctccccgactgtctaattaatacatctgaactttaattatataatgtacctttattgttggcacaacttcctggaagtttacaaaaacattatcttggtgtttggttagatggtctgcttaaaagattctaccattgatcaataatccgaggttttcatttttctcacaaacttctctcacacatacacaaatgcacaaatttgacagggaagaaccaacagcagacgggtctgttctaggagagaccctgttgatttaagctgagggtgccagcaaactactagtgaaagcagcctcacacaagcgccaaaaggaacctgttaaaaaaaaaattcattctcctccaagaagcagaaatgattaaattaatcatttcaaacggcctttttagaagaacagacagtacgtgcagtcgagatttgtggatacttgcttatggaggccacaggcggggaagcattttgtgacccggcggaccacaggatgcacgcacgccctgtggcagatgcaggtgaggtggggacgcaaggtgagcgagggcacgggtccctcaagacatcctgctctgcccacgccccagctcagctgcacccagagacgtgtcttctttgttctgattcagtgacgatatttatcactcaaaaggaacatctgtagctgggagacctcccctgatatactataaagctatttctgttcctatttctaaatgcattggcacaaaatgtgtgatgtccaccacacaatcaaagtgcacctggaggtgatttgaaactacgattacggacacggagaggtacagagactaacgagggcagagatttcagaaaaaaaggtcaccaatccctttcagtttgtgaaaatcacacactttcaattatttttaccactactggggtaatttgtccttcacatgtggctcaagtgacctaaatgaattagattctgttaccaggtataatgcttagatcacttctagtgttaagagcaatgtgaggtcactatttaagaaaatacagagtggagctaataagctatttgacacatagaggctaaaagaacaaaaccaattggggctgaggcactaactagatagattctctaagtaaagaagttacttccagagaattaaacattttaaaggcatgttaactctgagtttgtaaagaacttttgaaagttactgtagtagtgcaatcaattggctttgaaaagaaaacctacttaccatcttctcaaattgctagaatattttatca

SEQ ID NO: 53040 - DNA, 937 bp, Bovine  19866880459676
  misc_feature (1)..(1): n is a, c, g, or t
ntttatgcctaatcggtttcatcccatgaagctgaatacagatagaaacagggtcagagctcagggccccctgagccccaggtcacagacgtttggcagctccacctcaaatcacatcaaacgcaaagatgcatcccggttaaattggattgttttgctataaagttttttggtttttttttttttaatgattttcattttgcttttgaaattactaatgatttaaaaaaatttttctctcataacattagaacctctatttcttttaaagccttagatttttagagacaatttaaaagcttgtgggttctactccctgaaatttcagtgcccaaaggggcctcctggcctgccctttcttcctgttttcattctgcctatctctgatagaagatttgaaacaatttatgaatcagtgctcaaaattgacagcaagaggtgtgtgtgcgagagtgtgtgtgtgtacagaaacacacagccacgtatgtgagtttccttttccagcagggacgtttgtctacatgcagataatgcagaagccctaaataagaactcaagaaggacaaagtagtacccaccaggtgcagaacgacttaatccgtgtgtctactctgtagctggctttctagtcccctggctttttcctcccctccggaaggcaaatagacggtcgtctttctcacattcactaactctgtgttttgtttcccagctctgaaggacagcaggttccagctgctgaatttttcgagcagtgaactgaaagtgtcgctgacaaatgtctccatttctgatgaaggaagatacttctgccagctctacactgaccccccgcagggaaagttacaccacaatcacagtcctgggtaaggaatgcatcaaggcttgtcctcggagatgagaggggtagcacttactgccaggtggcttccagcag

SEQ ID NO: 53041 - DNA, 1787 bp, Bovine  19866880464997
  misc_feature (1)..(1): n is a, c, g, or t
nattcctggtcatcttagagcccggcggatccaagagttgaaagtgctagagatgtctgactttataataattctgcttctcagaagtgcaaattacacaggaattggtgctaaactctccattaactacagagtccaaggaacctttagtttcccaaattacctgtcagtttctctgcgacgccatataattctgtcgtttaaggggggaaaaatggttgtaatttgaaatttcagtgaaatttctaattgaatctgcatttaactttgaagacttgatgttcctccatttcagcaatgggttgagtcacattggaaatttcagtttcaccttcccctgaattccacagctcctttcttcctctctcaattgggagcacttattatggtagcaccagctgctcatacaatcttcatcctgaaacaagaccttcagagattcaatccacctgctgctgcctcagtaatgggggaaaaggggggagtaagaagggagaactaagctcagattatgtttaaaaaataatttattccccttttaaaaaattgtaaatgataatacatcataattattcttggtaataaattcaagtgactgagagtcttaatagtgatagagatataggatgttttggttttgtggtttttcaagctttctccctgaggaaactctggagtgtacagagagatggagcagggaaaggggagtgtcttattttctaccctcgtttgaaccagaagaattctattttttattgaggtatagttgatgaaaaatattatgttattttcagatgtacagcatagccattcagtattttttcatattgtactccattaaaagttattacaagataatggctatgattccttgtgctaaatagtatatctttgttgcttatctattttatactttgggtttatatctgttaatctcccgcttccagtttgtcacttcccccttctctcttccctttgataaccacaattttgtttcctgtatctctctacttctgttctgtatatacttttatttgcattatttttcagatgccacgtataagtgatatcttacagtatttgtctttctctttctgatttatttcaccatgtgtaatattctctaggttcattcatattgctgaaaatagcattcttttttatggctaagtgatactccattgtatacaccatatcttcctctaatctaatcacatttaatcacatcttgtccatctaatcccatctattgacaagcacttggtttgcttggctactgtaaatagtgctgctacaaacattggggtgcgtgtatctttcagaattagtgtttttactttttccagatatatatccatgagtagaaatactgggtcacatggaactcagtacagctaattaatataattaaaagtgaagtttttctggttgaaattgtctgtttgatttttgctcaagagttcacttaaagcaagagttccctagcttggaaaggtggacagagtttgaagtctattgaatatacattatattataacttgggaaactgagaccagagagagaactttaagtctctatctgatgctgatgctatctgctcatttatcccacaaatatttggggggagccacttgtgctaggcgtgttctaggcactggagtacagcagtgaactaacccatctttatcctcagagagtttacattttaacgggaggtgacagacaatgaaccagatgtcaatatacactcggtcgtgtttgtctgtgctcagttgctaagttgtgtc

SEQ ID NO: 53042 - DNA, 929 bp, Bovine  19866880535645
  misc_feature (1)..(1): n is a, c, g, or t
nattgagaagttgttttgcatcttagttattttgctcctggtttacatttttgcttctaaggaactgtttgtgcagtatgcttctgaaaggctcaatgtgagaagtagattacactgaattatctaaaatgtgaaatcaaaagtttttttctgcttacgaggctattaattaccagactataattagttatcaatacctttgacaaggtataaccttctttgctaaatccagggtaacagtatgtcattttcctttattttaaagagagcaatagaaatacatgtttcttgtatggcaagaaaagagtgtttaggatttgtgaatgtgagaacacagatgggtgagagtgacttaatccagatggtttatgcaaggaacttagtaagaggtgagagtgatgctaatgtggcagtgaataataaattggcatttcaatattggcaaactggggaattgtgaagaatgtcatatttagttaacttctgatttttaaaaaccaagctgtacattggtaggttaatacctgggaagtgtgtgcatacgtgcatgtgcatgcgtgcacacacacacacacacctataaatgtgtagtttttgagaattatctttaatgacttcagtctaggcactctgtgatttttcttgtttttaaaaactgagatgtaattgttacataatatattaatttcaggtgtacaacatgatttgatattcatacacattgcaaaatggtcaccatagtaagtctagttaatatccatcaccaacatagttagagcaatttttctcttttttttcttgtgttcagtacttttttaacatggcactctgttcttaaatggcttcccttgtagctgagctggtaaagaatccgcgtgcattgtaggagacctgagttagatttccgggtcaggaagattccctaagaa

SEQ ID NO: 53043 - DNA, 964 bp, Bovine  19866880587206
  misc_feature (1)..(1): n is a, c, g, or t
nataaggataagcaattttaaatagcaaataagccccttagctaccaaatttctaaaaagtgttctccttgctctaaaggtaggagggggaataattggcccatgggcccagaaactgaatgacaagttttggtcctaagcaaattttcagtcaacagagtcctttaaaaaactagaaggaggaggtggtaaatgttggtattggcaacagcttaaacaaaagccacactttttttttttcatgtgaacactgggaataagaaggaagcaatgatgttccccttaaaaaaaaatagcaatccaaatgtattaacttccctctgcctaaagaaaatgtgtcaatcttagtttctcaaacaacatattttccccaacacaatagctcatttctttatactacagctagttggccatccccgatcagctgaaatcactgcacagctcaagatctgggactgaaaccaaaaggaataaatcagtgaaggcctgaatttctatcccaccaagcaggccagactctcctaagatgaggagcagccaaaagcagcaggggagttcacaactgtgctggtcagtgatctaaaattacatgacatgggaaaggtacgttcccatcaaaatcccgggaaatctcctttaatcttccctttactacgctatattgcatcgcaaaggttctatgtagctcctcctcctagcacttttgcagaaccaaatctactctaagaaaattagtgaagacatcactcttatgtggaagggctttctaagtaatcaaagtcctgcaataaaggaagtcagcattatttcactgcacagaagctgggggcaggggggagatgttggccagaaaatacttcactccaaacagaaaagttacgttttgaaattgttccaagaagaggatattggcaggaacttcaagattttgtgctttttgctgctactaaaatgaaatagattt

SEQ ID NO: 53044 - DNA, 993 bp, Bovine  19866880611176
  misc_feature (1)..(1): n is a, c, g, or t
nctgatttgatgtgtgtaggacactgcacattcattgagtgatacagattgtgttaaatgggcctgaaataatgttcaggaaagagaatcactttctattcttcttgacacaaacagtttgtcacagatatgcgttcctatccctatcttgttagtatagtcgttatatgcaaataattctagttttccttgattaggtttacatgaatacattgcagttgtgggctaggtgttattaatatatgtgattaaacttgtaattaatatgtgtaattacatagtgagaggtatactgtgctgggctctatgctgatttactgtataaatgctgcatgcacaaagacatggttagaacgttatgctcaatgtttactcccacagtaaatcggcagtggtttgtcgttggggcacatgctctttcatttgaatgcaggagaagcacttttatgggcttgggagtgactgggtcatgattgtcttttactgtggctctgtcaaatattctacccagggagcccacggaagaaaggtttggcatgatgttatggtccttcctgagtgtgtgaaccctgtgctaggcttagcccaacttgagaatatacagattttttattttcgcaaattttattttactcaagtatagttgatttgcagtgttgtgttaattcctgctgtggagcaacatgattcagtcttatatacatatttatatatatatgtatacatatatatataaacacattccttttcatattcttttcaattatggtttatcacaggatgtttatatagttccctatgctgtacagtaagatcttgttgttcacccattctgtatataatcgtttgcatctgctaaccccaaactcccagtccatccccgtccacccaccatcgcacttggcagccccagttctgtctctgagtctgtttctgttgcatagatgaagttcacttgcatcatattttaggtttcacatgtaagtgatatca

SEQ ID NO: 53045 - DNA, 844 bp, Bovine  19866880615686
  misc_feature (1)..(1): n is a, c, g, or t
ncggatggatcccgatgcattcagagcagacaacacatctgttcccaggtcccccttggagacatgccgactacagatccaagtcaacctttaatgctcatgttttttcaggagagcatatctacataagcactgaaatcaaaattatatgctggtagttattgggcccttgggtcatctcccacattctaaccaaaactgagaacattccacacgaggttttgagcagactgcaatcaactatgacctgaactgctttgctcagtaagaacaccaactgtaaggatgccttcaattgctattttctgcctcttatcaactacattgctagcttccagctgaccatgcctctggccagcataattacatatgatgtcccagaaacaactccggctccccttgctactttctcacatccagtagatttcaataatctcactagattctattccctgttagtcctttctaatcctgtctctgccattcttctactcttggcatagtttaagtcagaattcctctcttaaaaacaaatgaaatacacagtcaagggagggaaggggacggatggggaaagagcaatagaataaatgctgaaaaggaaacagagtaccttctgcctgtttacagagcttcaaaaaaatgtgcaatgatgctgacatgagtgagagtatgatgggcacagatgggtataattaaaacagaaaggcgctctcaagatgcttaaaaagggggtagttcagctcccttagttcaaagtaaccaaacatatttaaaagacagttacgtgtacttggatgacaatgaatattgaattcacagggtttaaaattcatgctatctg

SEQ ID NO: 53046 - DNA, 1201 bp, Bovine  19866880712276
  misc_feature (1)..(1): n is a, c, g, or t
nacgtttaaatttcctcagttttggtcataaatgtctcactgggcacatatccgtcagaaaaccccatattttggttctgttaagtgacttagaacacagtgctttcccccaggatgcttgtaggaagacactcttaacaaagcagtattacttgcgaagaattatgcttcaatatcttgtacttggtaaagcttcaataggtgcttctgggataaataaatggatgggtagctggatggatggacggaacagatggagggaaggaagggaggagggaaggaaggaaggaccagagggagggagggagaaaagaggtgaaactgaatggcagctttgtgaatggaatgatggataagtgaatggataaatagaggaattatagtggctaaaataataaagctataagaagagaagttatataatatggctagaaaaaaaactatgtaaaaaagttgcattttcgagtttttgaaactgacatgccagcaatgtctttttacagacacattatataacactgcatcatccagccacacacacacacacacatcacagctaacaatacctccatattccccttccaactcctctctactctctttcctctcccatcaccaacaacatgttttagatgaaactaaatgagtgctattactcccactgacacgatgggtccttggactcatcacctcagcctcctagtctcaataattccatctgcgtcaatgaaagggttgaatcagatggtgcccacagtcccttttagtgctaggatcataaaccattgtctttgttaattttaatcaagtgacagagaggacatttagatagcacaggagcagtattttgggtcacgtctataaattctgggttgggaaccactgaaataatatgatattttctatacatatgagataagaagtcagaaagaagtgaaaggggaggcttcccttttggtgctgaccataggacctctgccccctcctctccccgagagaggaattgagcctggaaaaaaaggatgtgtttccgttgtcgctttcagtctggctccatgtggctggtgtgaagttgtacattttgcagctgaaggcagtgggctccccaggataatagcagctgttcaagtgcatattagcactcgagatgcttgataagaggaattagagtaccgcccggtttctttatttttattttttg

SEQ ID NO: 53047 - DNA, 948 bp, Bovine  19866880758567
  misc_feature (1)..(1): n is a, c, g, or t
naagtctcttttcttgtttaactcattgcactatacatctactagaaaagactacagttattagtattgcactcccataaaagctaggctgctgttatatttgaccactcggaatgctaaaatacaggtgaacctcacaactaagactgtgcctgaggccagagggagaattctcactgcttagagcagagtgcctggtactggagtagatttgcttaagggcaattcttcatttgataaaatatcagagcaatttatgtccttgtacacttgttcccttcctttcctcttatgcagaaatgttaattgacaatcaaaggagtaacaagtgcatacctgaattcacaagtctttgggggcctatctttaatacttctgcagatccagtcctagtttgggttaagctttctttcatccatgctcacccgagagtgctggtgttttccttgttcttttttctgcattcagagttctgaaactgactgtctggtcattttattactcctgtcttagaacatgctctagttttctatgggtccctccagttttgaattaatattaaaaacgggggaaaaagagttaatctggaaatgactgcttcttaagatcagatttcagtttaaaaatctaaccgcaatgttgatcatcctttagcttcatttaatattagtttagctttgttttgcatttgtaaacattcacattttattaatgttcttgagggagagacaaagtggccactgttactctcactttatggtgcagaatgaaacttcagagctttgggtggaacaaatttactcatatcttatatcctgatattctttctattgtaaaatgtgacttgtaaagaatccaaagtagtttccagtgttatagtgcaagcaagatgattttaggagacttcaacaaccaattagaaggagagagtgaaaataagcctaagtg

SEQ ID NO: 53048 - DNA, 926 bp, Bovine  19866880771986
  misc_feature (1)..(1): n is a, c, g, or t
nccggtgcctgcctaagtccctgtaactttttgaaactgtaggggcttgtccaaagggttccagaaggagaatactcatcttactcttttgcagatttaagtagcacttttcccccttttttataagttatttcagctctccaaagatatccttctatcagctagcaggaaccccacgtggtgctttgaatattgccttttacctgtcccccaagtgaagaactaaagttcggtttgtttaaagaccatgttttgaagaaaagcaaggcttaatttcaacctttcatggtcattgacagcattgtcgcttcctaagctatttctctaaaactttcgttacagtactaatatctctctatatattttgtttatgtggcttggtctgtgatgaataacacatttatgcaaaactctcaatatatctacaagatatcaatagacagaatagacatgctctcatatgctgcagttaataaaatgcagtaaaaagcatatagtttcagaggcaattagtacagttcatgacttcaattaccaaaaaaaaaaagtcttcatgatttctaataattgttatttatctttcatctaaagtgttcctcttgtctgtgtcagctttggcccagaaatagcattgccgctggggaaagcatagagctgccgcttaccacactaggataaagaagagaaactgacgatcaggcccctagaaactcctacagtctgcccttggtattcacagattcggagggttgcagattcaaccaaattcggataaaaaatattcaggaaaaaaaaattccacaaagatccaaaaaacaaaacctgaatttgccatgtgccagtaacaatttacatagtattcacattttattaggtattataaggaatctaagagtgatttttctggcagaatcccatggacagag

SEQ ID NO: 53049 - DNA, 1750 bp, Bovine  19866880775955
  misc_feature (1)..(1): n is a, c, g, or t
nctggtctgctggattgtggagatttcttctacttaaggaagtttattagcaccaaataagaatcttcagcttataaaaggaacacatggaaaggttatccagcaaaaggccttaatccctttggccttatagatcctgactacatcctgcaggaggcttttccaggtggctcagtggtaaagaatccacctgccaatgcaggagatgccttcgatccctgggttgggaagatcctctggagtaggaaatggcccactccagtattcttgcctagaaaattccatggacagaggagcctggtgggctaccatccatggggttgcaaagagtcagatacgaccgagcacacacacacacacacacacaccattgcagatactaggacttgaagccaactgcaattcaattatgctctaatgggatggtttctgtggaaataactatccactcttaattttagtctttactcagaaccctagtatatttggtctgtattcatagtaaggttatgaaacatctgcaaaggagatgggagcagaggagttgaccgtgattttgtattttaagcaagataagtattacaacagaaccagagaagtttacgtttctttgttcatttcttaaaaagtctcagcattcttatttattacttacaattaagtaatataagatcagatccctttaatatgtcattactgaataaatcattcaggtaaaatgtttgccatctgcaaatgtttgccctggctgtgctctggcacataatatgctctgcaaatccatggtggtatcatcgtcattactgtattttttttatgaaattgctaaggccaacctaaagtccactgtctcaggaaatgacagttcctagctatgttaacatggttacaatactaatgctaaaaagttagaagtgctggaagatatcaaagtgccttgatggatggtggtggcccaagggtatcggtctgtaaaaatcaccaataaattatacgggtcagttggacagtagttatatgaaacagagctccatatttggagcatcagaagatggctgcaatggaataataatgacctatttattggaggcaaaggaagtgaatgacagtgatgaaaatacgatatgtatgtcaggcctcttaaccgcctgaagcctttatgtaaaaataatttctgctcacatcctcaaatatttcttccaaacagaagggtgtactgtgactcgataaatttccccttgacatagatatcatgacaattaggttgttacaaaacacaatttgatgtgtagcagaaggatacaaacaggcaactccagtgcctttcttaaataatccatttaaaaaacctttctgattttctaaaactcaattagcagatatactgtcaaggtagaaaatagcacatgttctgggcaaaagaaatcaaggaggcttcaagcaggtacgatataaccgtagccattaaataaggctgttagcagcaaggtaatttattttaagtgtggaacaatgtctgacacatacagacatttttgactgctaactggtatatgtgggtgaggtttaagagacagaaccaaactaggttttaatttataccagcaactgaattccctataacatgcctacttgccccacaaattctaaaaacaaaacttcagcattagagaggcccattcactcacaagcaagtctcccatagaactctagaagttgccaagatattcagacaagaataaaaagcatc

SEQ ID NO: 53050 - DNA, 1732 bp, Bovine  19866880832871
  misc_feature (1)..(1): n is a, c, g, or t
nattaactctggatgtgttgatgcatgtttttttaaaaaaggattgtagtttatttggaagtcagacctgggctttggaatttttaagagctctctagatgattctaacatccagacaaatttggcaatcctcagttttatatgtagtaatggccagaaattgaaatatcaaggacaagttttgaagtatcacagatgtattacgatttctataaatctgctttgtcactccttactttagctgaatgaatttccctgatactctctcactttctctttcataaacacacaccattaaaataatccaaaagttctgacccttctatttttgtcttttcttctggaatgagaacagtgggtgaaaagtaattacctctgatgttttctttgacatgctacatttgtctgttaaaaaaattgactccaaaattttagaacattttgaattaagactgcaaaagaaaatcaaagcacgcagctagaagggaaaagaacagagttcctgttttagaaacttgattagcactggaaattgaacttgagtttttgacattgggttccacacgatgcaccatcgtgctcagcctgcatgcaaattgttttctttaagctctttataaatgatgagatgacattaaaagaatagtttaatcatgttttcgtttttcaatatgtaacgctagaggagaagaggaaaagtagatttcttcatttcataaaacaaagtatttttgcaataaagttctaactaaaacttaacctggcacttttttcatttaccttggttattgcttttcacacgtctcatggttcttgtaaacatgcttttctccctgtggagctagattcaaagcaaaggttatgaaggaaagtcttggtatttgagcatcttgcttctgatgtttagccttaagaaatagatttgagcttaaaagaaaagtaatacgtttgcttgaattttcttacctttcttcacattcgcttttactgcctctatggatagccctaaaacttggtttagatagagatctgatgtaatttcatgaagcagtgctgtcagatgacggcaaagcatgtttatatttgttgacacagttctgtagatttcctttccaaagagcatgtgcagatattacgttggtaggtctctatctgtaggcacaaacgttttgtgttgaatgtttaaatttgttttagaattgtttaaatgattattctgcctgtacagatatttagggggaaaaaaggctttcttaagagtttagatagtttttcttctgaccatctgataaagatagagctttttttgttttgtttttataaattcagcctttttctagcagatgatttatagctgtgatcagtgactctatatttggctgatgtatcgaaaagtccatttattgtcaataatttgtttatggcaaaggacatatgccataaatgttttgtattttttctcctttttttttattttttaaagatttgttcctctttcatagctacatgagttaggaaataaaacgattccctgtcaaatttcatattgaactttaaaagaaaaattctaagaatatgctcttggaatgaaaggacttatagaggttattcagggctgtggtttcttaattgctgctttttatttaaaggagattaagggtgttctctttcttaagaatgctactcctgtgtttttgcagatactcttctaacatttacttttttttttttt

SEQ ID NO: 53051 - DNA, 1239 bp, Bovine  19866880837297
  misc_feature (1)..(1): n is a, c, g, or t
ntgagcgacttcctttccttttactttctgcattggagaaggaaatggcaacctactccagtgttcttgcctggagaatgccagggacgggggagcctggtgggctgccgtctatggggtcgcacagagtcggatatgactgaagtgacttagcagcagcagtagcagcagtgggaagttgccgtataacacagggacctcagcctggtgctctgtgacagcctggaggagttgggttgaggacggggtgggagggaggctcaaaagggaggggatatatgtatgcttagagttgattcacagttgtggtatggcagaaaccaacacaacattgtaaagcaattatcctccaagtaaactttttttaaaatcgtgaaaaatatcatgtgccatttaatatgtgtttgtatgtggatagataggtggacaggcttggtgtgtgggaacagaaaatgaaaaacgcagagtccctgctctcatggcacttacagactgatagcaaaaagggaaacagggacagaaaactaacatttattaaacacataccattaataaaaattagccaggctaggaggagggaaacatgggaaaattacacgcattttctataatataagaatagatttttgccctttgatgtgattcagaattttccagaaggacagaatatctgagccagatgggaggagttaagtggttttctttgcttcaggccaggaaaatgtcatctgatgataactgtgctaattgttcttctagtaaacacattgtttatccatcaaggaaactttgagaaggacccaggagttcagtttatagaatttggccacagtcaccctcaagaatctagaacctaggacccagggagatgggtaacataagggaattgtcaacccataagatgccttgacaattcaaaagttctttgggagcagatatctccacctaatgcttcaatacagatgctataatttatagcatgaagtttatgtaaaagatattgttttctctgattggcattttgggggtagtccctgatggtaagtacagtcttttgcagggctgacgaataatcattcagtgtctggccttttcagactgctttgtcaggagaatctacaaagatgtattgatttaccttgtatcaacaatgaagtgttgaagagtctggcaggaaaaccagatggagaagcccagcaaaattgcaaagctgggaccaaggcttggaactggttacag

SEQ ID NO: 53052 - DNA, 852 bp, Bovine  19866880875111
  misc_feature (1)..(1): n is a, c, g, or t
nttaagtgctcgccagctcagttgttaggaatggaggtaaagctaaagattgaagacagcttgacaaaatcctacacaccatccagctgggctttacacattatgagatgtggtaggacagaatgagggtgtttaaaaaacttattgctcttatgttgctgcggggcgttgggctgagctgggaatatgccagggggacttgtgctgcttgtgtaggtaaacttgcaggacttcagctttcaactccatccaatccttcctgtcagattctcttaaccttgtcctgtcccttgctaagcactgacattttcagagcagaagaaaatcatgttaaatttatgtatggggagggggggtgtctgtgtgttttgctagactctggtcttaagtgtttgggctcttttgattagttccgtcctgggtttgttttgtcgtctgagaagagcttataaataagtgctggttaggagtttaatttggattctcatgttctctggccagcatggctgcggttggttctttgtggtgggttacagaagagcttcagccccttctgagcagccagagggccccccgagtagcatgctgctgctggaccattacgtctgtttcggcccaggcagtgatgtttttgtcatttgaacttactggtttttttgcccaaggtttcatttgatggaagagtttagaaactgagaaatatttgaaaaggcctgatattggggacttatgagagacaggcctagaaaggaagattgggccaaattgtagaggctcctgaacatctgacagaggtgaacacgtttttattttccctgcagacagataatggggagccactgaggacgactg

SEQ ID NO: 53053 - DNA, 1162 bp, Bovine  19866880908071
  misc_feature (1)..(1): n is a, c, g, or t
naacaattattcctgtggccttcagaatacgaactcttcctaccgacgatgatggctaacccacgatgcaaatcccttactggacatcctcgctgggagatgggagagacagttcacaggctggacatcaggagaccagctcctcgtccaggaagcatagctaactgtagcctcagttcagtcgtccttccttctttgggctttggctcccacactgcaaaataatgagattttaccgatgatttctaattcctttccaaaattccatgactgtaagacactgtgattcctcaacaggtgatatgaagaaaaagaaccttgcaataaaatgttacaagtttctattaaataattttaaatatgactgactatgaatactgggtgaacttctgtataagtgcatatatacacacatatgcatgtggctgtatacatatttgtgtgagtacacacaaacacatgcacacacaggctaactgatatcatcaggtccttatacgggactaattgcttacaactcaaagcagcaaattttcaatactgcaacagatgtcgctgtgtgatttctcctttctgtcctggattttctgttaaaaatgcccagcgtgatggtcagtactattcttcccaagaaagagatacaatatttgaatcctttggatttatttctcataaaatttcttcatatgctggtaaatttccattcaaatcatagcattgattcgtttggcccaatttaagagattcccctgaataaaaatgggccttttgttaacacgcaggcacaaaaccatttttaaaatgtaaattctaagtggccagttaagcatcaaaatatcacatccagaaaccgagagattgcgtttatattcacagcaatattataaagtttttaaagacggaaaatcacttagcaatataggccaaggaataattaaaaacaaaaaacaaaaaacaaaaaacctcacttatgtttaaggccaaaacgtaccaggtgtgggcaaaaggcactgaaaactccaaaagcacctttcatgatcatgaaaattttggattttagttttcaaagcatttctttaaaaataaataataaggctaatactataattgcaagacctcttacccgtttgacagtcactatcaaccactttctgacacatgc

SEQ ID NO: 53054 - DNA, 3827 bp, Bovine  19866880928064
  misc_feature (1)..(1): n is a, c, g, or t
nccaaagataaatatgaatagcaatttatctttagtgatgtgattgtgttatcctactttcttttgtatgtttgctatatttccaataacaaacatgtattatagttgggaaagaatgaaaaccacataaatgaaagtgatgctttcctctccagggtctgagatagtgaaaaagacagacttgcaccaaggaaccctcttcacctctgacctcttagggtgtggcttcagagatgctttctggtcctgacttgcctggtccaccctgagcaatcctaagaccagaacctagttgtccaagcgaacagagctggcgtggcagtgatctcctgcaggcctgcccatcctaggagccttttttaagcctcctgttagcaggctttcctcctgtctattaggtcactgcagattgattcatctcacttcactgtggtttacagtttgcagttcgtgaccctgacatcctcccctggtgctggagccctgtttctgcaatagcaacaagccagtggcagccagcggcaggtcagcggcaggccttgtatcctcctggcctccttgcagactcctcaccctctcctttcctctctgtgcctgtccggcatccacatacacaaggctgcagcttcaagggaccctgtggggtccgaaccatgactcaggggaaaaagaagggccggctgagaccaggccaatggcaactcagttctctgcaagagtccttagctctggccaagctacaaaacaagaggctctatttgcagagtccacaaggtctgggaccctatgccttacctttcactgtggagcagggagctcacaactgagtgaactcaacaggctgaaacattctgggcttctattaaaaggtagggtatttgtagaaaaatccattttgcaaataatattagcaaaaacccatgggagacagagaaagtctatccctctgtcccatgttgccatttatggaaaaaaaaaaaaaaaaaattgttcccttcagggtctttggccacctgccctcttcaacatttctgcctgatgtttcacttctcctcatcaacatggaccccatctataaagtccactctgcctactccctgcctctgacatggttttcaatcagtcctttctgcctctccttccagtgtaatcataagagccactggacacagaggaaaggaacctgaattctactcctgactctctggttcaagagtttagaactgcagggccagcctagagcctccctgagcctgagtgttctgtctgaaaatatacggcttgaattaaaattcgaaacagcgttccagttctcacgttctatcgcgcgtccaactcccagaagtttcctgagtgaggctgtccccgaccctgaggtccacaggcgccctctgaagtcctcacagggagaggaatttactcttcatttcccatcggtttgcacaagatttgtgctttcttgtttgtcttctcctgtcgaaatagaaagcagctccgaatggacgactatgcttcttcacgacctccatctatgtgtgcagaacacaggaaacagtcaggtgaggtggttagttctctgactaatgcctccccctcgggcagacttgaaaagagactcatttaaatttggttttcctgccagaattgtcaggcctcagtggccttgggaaatcacctaggaagaaaatcaccatttatccaaacaactctgccatctgcacgggctgccaccatctccaaacctctgcctaatctgcacacagcagcatcaactcccctgttccagcgcctcccccccaaggtcatggtcatgcctggtgaagtgtgggcctatgccctcagccaggatggactatccagggagcaccagactcattaaaagccagagcctgtgttcgcaacacagatgagctggagaggcactcacccaggtatcagatgcatcgcattctgagaactgcaactgtctttgcagtgtgaccctgaagaaatcacttgacatctctgagtcccatactcccatttctctggagtagacatcataacacgtaccttgtagggttactatgagacttaaatgtaatcaattatgtgagcatgcatttttaaatgtgaatattttacactctttacacattacggatgttccgaattacctgacccagtaacacatccttgtcacaaggccactgtcaggggagctacatcatgaagaagaagcatttgtcttgacacacagagttggaactcacaacatattctcccattgaaaggctaatatgcatggtatttggttgctggggatagaaatgaccatagttagtacattagttatgtgtgagttaaatagattttcaaggagttcccggaaaacctctccctccatttaccacttttttctatgagagaatagtgttcccaattcatagaaactaatttccaggcaagtctttggaaccctgcccatctgtaagtctacctttgttaaatcaccttcagatgcagtcattgtgtgctacctggggggctaatgacacatttgcggatcccagaaggtctgcgatattacaggcacaggtatggtctcctgccttcccctacagagtgaagaaggggtggaaggaaagtaagaacagtcacttcctcggccccctcattctgcagtcgttgagctttctgaatctgacagctctttccaggtaaaggaacatctacaaaacacaaacacatcatcacagttccggaggaaaggaaacctcagaagagacacctatttctcagccagaaacagaaacagatccccatcctaatggcagccttcaggaggtgagaggcaggggttcgggaaccccaacgctggtggtggattacccagtgactcagggtaaaggcaagagtatttagagagggtttgcactgcttcaaaaacctagcaggttcccagtttcactcctctgcgaggggcaatggccagaaggccatccaaagccactttcctttctcccaaagggctacgactgaaaatgcaacttgccaagttgtatgcttgagcctgaattccacccaccccagccctgcaaacgcgtaagttgaaggccagctcccaccctccctccagcagctcagaatgtgactgtagttggagatttgggggtctctaaagaggtaatgaaggttaaatgaggtcattagggtgagcactaatccagttagactggtgtccttataaaaagaggacatcaggacccagacacacagagcggagactgcatgaacacacacagagaagatggccacctaccagccaaggagagaggctgcagaagaaagaaacctgctgatactcagatctcaggcttccagcctccgggactgtgagcaaggaaatttctattgttgaaggcacccagcctgtggtgctttgttaaggcggtcccagcaaatacgcagcagaacagcaccaggggcaaagagcaaggaaaatgagatacagactccaggagtctggcctcccagtcaagaaaacaggcagacttggatggatgtggttaaaatacttccagctctgaatcagtgccaggctcctggttccttctttgatcaaggcggctggcctgcccgtccatcgccccctgccttggcacagcatctgccagcatccctgttcctaggagccatcctccagccactgagggtcccgtgccatccagagaaggagaaaagatgggaccaagtaaactcttgtcaaggccacactgtctggtttcccagacattcaggacagctgaaggcagcacagacttgggtgtaaaatttactcctctctc

SEQ ID NO: 53055 - DNA, 1405 bp, Bovine  19866880970329
  misc_feature (1)..(1): n is a, c, g, or t
ngtgagtacaggctcagtaactggcgcataataaaggcaacaatagacttatattggctgcaaaaaaaaaaaaaaaggaaaaaagggctgggtggggggagcgctggccagggatattgcttttggagtaaaaatgggagccgtgcaatgccgcttggcagcagaacaggatcagattatacctcctctgtccagcctgctcattgaaggctcggagtagtagcggcagtactctatttgtaagtatctcgcggtaagaagttgccttccccagcgagggctgtatgctgacttggaaaggagcggtctggagctcaaccgtgcatgtcaaagctacaagaaaattctgttgccagttaccatggaagcagcttcttgctcttgtgtacatccctgtttgtactctggttatcagattgtgttcaaattagaaagtaattgggtttgatttgtagtgaggggacgagacaactttctttaaatcttttttctttgcttttaatgtgtattttggtgctccgtttgagaagggattttggcctaaccccaggtcctagacccggaaagtagatttcaggtggggacccagggacttctcttccttactcttcttattttaagctttctctgaagtctccagttcctactccagggttagagaaacctgttggcattgcctttgaacttcattaggcttgtttcattcacagcctcactagggtagccatctagggctattgtgcagtggggtccaggttctctcttccccctgtaactgaaccccatctatcctctggagaaaatctcccatccttcttgtggtgtttggaagaaatggatgttaatggaatgcagctaaaatgggatcatcaaagctcattcagtgtaaatcatgaccgttaggtttgggatgctggcatgctgttgtttttgaccctcagtgaacccctggttggtcaccctccttttccctttttcagcagtagaaaggatggccagtgggtgggggtgggtagcctgctggggagcccaggggctgagtttctgcttgtcgcagcctgttggggcttgtgtaccggggaaggttagagactttacaaaagtgccgccctgcaattgtcgcctttccctgcatcagatccagtagccacgggagggacttacacttgtctgtgatagctttgataaaatatccctcattaatgccactttatatttacagtgtgtcactggagacgcacaaggcttcatttagtgacttgtgtgacgagacaagcttgcattatttgcctgggacattttggtggaacaagagacccattgagcaatcttttgaaatgaacaaatacggaaaaaggggggaagaaaagagcaggcagtgctccggaacaaagagctttattca

SEQ ID NO: 53056 - DNA, 1146 bp, Bovine  19866880976641
  misc_feature (1)..(1): n is a, c, g, or t
ntacattcattgtgtatttcggagcaagtatttcaaccccagggctccactgcagattgaatatcctgctgcctgtggatggaatgcgtcaggtgctgggacagtgcttctgtgcacattctcatctaaccttcatcatagctccagcatatggacagaactatttctatcctatgtgcgaaaagctgaggttcagagaggtggaataactttctcaagtttgcacaattagtaagtggtccagctggcattctaagctatgctgtatcctgggagatttgaaaaccatggctccgagaggttcggcgacttgcctgagatcccactgccggttgtggggttggcattctcattgatctttctcttaagtccttttcatgtttggtcctctacatcacactgttttttttttagtcattcctccagtttctgtgttgatggtgcctccacaatggcgagaaatctgtgtccagtatggagaagaagtgggttctagggaacagaaaagacagcatcatgaacaggcagtattttgaaatgagagtccctgtgtatctattttttgtttctttgaaaggacaacattggagagagagagagagaaggaggaggaggatggagggagggaggaaaagagagagaggaagatagaaagacatatacccagagacaaagacagagagagggagatggataaagagagagagacagagacacagagacaaagagaaaggtgcgcgcgcgtgcacgcacacacacacacacacacacacacacacacagccatcttgttccttcagccccatggccctcagcttccctcctcatcctgagacagtgatggcttggctttgggttaagccacttgttgccagttggtggcatcaagagttgggagtgctagtccggtcacaggtgacaggatttggaacatcatcgtggccctggctccttcccagtagacccagtgggtcatggaaatgggattccccagttggagaattgactgggggtgaaaagagatggcagatggtgggtcctagtggggaggggaggggtgaagggctcgccccatgagtttaacactttgatgcaagggtttctccagtaagtattaataatgttcctataattatacttcagggc

SEQ ID NO: 53057 - DNA, 812 bp, Bovine  19866880979366
  misc_feature (1)..(1): n is a, c, g, or t
ncgatacaaagcgctttctaatcccgcatctaattagaaaaaaaaagagtaaatctccaaacaaaattagttttcagagtcttaattatcaccagaaagagtaattaataagcgaaacaggaaatgaccctgctgagtccctcagttctcaaagatctgctttgcttctcagcaccacttgggtggggagcatgggggaccccgcaggggccgtgtggcgctaaagctctcagagccccagtgggcatcacagctttcctgaggcaccacacatccttctcaagtctgcctgcctttaaaacgtggtttgctgaatttctaggtcattccttccaggctcctttctttcccaggcctcgaggccagggtaaggcagcagaattagaataaatagacggaccagccttcccttttttttctcccccagtgtaacaggctctgggccagaaactctcaaaccaattgatgataacaagctcaagttcaatgccattggctgtctggtgagaccttcctggctatacttgtctctactccttggcttgtatttctttctttatttattcattttaatagtagcatcatataaataaaacactattacaaaaatgtcgcagaaagttcaaaactattcattatccatttcatacagattaaaattgccatcaaggctgtttggatttgacttgcgttcctttccttctaatgagccgaatagagaaggaaaggatgctaattcatccttacatctctatcatatctcgacttttactatataaagcatcaaggtcgcattcggggaaatgtctttt

SEQ ID NO: 53058 - DNA, 914 bp, Bovine  19866881000926
  misc_feature (1)..(1): n is a, c, g, or t
naacctgctcagacttggaaggaacaatttggatcgcagatggaaattacttaactttctcttcttcttgatcccttgtgtgcatgctcagttgcttcagtcatgtctgactctttgcaaccctgtggactgtagcccgccaggttcctctgtctataggattctccaggaaggctactggagtaggagccataccctcctccaggggatctccctgactcagcgatggaaggtgagtctaggtgagtcttctgcacttaaggtggaatctttacctctgagccaccggggaagccctcttgatcccttacttacatgaaagaaacagcgaatttggaactggtctttcctaagaaggtgaactggctcccagactgagaaccagagttcatttgaagcttggaattcaattgccccaacagtgaggggccttgggggaaggctgggggaattctttggggatttgtagccagtgcttttccctgacttgcggtcgctgccagtctgggagtctgaaatgtgttttgacagcagacatcctgtgtgtcctgactataagtagtgatctgtgggtctcctgactttgtctcttccactggcagctcaaagagtgaagcagacagcaggagacacgagggaagggaagaaggggttgatgggtgtgtcagagtgaggcctgaagttcctttttcctccgttcctctttcgatgacctcatttattatggaaaaggtttacctgatattgagtcataacttgcaagaaggagaaacagcccaatcgatacctctcagagcacctggggaggcgcatcactggaggtagggtgaggaggaagcagagagggaggagaggagagtagttagaagatgatcggcttaagaagggctctggaccgtctgtgcttttgttaa

SEQ ID NO: 53059 - DNA, 1969 bp, Bovine  19866881012087
  misc_feature (1)..(1): n is a, c, g, or t
ngagactttaggtcacactacagtagcagccaattaaaaaaacaatattagaaagacattctgatttgatgagactttccttaaatggactttgctctctataaagggggggatatatatatataaaaggaaactcttaaagaggttagaatggcttgctggcagattacaattgatttcatgccagtttgaccttgcaccgtattctatgatcttttcagaagatgaaactcaagactctggaacctgtatttcactttcccatgtaaatgaaaagtcacagtctccttctctctagatcactgagctcatgtatcaggtctttacaatttcttatttttaaaaagagaacactgtggtttccttttgcctgggatattatccttcccaggtaccagagaggagcattgctgaaataagacagcacggtgggagaagacctgttagcccaggggctcctgacacttcccctgcctgagaattcaagtcagaggacgtggacctcacatatttgctgatgcgctgactgcaaagcagatctagaaacacgagccccagtgtgcttctccaggctcttcgtgtgactgagatttcctccaacattctgaaacacctgttagagtgagactggaggcctctggaccaagtgttcattttttgggcaaagacaagggcagggtgggggcccagataaatcagactgacgggaggcagtgtgggtctgtgcctgtgcattcaggtggggaaactttacctgagggtctttgtcaatcatggaggattactgcagttcagaggagcatggggatgccaagatgaacctgagatttggtgagggcttagaggtaagaactgacccctataacacggctgcctaaactgttgggcaaggccggttttgctctgaaggagggcgatgtctagtgacacaaggaggttgggactagtcagagaacagagtcacagcaagctctccgaggagttaaagagaacatcttgcaaaaggcttgctttccattgtcatcatacattcatgaataattttcactgccgtttattttgtttgtttgcaaggtgaaggccctcctgctgttacatctgctgtatgaatcggagcacttaaacggcacttcttcgaagagggctgagctatgatgagtgggatgagtcaggccttggaggatggatgtgggaccgaagagcatgtgccacatcacacagtaaaatacaatttcctcttgttgcaacttgtaagtagctttgtggatactgaaatgactgtttactcaacaaaatcaaattttattctgtgatgttgtggcagagagttgctcccagtgcctttgaagtggggtgcacactcacccacacagcactcttccagatctatgagaaatcttcaaaatttgaaagtgaacactgggtgagaaaaccctcatagcaagagtgtccgcacaagaatgtaagctctgtgacaagaaaggttttcgttttttgtatccctggtgcctagaataatgtcagtgactggaacatggtaggcatttagtatgtattcaccaagcagatgaatgaatgaaaaagttgggagatgttggggaatggaagtctagctctgctactggttaaacgaaaactaggagaccatgaattcaccttagccctgttctaagacagacaagtcacattaaaattttcaagtgtttctttgagcagacatccagttcaacagggcagtccaactgaaaataattcaaaaggagctgggggaaaggtttctataaagatgacatggaagaaaagcaagggaattatttgattggctagagctaagcagttgccttcagagaaggcaatggcacccgactccagtactcttgcctggagaatcccagggacgggggagcctggtaggctgcagtccatggggtcgcgaaaagtcggacacaagtgagcatcttcactttca

SEQ ID NO: 53060 - DNA, 946 bp, Bovine  19866881033933
  misc_feature (1)..(1): n is a, c, g, or t
naaatgatgctgagggctgacgttctaaagtgaaagcgaaagtcgttcagtcgtgtctgactctttgtgaccccatggactgtaggctcctctgtccatggaattctccaagcaagaatactggagtgggtagctgttcccttctccagggatcttcccaacccagggatcaaacccaggtctcacgaattgtaagtgaattttttaccatctgagccaccagataagcccaagtatactggagtgggtagcctatcccttctccagaggatcttccccgaaccaggaattgaactggggttttctacattgcaggcggattctttactagcttcgctaccagggaagcccctaaacattctgttttaagaatttaagaaataactgttttaagaattcagagaaggggggagagatatttgtagggtgctgggttcaaaaagtatttaaggaggaggggagactcgagcaggttattaaatgatgggttgcatttctcttggtagagaagatagcaaagggtaataatcagacatttaagataatcagttctgccatccacttgctgtgggccttttggcaaatctcttaacctctctggccctcagtgttttcctctgtaaaatggattggatgtattgcttcaaaattttatgacccaatgaaaatctagacaggggaagagtttgaatgattttggtaaccaggcagggcaaaggcttaatgatctttggaagaccttatctgattttcccaaagtgactgttctgcatcagaaagagtgggctgtctttgaactgggggccatagcctgggggtctgatctgaattccttttcccgggactggaagaaacacagcctcactatctttgccaacaattgcctgtggcaaattcagtaccctccttgatgtagcattggaggaaatttttccataaaacaaaa

SEQ ID NO: 53061 - DNA, 1713 bp, Bovine  19866881047636
  misc_feature (1)..(1): n is a, c, g, or t
nccaggaaaacactgccatgtctcccaaggcatgtatattaacgaactccacttaatttttcaaaattcgaagaatgctacagatccaaagggtgggggaactcgggagggattaataaattcatctttctttctgctccatatgagaacatcacttggtctattctgttaactcaaacccacctagttactgacagaaagcttaaaatgaccaacagtcagacgaagaagatgaatgaagttctccatgtgcagactctgcggtccagcaacgctctctgttggcgggtatcctcggcgcacgtgcacaaggagacacatacacgaaccttcactgacgtaagaaaagtctgcagacagcccatgtgcctatcaacagggggacggctgaataacaggtatatgtgtgctttggggtacaaggtagcggctaagtggaacaagcaaaacctgcatgcaacaacacggacgggcttctgggcaccgccgcggaagggactaagctgcagaatgatgtgtgcggtatgctagcacatacgccatcccacagcattcccacgaactatatgtttacatctctatctggacggacagacacagatacacacagacagacaggtaggtagacagagacatgagcaaatacagaggaaaacaagttagcggaccccactagcatccatcaatgaggacttcagccttttctaaaatacttttaaagggaaatatattcatatatttcttgactaattagaagttaaagaaaaaatatatttataataaactgggaggtaactgaaggggacaacatcaagaactaaaggaaatacatctgagtctttcaagttctatcaaatgactagcagatgaactgattctacctcctctaaaagtgttacttttgaaaagcatttcaagacaaggatacaaatatctagaatatttgtatctagttttggtggattgtgaatttatgtaagtttaaaatatctagacatttattttaaacatctaaatatttatgggctcctttagaaaagagccaactttatcaatataactaccttactacaggatggcaatacatccattaaatggaaaaaaataataaaatattaattcttataacaccttcaggataactggccatggaagaaaatatataaatgggactcatttatataaaagtgaatccattaagaatggcaagagccttgcatgtggtgaatttcttgtgtttggaaatgtgcctagaagtcatcagatttgttgttagtgaacccccatctgtcatagctcgtatctgaactatggatagctcttagtccccaaatcaatatgctgtgcattcgtgtcatctagcatccagtctagaagctctgcaattgtctatgagctcctcgattcttattttcacaaccctgtgctttgttataattcttggcatccaactgacaaaatatagaaatatcattttaaagacttcactcaagaaagcttggctgtggagaaaaggctacttctgtgtgtgtgtgtctgtctgtctgtctccacccacacatggaaactcaagagaggataaaattataaaacattatacttcattatggttaagaggttatcacctcaaaggactggaacgtgtctcaggcaagatacttttagcagtgtctcatctatgaggccaggtatccagcaagtccagcttcccag

SEQ ID NO: 53062 - DNA, 4286 bp, Bovine  19866881049831
  misc_feature (1)..(1): n is a, c, g, or t
nctgtagaagtgctcagttatgactccagaaagaagtgcaaaaagatgcagacccaagccagaagataatatcaaagtgaaatatttccactaatgtcagcaaaatgtaaaaatatcatcagaaacaaacatgtgctccctcccacctgtcctgccgattttaattcagaaaattgaaatgatttttctcatatcaaaaatgagtgaaaatactagggagtctttttattctttataaactgaagtcagagtaatttattttatctggaggagagtattaaattagctgtcaactgtgctacacaggtggatggtaactttggaattgaaatgaccaaatctccagtcttgaggcattcattttaatctccgttttccattgaaataggcaaaacatgaaatgttgagataatggcactaaaattccaagtaattgcttttgttagctcaactcatgtttactcatattaattactgaaatttgataacctctttgttttctacttagcatgactctgaatgcagggacagagccatcaatcaggtaggcggttctcaccgaaggccggactcctttgctttgatgttggcagcttaaggctaattccttccgcttgataggtttataattcaagaagatgtgatttaatgttgatggaatttatttttgaaacacattataggacgaaagcctttcaaagtaaaaaatgaacttttgaggtaaatcttaagtaaacaaaggctgtcaggttctctccacacccaattttagagatctctatagaactgtggacctgtgccatgcatgtccacccttcagctggaggggatgaggtggtgaaaggagaaaatgcaagagctcttgagtcttagaaacaaggtaggcaattaaagacatcaactttttccttcctctcctctttgtaaatgtgtttcacgttgccttctcttcctcataccttttcatttatggtattccttacaagttgtttttccaaaggtgaacctgaaatattcaagtttttaatatttcattcaaactctaggtttgtagagtttggagggatcctgagtccatttgttttcaatctgctgattcatacatttcttcagcctctcatttatttcatttatacattcatgccctctagaagcgttgagttccagtcactgctctacgcatggaaactaagcaggtaacaagctacactaagtctttgccctcatggacatctttcttttggacactattgttattagaccccgcctgccaatgcaggagacatagagactcactttcaatccctgggtcaggaagatcccctggaggagggcatggcaacccactccagtattcttgcctggagaatcccatgggcagaggagcctgatgggccacacacagtccatgggttgcacagagtcaaatacactgagtaactaagcatgcgcgtgcgtgtgggtacacacacacacacacacacacacacacacacaaggaggaaaaacaaagcaggggttggagataggaaccatttgttcaaatcaagaaggatgtggaactgatctttttgaggggaagctggagaagttctcaccaagaagatgatgttggaatgaaagtctgaggaaatctaaaaatattgagggattccttatacttccaacttgtgcaagcaaattcctgcctcctctttaacaatctggtcctacctgagggcctgttgagttctggagcagagggctctggtgggacacttggatgccccttgccctggtgaagtttgggtttgtctctggggaagccaagccttggtcatcagctctttagactccaggtggacagggaggttctagatatcctgtccttaattgtcactgaggtgttacgtctttggaagagagtccttgaggaccggagttgtgagatagcaaaaaagagacttttaaccctcagactgtttggtgaagccctggggagtttctttggggtcatctgtgtgctttgctctcttctgcacttgagatccaaaaaggtccaaagtctctggtaaagttggggactttctggcacggtcctgagtttggcctgacttccagccaggctatctcccagtgcctttgttcagcttccctctgcctcccaacttccctgcctctagtcttgcttctctaccctatggttacagcagctgtcaccatcctggatcctgactgtacactgaactgtgctaagctctctgcatccatgatctcacttactcttcacagcagctgtgtgtgagaggggtcttggtgcctggcatagagagggtgggctgttggaccgcaggttttctcagggggtgggggggatcagaaacttggttttagacgtgttgaaactgaactgtcttttagacaatggagagaagatgctgaggagctgggtataggagtccagagtttggggatgcagactgagtttgaggtataaatttgggagttggctgatgacagaggttctgtcaagtcttgagcgtggctgagatcacagagggtgagaatgtagatggagaagcgaagaggtcctgggctgagccctggggcgctccgacctggaagaggaggaggagactgagaagatgaggccggggaagcaggaggggaaccagaagagttgtcctgaaaacgcagctaggacagtgcgtcaagagctgggaacggtgtagtggtgtcagacgctgagagagcaagaagacagcctgaccaggggacatagctaccctcaggccgctggtgaccttgacttgatgtgaggcatttgggcaaaatggtggaggcctacggctgacaggagtggactagaaagagaacaggaggagagaaacaggagccagcaagtggaggccactcctctgaggattttagctgtaaagaggagtaaagaaatggagtgtgcgttggctggagacgtggggtcatgaaaggaatttttaaaaagatgactgaaatctcagcctgtttgtatgctgatgaacataatctagtagagaccaaaaattgacagagaattgctgaggcagtgtccttgagtaggcgaaaggaaaccaaggctcagagaggttaagaaactcactcaggatggcacagcaaggaaatgacggaccttgcgctgaacctgctctttccactgtatcgcgtgtcgcccacaactcccacccttcccaaagctcggaggcatcaaggtcacagtttctcttggtattctcagagacttagcagctccatacacactgatgtggcagagacagctctgatttcgccccaggaagtgtccttcttcagtactttcaagaagaacacttaagggcctgtgtatgtttaggccgttgcagtgtaaccccctcctccctggtatacattcataccactttgggtcagggaaatgttttataaccacatgtccctgcaaatgagctttctgtatctctaagcaaggcagctgggagagcagagagagagaaaacatctccagtggcaggcagttcaggcctgtctctacactgcccacttaccaaatcagccaaccttgagccaagtcactccaagctcagacagatagagcaacacttcttgaggcccaaacaaaatcaggtgcttgattgctgttactgatctgaagagcctattttgatgggagaggctatagtatgaagactttctcatagaaaaggagaaagacccaccattgcagtgggaataataattgctcatgttttttgagagattaggtatgttctgagaatagtgctaagtttttaacattagttatttaatacaactctcacaacaacctttagaaataattattattgggcttccctagtggctcagacaataaggaatctgcctgcaatgcaggagacccaggttcggtctctgggtagggaagatcccttggagaatggctaccctctccagtattcttgcctggagaattccatggacagaggagcttggcaggctacagtccatggggtcgcaaagaatcagatgcgactgagtgactaacagatacacacacacacacacacattattattatttccatttttgagatgggaaaagtgaggcctaaggaggttgagaagctagcccaaggtcatacaagtagtaagtgactgtccaagggttggaacttgggtgtgtctgaatcctcttaactactttagacaatggactaggaaaaagttcatttatttttataaataaagaacttcctctttattttaattttttttaaa

SEQ ID NO: 53063 - DNA, 1829 bp, Bovine  19866881099774
  misc_feature (1)..(1): n is a, c, g, or t
ngggagccatcctagcccaccgggggcttccgagggagttagggctacgtgctggggacatggggctgccaaggtgtccgtgtctttcttctcttccaggcatggtgcctcccaacacgggcagaccctgtcctcaagtcaaggaggatccaaggccaggaacacatggctttgcatgtagatgtgtatagagaaatgtgtgtgtgttaagatgtattacaactgcgggtgtgaatgtatgatgtgtcgtgccattggggagccatgtagcaaaggttgtttttatccggtaactttaatctatgtcaactttgggagttaagattctctagggaatctctatggaccatcccctttttcagctctctcactgctcccctagatcctcccttctccgttaataataaaggaagcagtagttagagttgatgctcagaaccactctaaatcttttctcccttctcccatgactatgtgttggcctgagctgagtacatcaggctcagtgagtcacacgcaggactgggatgcaggctgtttcagcttccgctggaccagtgtctcactcctgggctggcattttgctgggggtgctaaaaggatcattaatctgtctccttgctatttttctgccccagccaagggaatgactctggcctataaatcagctcagtaccgagtgagaaactcaaggagggatccagtaagaaggaaaataaccacttaggaaggatatagacctgaggtatgggacgcagaaaatcagaggaaggaagaagagtgatcttttgaggaaataacaagaagagaaaaaattgtaccaatccagcagggccagatctgggacaaaggagatctagattctggtcttcaagatgttattctaagcttcttgtttcagctaatctcgctgggctacaactaggccatctgttcaggtgggctctctccaggtcttgctcagccttgtgccttcctgggaactagaaacaaaacaaattcgtacacgcaaatgactccaagcctacatatttactcctgcaagttacttaatcaaaagtacccatggtaaagacttctaaggtgcactgggaatgctggggggcagtgtggccagtggaatgggtctggaatcagatgtgttcttagttttctctggatttctggatctgttgttgttcagacaccaagtcgtgtctgactctttgtgaccccatgagctgcagcatgccaggctttcctgtccctcaccatctcctggagtttgtccaagttcatgtccactgaatcagtgattgcatctcatcctctgttgccctcttctcctccttccatcaatctttcccagcatcagggtcttttccagtccattaacccttggccagcacctcagtttcctcatactttaaggtcagtttgaactccagacttctgtgatgatgacttgtctccacagtgatatgaagcactcacatctctcagtgactctccaacatcttggctgtcactgacaggagccacagctagaagggagaaggggaggccttaatggggtccaacactccacatcccactcaagcttattgctctccaggctgtatgggctggagcactccctcctgggactaagtctgctctaggggctgttatcttctgagagtcagcttggtagtttcaagagctcaggctctagaaagagatgtatttgggttttaaagtcactcaagaattatgtggcccctggggagatcctaagcatgcctgaggtcctgtaaccacatctgtaaattcaaagtgttagtcattcagtcatgtctgactctttgtgg

SEQ ID NO: 53064 - DNA, 1295 bp, Bovine  19866881100382
  misc_feature (1)..(1): n is a, c, g, or t
nttagaaattcccctggcagctgagcatcccactggccacaattaacctgctcaagactaggtcagcaactttgcagggaatgtttgctgatggcattctactgggtatgctggtagtactgactctggtccccagaaagcctggcatgtctctagtggcagaagaaagctaggagcaaattctgccagcatcacagaatccttaggctgagtgtgacatttagaggtcgcctggtccagccatttgcctgcaggcatacttggacataaaccagctgagacagatgagaatctgttctctctccctgccttcaaaaaccttcacacacagaaggacatttcatgtatagccttagtatctaatattcctcaaccctgagacagttgtttctgagcgctcatctgtattccacttgctcccaaatgattctctctttgatttatatctcgatagagatggaaggaagaaccctttgcatgttgtatgcagtaggccttggatcttgctcatgaagacatctccagaattcactgtgcttcttctaactctgcattaagtgacatcactttggtagcttgaaatcagccatggtggacttctcagatgactcagtgggaaagactctgcctgccaatgcaggagatgcagcatatactggtttgacccctgggttgggacgatctcctggagaaggaaatggcaatccactccaatattcttgcctgggaaatcccatggacagaggagcctggcagttgacagtccatggggtcacaaaaaagtcagacatgatttggtgacgaaacaacaatcagccatggtatttacaccatggaaacaggcgaacaccacagattagggctttctttcctcccagaaacaaataggggtttaacatttcccagcacacagctggtcttggagagcagtagtccccggaacttgggggtcgacgcttctgtgtacacgtcaccttagtgctctcaggtgaagctcactctctggcacgactgtaattttgcagcgagcagaggctgtgacttgcattcaccccctgcccaggactttttctacagcagctgcacgtctgctgtatgccagaggaatgaaggacacatatcagatcatcaggctgaatgactctagttttcatcgtcttagtcctaatgcgatcccacggttggagtcagatttgccaagcaggagatatgtttatctcagttgacttcagagttgtgcaattcaattcaagcagggtttgagagacaccttctccacgttccccgggttctag

SEQ ID NO: 53065 - DNA, 1063 bp, Bovine  19866881158158
  misc_feature (1)..(1): n is a, c, g, or t
ncaaaacattctaccatcagctaaataaataaatccaactctgttttctagaagtaattttggggcaacccatggttgaagttcagacttaagaagagtaagtcatagacagcagtaaatgtatttagatatatagaacctgtaaccattatttattctaaatctgagttttcaatcactaaatatattagaaagcgtttaaaagtccaggagagagaacttccacttagtacaaagctgacctttgaggtctctttggaaaatattagaatcttaagagtgaattctttaacaaagcaacatatttaaaaaaaaaaaaacaacatattccatttttagtacttgggttttcttgtagcaaggtataggtatcaatgacacaaaagacttttttctagtttttatcactaacttttgtaaattataactgttacacatagcctaaatgctaatatatcaatttttactttttgaatgaaatttgttcattcatttttctatttagtcaatcaacaaatatttattgaggcactgtgctgaatatatttatggatggtgatttacctcttttcactttaaattatctatatagacaatgagcactgaattatgctacattttacacaaaaggtagggatttgcttccacaacctggcaggaaacctttaagcagggcataaacggtattcacagttttgaattagatcagaaatgctctgctgaaaccaataatttggggtttcatttttctttttatcttctttattcttattccagctataaatcatatcactacccattcattcttctaagacatgggaacatttaagtggaagggttctgtttattctttccccaaaccagtgactaaatttaaataaaatgttctttgagggttgaaggaacatgccatttcttttaaagttgtcaaccctctaaaaaaaagtttcaaaaaggaaagccaaaaggagtgtcaatgtataattttaaacacacagattagctgtaactcatgggctttttcagtgtataacccaagaattctgccaaagtaaagaaaaga

SEQ ID NO: 53066 - DNA, 1026 bp, Bovine  19866881165540
  misc_feature (1)..(1): n is a, c, g, or t
ncacatagtaggggatacacatacccacacccacacccacaacccacacagatatgcatgcagtatttacttaaaaggctaaggacaaaatttaaagtcacattaattttaactcttagaaaaacatcacaccctgaagcttctctatactcactatagcacacagccttcttgagttgagtcgtggaataggttccatttgtcatgggaagtaaaggtgggaaacttatgattctgtttctcctataaaatggtcaatttcacttgagaaatatagctgtgcactagacatcacagattctcctaacgagttcactcctttcaggagtttagagtctcagaatctgtagaatgtatttcaagaaaaaatttgtggtgagtttttggtatatatgcatttctgtgcatcagtattctttaaaatgtcataaaatgaatggcaccacacgtgaaaattctgtttccaaatggaatattcatttttaatgttaagttttgaaagttaactccaatgtccttctgctaatctctcagtttggttcgttattagacttcaaatcactgtcactgggcaagcagtgaacatggaataattatttcatatttttctttctccctctctatcatctttaaatccacaatatctcaatccaactgatgtccgtaaatccaggctgtcgcaacttttctctaaaactcttaaaactatttgaatgaggtgttgagcagctgtcagttatggatttgaaaataaaaagagcctgaaaattgtacgttcagtataaaaagattaggtgaagcaattcagaatgtttaagaactttaaatcaagttaaaagcagttactatggccagatctcatgaagctctgcttaagagccacattaacctggcagtcaaaactatttaaaatgaataatgtttttttcacatttcactcacttttggcatcatccaaaaaaaagaagaaaagataacaatgtgaattggcataggcagtaagtcgtgtaacagtaccttcaagat

SEQ ID NO: 53067 - DNA, 1363 bp, Bovine  19866881199556
  misc_feature (1)..(1): n is a, c, g, or t
nactattcatcttcccccctggtgctgtgtctatcatgcaatctggcaccaggaattctgctggttggtgatagttcctgagcacaggaattgcatgtactctgttggcagctgtatccagggcacccagcgtaatatctgggaggcactaaatgaatgaagaatgagcgttttctacatgatcacgtggtcgtcttagactcttgactctgagggcccgcttgtctacccttgtgtttcttaggaattaggaaggctcacttgtatcaattatagtgaggtatgtcctttgaagttgaaggacaggggcaattattgtgtgtatgtgaactttttacattcacagaagaaataatttactgggaatgagaaggaaaagtgactcctgatgcataatagggaccggagctcgttaacttaattacttagtggtccctgacaatgcttttctcccctgtgatcaccctcttacccttatgcagtatttacccgtggacttggatagagaatgccgagcagagtggcttccacccctgcccttccctgtgctcgcgggtccacaccccaactgaggctcacagtgctgtttgtacaggggtgtcctgaggcgctagtgctgcatggactcactctgttgaccttgacgattagcaggttgctcctgacaagtcggttgagagcattattcataattttgtcatggatactcttgcatctccaatagcaattctctgagaacctattagtgaagttagaaagctgcaaattttgcagtgagttggatatttagaaattaagtttcctttgcttaatagtttgaggtggatgctctggttctatggatagtctagctcaacccagccattcagtgaccaaggctaacagtggctctgccgccttctacaaggagattctggagtcgttccagtcacacccttttagcctcttgtaagagagaaagggaaacgggaggggagcagtctgttctttggacacacatcctttctgctcactccggcaggacatagtcacctgaccagcctagctgcggggacggctgggaaatgcagagtaacagccactcttgtgccaggctgcctggatgaaggtgagagtgggtgagtgacagacagcaggctctgggccacaggcttgcttggtcttgcaaaattccatcgtttaccatagactttacactgtctgattactcccccctttcgtttcttggggtcaagctgtttatgaagatgatgatgtacatcctggtcgagcagctatcttatgtccttctggttaatatcaatgcacgtatgtatttttttttaacactttgaaagcaacgtcaatcctctgaccagcttgt

SEQ ID NO: 53068 - DNA, 1640 bp, Bovine  19866881205112
  misc_feature (1)..(1): n is a, c, g, or t
ncccttcccttttattgttaaacgagttcttgtttggaccataaatgattgtacccaggcttgtagatgaggagttgaggcttagagctttgcctaagtgtccccagctggtcaggggcagaccaggttttacactgggttctgtttggaatctgaactcttgatgctcctgcttctgggccggtagggaagaggaaaggcaggggactgatgctgaaggggaggctgaagcagttccagtgctcctctgataggtagcaaaatggaatctctctgtagggtccggaaggcagaagttgggggcacccagcttaggaagtagttcgaagatgcctgttgactgacttgtcaacctgatctctggggggccttggcctgcagtggctccaagtagggttttggctccaagccagaaattgaggccgggatgcggcagtgagtaccaaatcctagccactagaccagtggtcagtgacaaggccctggccctttggatctgcagaaaagaattcccacaaagaagaaaagtagtgaaacaaataaaatattcattaggaggaaaaaaagaatacagtacgtgtggatagacacatgggcagactcagagagtgctgcagctttagttttcatcacttatacgggacatttcttccaggtttcctttggaccatcctttgacctgcctgattcagagtctgtatctggtatatctcaggatcctcccatatgcatacatgcgtctctcagccaagatgggttccacggagaaggcctatgggcagccttgacaccactcccgtttcgacttccaaggaactctctagtcaggaaggtctccttgacttcaagaatgagaaatacgtggtctcgtatcttttatctgtgcagggcccagcctcctctctcaattgtcctgctatcttcatctcacagtttccatccacagggaatgaactccaactgttcaccatggggtagatgagggcgggggttggcatctacctcctgcatcaaacctatggcagctgagaaagagagtctgccctctgaaatccaactcctggataaacttgttcaaggcaggtgccaggggaacttagatggggactaagtgttgttctttgccaagaggtgacccacatgtgcctggctcttcttaaagtccagatgtctgggcacagaaccaagaatctgagtctctgtttccagtctttggcctctgatctgaagctagaagaagcgacaataagaaaatccccctccagttggctgcctttaacacatcctgtcccatcccatttgtggaggagggaacggcttggtgagcctggctactgctcttggaggctataaagtcggtgcctgagaaatgaaaattgttgttattaccatgcaaactgttgatgtaaagggctggtctggagtactttgcttccttaattagagctgatctttcttttcctgcaaatttggggactatcctgttattaatgacctttttggatccatgcccaggacttagagatattgtctttggatccaggtaatgaggtcgctactgatcctgaacaaatggggaagaatttaataattactctgcactgtactgtggggacctttcattgtcaagatagaggcat

SEQ ID NO: 53069 - DNA, 1493 bp, Bovine  19866881205814
  misc_feature (1)..(1): n is a, c, g, or t
nacccggcacagtactctgagccttgcttccaggcggtcgttcccaggacatcagcccagtcttgggaaatggtccatgttgcccatcccatctgctttgagctgagtgttccaaacgcaaaccgaccctaaaagccgggcctgattttaggcagtagcaaagttgggctattgtaaggtttcttggttccaaaatgctgccaacttgtgcttttgtggttcacaattagactcttgatcatatggaggcaatgaactgcttctgctccaaaagatttggaaccaactggctcatttaacattttaagaaacactcttaggcctcagagaatcctttgtgcatcctgggattttatccacagggatgtggggacggtggggcacaaatcaggatcccatatccctacgttgaacacattgtactcctgcccataaaggtgaggcagagggacttccctggtggtcccgtggttaagatttcacctgccaatgcagggaatggggggttcgatccctggtcaaggagcttaagatcccacatgcctcgtggccaaaacaccaaaacataaaacggaagcaatattgtaacaaattcaataaagacttttaaaaatggtccccatcaaaaaagttcttaaaaaaaaaaaaaggcaagggcagatgtcacgatattcacaacatggccctatgccctgcctgctctgtcttgggcagccaccgcttttgttcagattccagttcccatccagtttctgtgattccggatcattcattggctgatgtgtcctttgtctttgatggtcaggtctggcctctccagcctcaggctttctgctctctttcagcatctctatctctgattcaccctaccagctctgtcctgccagtacagatccgcttgagtaatgagaagggtacagactctccttgcccggtagagagctgtttacccagcataagtcatttctgctgtttagtcttctgtgacgcgaaacccgtcagacagcaagtgagctccttgggttctaaaagtcatggcgccgtcacattacagaatgttctagcaggaaaagcctttagatgccaccgcattagcactagaactcttccttctaatgaattaccctgcagaatcatgatacagaaactagattttttttttttaaagaggttgagagttttctggtagaaacagactcctgagatccacccattttccagaaacccctgggagtccttagagtcctagtgactcctctgagcccagtgtgaaagccactcatctagtccaatctttacttcacagggaaggaagtgaaagctcggagaggtgaaggaactcttggatgagtcacacagctgtaagcaagaggactgagttgagtcccagagcactcgccttctaagtcagcactctgcccctatccttcatgtttaccttcatcttcattatttttatcaatcacaatgtcccccagcctttaataaacatg

SEQ ID NO: 53070 - DNA, 1447 bp, Bovine  19866881225296
  misc_feature (1)..(1): n is a, c, g, or t
ncagcccctggcggaaaagtcaaccagcaaatagaaatgtcactcaatcatttccccgtgctttcctctcattggccttctccaccgcatataatgaaaactgctttttgcccaaatattgtttgaatttcaaatacacaatttcccccaggggtgaccagatgaaaagagaactctggtttgcaacataagacctctatgtggaagttgccttgaatgaacaccaaaacgaaatttttattgagctccttgaaatgacagaagcacatcaaggcaaccaggctcccttcccactgtggtgtgctaaaattattttaaatgaacaccaaggaagcacccctcaaggggtgaggaaagaaggaaaggattttaaacgcagtgggcaaaataataaatccgttcatggcatctaacccatccctacaagcaccccagcatgtgtcttccgacgtgtctctctgtacagactctgactgtccacagctggggctcttaatcagagggaggaggacagtctaagaggccctagggcaatgattctcaatcctgactgcattagaatctcctaacgtgttgtagaaaaaacagatgcccagatcccaccctggaccatgtaaatcagagtctctatgtgtaaggcccaggcctcagaattttataaaagctgccagaggattcaaatgtgcagccagggtggggtgtatacatcaattcagaggatgtaacccctagaaatggcagctaaacttgtgtatgcgtgagaataggtgtgtgtttctggggtaagacatcatagtaaaagtcacttagtcatgtccgactctgcgacctcatggactatacggtccatggaattctctagaccagaatactggagtgggtagctgttcccttctccaggggaatctccccaacccagggatcaaaccctggtgtcctgtactgtaggtggattcttaaccagctgagccaccagagaagcccgaggggtcagtttcagacaattctttaaaatatctgcaactctaaacaggttctcataatacatctacaccttatgtcatgggttccttccaaccagaaaatgatgtgtacctaagatgttgctgaggtttaggagctaaggggcaaacaaaagttctctgcttccttgagcagtgagcttgttgatcaagatcccacacggcaacaagctgtcagtgaggggttcagggacactaatgagggaaggcccactgaagaacagagggaagcattctcacaggcaaaaacagggccccggtgtaatttactatttcggcagcccagcctgtggctcagctgacagctgtgcccagctcggcctccaaatctggacatcagaagccatgaccagagggagggtcaagtgcccaggatctcctattttgggaactccatagctcggcggccactgcactccataaaa

SEQ ID NO: 53071 - DNA, 909 bp, Bovine  19866881249313
  misc_feature (1)..(1): n is a, c, g, or t
natacacacctacgtatgttctgaggaggtgcacctgtgtgtacttgtgaagcacgtatgctgagaagcatgggatcccaaaatcgacttgctggggattttctttggctttctgacaaatgactgcacagcttgatcgacctgaaagcgctgggaagcccactgcctcatgggcagctcctcctttgctggctaagagtggttgttggacaatgttattccataatacaaaatctgcatccagattaattctggttctgccctgcagcaactgagaacaatatctaccttctcttcctatatgacagctcttcaaatattttaaaccaacgttcacatccctaaagaatctttgcttctctaggctaagtatttcccgtcccgtcacttcctacagtcataccttgagtgacataggacccagattgcttgttaggattgagtagtggattgttaaaaaaaaaaaaaaaacaggcgctgaaatcagacctagctgagtgtgaatcaccctcattgagtagagtcgactgaacagagacctggtgtttgcagctaaattgcaattgccatcttgcaatccaattacccacacatttggattaaacaggatttattgagctgttactaggtgatatgggatctatccttatcaaacgtacgtattatcacttctgttttagaaacataaaaaactggtgcatagaggtgacctaccttcccttgggtcatacagctagtctataaaagcaaggatatgaacctattatgggttttgtttccaagtcaagtacgtgtttgtatttggagactgactgggatactggagatgcaaatgatttgcatatgtaagtatatctggggattccctgatagctcagttggtaagaatccacctgcaatacaggagag

SEQ ID NO: 53072 - DNA, 2077 bp, Bovine  19866881260745
  misc_feature (1)..(1): n is a, c, g, or t
natctcgtcccagtgagatccctcttcctggttcctggcttgtgccttctggctatgtccttgcatggtggcagggctagagatctccctggaaccaccttcataagggcactagtcccactcgtgagggtcccaccctcctgacctaatcacctccccaaggctctaccatcacactggggatcaggatttcaacatacaagatttggtgggacacaaatactaaaaccatagcattacccaagtattttattctgaggatatagagtagcagtttaaaaaaaaaaaaaaaacacacacacttcagaagccacttattaaatacatatgtttttatatagtttagatagaatttttatcttgttgtcttcgtagaaaaataatcaaaggattattttactgaaacactgccatattacagaatgccaatgaggattttgaaaatgctacatttaacccaaatgtaaaacttgaaaatatttccaatctgctctagcgcatgacttaattaattaaattttgtgaatattgactgtaatcatttctatgccaacttcaaaatctagggtaatttccaccccctggctttattaaccctatcataagtgctggatttttttatagaagggattttattcccaatgaacatcagcatcttgttttaaattgcacattctcttccattttagcttaaattatactgacgagtttaaaactggaactctttgggatgggtgccacagttttgatggcttcatcaataaaagctggatcatgataagtgaggtctctcctctctgagccctgtctcctcatcttctcctctggactctcctacatatggataagaataaggtgttttttgcacacagttcttcttgcactgaggttgtggctaagtagtcaacttctcaactttttatcaaaacgcttctgtaacttgacctctgcagatccaggtgctatttgagtgtgcttagtgaaatgttacaagagtttgattggatgacagtgacagagcattgaataaaggaaaagcgttactctctatgattattttattaatcttctaggcctgccataacagattacctcaaattcagtggcttaataaacgacagacatttattccctcaccattccagaggacagaagtctgaaataaaggtattggcagggcagactccctccaaaggctctaggaaaggatctttcctttccttctgtagcttctggtgactccaggtgttccttggcttgtggccacatcactccagtctctgtctgcatattgacctagccgtcttctcttctctatgtgtctcttataaggacacttattggacttagggcccacccagataacccagaatagtctcaattcaatatccttagtttaattacatctgcaaagatcgcacttccaaataaggtcacagccacaggttccagacattaggaagtgggcctatatttgaggggccatcattcacaccccctacaatttttatcatttatttaagttgcaaaacagggaatggggaaaattataaaaagttgcttctaccaggctatcccactgcaagctaccctatgagcctggctcaatttaacattacataatgcaggtttttcttgttaactcatttcatctacttcattatgtaccttcattatgggcatcatgcttataatttttatatcactaaaactattgtggtgtaatgtccctataatgggaaaacagaaatgatcagatattacctaaattggcagatagtagatttcttgtgacttggttaatatgtaattcatttaagcaaacttaacatccattaactttccttgtaggggcccattagctttaataatgcattagctcttttgtgagacttgagtagctattcacccagttcccacccctaaactcttactttcccagggcgtcttctaaatagaatatagccccacccacctaaaaagttatactctctcccgaatgcaaaatatttcaagcactacacctcctaccccttggaagacttgctaatgatctttataaagccttttcttttga

SEQ ID NO: 53073 - DNA, 757 bp, Bovine  19866881281803
  misc_feature (1)..(1): n is a, c, g, or t
ncctttctgccaaacaggggttttgcaaggatcaaatgaaataatatatgtcgtgtgtattatacacctcaaaaacaccacatcaatttaatatttccaattatattgatgttaagattaaacacactggaacattaacagttcaccgaataaccaactttcatggttccaaacctacctctgctcagactagtcctgcttgaaatttcctctgcttcgccactgccagactaccaccagctcagtaaagataggaatctctctgtcttaaccacctcagaattcctaaaagttggcagagtgcctggcatagaattcataggtactgcataatgagtgtctactaaacactagataccatcagactttgctatacggttccttaacccccacgcctcaaccctattagatgggtaacagaagaggaagctgacgctcagacagtttaaataactctgcaaaggtgataaagctccactagcgccaaggttaggccccaaacccaggtctttcacactccaaaactgtgtccttcccactctgctactccccctttcacactgcagacgcccaaggagttgtatttgatttcaagttgtatttgattcgttttaaccatgttacataataagacataacttaaaagcaagcattttgacaataaactaaaattgcaaactgaaattttaaaatccatgggcttaagcctgggtaagatttcccccaaatgcacctagattcacagataaagcaaaag

SEQ ID NO: 53074 - DNA, 1153 bp, Bovine  19866881364258
  misc_feature (1)..(1): n is a, c, g, or t
ncaggtgagagcaggtcgtagtcatataccaactaggagaagcagttcccccgtacaaggacccaggaagccaggccccttgacaggagggccccagacctaccaggggtcaaggagaatctccaactgggagccatggaccccagcaggcagccactggcccaaggagtcctttggcactccatgtttaatccccaggagacagcgtggctgaatgtgaagggtactggtctgagagctgtgtgaccttgacaaaaaccacctctctctgagcctcagcatcctcactgcagaggagagtgttgacgggacaacctcacaggcccttccaactatgtgacgagtgacactctgtccttcgatgctgggtgggggttgggggctggaacttccatcacctctcagccttcccagccttctggctaatgtcctcattctgaccccaggaagagcaccccattctccccagaggggttcgggagttcccctgctgaagcaggacaactggaaagcctgggtgggggtgggccctgccctcagggacgctctgtccaaacggcaagcaaagctctgctggttttgatgatgaagatttacagccagaagtgagtttctctggcaatattgtctgctgcctttatgagcagcaattacatagcatttggtacctgggaaggcaaccggcgagagctgaaatggtaaaatgctctatcactccaaggagcacaacgcctttggtaataaatattgacgttcattaagacaaagccagaattcaatctgttctggggaattctctgcttccggcctccagaatggcccttatttacaagatgtccctgagggaatgagacaggctggctcaccttgctccccaagatacattttattcaaccgactcgtcctgggcaaacgtgcatctgacaagccaatttgaaaatgaatttggtacattttttgagttgattatttattctgaaaatgaatgcctgctctggtcaggctgacagctctcaggatgagagaacccgtgctcccagctcccattccttgcttcctccccagggaaaggggcacagatccagagacccagctctcccagcactggggcaggtgggcccctccagcctcactcaccggtactcagcccagc

SEQ ID NO: 53075 - DNA, 1083 bp, Bovine  19866881366075
  misc_feature (1)..(1): n is a, c, g, or t
nttttagtgactgtcttgtctgatcctgtttgcctgctctccggtgacctctgagggcctgattcaactgtgaagttgatatacctgacgcccaagtctgcatctttcttcgtcctgtgaaaatgtagagctgcacatcactcatctgttccccactgcctgtgtccccccaggcctcccgtcttcacggaggagtcctcgcccttcagactcactcttggcatttacctccaccgtcaccatgcttctcccacactatggttcagagatggaccaggttgtatagcttctcctttgtgattctaggatctgatctttcctatttacgactgctgctcctcccacccttgttcaggccagcctcggcctgcctggtggtgctctagtaacttctcaagcaaagtctctcgtgtccgtggtcccctgcttactatgcttatcacacacacacaacgttctgtccatcttacctctgtagaatccctcttcttgagtatggtgtggttattatacctcttactccattccatccacactcataagcttaactacctcctctccctctgcagcatccaaaggttacagtctctattttgtcccaaatgttcagacccctccgtagtaatctccaagtaaggccttgcttcgcccatcttaaggccttctctcctctaaaatattcacaggatctttatcacaccctatcttttatcctaattctctgaagacccatcttgtctatcctactaaatcttgagtgcctggagagcaaattctttttctttagtttacttatatctatcacgtgtcatagctaccatgtaatcaacagatcaataataaatacagctgacattcactgagcattaactatgtgctgattacagtactattcaaagtgctttacatacttttttttcttattttagttcatgaaaaggtattattattgttatttccttttataacggtgcacatggaattcaaagaggcagacaagatcacttctctgcaacatagtcaggcaaggcttcggataatccatagggtacagtagggaagtttatgtgcagatgggcagcc

SEQ ID NO: 53076 - DNA, 1806 bp, Bovine  19866881384060
  misc_feature (1)..(1): n is a, c, g, or t
nctattctttttaagtacttacaagttggcaataactaggtttccccagaccactctcagaccaaaatttccacagccaaattgatcgtctcttccataaagaccagttagccctgcttcccctctctctctgttaaaagcatcaccatctgccaagtcagccaaatagaaagaagcatatctcctcccccgcctcttctaatccagttgcaaagtcttgtccatttgttctcaaagagtcctcaggtctctcccatctctcctattctccctgccacttctttagcctggcagtcatcacatgttaatctcatctcttgctcgaacccctgcaaaagcctcctaatggtagccagctgtagcctcctctgttttaccctccattctgactcaagaatatttttctatcgtgatacagagtaggaaaaacaaatatagtggtgtcgaccccctcaaagtcccgcaatgtctctccatcacctcccatgtaatatgaccatccttagcactgcacatgaggccctgtgcaatgctgttcccagttactttcacattcttctacactattctagcctttgcacccacagccagtcctactaaatactgttccctccaaatgtcatgcttttatacaacttcatgtctaagcatttttgcctgaagccatctggtcacgattcaagacagcacatcttgcccctggaaacccctaagaaataagtcaaacacatacagactttggatctctagctaactgggaactgggataaaacctgaccccttagagctgcaaacttgactcaaaacagctgaaggcgttatcctcggcacagcacagtatctaagcaacaaactgcctgagttcaaaccccagctctgcattgtactgatccagggcaagttacttcatctttctgtgtcttagtttcctcatctttgaaatggtaatcaccattattattccctatagggtctcataagttaatatatgtaaaacacttagaaaagagactctcatgaattagggggagccattactcagtgtcactcagacagatgatatatttggggcaactaatgtttctgccatctgactgtacaggtaagcagttaattggatgaaatggtaaaatgtgaatgcaagctctttgaaaacttcaaagcactagcgaattttccagtattactatcacaatgcctctctgtacttccaggaatgcatacatcaggatctaaatcctaagagttagatctcattacaagaattagagatttaaaattacatctacccctatatacaatggaatattattcagccataaaaagaatgaaataatgccatttgccacaacctggatggacctagaggttatcataccaagtgaagtgggtcagacaaaggcaaatatcatatgatatcatttacttatatgtgggatcttaaaaaaatgatacaaataaatttactagacagaaatagactcacatagaaaagaaacttatggttaccaaaggggaagtgggggagggataaattaggaatttggggttaagagatacaccattatatataaaatatatcaacaaggactactgtatagcacagagagctatattcaatatcttgtaatagcctataacacaaaagaatctgaaaaagaatatatgcacatggcattcctgctgctgctgctgctaagccgtgtctgaccctgtgcaaccccatagacggcagcccaccaggctcccccgtccctgggattctccaggcaagaacacggagtgggttgccatttccttcttcaa

SEQ ID NO: 53077 - DNA, 1227 bp, Bovine  19866881403280
  misc_feature (1)..(1): n is a, c, g, or t
nttcatctgtgagtcaacaaaagtatgacaactgtagagtttgtaagcagaatacattattaatataaatggtaaggctaaataataataataaacgtcaactaaatgctgcttctctgaaccatagctccgtgccaggcactatgttgatccttctgccacacctaatggttctgaacatgttctggcatgcatgagaatcgtgggccccactctggggttttaaatttggcaggtcggggcccaaggattggcattcctggtaaatgcccaggcgatgtgatgctgctaccctagggaccatagtttgagaactggcatgcatcatcttactgaatccttcactgcgtccattttacagatgaggaaactgaggctctgagaagagctctgatacgtcatagctgtctacatcaagatacttaacttctccaggtgtccgtgagggtgaccattcccattaggagtttactcatggccaagtcttgtcctttctctctaaacgtccccctgactttatccgaatgttaatccgtgtcccttttctaccacccattactataataccatatcagtgcagatttatgatctgccagcagtgttgtgattagatgtcatccctgtctttctattactccgatattgatagataaaattctgtggtgatgcatcgcctgccctttcaaaggttactgccagcagatgctaggaatcaatacagttcttatctgtcacaaaccacaagaaaaccatggtaaacaaggctcaatgaaaggcctgtgaataggtcaaagggagaattccagaggcacggtgtcaccatggtgtccctacctaaccgagaacctgctttggagctcaactatctgttgaggatttgggccatataatatagtggggctcggaactaggccctgggtccaacacgacctctggggaccctttgtcatgggagctaaggtcaaaagaggttaaaaatctacttttattataacatgcggccaagatcgataagatcatttgagctctttgaaggcaaaggctaaataaatctaaggagatacggtaggtttacatacctgctgttttctccatccatctttcaataggaagagtcttagtttaggcaaaaatgaagataaaaagcacaatattttcattttttaaatgtttgtaactcaatttacattaagaaaaccaaatggtagttatagataccctagaaaa

SEQ ID NO: 53078 - DNA, 924 bp, Bovine  19866881412034
  misc_feature (1)..(1): n is a, c, g, or t
ntgggaggatgaagggaagctgctccctgcattcatttctgggccagcaatggtttcaggcctcttcatttacattcgtaattgacagctccttagcagctcattaggaaagtagggctttgtgaccaacaaaaaagaggaatgaatccctggggttgggatttgagaacctgtttaagaatctctaaaaggcaacgacagattcccagggagcaggaacacaaggagcttagcaatcatcagtggcaatgagcttcagcatttcagcactctgcagtgagcctagaacccgtgtctgcacctgctgtggaggcgagagaagccgggacaatggactgaggcaggcaggccagtgccaacactcaggggtcagctagtgaccgctccctgcctcccctggactcagactgggctcccagatcctcatggcatcagcaagcaaggggtagccccttaaggtatccgaacccaaatgctggggaggcagggcaagagaaaaccatgcgtgctacaaccattaatcaggcaccacctgtttgtgaaccgtatcccatatagcaggttgttttagtcctcacaatggaattctaacaggataatcacctgcatttattttacaaaaaaggagtctgtagaacaaaaaaggcttcttgatacgttaaaattcacacaagccagatattatgagtctgggaatcatttccccacagcagcaaagtggacaacccaaggaccatgtgccaagagtgaaaggagatgcatgcacaacaaattctacaggaattcaagggagatagaggccctcctgaactagaagagccagggtaggctgccaggcaggtggcccttgagccgggtctcaaaggctgaagttgggtttagaaagacaggagggagaagagccaggggtaagggggaaggcaa

SEQ ID NO: 53079 - DNA, 1434 bp, Bovine  19866881442687
  misc_feature (1)..(1): n is a, c, g, or t
nagtccctggtgctggcagtcctcaaaattgacaaatctaaaaagtgaatagaacagcaagtagcccactagaggttttcttttttctttttctgtatttttttttttttaaaggaacaccttataatgtcggaagagttgatttttgcatcttatacatgaaaagtagtagtaataaacttccacaattgttggtcttttctctgcagaaattatggctgtgcacaactgtggagttttaactgttttccaccaaagtccgtaattcacacactaaatgtgacaagcgtgactggccgtaaacctaacgacttttttaagagactgaaattcagaacagcattctctctgaaactgcactttggtaaccccacagaaaacccttcagagatctgctcccactgcaagaaaggcatctgggtgtgccagcagtcagaatcctgaacgctttcatgtagcacacaagttagggggatgaagtgagaaccgattgcaatcaccctgtattaagcgaccagaagaacagaaactcagtggtggcaatgactattgtgctggcccatcctctcttccctcccattaaaaaaaattataaaagtttgctaagaaacttacatagtggtcagaattcttatttttatgttttaggcattttattttaactttttattttgtattgtggcataactcgttaacaatgttgtgacagtttaaggtgaaccgcaaaaagaccccagccatacggtatatatgtatccattctcccccaaactcctttcccatccaggctgccgtataacattgagcagagttccatgtgctatacagtaggtctttatcggctatccattttaaacatagcagtgaataaacttatggttgctggggtggggaaaggtgtagttggggagtttgggatggatatggtcaaaattctaggtatataaagtttcagagtgataggagagaacctttccaagctgaggttcttaggctttaggtgaaggctttgttctttgctttcaaggtaagtgtcatttcttccagtgagcagctgctaaggatgctgttagcctgcatctggaaagcaaggcacattcgctccagcagccggtccaggttgatccatggatgttcattaagaggctgtggaaaagtgaatctcctgtttaccttttcttcccctgagcattctacgaggctctttctgtgcccgcttttttctgcctccagcttaagacccttattatttcccttaaatgtctgtttatgtcattacctgtatttttgcagcaaattttatctcctggacagagattgaaaaggcctgctctaatgggatagtgtagctgtttttcccccctcccttcagatcatataattgaatctcatcactttcgtaacaaacctaggcagcctcttttcagtttccat

SEQ ID NO: 53080 - DNA, 1753 bp, Bovine  19866881485982
  misc_feature (1)..(1): n is a, c, g, or t
ntgtttcagagagtgagagccctcagctgttgcagctggaaaggagattccatgcgtaacttttaggcaacaaaggattgttttcgggaggtgggggctctggttactcagtgcatcttctgggagggagataagacaagggggctgcagcaggtgggatttaggtgggatagaaggaaggacctcatgacccatagcatcagttgtaaagacaaacgggcctggacaaatcactttccctgaggatattgccctgctctttcaggccacccacctgacatacttatctggaggcctggggtggggctgggggtgtagaggagggaatgggagatgcaaggctttctccagcagctgtatctcctgctgtgtaagtttgcaagggctgctgtaaccacaggctgggtggcctaacaacagaaatggattgtctcccagttttggaggctggatgtccaagatcaaggtatcagccgggtcggtgttgagaatatgttccacgtctctgccctagcttttgatagttgctggccatctctgggggtcctcggcttgcagaagcatcattccaagtctgccttcatcttctcacgatgttccccttctgagagtgtctgtgtttaagtttctctcttttataaagatattagccttgtgggatcagtggtccatcctacttcagaatggcctccccctaactaattacaaaccctatttccaaaaaggtcgtattccaagatcctggggtgaagacctcaacatatgcattttaaggtgacacatttaatctgtaactcttaacagttagcaataaaagattatcaagagggtcggtgggctcccctagtgggggaggggataagaatctgcctgccaatgcaggagacatgggttctatccctggtccagagagatcccacatgctgcagagcgactaagcccatgtgccatgactactgagcgctctagagcccattctccacagtaagagaagccactgcaatgagaagccagcacctccatgctgcaatgagagaaagcccatgcaaggcaacaaagacaataaattttaaaaaattaaaaaaaagagggtgggtgacccaagaagtcagaagttggagaaagaattccagcctctatagcctttggctccacaaaggctcctccatgttatttctgttggaggagcgtggatctgcttctcaaactcagatcttttcttttccttgacttttactccccaaagcagcagacggtcctgacattacaaataaagggagctctcgtgggctccttagcttaaagggccggctggtgtccaaagtatcctaaccacaagaaactcataacagcacaggcagcaaacctcccagctgccttcccacaggtttcagaacagattcgatgaacctgctcactttggaaagagaaggtaaaattatttcacatctggctttatgctgacctgacaatgacaccgcccagggatccagttaatgttcaaagaaaaatgacctgttgttcaacattctctatactgtccatccaattcaattagctaatagaatcatgaaatgtcagtgctggaagtgtagagataattcaatctaagctcctcgttttttagttgaagaaagcaacgctgagacaacgcaaaacattgtctgcattatcgttagggtcctttgtggggacactcaggtttgagggctcccaggccagttcagtgtgcatttcctgagcacctgcttaa

SEQ ID NO: 53081 - DNA, 1083 bp, Bovine  19866881534635
  misc_feature (1)..(1): n is a, c, g, or t
naccaaatctttgagtatatggtcttccttgtgcccctcatatcatctctccctccactccaaggtggtagtggttaacctttcattataaaatcgttgcactcagagctccttgctgaagtactgctggagggttataggttgcatgtttgaaaagtcctttgagttggagtaagttttgtaactgctttgcatggcaggaagaagcctctctgatgactcactgagcctgtcttggagtgggtgctctgatgataatgtgtcacctttaatactgcttgacaggatttaaccacacatgcaacaaatcaatggaatggagcgcagatgcacttgatctatattgtttgtcttcttttgactgatgcagaccaaaaaaaaaaaacaaaacttgatagcttcttggttaatacagctttggtctgaaaagcaggctgtgatgtatttgggggtgcatatgccaaggcctgaaacaaagaagatatttactagtctggacaataaataggcaatatccagctaaacaatgctacaggaggaacctggttctttggcacacacaatgttatgtcagagttctctaatacattattactgtcattgacaaatatatagcccactaaaaatcataaatgatcattttaatgaaagttgcatcatttgtgagtggtacttgcctatacttatttttagagctgtgaaaacaaattagaaacaaggctgatggttctactttcttcttttatttatttttgcctcttccaaaccttcatgaacagttttgactgtcggatttgtttcattgtttccttccactgcctctagaacatctgttggaaaataatgcttgtcctgtcagtttccagaatcagcagcaaaccaaagtgtgtgttcaaggtgggtgccagcattgcactaccgctgccaccaggctaccggaaggatgggcttgatcctattgtggtaaaaatcacttttaaaaaccatctggacacctcgattcaggaataggacgttcatcccaaaatggaccaagcagaacaccagcagagatggattttggggccgaaggcacaaatacag

SEQ ID NO: 53082 - DNA, 1570 bp, Bovine  19866881777596
  misc_feature (1)..(1): n is a, c, g, or t
natagctgaggaggcttattgactctgagctccctttggaaccgattcagaaagctgtgcacttctgtggcacctgggagacactcagttgaatagagctacggagaaaagcatttcagttattggcatctttcctaatgcattttgtatgtgtctataccgcagggagaaatgtgtggttattgttgaaatattatctacatggctctgcagaagaagaaaaggccccgtacaacagtcaacacattaagtctcgtgatgttgtaatgctttgggggctgtgcatctctccccaccaaacgccggtgcagatatatggcttcatcgtttggattccctcattagacatacaaaagcccttaaagggaccttgaacttgacaagttgaaccttgaacatgacataatttggaatgttgtttaaacattagtgtttttgttgttgttcacctgattttaaccaggaagctaggctttgatcatctgagtgtgctgtacgaatctaggtaggatgtcaaactctcagaagtgcacagaaattaatttctttctccttctgcacagatagactcctgttcaaatgaaaatgtgtgtggacagatttttgtttgtcatgtgtgaactgggcatgttggtctaaaaggagcagttttaagtgggtggatgtgtcagaccctccggctatcagagccaccttatttccacaaatctcttctcatataacaacattgcaggaagtctggataattgattctcctgagcaatacaaatattgggatgcttaatcattccaagagatggtcagagctactgcttttatatttttaaaaaaacatttgtttactctgctcaggcattcattaagcacttattgatcaacagtctaccatgggccaggctctaggctggatgatgaggaggccaagggggagaaaggcataatctctgacctcatagctcatcaaggaaggcagatcccagatggataattgcaacgcatgcaacaattaatttaggatgtttttatttaatgagtatgtgctaggtgctgagtggaagaagccagtggtaagcaaaagcagatttggcctctgccctcatgcgccttgcagtcaaggagtaattattaaatatacttaatataattatttattaagcgaacgtcgcacaaatgtacagttattaagtggtccaagtgtcatggaggagaaacctatagctcagtgaaatcataaactaagagaacttggtgtggtctggatggccagagtgggaaccacagaaaagtgatgactgacctgtgactgaagggccggtgtgagttaaccaggccataaattgtcggaagtgctttccagaaggaaccaagtgcgttaaagggattgaaagaaggccattgtggctggagtcagagggcgagtggagaggtgggcagtggtcaggccgctcagggccctgtaggctctgggaaaaattgggggctttattctaagaaacatggaaaggctttgagagggtttaagaaattaggaaggggtaacatgatcctagtcatttcctgagaaagagca

SEQ ID NO: 53083 - DNA, 833 bp, Bovine  19866881808635
  misc_feature (1)..(1): n is a, c, g, or t
nccagctgcgactgggacaagtgtctggtcttctgagagtgacccagaagagatggtgaatctgtttgagatatttctactaccagtgcattttctgcacatacccgactgtctgttctccttctcttgtttatagtttttaaaacagaaataagatagtctgtagaaggtattaacttgagattcacattcttaactgcatagcagatgtcttactaattgaggcttgtatttaactgggttaaatgcagtggtttgatgttagcatacagtgtggtgaagtccattgtactttgatgggaagggctcagctttgtaccaccctgcagtgtgcaagtcttatatcgtcctaggatgctggttttgctgtaatttcatttggggaccagggaacattgcagcatggcgagctgggtaggaactaaatatttcagatggaggaaggaatattgttctaattaaactgaatctagagcctgtggcaaagtatgtgcttaatatattggggtatgtgtgaaaaattacatgtattttcataaactggtttttttccctctctcatccttgctgaagggcttttgttttgaatattgtttgcacagaagaattattttgttactgacacgggacagcataataaaatctggaaagtcgtaacagttaccctggccctgaaatgtttctcttctttggatgaatagggaatatgagttcagacttcttctttaaggtggaaaacaaaagagtgttattttttctccattatctaatgcagagggcttccccgatagctcagttggtaaagaatctgcctataatgcaggagatccctg

SEQ ID NO: 53084 - DNA, 1556 bp, Bovine  19866881875081
  misc_feature (1)..(1): n is a, c, g, or t
nccaggtaataatactagagtgggttgacatttcctccaacaggatcttcccaggccagggatcaaaccctgcgactcttgtgtctcctgcattgcaggtggattctttatgactgagccatcggggaacacccatatatttaggttgtacaacataattttctttaaaggtgtacaacacgatagtttaatgcagtatacattgccactgtagatgtataaattagcattatatccatataaattagccattgtcattgtatacatataaatgagcaatcctcaagaagcactgagacacatgtacacatactacaatcaaggtgagtaacacatccatcacctctcttagatcctgcagtaatttctcagaaagcatcatggaccctctaaagtcaaagacatgggtaaactgtaaaagtataaagaataataagcataatgagtttttagcttttctgtttttcttctgaagggagtgatattttagatgtgtataactaattctttttattctaaaaatcagagaacttaaaattgttactaggcctatgcccattgaggttcattttgtatgctgagcaaacacgcatcactcactgaaatattcagcgaggggtaatataatactacattataatatctttttccatacacatagacacacaaacaaataaacaaaaaaggacatcaaagggggttttctttttctcaggccatggaaacacctattagtcattttgttaaggctcagggcattcagcttatatacaaaactcattactgtctgcattttaagggaaatttaaatgcagtgacctgaccatggacacaataatgaaacaagattctcattaccatgctctaaataataatctaaaaaaattaaaccttggtaatattttaacgttcagataaatgcctgctttaagcccagtccatggatgctcgtgatttctagttgaaacaaaacctgactcgggtaaaacatacactgtggtagttcgatttgttatgctctggatagcgcctgtctttaaagaactacctttccctccaattaaggaacaattttgccaatcagttttcctggcaactcagcctcacaaaagagagagggaaggggagaagcagggggtgtcaggaaggtggctgcacctcctgacacattgcgactgattaaagaggctctgaaagaacagaaggaaagtgcatctcaagaacaacagaactttcagtgaaagtacattcacctaattgaaaagcagctcgaagctgttatttttgtaccccaaaatgcggaattattcttcaaacaatttcacaaaatcaataaaagagaagtagtgctctcccgactcctcatcctaacagttgccggtctgagatatcgcctctccttttctctgtttagatttaggcccaagtatctaaagagaggcaagagcaaactgtggtctctcacttaaggaagacaccatgaaagaaaacggccatgtatgtcttgcaccacagtttttcttctaatgtttctacatcgataatctagaacacca

SEQ ID NO: 53085 - DNA, 820 bp, Bovine  19866881907584
  misc_feature (1)..(1): n is a, c, g, or t
ntccctctgtctgcagcacagatgagggagttggtttgctgatgctcagcctgttcttcacccaggctctgggccaggtctttccagaattcttgaggagaccaccatctcgggagtcatctgcctatatctctatctcctaggagctctcagaagactgcctctgttcttccttcctgaagcctggactccttttgcaccagcagtcaagtttacagtttctttctgatataatgtagttcatttgatggggggataaaagatgcatttgctctaatggatgactctaggtcaggcaatttacttccccactttgggtttttatgatttggctaggtgacacctccttcaggcaggaatctttcaagggtcacatccccacacgatgtctttgtccttcatacctcagttaggttcgcttccctgtcccccttcctcagcagcccacatcctcaagcttagtccatggctgtcacaagtcaaggagatgctgccaagctagggcaggcacctggcccatggctgggaaagaagtcaggcttcccaatcgatcgtttcttcctttggtctctcttcagagctggctgctgcaattggatggggactgtgatgttttatcatttaagtctgttaagaatctatttctttctgcattcaaaactttattcccatcttctcagggacttaaaatactgtccttgaactgagatgggaccctggcgcattaaacacactcgcaacttcaaagctctgtgtgtgttgctgcagagggtcccaggggagacatgtgtttgctgtagtacaaagagaagccttgctt

SEQ ID NO: 53086 - DNA, 947 bp, Bovine  19866881971232
  misc_feature (1)..(1): n is a, c, g, or t
ntagctttaagtgtaagagatagtttattctcaggcctttaacttaaaatgaatgttatctctcagagagaacaaggataaagaaaaaagacagtgcaggtttctgtctaacagccagagcagttggcagtaggggccgttgatagggacagatgaaaggtcaaggtcaaggtcagccagcagttcatggtcattcttataggtttcatattatgaagcattagagtgagaaaaaaaattctatgtacccctctttctttctcatcctttcccaaacctcccccacattctacatgtggaaatacaatccagaattcttgtggaagtatttttgttgccccaaaaaacaaactgacatgatgacctttcatcctttctctttacttgacctcaaaacctcatcccacagaatgtcagtatgagccccagtgtagaaaagaagtggtccaggtttgcacaaaatgagtcagggggcaatgaagaccctaaatctagctccactggggcctcttatactttcctccagcccctgctgttttctaatccatctagaagcaaacaggagagactcagctgtgagcaagtttggagacatggagagagacattggtgaccaggccctgttgttgcccacagaagaaaatgatgtaagaggaagaaaagagactgattgtatgtgaggcaaatacactgaaatgctcctgattttaacccaaatccaaaccaggtgttggcctttggacaggtcattttcatctctctgtgacccaatttcctcttctggacaatgacagatgtggaggagccaatctctaagctgtctctgaacttgggccttctgtggcctagctcatgatcacagatcttgttctgctgattaggctgggctctccttgactggaagagaagccgatgaaaatgcaatcagagggtaatagacatactga

SEQ ID NO: 53087 - DNA, 787 bp, Bovine  19866882010228
  misc_feature (1)..(1): n is a, c, g, or t
nctcagcctgtttcccaggctgatgccgtaaggaccctgccatctgcctgccttgctattttcagacttaatgctcaggaggaagcctgacactttccatcctgctctccatttctgttctgtcttatgtggacctgtcgcaggctcctcaccctctcctacctgcccagagtcaacccctcagttgaaggcatcccccacacccgggacatagactgatggctgtttgggttctaatgcccttctgtggcagctgggcattgggtccatcctcagggggccctcccatccttcttccctccttgccacagctctgatccccagcacctccactatcagggcatttagactttgcagccatggtggcatgctcctacagcaggggcctgggtggcatttgaggcaaaaagccataaagtcaagccctgaactttcacagcccttcagtctcttgtcacttccatcctctgtaagaattgagtctcgctgaaggactccgtgtgtgcaattagatcaaaggttactgcagagaagaatctctgccattgttaagtaagatataggccagccagggccccttggtaacttttccttgggagtttaatgcctcatgaaccaaactgtgtagaaggctggaagatgcacctcagagatggggaaaagcctctcccagggaagcaccaggaccaccaacctccctgactgcctgtcccaccagcctccaggagcaccacccacaccaggggagagggaatggagggagaagggtcgtctacttgcaggaacc

SEQ ID NO: 53088 - DNA, 813 bp, Bovine  19866880396997
  misc_feature (1)..(1): n is a, c, g, or t
ngattccaagctttggccctagagactggtttatgatttggtttctcaaattttaggttgctaacactttatttcacaaaattctcaacaaaagcaagaaagaaaaacttcaagttatttggcgcacaccggaacctctaacatcccagaatatttatgcgagagtgaagtaatttagtttgttctttgacttcaatttctataggagccaaagtggtttcctgctgtactgtccctcttttgtagttattttaagtggtcaaatgaatactttataaacttctggacagcttgggtcaagtagcaaagattccaaacatttggagtctgtgtagatttccttcaaaggaaaagggtccttggtaggggggtggggaggtctgcattttgagcaagtagctcttctgtttcagaaattagccaggagacagctgtgaatcctgtggacattgtcagcactctgcaagcccttcagatgctcaaatattggaaaggaaaacacctagttttgaaaagacaggtaaagtttctgttagccttttactcattgctttatgtctcttgaggcctagcaaagtggagccttcacaccttaaagtgtaaccttccctttttaaagagtctgactccatgcagcttttccttggtctcattgttaggcttgtctctgactgttcctttatcagaagcttttggtaagctcctggctcacacttggatgacacaagcatcaacagctccagttaagcagctttatgttgcactgttgtacttctgtcctttgatgattttcttagatcagagaagagtgcc

SEQ ID NO: 53089 - DNA, 1629 bp, Bovine  19866880461531
  misc_feature (1)..(1): n is a, c, g, or t
nctcccttgcatttgccgtctaccctgggtgagtgacttattcctttgggtttattctctttgtgtgtacagtgcacactacccaggagctcacgggtttgaggtggaaaccctgtgatgtgtacaaataccctttgtgagataggtgttaccctaaggggcattagagcctctccaaggagctcggggcccctaccctggccctgcccatatttggctgcatctgttttcctccatgtttaaagtctcaggaaggtgttgggcagggtgtggatgttgtgaagggttaagggtggttactcaccctgggccaggggcatggaacgggtgtaccctcatctaggacgggacacatggtacgctggtgccatctggtggctacagataacaatgctagttactgggctgagagaagagaggaaggacaggaaagctggaaagtgggtataaaaggaaaggaggggacagagacgggcacccaggaaagaggggaggagggagcgagatggaaagagggaggcaagccagggcccacagcaaaaggggagatgcccaggactgggcctgctggatgttgtcacaggcccaggcagcccagatcaacagcccaggaagatctgcagcctctgagaggttcccagaggccacgcggctccagccccagcatgagtttgagccatgaggcctgatggtcaggaggctgagatccagcaggtcaaaccaggtgttattccacagggacccccagtttctaaggccacccccccatggggcctttagctgttggcccccagacaccagcgatgaagtgaaatgatccctggaaaaggttggccacagctcccccaaggacgcgtgtgaaggtaaacacgcttctgtacatgttgcccacatgtaagagcccagcacacaccctacaggccccatggacacccgtgacacgcacctgtgttacgtagatggcttaggccgggtggagtgcttggaggcccccacctcaccctcttccctgcttcctctcaggggcaggaggcagagggcaaacttgtttaccacttctgttctgagcaatggtgatgagctcagactggcccattgccctccacgggcagggctaggcctgagtcatgagggtcagatgactgcagaggctaaatgggtcccatcctgcagcccccaggagctgctggcaaccccgccctttcgctgatggtgggccgcccttccaaagcaatcaggatggggtggggagggggattcccagactcaggccccaaccggcccctcccctgaccagaggacaacagggcagatgacccccttgatctatgcccagccaggcctggtcccctcaacacccatccaggagcagcacctccctctgggacatcgtggttcagaccaacgccctcccagaatgccaagcactccttcggtcatgtgcaaggccccaaacacatctcagaaataaatggaatgatgcaaaagtggttgtgctggagattatgatacttctccctgggtctcagtctgccacactctgaaatgagaagagggatcaacgtcgtccaggggcagttcctaactgacacctgccttggcctgcagtatgtctttggggggctgcag

SEQ ID NO: 53090 - DNA, 1436 bp, Bovine  19866880558017
  misc_feature (1)..(1): n is a, c, g, or t
ntggtgttggagaagactcttgagagtcccttggactgcaacgagttccaaccagtccatcctaaaggagaccagtcctgggcattcattggtaggactgatactgaagctgaaactacaatactttggtcacctattgcgaatagctgactcattggaaaagaccctgatgctgggaaagattgagggccggaggaaaaggggacgacagaggatgagttggttggatggtatcaccaactcaatggacatgggtttgggtagactccagcagttggtgatagacagggaggcctggtgtgctgcggttcatggggttgccgagtcggacacgactgagtgactgaactgaagtgaaccctgggttgggaagataccctgaggagggcatggcaacccactccaatattcttgcctggagaatccccatgggcagatgagcctgacgggctacagtccatagggtcacaaagagtcatacacgactgaagagacttagcacgcccgcaccttcaaatgcacgcatgcttcttgaagtacacacattggcccttgataaacttcattggcacccatgagcagacatgcttattccttcttcatatacatttgttctcctctataagagaaagtttgttgaccaataatgtgctggtaaataatcacctctctaggttggaagagaggtgatctgatttatagcatttgccaatttccatagagtaaatactctaagtatgccctttcaagctattgtttcaagttatcaatgcttttgcaacctgctcacaaaattactgccaatttcacaatgctcttagaagcactttggttcagtacaccattgaatgctgaccaacccagatgccctcacttgctttaagtgactagtgagtctgggtcttactgcaaaatggcttagagcatgggcttataattctctgcctcatggaggcagtatagtgcgtagttaacagctattacattaccattatcttgaaggattgtgatgaggctttaaattaaatgagatcaccatgatttttaaaaactgatatttacaagtatgaacaaaaacaagagtaaaaaaaacaccaaaagttgaaaaaaaagatgtttaaaagtcctgagcacaaatgtctggcatttgtaagacagttgtacaaaactttttaaaataaccctttcagattcattgactcacagagacacccaagattgcagaaatacagatccaaactcctcctcaatgcagtcagctctatcatggagaatcactaaaatatatcctctgaataaaggcatgctctaaattgtgtgatgcatacttttagaactcaaggaggttaaaggaaaggaaacccaaaatgttacaattggaagagattgcaaactggcagccctcaggcaaattcagttctccagggagttttatt

SEQ ID NO: 53091 - DNA, 957 bp, Bovine  19866880587364
  misc_feature (1)..(1): n is a, c, g, or t
naaaaaataaggggctgcttttcctgagattgaggattaaaatagattgagactcgattgaatttcaaagtattttagggggaaaaagtgatttggaagattatgaggaaagaggcggagatgcaagggatatgttgtcagattctaagatgcccctttattgtttactttttaaaaggtgcctcaggttgcgctagaaaagtgttttctaagtggtcatttaactgaatcagaacatcctgctttggggcctgggtttgttttttaacatctcctgttgattcttatgttctggttgcctcctatcacttcatgagcctgcaaacatggatgcttttgacttttttttaacttctgttttgggcaggtgtttgcgggtaaatccaaaaggactagatgaagaaagcaaagattacctgtcactttacctgttactcgtcagctgtccaaagagtgaagttcgagcaaaattcaaattctccatcctgaatgccaagggagaagaaaccaaagctatgggtaaatgttacctttgtttgactctgttttcacatccagcaactttatacattgacaagttgtggatttgatttgatctttttttgagtaaccctaaatataacttttttttttttcactccagagagtcaacgggcatataggtttgtgcaggggaaagactggggattcaaaaaattcatccgtagagattttctcttggatgaggccaatgggcttcttcctgatgacaagcttaccctcttctgtgaggtgagtccttttaccctgctgtgagagtagccagttcccagacctgatgggtattggtagatgtactgttatcaaggatggagagcgagaaaatccccagtggagtggtgctgcacgaatattatttacacgactgactgaaagctgtgccatgttttcaaggttgttgggcaactcagttttcca

SEQ ID NO: 53092 - DNA, 1162 bp, Bovine  19866880606272
  misc_feature (1)..(1): n is a, c, g, or t
ntttttaataaatattccattgatagaagggagcaaaggtcaaagggacagaattttcaccaaaggatgatctagctctgaaatgcactaagaacttagatgagctgcagacatttttaaaacccacacatccaacacacacacctacgcaactgtcttgcaacgctgaacgctactaagtccacagagagtcttggaacagaaacgagtctcactaggcacaagcccaagaacgagaagcaacactcagcacctgtggccaacagagaagtgtgagatgaacagatggcacacctggtccgatggtaagaaaccgatggcatcagcagaacccagccagacgtttccctgttcaacatctcctcatttccaaagtgccatctcacttcccttctaagtcagtaaggcatttctaaacttaaccacagaatttctcctaagagaatttcatatggggaagcaaagagagagcatctcagactcaaccacaggatgagaaattgccaagtgagggcaggtcaactggtttccaaatcaagaatgtcaatacaagggctgaagcacatggaatggatctgggcggggtgaagtgctggggagagcatgtaagaaaacgctggacgcactgtagacttaaaaatatggcaataaaggttctggtactgcctaagacaccagatgcattatttagaggtgatttccttcagagaatagttcaaagattggctttcatttccaaaagaaattagaatccactattttaaattttttctgaaatacaggatctctaaggtgggtgaatatttgatagtttgtttatataacattcaatctcacacgaaaccacccaattgttcttgctttcatttctctacttgggcaattgagtatgatctgtaactactacttggatttacgtagaattgaaattccaagataaaaaataactgcaaaattttataaaaaataactgcaacatttcatgtatttttacagacacctacactctagtattttcttatttcttttcacttagcaattaaaaaggagaaaaggtagctattatgcaaactatattttatgcattcagtgtagtattttaataaactatacctcccaggttcactaatcatcagcaactctataaaatattcaatagctg

SEQ ID NO: 53093 - DNA, 1918 bp, Bovine  19866880616215
  misc_feature (1)..(1): n is a, c, g, or t
nacagaggagcctggcgggctacagtccattgggtcacaaagagtcagacatgactgatcgactaagtacaacccagagttaaacaggaaggggatttcaggtagaggggacaagctggttggcgccattttggctaaactaaatcagtagataaaataaaccctagcctagcacaatcgttacaggagagtggaaggcacgtttacagttctggctgaggacttagacctgagtttacatccagcctcagtcatttactagctgtgtgtctgtccttgggcaagtgacttaatctcgtccagctttggttttgtcatttgaaaaatggagttaatagtaggggcttccagctaggattctttgaacacaaaacaagtgggcactcagtgactggcccatggtaagggcccagccagtgtcagttctcgtgacaatggcaacagctccttaagaggctcctaaagggaccagaagggtcagttctcaaaacagatccccaagctactctgagccacagaaagcatgtgaggcgccctttgccctgcccctcaagcgggctatcaagggaggagatgactcttggtgggttctacccttagcacatggtccccatggatgactcctgcttctaatcagtcaacaaatcccgtggattcctctaaaatgatttttccactcctccctcttctttacctccaaccccaaagcagcagcctggtctaagtggtctctcttcaccaaacctcctcctccccatggcctccagagcagagcagatctggcctcccgcctgctgaaaaaacatccatggctcccactgccaggaaaaatgaaacccaactccttagcctggcacccaaagcccctcctccacaatccagcccctgcctgcctttccagcctcctctcctaccacccacatgccagactctccagtcacactgggccaaccacctccaggtactgaacagcttttgtgcagccctgctgtggaaccctctttacaagcagcccttgccttaccctctgcctggaatgtcctttctcccttctctgatggctaaatcctagacaagtttcaaggaactatctcagacagctcaccctccctggagccctcccagactctattccccagcaggatggctcactcagggccatctccttctgcaactgcgtgtggaacatggttgaaggcctggggtcactctgtgcagtgacccagaagacctgttggggaccactcctctcagggcagagaccactgctgagagatgctccaccctgcagcccccttggaatacagcagggtggggctgcagaaacctccacggagccttggcatggatgccagcagcccagatagagcccaggcagcagccttggcacggctccgctgccggagatgagggtgagacaaacagcaattagccaagcacaggctgggctctcaaggctaattaccaattagatggggccgggcgattagcgacatgaaagagacagtcagcaaatagtccctggcaaggcacagcagaaggttgggggtggtgtctgttcctgcaagcaggcctggccgcctggtggtcactgcagccctgttataggggaggagagtatttccagccatgcaggggctgagctttctggggggggcttgagctgatttgctgccttctttttgattcccagaatcatcttcccagtggaactcatggcctgtgtttctagggggtgtggggtgatgggtgatgcgtgatttgacacccttggccaggttagcccaggaggaccttgcagcagtttggagcctgtgcccagtaggctgcatttgggtctggagcttgcctggcatggccaggctggaggaaggagcagagtgtgagggagggaggctgatagcttccttcctcctat

SEQ ID NO: 53094 - DNA, 1948 bp, Bovine  19866880693069
  misc_feature (1)..(1): n is a, c, g, or t
ntggtgactagtatgaggtgtgcctgagaccccctggttgggtaaggcagagggtagaggtggaggggactggcctgataactgggaaaatgtctcttgttaaaacaccaggcccagggacttccttggtggttcaatggctaagactccatgctcccaacgcagaggttcctgggtttgattcctggtcagggaactatatccccacatgctgcaactaaagatcctgcgtgccactgctaagatccagcacagacaaataaacaattattttttaaaaacccaaaacaaagaaacaccaggcccaggtaaggactgctaaataggcccctggccctggtaacatgctctcactgcctaactaatccacagaagagagtttggaagaactatcagtccagtaggtaaggagctaattgatgcgactttcaggatgagaaacagagaaaagaaaggggtggagaaaagaaggaagttcagccagatgcatttaaaacctctcttctcaaggaggagttcaaaatgagagggggcctttcagggcagagctgcagtgacacccagggccccaagagagagagacgagtgcaactgagccaggcttgaaaggctgggtgcagggggtgggaaggcagcagcgcaggaaggaggctgggcgcccatctggagagccaaggggctggggctgctgaacagatggagtgaaagttgcagctggtggaaatgcactttcatgtgtaaagtttggtccacggaggatagcgatttccaactccgaaggcagcagtgggcaggtggctctgctccatgctccgccttctccccccactgccacccagaaaactcaacagcagctctatgccaggactcaaccactgtgccttcagccagcatccctttcaacaggcaggagctggcatgggaataccagggcaccgccaaggatggcagaggcctgcaaggctttagcagctgaagaggacaagggaggattaacccagcctccccaggaggggaccgagatgactgagaacagacacggaggtagaaggagggaggcagaccttccaaagctgttcacgacatgcacactgggtctccgctctcgttttggttgagctttggttgaaggggaggaaatggggaaatgtcaaaacgcagcagactctgaggctctgggctcgtttcatctcaacctcaagagaagtttcttgaggagagaatatatctgcagttttttaagaaatatttgcccatcagagctttaagagataaagtgctttttacactctctagctctcacagacacctacctgttctagcgtatttagaccttcgcctgtgggaatagaggccataagcgcaacagttcttgggggaaccagccacccagccacgttaaccacacccacgtgggagcagattgggtcatgaacaccaagctctgcctcttctctttccctcttgttttgtgtgagactgtgctcctggtcgtcaagaacagaaatggccaactgtcttgttaaaatccaaatgctttttttagaatatgtgattttgcttctttaaaaaataacaacaacaaaaacaaaaaaacccagactgacactagtcctttatctctattgtgtccgttttcccaagagatgtcactgttggagaaaataacttaaatattcttggagtggaggtagtctctctcttcctagtgggatgtcttcttggctcccttcccaaacttggcatcaagaccgagacctatggaaagagagaacatgggcttaactttatggggagaaatgaagtctacaaattatttgaggatgggaagtggggtgtgccttggtctccaaaattggagctttaaataaaactataattttcaaacatcagttttataaaatctcctcagagaagagagaattagtatcaaataaaaaaatcacca

SEQ ID NO: 53095 - DNA, 1965 bp, Bovine  19866880696284
  misc_feature (1)..(1): n is a, c, g, or t
ntttgtgttgaaaaaaattttttgaatgctacaaagttctggcaggaagcacaccattaaccagagttacctgatggagttatggagcactttgtattctatcgacttcagtactgcttacagaaattctgtatcctaagcatgtacttagcagtaagaccacagcaaaggctagactggagcccctcaccaaggctcagtcccctaggcacaccttccactctcctttctgcggcactgggagaccagaacaagccagagtatctgcttcccacacacaggcattggaggctgcctggctctgcaggctcattcttgtcttcccgaggctttgtcaggattcctcacgcttccgtgggacccggggtgagccacttggcttccctgtgcctcagttttcccatgtgtaaaatgggagtcggccatactaataactaggatcaaagagattatgtttatgaaaatatttcgtattagtggctgcttctcttttctaaatgaaggcggccccttctgagggggtaagaggagggttggagtgaaggtgaatacctgccaggtccttcaggggagggccaaccacagcagttgggcagcacccaagaggtctgggtgggaactgcagccctcctgcctgctggctcactccacggacaggaggctgggggagctgatgggagtcctgctgcccaccccccacttcagtgggcagccttcgggtcctctgcaggcctctcgggttggggtgggcagagaagtaaagagagagaggaaaatggatcttcctcctgcagaggaatctctgctgctgagagaggcgtctaaacttgggctgccatagtggggaccccggcaggatggggaggaggtcctgggagggagccaggtccccttgagaggtagagaggagaagggcaggagccaagggccagggtgaacagtggcatccaaggagggacaggctgagagcaggaaatagggtggttgttcaaggggagaatggagccattttggccagccccctgcctcaaaacccctcccaaaagggatgagttattgttttttcctgtgaaaaatcacctgaatcctctctcccaaggtcggcttccccaggtctagcccttcttgggaagttccttctggagcgtgacctcggatgtccccctcccttctgcctgggctggggggggagggaaaccgctgctttagtcacgccagataatcacctctggtcactcactgtctggcctcttcctccaagtaactccaagtatctcttagacattatctcaccatgcaggcctgggaggggggcgcagtgggtagttgggggagaggaggggagccacatttaagaaagggaaactgagggcagaaagggccaacatccccctaccctgcttccccacgtaggctgggaaggggacactgtgtcgtactccatacaccaaggaggggtggcaggcagacagcagaaagaacctccaggagggcactcgaaaggggcctttggagaaacccagtgaatgccagattctgtgttaagagctttacagggactatgtcatccctctcccactctcttatcctcattttacagatggggaaactgatggggacactgaggcaaccacttgtctaagaccgctcagtaagcaagggggagtgtggggcagcctcttggtggaacaacagagcagtcagtctggaggcaggagcacggctggggcgacctccggtcagtcctcctggaggagccagtagaatgacctttaggtgtccatcgaggggagggttgtttaattgctgtcaggtcctactctttgtgaccccatggactgcatcacaccagccctccctgtccctcaccgtctcctggagttcgcccaagttcatgtccattgaatcggtgatgccatccaaccatgtcatcctctgccaccctcttctccttttgcactccac

SEQ ID NO: 53096 - DNA, 1539 bp, Bovine  19866880706935
  misc_feature (1)..(1): n is a, c, g, or t
nagtagaataagtaaaggggcaaagggcaagaactaagattgagcagacctggaagatcccctggagaagggaatggccacccactccagtattctttgtctggagaatctcacggacagaggaccctggcacgctacagtccatgttgcaaagagtcagcacaaccaagtgattcacactcagagatcactcagggtgggggaagtagggggccagggcagagctttcaggttcagggactaacatccagagctttcaacctgaccctcatggctcaccgtcttgccacctttgccaatgacccggccggctgctgacgctggcacccggatatgggtctccagctttacttcttccttgggaccaaagaagttctcctccttgagttttccataaattcttccctgagcctgggcaaaggaggtctttgttatgttggcagtacacatatgtatgacaaaagggaagctccccacgccccactccctcgtgaggggtagatcaccacctaggacaggtgacgtgaaaggtccacagccctgacctgtcaacactccttctgctcacttgtaacactaggaggcctgggcaaagtaactgaatatgaatacataactccccaggcgaatacagtacctaaatcacaaaccagacctaaggggtctgggaggcttgcatggactcagacaagcagtgaatggcaagtcaagccctgagtggcagctggaggagtcactcagtggccggctgctggtcactgtacacagcctaaggctgtccccattctccatccctccctagaccagaacaagttactttattagctctttggctgtctgtcagaagtccgagaccctaggaacgtagcagggacataaaggagagaagagccttccttagtcatgacagcagagggcaaggagacggccttcctttccgtgtgcctattcactctcaggaatcagagagggaaggcaatagaatgcaagttggatgtcagtctgaaagcagctgtgcagccccgaatttacagggaagcttaaaatctgatgcagatttgcactcccacacaaacttgattcccctgggtcctactcgaaaaaataataaagatcagaaccttgaactgggcttctgggggtccagtgatgatgaccatacgaactttggagtctggagtttcaggaggagcaatctacaaagcaaacactggtcacagataagccctctatcgccctctcctccagaaccctaccaacaccctgcttccacttcccacttctgatggccaagagagtgaagaacaaagaccccgcacccaaggctattgcccctgtgccaaaactcttaggagggcacaagtgcatttgtttcttgacgttttctaagtagggcctccctgctcaccacccagagggggttcagttgagtcctgccaagaggtacccctggtgggggtggcagtacagggggaacagactgatctcctagagaatctctgggagcccttattcaccagagaacatatactccatttg

SEQ ID NO: 53097 - DNA, 1017 bp, Bovine  19866880812995
  misc_feature (1)..(1): n is a, c, g, or t
ntgagcctggaggatcccaggccaaggaaagcaagagagaaaggaaggtagactcaaccttcatctttccctccaggcccaagtcaaagtgactttcatcaaaaccagtgccgccaagtaggagcagcaggcacaggatgctccttggactgtgggctgaaggggttcccaaccaggaacttgggcagacagtacaagacctcctggctctcccagctcgtatcaacaggaagacgtctatctacaatgcatgacctgcagaagggtgggaggagagcgcggtgcagggcctccctgaggttaacacacagctgctcaactgaggctctggggctgttcactcaacaaatgtttacggatacctagtatctaccttaggcatggttttgatatgttctagatgctggagagaggaagaaaaaagaaaaaacaactccacccgcttggagtctataatctctaaagttaaacgtctacccatatatctttctttgtttgattctaaggactaaggcatcttgattaggaataaaaatccaagtgtgttaatggtggggagaaggagatacatgaaataaacacaccttcacaaagactgaaagaccaggccctgtgcaaatccactgcacgccagcacactgacacatctggatggatttagtgcttgaaaacaatccagcgacaatagtgtatctggtgcaacgtttgatcctttaggctgtcagctctcactgtgtgaccaaggctaaaaacaacttctcagtgaagctgaaaatattccagaagaaacatttttatttgtgggagagttttgatcttagggacgtggaaaagaaattactcttcaatgatttaggaacataacctcacatatctctgactagaccctaaagactctggaaccaattgcaggagtacagtcttttcaatccccttccgatgatcccggaagaagagatgacagatgatgaatttccaggccacccagcaaacggggcggctgagcacaggagaaag

SEQ ID NO: 53098 - DNA, 1186 bp, Bovine  19866880820019
  misc_feature (1)..(1): n is a, c, g, or t
ntggctactggcgcagaaggggaagaagagcgagtgagtcacgtgcaccccccaaccccctgctcccctgtgccccgtgtgatgcacaagcccaatgtcgtctttcacttaggtgctgatcgggagctgaattgcacggcagtcctgcctgggctcctggctcaggcagcagtccggtctgagggcaggacgtgggcaattttccaatcctttgcttctaaggggaggggtcagggaaggtgttttgggctctgagaggatccctagggggctggggatgaaggcagaggagctgaactgctgccaatgactcttcagtggtggcagcttcagactttggaaataagacgagttgatctcggtcttctctttgcaaagtctctttccctgactttgctgtttgacctgcgtggtagcttttgaaaagtttttcactggcagctgaagacaagcagttgggaggttgactgaagaaagaggtaccctctgctccttgggttgaggtaccaaatggttggagcttctttgggctggagaatatctggaatcgcccctggccctacctattccctaatctttattttaccagctggatacacaacatcacccagagggaggctggggccctagagctggcccatcagtctaacaggaaggaggaggcaaaggagaagcaggggtgagtctgcccgcaagggaaggggtgggggtggggcctccgactcactcccacctcattgttccctttcccagaccggagcagggctaggccccagacaagcatcctcttctacccagaattcaaagaggggtcttcacagagctcctggagatcagcccaagcctaagggaatagcctaggaggaatggggatgggggtcctgggaggggatttggggctagagtttctaagattgatgacttaatgtgcagagtcaccaagtccaggagagactcaagtccaggagctcaaggctccaggagggacttcagaaactggcttctcccttttgtctgctaaacttcaggaaggcttttatggaacaaggaccctcccaaggccagtcccctgaaatcagttaccctgtctctgtaggaagctgaggaattgacacagatcattctaaagagtgaacattcccaaagtaatctctgcggggctggaatacactctgggaaaactgta

SEQ ID NO: 53099 - DNA, 2126 bp, Bovine  19866880832547
  misc_feature (1)..(1): n is a, c, g, or t
ncaggagggtgaatgggccaaaacaggagaatggcatgatcttgccccaaacctgcatgcccctctggtattcacaacactcacatgtacacaagggttcccacctctgaggtgaagggacactgttttagaccctcagacgtccttctccagcggtccccccgatctgatggaggcagacctcagactcacagcccgtgacaaggtgggggagatgggtctctaacttctaaaactcacatttttggtcatgtgacccacatcctcactcacctttaaaaaccagatgaaaactaggaaccctctcccccactaacacatagcacataaacacaaagcttacagggggaccacagacccaagactggatccccacttgcacccaggaatcaaatgaagaacccctattaattcagtgttaaaaggactgatcaatcttgaggcccaaaagcaaagtcagtgttcccaggaccccaccatgtgaacgcccacccacttggagacccacttctgctatggctccggctcaaaggcgtccgacactcacgctcatggcagccacgtcattctcataagcttcccgcactttcttcatgatctcctgctcggccctgcagcagttctcgatggcgcccttcacagtgatggtcctctcggggttatagagggtgagatcctgcagcctggggcagggagcaggttagcgtcaagcttccactgacaagcccggactgggaaaagagcctggctgaggacatcacagccacgccgtttccacaggatgtttagtttggggcaaatatgaacagctctgtctctggctttcagctcatccccagagcaaggtttccccacagggaggtgaggacattgggcacagactgtaagcaaggagggtgctcctggctgggaattccccagtggcaccagcaatccattttctgagccctcctgaagcagagcaggtaatctgcccacaagtaagtctcttgacacagtcaagagacacagtgttcacagaggggctaacagattcctcctgagaagcaggccaccacagagcacctgctcaaggctcaggtaagcatctgggtctgtcctctccctgtggcctggcagtgtgccgggagaccccccgtcctggcccctggctgcaggctctctcccccagaggcagagtgagagagacaggatgcggcagccaaggactgaagaggcagcaccctaaccacagcggtgatggaaggacttcagccgttacagaaaaatgctcttcattgctgctttaactattcttcgataagcagaaactgtatctgacttacggggcaggtgttaaggacagataatgaaatatgccaccctgggggcccaggcatcccactcgcagaggaaaaggaaagtgccttacgaggaaatggtgatttttgtctccgtgtcctgctccaccttcttcaggttgcgcccttccttgccaatgagtcgccccacaaagttattatgggccaggatcttcaggggaacctcgtcagcccttggaaagaagtgaggcacaagagctccttagatggtaggccgctgcagatgcgggtttccgggacagacgccagaaccaaatcatgttttcaaacaatcagtgggcgagaaatggggagtagggaccggtggcaaaggcacgggtcacgatgggcgatgggcacactccttaactgtggtgatggtttttgtaaatagacttgtatcaaaagctcatccaagggtatactctcaaatgggcatactgtagaatttagctccgttggtaaagaatccacctgcaatgcaggagaccccagttcgattcctaggtcaggaagatccgctggagaagggaaaggctacccactccagtattctggcctagagaattccacggaccatatagtccatggggtcgcaaagagttgggcatgactgagcacttccactttcacagaatcctgtgtacctttgggctagtgggctcagttggtaaagaatccacctgcaatgcaggaggatccggtttcaatcccagggtcgggaagagcccttggagaagggaatggcaacccacttcagtatgcttgcctggagaaccccaagaa

SEQ ID NO: 53100 - DNA, 1804 bp, Bovine  19866880848477
  misc_feature (1)..(1): n is a, c, g, or t
nagtattgtgtcattgagttctgaggccctcaaaatgggacctgtacagagactggattccctcagaccaaatcattctcctgtgaactaattagtgacaattttactttgtgcctccttttttccctgtcttccctctgccctgaagttccttagtgtaagttcatgatatatttgagagcaagtagtacagttggatcaaaacaaatcgagtagatcagatgtgcccaatattaacctggaccttcatttctagaacatttacttataccctttatttgaaaaataggaagtttttaagactgaaactaaatccaggttctctgttgctttgttcttctaccctcagaatcttaacctcaaccccaataaaatagggctccatttatccttttctattgaaaaggaggcctttggttgacaggaacaactgcaggcagagatgctggtaaaagtcaccacagggctcctttcacagcccgatatcctgctgggctggtggcagtacttaagtagaaagggctgtgctgcaccctagtctggctctaaataaaaggattgcagaaatttaaaatgtaatgtccctgttgacttgaagcagagaaatgcctcattgtaaaggtaggtggtgattgtttaagagagactttaattgtagtcagggtaaaggaaaacttgaagatgtgggtctattgcatagacccatattgctatttttctaatagactttagaacttgaatggcagccctgcaagttattttagccatcttcatctcagccttcagcgtatggttatgttttataattgccttttcatggtctgtggagttttattcaggtatccagttacatgatggtatggttgaagaaaactgcttcagtagcaatcagcccagagcctttcctgttctgacaacagcacgcttgtgttttacagtacgccttggagcgtttaaaggtcatgtgtgaggatgctctctgcagtaatctctccgtagagaacgccgcagaaattctcatcctggctgacctccacagcgcagatcagttgaaaactcaggcagtggatttcatcaactagtgagttgccatcttcaaagttctttcaggatagttgggttagctagcgaatgaaaaagaaagactttgaattggtgagtgaaacagatgagtaactttaagctttcaggagtaagtagagagtgtctgtcttttccttcagcttgacagtgtgaaaaatggttttgctttcatcagtctaatctgattggtgagtgaagtgttttactaccttgcaggatgagaattgatgaaaaggaaaactcgctggtctgaaagaacctttgtcccccgaagcagtagcatctttacttcacactcaccagcttattacaaaaagactagcagatctctgagaaaacaagtggattttatgagttagtaagggtgtccagtggtcaactgcagaatggggaaaagagaaaacataattaggagatgaggttgtagaatactgttttgagaaagaagtatccattccagtacatctgttccttcttcctaaatgacaagtgacctggccatattactttctcagtgggaagtaattctcagtgggatatgttctactgctttgcctgatgaggggcaaaagttggggaagaaaccccaagaagagaatcccctacaatagccgtattggagtaagacaggtctaaagttgcagggtagatgagtaaacatcatttaacacagaaaatgccttcaaacaaggaaagatgttctgtaaggctaaaggactat

SEQ ID NO: 53101 - DNA, 722 bp, Bovine  19866880880469
  misc_feature (1)..(1): n is a, c, g, or t
nttctttccttttcccttctcttaaaactacatgtcctttttaagttttctttttgctccaggcacctgacgatttgttctgctcagtcagatgcagacaggtttctccaaagtaccaccgcggggatgtcctcagggccagcgcctaaactgaatccccacagtatcaaccttggccgggccaaaggggacacagtgacgcagcaacagggttttcattaggtagaacagccccgagtcttgggcccttccctccccccacccccatttcccccaggtttatttagtgctgtattaaaagtctggggccacgatgcagtcttttccccccacaacagagtaaaagctccacagattgcgctgtctgcctggtggtcagtggcagccatgacggctgctgcttctggaaaagaaacggagtcttacaacgggcaggatcttaggactgcttcaggcgtttgcgtgggggtcccagaaacgggcactgtgctgaagccagagagcggtacgcctcagccaccaaatggggatgtgacaccaccattgacttccaccccggaggtctccaagacatccgaagcatggctaggagaaatgtgagagatgggttaccaaaggagtacatgaaggatgaactgaacagccatctagagagcccagtttcccagggtttgctgtctaggtgtcaatgcaagacacactcagacagaacccttaacatg

SEQ ID NO: 53102 - DNA, 1131 bp, Bovine  19866880894983
  misc_feature (1)..(1): n is a, c, g, or t
ntggcaggtgattctgagccaccaggggagccgtattttgaatacttataaaaaatcaggattttctctattgggagtttatcttgatgtgagctgtgagatatattcaacttgtcattctccatatagctacacagttatcccacatgatttcttgaataatccatcttttcccctctttaatttgaaaaattacctttatcatatggtaaaatttcaacttgtctatttctagatttctaatttgatgctattgatatatctattcctcgtccaggaccactctgtttttataattattctcctactctgtctcagagaggatcccttctgaatctcatcagtagtctataggacccactatggagccccaggaacaagggccttacctggtccagggtcatataacttaggcataacaggaaagcggatggtcactggaaacttggccactgaggagttggactccagactcactggagggagaaataaggtcagagttgtgtactgcgtctgggtcactccccatgctgcccaggaagccaacaagatgggggaatgagagattggtgggaggagattgaggacagcgtggagtctacggcatttgagctcctgacttgctgtgtccctggggcaacccactgagtgcctctgaaactcacatttcttccccatgcggctctgtagggtgaagtgggcttggcatcagaggggtgggttaagtttgactttgttatttatcatctgaaataccttgggtaaatcattcatctccttcaccatctacaaaaccaggaaaactcgacctgcctcatttgacctctcagggtcattctgtgataaacatttgaacacctgaaggtggagggaactctctccctagtttgtgttcatgggaaatctgtcccacagttcattctgtgtgtgggtgggtgtcctgggaatgcatcctgtggagctgctcaaaatgggaaagagtgcctttaattcatccagaaagaaattggggctgcccttactgtcagcagacactaaggaattctggggctgggatgggaggagaaagacaaagctactgccctcccaactgcaggtttcctcacaccctactttctggtgagtgcccag

SEQ ID NO: 53103 - DNA, 1176 bp, Bovine  19866880902282
  misc_feature (1)..(1): n is a, c, g, or t
ntgaaattaatggaaatataatgactgggagagtactctggttagaataatgagcactggaatcaaaatgatctggttcccaatcctagctcccccattttgtccttccctcattagtacagtgggatttatcacatcagatggtttatgatatttcagtgacctttacgtaaagcattttacagtgtatctgttgcctacctagctaattcatggtagttgggagagcctggtttgttttgaggctttttgagatagatgcaattatagttattatgactgcccttaaggtagtcaactttttacccaaacaatggggataatgtcttttgtgaaaatgctttgtaaattgcaaatcactaacagaatggtgggttggttattctcatttcccccaaaggctcttacaggtggggcactataaagctgataggctgcaaaaggaccagaacagtttcttctaccatctgtgttgtgggtgctcactcatgtgaaaagaacactcagaaggagctaaagcttccctaaaactgtgcccagagattcaatctgaatgccattcccttgtcttgtaaattgccaaaccgtttccccttggtcaccctcatttcccaggtaaaatgcactctctgttagggtgtttttccagactcacccaagaaaggatgacttcccccactaactccttcactcctcatccactgcattcaggacatcccttctctggctgcactgtttatatgtccatgtagagaaggcaagtctgctgtcctgaggacacagactttggacccatccacccaacattatgtgttaagtaaaggctcctcttgaagacaaggatgaagtgattaatgataccctcaatctccatcctgctccctcacccccaaaatatttaacagaaactcaagctgctgggaatacttatttatttggtctattaacaccaagatctgcaaaaaaaaaaaaaaaaaaccttctaaacacaggataataaaacttgaacattaacattcttcttcaattttgtgtaagctctgcattacagaaaatatacaaacttcaaacagctgcaaaaatagtgtctttgggagaaaatagagtttctacatcgatacaagaaaaataggcattttcctaatccaacccagtcctggggcaggtggagggtgg

SEQ ID NO: 53104 - DNA, 963 bp, Bovine  19866881013349
  misc_feature (1)..(1): n is a, c, g, or t
ntctgaccctttgccccctatggactgtagcccgccaggcacctctatcctgggaattctccaggcaagaatactggagtgggtagccatgccctcctccaggggatcttcctaacccagggatcaaacccgggtttcccggcattgcaggtggattcttttactgtctgagccgacagggaaatccagtctcttctatagctaaccttgtatttgtgatgtggggttgggaaacaatgctctcttgagagatactagctgtttttcacaaacagtactcaagataagaaagctgtgaggtctaagattcagaatccaacaatgccagtgacacagaaatgaatcaaacactaggtgcactgtgttaaaaaaaaagacacctttagttgttagaatttggggacagaagctccatacggagattaacaacacagtttattaaaatggaaggaagtgtagtatagatatataagcatacagaggtaaggtgaggggacatctgagacaagaaaaaagaaagtcattcagcgacttcctctgctagaagcttatacaccaagtgtaaaaggctcccaaaggtcaaacatgggacattttgagcatccaaaaaaaaagtctgtgattattggtaaaacacagagaaaattaaaatccatgagtttataaagataccaaaacagagcaaaaaaaaaaaaaaaaagaaaattcatttcattagaggtataccaacttcttactcagaaaattgctaaaggattctgagtaaattaagaatttatctgaacttttgggaagaaattataatctattcctaactgatgagagatacctttacagatgatggaaggctaatcaatataaaaggaatgttagaattagaaaattagcactttgtaatagccaaagaaatagttgattcaggcaaagactgttatcagtaggtgataaaggctgctgaagaag

SEQ ID NO: 53105 - DNA, 1226 bp, Bovine  19866881074560
  misc_feature (1)..(1): n is a, c, g, or t
ntgaagttgatggcagtgaggatgagcttggtttggggctgagttaaaagagtgtgtgcattttcaggtcatggtcgcagcaaagctctccctgaggccaaagatctggctccctgtctcaggttccccctctcacctcttgaaggcgatgtaggccacaaggcccacaaccacagcagccaggatggagcaatagacagggatgaggttgtcggcggtacctcgggtcaccacaggctgggagctgcccatcaccgtggtcaccacatctgacacagtgctggttaccagatcttgctctggaggtacctcgggctcctgggtgctggggtctgtgctgtcggagccctcagggggcgtggcccgtgtaatccaacgtccagggatctctggaagaaaaggctacaggagtgaggacccactttcccctgagtccctcccctagatcctgacccccagagctttaccccagccccggccttgccctaggtgcttgtatgcccggcggctacacgtacaggtgtgggctgggattggctatatgacatcacgatggtggagaagaccaaggatctaagaatcaacagccctcggcccccttcagctctgtcactgacttcctgtgtgactctggaccagttccttcaactctcaggacctcaatttccatatctatagaatggggatattaaaagatagtcttcaagctcctttccatctcggggaaagctgtgaccctataattcaactctgcctactctgggtacccagaagcctcgcctggagataaacacacaaagaagtaaataagcactaggatgcctccagctggaggcaggctagcaaatgtaatttctctggccccagcttgtcctagtggtcccagtcatccctgtcctaaagaagggtaagagtaaccaggtgtggcagagaggtactgtccgatgcactgtcctctgagagctgacatccagccttttttccaggctctcgtgtcctagctctaggctcaggcagggtggggaggtgcacagctggcttgcttccctccagccagtccatggatagtggaccctatttcctgccctgtgtagcccccataccatctgatcttgccatccagagaagacagtgtcagatagcccaaacccaagtgggaaaggatgaggactgctggtggagagcaagcccacagaccaggcactgccctgtctcagaggaaggag

SEQ ID NO: 53106 - DNA, 827 bp, Bovine  19866881090054
  misc_feature (1)..(1): n is a, c, g, or t
nttagttcttgccctttgcccctttacttgattctactctccaagctcagctcctgaatcctgcagtttctaccagctagtgactaaacttctttcccctccctccactgccatccatgtttgacaccgtcagcactcaagcacctctctgatctgtcctgctcccgcctctgcccccaggtgaatgagctgcaaaatttgacagcagctgaggtggtggtgccaagagaccagacccctgatgagaacgaccaggtcatcgtcaagatcattgggcatttctatgccagccaggtacatatggcactcccccatcacaggagggtggcaggaacctggggatcagaggagcaggactctgcctgcctctggcctgggtcactcttctcttccaggtatagggtgtgatgtgtagatgtcttattccctcttaagactgtagggacttatacctgtggtggattcatttcgatatttggcaaaactaatacaatattgtaaagtttaaaaataaaataaaatttaaaaaaaaagactgtagggacaatgatttgactattttcgtgggtatatgttatgtacagtaactgttaatgttacatgtcgtatgttatatgttgatagtcttcgctgtcgtctaaccacgtggtccttctcttttgcactgggagaagagaaatgggtcttagccactgcccagtcttgtttgtggggtaacaccatgggttgcccttttccagtgcatttccttcacctttcccagaaccactgctccatccttgcttccagttcttccagtctcctggtctcatcctggcactcatcat

SEQ ID NO: 53107 - DNA, 1269 bp, Bovine  19866881179510
  misc_feature (1)..(1): n is a, c, g, or t
ntttgaaagtgaaagtacagtgtaaattcaagggatgtactgctgtattcttacactttaagtgaacatagttttagaagcaggtggattgattgacgttgttgatggttgcaggtgagagcacagagccgggataagcagatagaagaaaggatgctgtcccacaggcaagatgacaacaacaggcatgcaaccaggcaccaggtacgggccttgttaacgctccggccgttcacagttgagagccgagtcttggattctctctgccccataaccattgtagctatgtccactcctcttgtttcctgtgctgcgtcttcataagtggtcttcagtcataaacttagaaacagtgctttttccaaatagtaaattttctagaaacaaaacttctacctcataaatgaaggaatcatgctacttgtgataataataggtaatcttgattatttgcaagattatattctctgctgtatatcctcattttcatccactttctaacccattataatttactttcaggcccctctactctgctggtatgtttccaatggcaccagtgactttttcttagcattgacgcttgttgattatgtcatttttcttctacttttctttgctgttggattccaagatgctgctttgctctaatcttcttgtctctctgaacattcatgcacgttgattatgcttaattccttgtcccctcccctgcccccgaatgcctttggtgttttctcttgctgtttttctgcctagaactctatacttataccaagaagagattgtgtttttccttcaaggccttgtgcaactcttagctgttgtcgaattcttcccaaatcttgtgccattaatgaatttcttcctcatgtattcctatttgtaatgttctcagaatgttagtttaggttttggcacattttatatactcatatctcatcatatggatgtctgtttttgtggttagattataagtggatagcagaggaggcatggtgacgggaagaagtttgactttggagccagacaggtctggatttgaatactgcgattctgttactctagctgcgtggtcttaggcaggtcagctaacttccctcaattttatttccttgaataatatctacctggcagtgtagtcagctaaattatgcatgtaaagtaccgtaagtacctgtcctcagtgcttggcaggtaataagcactcagtaagaggtggctacacttttcttcattgtttatcttgggttctattcttattcagtg

SEQ ID NO: 53108 - DNA, 1278 bp, Bovine  19866881233981
  misc_feature (1)..(1): n is a, c, g, or t
ntttatgttaaaataactacttttactttttcaaagcacgtttgtgtggggaaattaataggatggggatgattatttcccacaatttatgcccaacacactcattgagcatgtgctgtatatgcagggtgctatacgaggcaccaggaggacccagagatggagactccagcgcactgatgattcagtgagcgacctgagatctgcacataccatggtacaggccagacccaggggcttgaggctcagacaaagaggaacaagcgttctaaggtgggtggggagtcacggaggtgatgaccctggcttggacctcaaaggctaggaaggtctgacaaggtagaaacagagcaaatgacattcacaaagaaggacaaaagttctggaatgggaaggcatgggatatgcatggccagcagtgaggagtcactttcggctggcatctagagaatgaacagtggggttggaaaagtgatttaaaaccagattcaacagccacatgctggactataagattcagagtttatctgcagtgagcaaggggcaggtgaggtagtagacacaaaatgtcgaaatcaaaacaaaagtcacccagggtcctatggtgagttaatctgtggcccagccaggacttgaatgcagatttatattgacacaggcaaagctcctagacctgacgctaacccgacagaaatgggtctgtgggaaagtgcttcaggccagggatggccagatgcttctctgggaaacccaggagcctgagtctccaaggagccgggcgtcctaccttcgacaaatgggtcttgtcgagctcactcttcccatggggcttgagtgagcaggtagctggactgcagtcgttgggaacccaaataggttgggctgggaatggctgagtgtgggatcactgcaataaaatggagaggagccctcggagtgtctcggggtgtggggagcacagggcgtgggcctcgcattcccgggtggttgagacgccacagctgatgattatcattattattcctgctctggcttctctgagctttcatcctgcaggaccctgccttgctggcccgggagtcaccaactagcaaggcgtcactaactagcaaagcctcctggggcagggcggggcgggcaggtcttggctgcaaggaaacacaacactagttcgggtttcttccccagtgagaccagggaattaacttcctaaccctggaaccaggagccgactttctcaagggggaaactgaggcacggagccagggaatgatttga

SEQ ID NO: 53109 - DNA, 1692 bp, Bovine  19866881302118
  misc_feature (1)..(1): n is a, c, g, or t
ncagatgtgggtgctaaatattgcctgtaatgactgccaagcagaagaagggaggcactgaaactagccaaatgatgacagcacttcttctggtaggttctcaagggggaagagttaagggggagcagaggaactaggatcaccatgccaggcccaaggccttcccaagtacctgtcaccaacacttcaaatacactggtcaagtcccaagtgcctggagagagcgaagaggaaaaaaacatgaaataaaggagatatgtaaaactgaatattagaactattatccctcacatggtgaggctacttgttttcactccacaggaaaatgcagccatttttccaagaagccctttgagaggacagcatgttgggagtcagaagactgagtcctgccctgcctccattgttgactgggctgggtgatttagtctgagccagtagacacaccttggcttgaattgccttcattgggaataatacctgttctgtttgcatcatggggttgttggaaaatctgataatggatataacctgtctgcaaaaaccgtaaagcactcttcaagtggaagatgatactactactattccaaagactaggagcccttcagaggtttggcccatgggtagaaactcctagagacttggttcttcagccctcactctgcatacccctcttccaagaggcagagtgggagaagggatggaacaaatgtccaagaaggcaaagttagacatctcagtgagatattctaggctcactagcctccatggatgccaaggtttttctcacatcgaatctaggtttttccttttactacttatgcttgtttcctcctgtttttcttgaagattttctctcacctgcttcaatatgacattatttttagtgtttatccactgaagacattcactattgaagaacttgacccaaagttgctaaattatgatccctggagtccaagtgtaataaaaacgaagcatctgttttgagaagtagccaaggatagagtcagccctggaaccctttaatttataaagtttcaatctcttcccttttcccagactggggtcattttattccccacaggaatttttgggggtgcaatttttggagaagtagctgcatacgtattaaaaatgttgaaagctcagatttagtgcaagaacatttattaagtgtagtgtaagaataataaagaattccaattaagataaaatttggaaaacatcagagaactttggtttatggtgggaaaggtcatgacttggttctactccactggaggcctttactttgcctggttcatttcccctccctgtactccaagcgctttcaattatggacagcttctcttggcgatgaacttggataaatgctaccttgttagctaatagtaccattaattatattaatgattaatagctaattagtcatgatgctgtaatgcttaaatggaggcttcctttctttcggcagctccatatctcaagcacaatagcgcacacgcgcctgcacacacacacacacacaaaatccccttccctatttctggccgcagaacaagcagggttctaaatttgtttttctgacaagtctgggcgatctctaaatttctcgtttttattagctgtctcattcatcagacaaataacccactactgcttacattccgtcttttttatttctgtctt

SEQ ID NO: 53110 - DNA, 1324 bp, Bovine  19866881318797
  misc_feature (1)..(1): n is a, c, g, or t
nactgatgcgacttagcagcagcatagttaaaagaagaactcatattttaaagaactgagaattcatcttcaatatatgaaattcctccattaaacaatttccctatcatctttttcagtatacttgatctttaaacagcaaggcacttagaagacacaaaaagtatttctccatctattcactcctgaaaattaggtggaacaaaaacccagtaaaatcgtttaaaaaatctagatagtcagctagtactcaaataaaaaagagaaggtttgaactcatttcaaatattaaaaacttacagaactcataaataaattctcttttaaggataagttacaaatgtaggtaagagttaacactaccactttacctttattgccagaggtagttacattaagatctgtcttacaaaggtcaacattttactgtgtctttcaaaatcaattcttcacaatgagaaatggacatcagttaaataaactgtcagaataagaacagaacacatcactatagtcataagctcttgaagtccttgagatctgaattctagcgtaggtgttgctgatactttcctaaatctaagttttcttatatttaaattgagggcaattatccaaggttctctaaggtccctgccagagttaaagttctatgaccctttggaaaaacttaaaattacatctgcctctcttcatatatgctttttaaaaactaaaagcaacacgtattcagtataaataatttgaaagttataggaagctaaaactgaaccagtaaaagctaccttccagacaccccaaatcctcttcctaagcctaaagacaccaatgttttcttttggatcctcagaaacaagtaaaaaacacacaaaaccaaaaaagaaagcatgtgccagcaaacacacacacacactctttctccttctccctctctccttggaagcacacatgtaccttaactttccgaaggttgcaaagaattccaccgtaccctgatgtgtggtttctgggtttttgctactgcaatgtagcacacaggtgtatctgaatataaatgcaagcaacctcaagtctaagcattgtttcttttgagagataatgccaaattgctcaacgaaatattgtaccagtatatacccccccatgactgactgctcaattctcccacatctttgagtacaaggaagcacaaagagtaggtgagcaactgggactgcagatctatgaatcacaaggagacctaagttctatcttagatcaaaagtggatttaacagcatgtaggttaaattccgccacatatatctagctactttcacccaaaa

SEQ ID NO: 53111 - DNA, 1329 bp, Bovine  19866881379097
  misc_feature (1)..(1): n is a, c, g, or t
naatgaaaaagacagcgtacctaaagaaaatggacatatgcctgggatgctgaaagtaggtaatcattcaaagatgtcagctatcgttgttattagcaagtcacctaaatgatctgagcagcacagaaatcaggatttgccaaatactctatttttggttgattcagacactctggtttatatcagaggggtcctgcccagcctcgtgggatctctcttgctacctggagccctccaacctactcacctgggccagctggtcctcagccaagacagtccctcgctccttgtacttggcctgtcaggcaaagagaccaggatgagttgagagaatggatgctgggggctcccacttgtatcgcttccgcagaagtatgaaaagaggagggtctcgcaaatggtttttcttagggagaggagggaacagacgactcccttgtaatcaaattgaggggcgtgggggaaaggactgatgggtctggggatggtgccattccaatccaccggaagctggagaaactcagctcccctggatccgagaagcccgcgtcaaattctttcgggaggctatttgagggtatagagctctgctcggagagatttgtctctcgcgagtcaggggtggctagtgggtccgccttcttcccctcacctcggcaagcttcttcttggcgatggcgccagctcccaccccacgacggtgcatccccgccgtggcccgcgggccgccccgctgctgggaccccgggtctccacttcccgggatccgccaccggctccccgacgcggaagcgcgtgtcgtacgtcatcttcgcgcgacggaagttacgtcccgacttccggctgcggggctgatatcgcccaccgccaggggcccagcggccccgcctcttgcgccgagaaggagctgcaaaactgcggccgggtgttcccacccacgtgtactcctcggatcctcttaacttcctgtggccgtcctcaactgccaccccagcttccaggtggaggtccgccactgctcactggatgtctgccgagtgccgtacgctgagttggataccaaggattccgtatcaagcatacagcaatccattctatgctaatagggtttaccttttggaatcattcagagcttctgactggggaatgccttacagttaagaatttggactctgaaattagtttatctagctcgtagcttccactacatatgatccagttgtttagtctctttaagtgaagtgaagtcgctcattcgtgtccgactctttgcgaccccatggactgtagcctaccaggctcctcattccatgtaattttccaggcaag

SEQ ID NO: 53112 - DNA, 1599 bp, Bovine  19866881406849
  misc_feature (1)..(1): n is a, c, g, or t
naacagaatggataaatttgggaagaaatacagcttctggagtctcaaatgagactcctgcgtggtcccatttgtagtcaggatccctgaagtcctctttggggatgttttaggagcccaaagttctgcccctgaagcaggagggagtgagatgaaaccccaggaagacgagctccttctcctcccacaggtgacacctgccctccccagtatgaactctgactcttcccagagcctccatcaggctagagtcctgctgctcctggcatccttccaccccagagtctgtgccatctttccctgagcaggacagggggctttgtctgggcatcctgtgtccccatggagccctacagcgtgacgcaaatcagggcacagggccttgtcaagtgcctcaagtgggcaatgccaaggggtgaaacacgaattccttctcagtccaagatttttcaaggggaagtttggtaatttagctgaaaataaaaataatttcatttggagcaacacagatatgttatggagtagaatacaaaattggctagaattttgcaaacaaaactgcaggactcattgtgtggcagccactgaagggaaagctggaggaagcaaagcagaggccctgctcggggcctgaggggccacaggaggagctgagagagaaaacaggtgtgtgtcgggcagcgggactgagggaactggagattaagggcaaatctgtgttgaatgaggcctcagggaggttcggggggtggaggaagatgaacctctgctctttcccgtggctggttccccccacccccgcctccactggcccttccttcagagccttacctcagatgtttccagaggaggccagatgctaagaaaccaggaggcttggccccttcaggggatgaaggaaggacaggaagtgcgggaagaggggtatgatctcaagccagggccttacagacatggtctcagctaatcctcacgaatggggaagcaggtgtggggcccacttttacagataagtcaactgagactcagcagcgccgcctcatcttctaagattgcccaccttcctgcctggccacctaccacccctcccacatgctggatgaaaaaaacctgtacctccctggtaggcccctcttccctctcccaggctcaccattgacccttcctcttttccttggccttgctcttctgtgctctccttgccccctcctccaggaagtccacctgaggccctcactcagcgctctcctgctggactgtctgtctcttccgtctgtcagcagaggggggaagaggaggatgtctcttccatttgtcacctgcccccatcagactgggcgtgcactcctcccaccgagttgcctaactactccaggcttaagggctgctcccttgtagaccccgtggaggggggccaggtcaaccccccatggccggtgctgggcattaggagatatacaaaggctccagatgaggtgagagtcttggctacatccccacacccataaagaaggatgttaacagcctctgagggaatgcgcgagggttaatcaaagtggtgggtcgggggtttcctgctggggcaaggctcccttccag

SEQ ID NO: 53113 - DNA, 1008 bp, Bovine  19866881478112
  misc_feature (1)..(1): n is a, c, g, or t
nctcatctgagtccaaggggaggacctaggaggagcgcgtacgtgtggtgatatcaggggaaagtgccatgggaagtgacctctaagccgagatcagcagtatgagtaggaactagatgaagagaagaactaggggggggaagagctagtgcagaactcctgaggtgagagaggtggtaaaaagggcagacagtcttgagagtttcatctctaagacccaccgggcattttatttttttgtttgtttgtttacatttgcattttagaaacatcacttctgctactgtattgactgctccccacccactgcccgccccttcctggccctgtggctgggcatgagctgaggcaggagcctctggggagacttcagcccaggctgacccagtctccccacggtgttgggggtgtaatgacaggctctcctcttctctgcaccccacccacccagcagaccacggggtcagttctgagggccgctatattgggctctggtgggtgagggttccgtccctcctctgcccgcataggccgggttcccccccgggattgaggggtcatttatatttccagggtggcagggcctcctccccagagccacgggcgcctgagataacagggcagcccaggcgctgtttatgaaaaggcagtctagtggcagtgggcagggcctgagggaatggtgactgctgccacagatagcaactggggcggggaaggttgtctaaattacagctcccagaatagagggacccggagggagtggtggggcatcctaccaagaaagcactggctgcctgccaggcacgtctgggctccgggccctgctgcaggcagaggcggggtgaccacacgccagccaggccctgggggatgccattcatccctagccaaggcagcgggcagctctggggtgggctgggcagtggcagggaggcttctggggcttgggagagaatcagcccggtgtgaccttctcaaggggtgagagcactagacgagggaaaa

SEQ ID NO: 53114 - DNA, 643 bp, Bovine  19866881553561
  misc_feature (1)..(1): n is a, c, g, or t
natcctcccccatcacccccctacagagcaccggcgcccacctgtggccccgacgccccagggagacagctgctgctccctcggcttttcttctgttgttgggaccaggcagacttggggggaagagttcacagccttcatggtaggtcggcagctggggctccagatgtgggggagccccaagcctggggttagagttacactcaagtggctaggctgctttcccaggaggatggtgatgtcgggggtgtctgggatttgagagtctgggtttgggggtggaggcgctgcttcctactccttctaaccccagctctgctcctaggccccctctggatgtgggtaacttcaaatcagctaaaagtagggtttagtgagtgggcctcagtccccacccgacaggcgtgcaaaccactaccccctttgggtccttcttgcctctgaagagaactgacccagatgtccccagactgtgccggaagccttcagccacagcagctgtgagaggaggctgagcccctctgcaagcccttccctttgtccacagtgaatgcatcaggatttggtttctctgctcacactccctcccaaccccctggcccagggctcccatccatcctgtctcagggcgggccttgctggg

SEQ ID NO: 53115 - DNA, 1543 bp, Bovine  19866880443552
  misc_feature (1)..(1): n is a, c, g, or t
naaagctgagtgctgaagaattaatgcttttgaactgtggtgttggagaagactcttgagagtcccttggactgcaagatcatccaatcagtccatcctaaaggagatcagtccctgggtgttcattggaaggactcattttgaagctgaaactccaatgctttggccacctcatgtaaagagttgactctttggaaaataccctgatgctgggagggatttggggcaggatgagaagggaggacagaggatgaggtatctgggtggcatcatggactcgatggacatgagtttatataaactctgggaattggtgatagacaggaaggcctggaatgctgtgattcatggggtcgcaaagagtcgaacacgactgagtgactgaacagaactgattaaattataagatttgcataccctctgatccagaaattctaccactctgtatacattctgtacaaactgccaagtaccaaaaaatatacacagaacatccataacagcattgcttaggacaaacagtaaatagaaaacagctcaaatggtcacctagagtagaatggattaaataaacacatggtataatcatgggagatcatatgacaataaaaatgagtaagttcaatctacatgctacaatttggatgaattttacaaatatatatatttttatttttttagttagcttttttcaattttttcaatttaattggaggctaattactttacaatattgaacccaggatgggggacacatgtacaaatataattttgaacaaaaaaaatcagctataatggaagtatgtactctttgagtccattgttataaatttcagaaacaaaacttgaaaagcattgtttcagaatgcatacatcaatctaaattaaagaaataaaaacaatgattaatgattatcacagaactcaagatagttattaactctgggaaaaagatcaagtttatgataaaagaagagaatctggggttgctcctagagttctgatcatgttctattattttttcacataccataataagattatgcactttattaatttatttacaatgagcatatatgttctagtcagcttttagttctatatagtatacatgtattttaaaattatataaaaagttgatattttggtatgtaactcttccaaataatttaaatttcttttttcaagtagccaaatgataaaaaaaaaatctgcatatgaatgccaaattaccacatgacaagagtctctctcagatatcattatttcatcatactttttcatagctaataacatgaggaaataaagcatatacaaattattttatacaacatatacatctagtatattaatattgggaaaaatatgcagcagaatacagttcaagaaatggcaacatgagaatttaaggaaatttgcccaacaggtaagaataatatgactgagccaaattaccataaacaatgatatcaggacactagaaaatgaatatggtcaacaagttgagaagcacagtttattcttgttattcatgggttatgtt

SEQ ID NO: 53116 - DNA, 1134 bp, Bovine  19866880494665
  misc_feature (1)..(1): n is a, c, g, or t
nggatcttcccatccgggatcgaacctgtctcccccagtgcacgtggactctttaccatctgacccaccagggaaggcccccgatctagtctttactacgtaacatgttaacagtatcagaaactgctaatagaatgagattttatttttttctcctagaaacaaatgaaactataaagaccagcattaatcatgtaggaaacacacacagagaaacttattattggcatttgtgcagaaaatattaatacctgaggctagtaagaagttattaaatttgaagataaacttaacttattagtaaggacttactaatgagatcaaatacacagagtgaaagaaaaggaagtcagcaaagtatttttgaccaggaggggaattccagaggcattccttcagagaggaattcctaataaatctagcatcttttaggggaaaagggtattttatttcccattttgttaaggagaggagatgacacacccacccatctttcatttagatgtacctatgattcttcatcatcagctctgagatttatcttacagtttacaatactgaaatccatcaaaactaatatagatattgctgaggcttttttaaataaaaaattagtattgactttaaaataaatctacttttggagaaaatatgccaagtaatcaaaaatatcttaagcttttgattccaaattacacaaagatattccttcaaggaatcattctgaaaaagtaatttttaagcttgtcaaatggcatcactatttttttactattgatactatcagctatacatggtttagaatcttaaataactgccctgcagatagtgttaactaagtggaggcagaatataaagactacctctcaatagagcacattacctagtggacaagagaaagcaaaagaatgctcaagagtaagcagtatttagtactccaatacctacagtaggagaacatcacgttttagtcttaacagcaaactttgcagacattcagttgccttatgttacagccccatgtaaataaagtgtctgtgaccaagatttctgtgggtaaactttctgaatatgtccatctcttgccctcagaaaatttatgctcatagagacatgatgtttttaataatgggg

SEQ ID NO: 53117 - DNA, 2942 bp, Bovine  19866880648156
  misc_feature (1)..(1): n is a, c, g, or t
nctttgtatgttttgctctctaagagatacatttttcttatgacttataaggccacctgaaagttatctaacagtaaatttacattttcattaaaaattaaagtgactattctgtatatggtagatgtattaactactttgcatagtagatgaaaatagttcagaatttttccttcatttattgatatggtaatctatcacataatacatatatacagagaaatacgtatatatatacacaaaaatagattgtttgtatcctattctgtttccagtatttaatttatttctttcattcatttattcactaattatatgcaatgaaaagtaatttatcagacacactagtgctcctcacacatgtcactcacttggagcagttcctctcatgtggtattttcacagtgcaattcttaaccagctttctccatactgattaaagttggatttggtcactagaacccttgtagttaatttatagactgggatggttttgcatctgtgatttttgcaacttattcattgctatggggatatggtactgaaaatgctttgctatagttaaagatataattttttttattaaaaagattatcatccttattgaaacctttgtacatgagactgaaggacttaagctgattctgcttgccccatatatgtggttccagaccaccaggctggtggctcagacttgtacatactgaaatttgatatagtagttgaaaagtggccagctaacagggaattgcagtgatcaacttgttggtgaaaaaaaatcaatgtactgaacagactttaatcttattataagaccaacacaagtaaagacaggcagttgccctcctttaccagcagcaatgtggaaaggaggagagaaaagaaaagaaaactgacttcatagctctacaggaaaggatatcattcaaaaggccactaaatacctacataaatcctaaaattatgaaattgaaatttgctatttctgccaaaatgtaaaatgaaattattttattataaagtcatttaaatgaattaatagaattttgttatttgtatgagtggacttataataaatttgattatgttacaaagttacataaaacccaggaaaagtggaaagtgtacagatatttaaatataggtaaatactagtgagttacataaaacttttcaaatatgaatatctagaatagcttgtgtgttagaaattaaaccaggtcagatttgggacctttctttcattcatcagcatactttgtttctaggagaaaaacggaggaagaattaggtgaggggaggatcagaggaggaaaaaaaaaaggagaagcaaagaggaaagaagaattatacacaaaacattgttgactactctcttgggggtggctaaggcctaaatcaatctaggctgctcttgaaatgcaggcatacgtttccaagcattatattaaaatttcatgatcaataacgctgaaagctgcagaacatacaagcaaaataagtgctgacaattcacaagcatctgaatttaataaaatgtcatcctccagcctcagcagttgtgccatgaggagatggccatcctgattagaatctgtcagatgaatctccatttgtcaagtaataataaactcaggatagtaccttttgtttcaggttgtgtttattctccaaaatatagcagtcaattcatattctaatataattctactgttttcaacatcaagtcaacaaatcaaacaaagaccttgttttctccctgagggaaaagatccaatatttacattctttaattctggaggatttcctctctccattaagcagctttggttccaggggctctgtttatgtattcacacatcagtcatctggtttttgtggagcttcctcatctttggagtcttacttgttatttattatgagcatgctcagtcatgtccaactttttgtgaccccatggacgtgtccaacttaccaccaggctcctctatccatggaattttccaggcaagaatactggagtgggttgccatttccctctccaggggatcttcctgacccagcgactgaactcctgtctcctgcatctcctgcattcacaagcagatacgttattgctgagtatcctggcaagaggggagcatggtgaaggccaaaggtttattggcatgtaatggagtttgccctatatcctaaaatcaactggaagccaaaggagaattttgagcaagggattggaatagggctacaggtctagtgtgttttgatgaattcactctggctacatggtggagaacaagtagactggaaagggagtcagtgattcctagaagcacagttggaagactattacagtagcccaggtaaaaaacagtgatggtgataattggagaaaagtcatcaggctatgactatgctatttcaggaggaaatagcagtagaacttggagatatattagatataaaggtggaagaaaatcagaaaataaaatttctagttgggcctttatctgctgacctatgaagtgacacatgaagactgggtcttgctgggttgacttatgggtatttgaagtatgaggtgcctttaccatatccttaaagaaaagatgctgaataacttatgtgggtctgggatggagatacactcttgtgagtcatctttaactataggtgcgctaccccagaggaagcacagggaatgacgggggctaagatcacgcctgaaagagcattaatgcttaaaatctagacacagtgaacatagggctgtttttgaattggcaggtttttttctcaggtaaatagtacgagtgttgctagatcatttggcagttctacttttaattttttgaggaagcttcattctgttttccatagtggctgcagcgctataggcaagatatggaagaaacctaaacatccattgattgatgaataga

SEQ ID NO: 53118 - DNA, 963 bp, Bovine  19866881131497
  misc_feature (1)..(1): n is a, c, g, or t
ntatcatgttcataaaatgaatataaaaatactacatcatagggctatggtaaagattaaacaagataatttatagaaggttttcagcatggtttgtattaagtgtgtaacaaaagcctttaaatatcagtaagaataggagtagaatatagaataaattctgatcccccttaggaatattggcaccttcttgagaatagctaaagcggggaaaagagcaaacaaacaaaacaataataccacaaaggttgccaattatcctgtggaatattaatgctcattttatgctgattctgctataatgttaattgggaatccagagccttcctttatgcacataatgaatattctttctcatgctctacttattcatccctgacaattactaaattaattacttcaaattgtagcacatatcaatttttaaccctttatgtctgtattcaactgaggaatttaaatttggttctctaagtatttccactattcatttaagtgtgtaaataaaatgcctataaaatatgatcaaaggtcttttgaacataattatgtagcagatataggaagatttgaaaatgcagttcctacaagcagcttagtttgatcaaaagctgtcaaagcaatttacttgctattgacattctttgaccactgtagttgtacagcatgcagacttaaaacataactttgaggaatatgaaacctattcatttggctgaaaaatagtggaaatccatgaagatacaaaatttaatatgcaaacaaaatttttgcattacttagtgactttcatcctgggtatcaactgaatagagagagataaatatatgaacaagaacacatctattacaacaaaacaccatagcttttgatggttaataataaaatcagcaggaaattttcataatcttgtaccaaaaaagtcaaataatatctcccaaatactttggttaataataaaca

SEQ ID NO: 53119 - DNA, 813 bp, Bovine  19866881144894
  misc_feature (1)..(1): n is a, c, g, or t
nttctgcctcctgaaagaaattctctgtggttcctccagccttgggtaaactattcttcctctttttcacatgaaaaataatacatagtttgaaaaccttgttcaatagcatatatcactccctaccttattatttttgttcatctttgatgtttatgttccaagatgagaggacatgtataattcaacttatatttaccataatgtaaagcacctattggaagtccaggtatgtaatacatgatcaactaatatttgcttatttaaattaatcttatattcatattcaatatgtactcacagtacttataaataagatattcttcacaaagtacaattctaacttccccagcattagaatatataaagattaatttcgtttgaagtttctttattctttcctctccctttcccctccatcataaaaagtttttgaaaaacagcatattcactctttgtcgtttcaagccatgaaatttgatatagaaagcttacaagagcagtgaaactgacaggggtcaagtttaaccagtttaatttctaactggcatccaaatgacccacattttcacacctttcgaaattctttacctgttgtagctagatcccttcctccaacggcataagaaaacacatagaattagtgataaagattgataaacaatgcaaaagtttcagctatacttgttgaagctattttttttttaagtcttctgttatccaaatttcctctctgaaggaaagatttatttagtcctacacagccatcacaatgttttgctctttgcccagtatgttctttcttggcagaca

SEQ ID NO: 53120 - DNA, 3185 bp, Bovine  19866881253168
  misc_feature (1)..(1): n is a, c, g, or t
ncattccacagactgtaccccatagtacatggggtcacaaagcatcagacatgactgagcaacttgcactttcagtttcactttttgagtgaaactctgagaatatatttctcctttcagtcaagttggggtcactgtgcatgcaaaagagtaattgctacacacaaagacacaggaaacaccaccttatcctccatcttttaggaaatacttaatacccaagtatttttcaaccttctaagaaaaataaatgaaggaaataattgtagaaatcattattataagcaaactctacaagaattactaatccctttgtatcttttatttcattaaaccctcaaatattttaaattgggtttagtttttcctccttatggatatgatttattaagatatataaacaatataattgctccactttcttgtaacatccaacacaaagtaaaaccttgcttccttaaattctcccctaaatcttggtaacataagtccaaatcccataccaaactattttgaatatcctttaactaagatacctcacaattgcacatgatgtgccttctctcccactgcaatgaatgcattcaaatgcaggtatgttgttggtaatctttggtcactgatacatgtaaaattcaaccaaatacatttttatgagccatctgatactaaataattagtttgatagttacagttggctaggttttcactcacagtaatttgtttggccttatgaatacctagtttatttgactctaaataatattttcttatcctgctcttcttcctccacttcttcctcctctttttttttttttccctaaaaggcaataaaggtttcatgttagctttaagtactggtttctgttttcccccagctttattgaggtataatcagtgtacaaaaatactgcagatagtcagtgcatacaatttggggagtttggaaaaagcattcacccatcatacctgcatcataacagggaatttgccttcttgacaaatttttaagtatgcaatacacctgacatgcttaagtttatggggtcgcaaagagtcagacatgacttagcaactgaacaactatgtcatacagtagatctttgaaacttaccttacataattgtaaatgtatgctcattgaattgttaaaatctaatatattctttaaaaaaatattttatttgactgaagcccagataaactatttattaatcatctgtttccattagacttcattatctgtatggatattttgaaaaaaggcagcttaagataaatgccaaaagcaaggaatgcagtgctggttggggataatagtgtcctcaagatttccacaaaatgactttaaagcccccagggtgaaaggtcaatgaatcaagtagtggcacataaaccattatggccatgctctcaggctctgcatgatcaggggtcatcctcagatttgtaataaatcacacagattaatttgatacgacacccactatcttttgactctataaatcttttgtgtgtggttccattaatttaaaacataaacaatgaggaaaaagtctgtaaaccaagacaaaaatactttttccccaaaattaaccattattttgtgatcttccaaattgcagaagaaaaatgggaaacccatttatctaaaatgcagtttcttgtgaaatgcactggagaaagctatatctaagaagggaatattttgcaacactctggcaccacataaaacaaggagagagtgagtgtctctcagtgagtggctacatttggaaggttgagaaattttcctttgattcctcttgtaactcctactttgcctacttttcagaccaaggttcagttatgctttcacctataatggacctaagaaaaatcaaaaggcaaaatcctgtatgtctgcactttcctttatattcatatttttcagagtttaatttcaatatgtgattaagtgtctttcaatgttacagaattatgcccctctaaactatgattataaactttaaaaaatgtatattatatagaccaaagcctttatttttattattactctagaaagtaagtgattaataaaccaacttctaattatttagattcaactataaactttattgaccataaattcctcttatataccatcctctgctcagtcctttaaacaatatttgcagctttttacaaagtgttgtttaagaaaagtaagaaacacagtttctaactgattttcagcagtaacatcaaataatttgatcaaacaggtttaaaatatgtggcaaaagcaatgaaataatagtattctaaactatcatcaccacagaataaagcacaataaatttaccatttgttgtttttgctcagttatgtttgattctttgcaaccccatggactgtatgtagcatgcagggctttcccatccttcactatctcctggagtttgctcagactcatgtctattgagtcaatgatgccattcaaccatctcatcctttctcaccccctactcctcacacctatcaaagcctagtgaaaaatttcaaagccatccagatcataaaatagttttagatccctaaacctgggctgctactgctatgagagtgagagatacagacagtgaaaaagacagaggaccctaaaatatgcttgtggagtcaatgttaccccttagttgcatttttactctctgtgcttaggtaatacactatcaagtctttgctaattttcatagggatttacctataattgtacaaattcctgtaatgattaccaacctaacagttgctaccaatatataattagcttttaaatatttaataccttaagagaccacacagataattaaattattttgagaaaaaactaattcaagtcaaaatacaaatattgtctctaatagtaatcctgagtctcttaattattaaataataaaaattgcatgggctctagaattatatattaatcttacttatccactctcccttactttccagaatgagcctcccagagtctaatgaaagttgaaaaacctggagaaaggagactgcattagtcagggttttccagaaaagcagaactaatataaaaatttattgtagaaattggctcacatgggctggagaactagaaaaggcagtggtgtaattcagtccaattcctaaggcaggacagccagaagtta

SEQ ID NO: 53121 - DNA, 1203 bp, Bovine  19866881336611
  misc_feature (1)..(1): n is a, c, g, or t
nctgaagaaatcttaggtcctgaattgactaataaataaacttactgctctactctgtgaatatatgcatagatcatgtatatacacacttctgtacttttcttttaattttatctatataacatttagataaattttataccttatacaatacacagaaaacataagtagataatcttaaaataattattttgtgtcacttctcaatataacaaagcaaggaagaaagcagacgttgcttttgagctgaaatgtgataggtgaataaattaactaaaaaatgccaaagggttgaaatatgttgaaagatacttagtctaccttgctaaagggaaagataatgaatgactgtaccttttacttctgtatttttatagcactttctgtaaaacaaataatgcattactgatacctctattgccagaatggcaatagagcagtgccattttgctaatttttcttcctaactaatgaaatcttacattctatgagaagtcatttgtaaaatatattaagtgttttaagatatttcttactgagtaaaaagtttctctcttggactttaatatatgtacttgctacattgtgtttatacataaacatcagaactaaacctagcaatatgatctatctatatatgcactcacacatattagtaatagtgtgacaatagtacacagctagctacccttctctcaatttgatgttattatagcgctcatgtgtattaaactgtctcatcatgccttattatgagagaaattaacataaattaatactaaattatatgccttcagtgctcttacttaaggagcttatgacattaattggtatcactaaaagagaatgtttgtgtgcaccatgaccagggaccccacagacagacagaactatgtttgagtatctcctgtggaggtataggttggcggtggtctgccacaaggacagggtctctgggtgcagcagacgttgggtatgacataagccctcttggaggaggtcaccattaacctcaccatagagctgacagaatttacaccagactgggaaatagactcttggagggcacaacaactttgtgcaccaggacccaggagaaaggagcaatgatcccacaagagactgtccaagacttgcctgtgggtgtccaggagtcactgatgaaggcaagggtcagtggtggtctgctgcagggttggggat

SEQ ID NO: 53122 - DNA, 1761 bp, Bovine  19866881349000
  misc_feature (1)..(1): n is a, c, g, or t
ncttaaagagtttgtgatatggccattaatcttatcagctaacatgtattaaaatttatcacttttctaaaactctcctgtcgatttggacccaggccagggtgggcccttttcacataaaatggaataaaacagacatgcacatagactcatttcaatttggcctgtctcaccacaatgacttgaaaaatgtattcaataaattgtgttcacagatttatgaccaccggatctttccatttttgtctagaactaaaagcagatatttaactgaactagattcttgtgttgctttcagtgctccatctaaagcaatatttgaaggatgcaatcacagaagaaaaaaaaagtaaaataggaaagaataccaagtatgtttgatgtgcccttcatacacatttttttcccacaatgtcatgactgccaactgcattatcaatggcttcaggaaatgtgactaaaaggtgaaggggataaaaaattcagtttaaaagggacaaaaataactcatctcaagtgtttttgatgcttctttgttattttatggtcatataattgaaaatgtctcaatctctgtgatctctagatccagcttttgcttttctctgtttctttagaaaagaaagaaatactgtctatttttcatgcataaagagctttatagcttgtgtgtaaatatttatttctctttacccaatgtaaactgtagttaaagcttttcttctgattctttgtacattctcagatgcagtgtttgagagtcatagtctcacatcactgaaattttttagctccagtataataggtagcaattttgtttaatacctagagaaattattttttatccttactgagatttgtttaatacatatacatacaaagaaaatgtataatctttctcccctctttaattcaaatggtagcacgttctattccttgttatatttacataaaatataaatgttgaaaaatttttcatatggctacatgtagtgctctcccctttgcttttctgtggtagaaaacacataacataaattttttcatcttaagtatttttaagcatgcaacagatctctagaattttttttttcaagacagaaactctgtattcattgaacagcaactcccctttgcccagcccatggcaaccacaattctactttctaagaatagataactatagatacctctaatatgtgaaatcatgcagcatttgtctttttgtgattggcttatttcatttaaccgtatatagtccagtttcatccatgttgtatcatatgacaagattcctttctttttaaggctaaataatattgtactgcatgtatgtattaacaccacattttctttatccattcctcagtcaatgaacatttagtttgcttccatatcttggctattctgagtaatgctgaaataaacgtgagagcacacatttgtctttaagatcctgaattcagtttccttgaatatataccagaagtgagattggtagataacactgtagttttaattttttcagaaacttccagaccattttccatggtggctgcaccatcttacatgcccaccaactgaagccaacagttccagttttttcatattgctgccaacacttatatttcctatttttatgattcagttcagttcagttgctcagtcatgtccgagtcttcacgaccccatgaatcacagcacaccaggcctccctgttcatcaccaactcccggagttcatccaaactcatgttcatcg

SEQ ID NO: 53123 - DNA, 1809 bp, Bovine  19866880173137
  misc_feature (1)..(1): n is a, c, g, or t
ncagtattcttgcctggacaatcccatggacagaggagcctggcaggcttcagtccatagggtttcaaatagctggatatgactgaagctactttagcacagcacagcatgcatggtttaaaagttgtggagggcagctttggggatctggagtctcagagagatggagggacccagtcaggggcctgcaagtctgctggggcggtgcccacaagcagcattcatcctgcggagacctcaaatcgtggctgagaaccctccactaccagccaggcagaccatgcgggatcttagttccccgaccagggctttaaaaaataaataaataaataaataaaagttgtgacgtacatcaaactctcactgagggcacccaaagccagtgctctctaatagtctggagggatggagttgggagggaagtggtggggagagggtggggacacatgtatgcctgtggctgattcatgttgatgtaggacaaaaatcatcacagtattatatatcctcaaatttaaagaaagaaagaaaaaaaaaagcttactctaattgcaaacttcaaaacaaaaaagtaatatgacaactgggagctcagaacccagtgtagaaaacacccatccttgccctgagttgggaggagagtcttttatcccggctaccccgacccctgggctttcctggttgctcagctggtaaaaaatctgcctgcaaggctggagaccccagtttgattcctgggttgggaagagcccctggagaagggataggctacccactccagtattctagcctcgagaatccccatggagagagaagcctggtgggctacatttcatgggatcgcaaagagttggacaaacttagcaattaagcatacaagcacacccccactgctgggactggaacctttattccaggtcctcaggctgttcccagccactcactgggccagtcctggtgattaatctgattcttgatgagccagcaagagtctggaaacagtttttgagataattgtatatttgcaaacaaggacctggttaaacagccagcagttgcctaacgagggtgtttctttacaattctgaacactttaatgaaaaaggtaaaaccttaagtcatccggtgagtaggactttggttttgaaactgtggaaagttcgaattacctgctgattctcagtttgagcccttataccatgtccctaatgagttcttcctggataggaggtggttaggccagcactaattagtctggggccacgtgcctgaggctctaccgaagaaggtcaggcatgggtctgtaataccttaggatttatacccctttctccttcagttcagttcagtcgctcagtcgtgtccaactctttgcgaccccatgaatcgcagcacaccaggcctccctgtccatcaccaactcccagagttcactcaaactcacgtccatcgagtcagcgatgccatcccgccatctcatcctctgtcgtccccttctcctcctgcccctagtccctcccagcatcagagtcttttccaatgagtcaactcttcacatgaggtagccaaactattggagtttcagctttagcatcattccttccaaagaaatcccagggctgatctccttcagaatggactggttggatctccttgcagtccaagggactctcacgagtcttctccaataccacagttcaaaagcatcaattcttcagctctcagctttcttcacagtccaactctcacatccatacatgaccactggaaaaaccatagccttgactagatggacctttcttggcaaag

SEQ ID NO: 53124 - DNA, 4726 bp, Bovine  19866880345126
  misc_feature (1)..(1): n is a, c, g, or t
ntgtgcggcaaattttgttagaagtgacccccacctcctggttctgaactattttgtgctcttggttgtactggctcctcctcgggtacttacattctcaggtgcctgacttccctaaaccttctcatataaaaaaaaaacaaaaaaaacaaacccaaatgaaggacgacagcttcacatcgtccctaatcctctgggataactgcgctcaagatcttacttgaaagaagaggccattcccagcacttggcacgctgggctgcatccatgcttcagattcagctcaaacgtcccctcctcagtgagccttccctgacctcctctgaagtggcctcctccagggacccttccgccacactgctctttcctccacgatactaacacaatctgttgattcttttggtggtttactgtctctccactacctcgtgcccccataaggttacctctgaaggcaggttctttatagagtctattttgttactgcgtgcgttctacgtctagaggagtgcccggcacagagtgaaagtgaaagcatttgtcgctcagtcaagtccaactctttgtgaccccatggaccatagcccaccaggctcctctgtccatgggattctccaggcaagaatattgaagtgggttgccatttccttctccaggggatcttcccgacccagggattgaacccgcgtctcctgcactgcaggcagattcttcaccatctgagccatagtctcctgtgtctcgaggcatgccaagcacatagtgggtacacaggaagtaaaacccgagtggatgcacgagagggaggatttcgtgaggaggagaaagttacagggttcctgatatcacacccggtaaacccactgtttatacatgtctctagtgctgtgtgacatggtcaggagaggagagatcagggttgagtggattacaggactctgttgtctgacgtctaaaagaaggcaggcaacaaagaagtgcgccatttttcacgtctccagtatgaactgcacactcactatgtgtacatttcagcttcatgagagccctgatcaggggcactggctgccagccccagagccgccactgaccagtcaggtgaacttgggcacaggtgcctcacttctttggctctcctttccttcccaggagtacacagccaacactcaccttctcgtttagtcttcacgacaacgctatgtgacaggcacagagcttacaccatgatgggaaggtgcacagacggggaggcagggtcagtcactcccctggtcacaattatcaaacgcagcagctgggatctgggccgagggctgattctaggattcctgccctcaaccaagtccctttctgctctcgggttttatgatgtcacgagagttgggtgagaagaggatagacctccaaatgagaacacaattgtggtctttccccgccgccattcctgattttatgtatatttttaattggaggttaattgctttacaatgttgtgctggtttctgcttacaacaatgtgaatcagctgtaagttgacacacatccccttccctctggagcctctttcccaccactcccccatcccaaccctctgggtcatcacagggcaccgagctgagctccctgcgctatgcagctgcttccccccagctgcctatttcacacacggcaggcgtatatacgtcagtgctcctctctcggctcatcccaccctctccttcccccgctgtgtccacaaattcattctctatgtctgcatctctactcctgccctacgaataggttcatcagtacctttttcccagatgcaattgtggccttgaataaaaccatgttttcccttttttagtgttaccaaggcatcacattttccctttaaccaagatgatgtcttaacataggtttccccaaagaagagcttgaaatggagagatttggtgactagctgtactcagtttaatgctgggaatagcttttggctcaaaagcctaccagctgtagcatatacggcatgctaatacttgaggaatcaccatcttttacatttctacttactgcacatctttgactcaggtctctcaatttgctttctgtggtagcttagataaaatggacagaggccacatacatgattgctgcttataatttttttcaagtaataaaagacttcagatggatgtcctgactacgtgtttagaaaaatcaatctcttaaaaagaaacaaaaacaacaaaagctcttggtatctcactcctagagattggtgcctatccaaaggtctatatttacactgtggcaaaatttgtttttaaactcatgcgaacattctgaaatgggaagtgaagtaccaataaaattaagcttaaaaggaggagggaagtacagcccactgttccaataggtcctggtgaatttaattctaagatgggtgatggacactcacatacccccagccttcttcatgccacccactcttaattctttccttaagtttcttaaatatgacctttggttgacaaggtacaatcggcttctacctcaaacccactccacaaccccagaggacatcctgtgaattacgtccaagacggctgcaagtcatgagcacaggaaatggaaattttggtccaagattagtaaagttcagccaaactggtgtagcggtggggaaataccatcaaaactaggaacactatttcatcaccagttccccaagccatcattcccgaaacttcccttcccaggtgaaatgattcatttaggccagagaatacatttcccccttgtctgtccacaattccaccccagagtcagcgttcatccttcttcccccgccccagtttcctgcttactcttgtctgggcaaccagacaccaaattccgtctgccttgtactgcatgcagtaaaagagggtttttttctttttttttttaaggcaataaagtcatttaccatttatttatgggaatgaagaaagggttgatagacttgcatcaaaagacccagaagcctctgacaaaaatcagttcgttcgcacgcacgcacgcgcacacacacacacacacttcatttgcaatatctctccgctttcctatctgctgtcttgacccaggtcgaaggtgaaaacatttccagcatcagtgcagaaacattgtaattctcaaaaggaagtacaaaacactgagcatgtgggtaaaaagtggctaagaagtgtgccatgttcaaactgaatcaggtacagagataccagagaggcagccatggtcagacctctgggtctgggaacagaggatgcatagcagtctcctgaactggagcttccttttctgactctgcagtactaagctatgaggactcacgggagcaaaggacaaaatttaacgtactgttgtagtttaataaatgtgtgggattatggtctctgctgaatttggaatgttttgttaaacctgggataaaaatggaaaagtaacagctgattaatgagcattcagaaataattaaggaaaaggaaattacttcccagaccatataaactacttgacgaaataaccagagatgttactggagacaggaaagtctaaaggccttcggtaagtagatgacatttgtgctagagtgaacgtgtgttaaaagttacccagtatatgagtcaacgtgagatttgcaaagtgcctcctcattctgtcccaaaccctagtttctaggttcctaagattaatttaacttagagactttgaaacatattttaaaaattaatctgaatcagcaattgagtataattatcacttttgcacgggacggggggttccccaggcaactcaacggtacagaaaccacctgcaaatgcaggagacacaggttcaatacttgggtcaggaagatcccctggagtaggaaatggcaacgcactccaatattcttgcctggaaaatcccatggacagaagagcctggtgggccacagtccatggggtcccaaagagtcagacacacctgagcacggcagatggcagacttaaaccaaagacttggtactatacttggttgacccaatgtctcaaagactggtttactttacattacttcagttttagctattgttataatgtaacaagcacaacaaacataattaatatcataaaaatattgactccatatatttctgtgtgtatatacactacaaaggaataatccctattttaaattacagtttaaaaaatcataatagtttgatgaaacaaagaaaacaaattcaaggtagaatgcttattaaaaaaaaaaaacctatttttaaaaagtagatgtcaaagtgttattttttaaaatatttttatattgaaaatcagcatgcttttagtagagaaaaagtagaaaattaagataaaaattaaagatctttcatatgagagaaagagtattttatacatgtacatttataaaaatgattacacatgcacatgtgtgtgtgtgcatatgctcagcagtaaagaattcacctgtaatgcatgagactcaggtttgatccctaggtcagaaagatcccctggaagaggaaatggtaagccactccagtatttttgtccacggacagaggagcctggcaggctacagtccacagacttgcaaagagtcggacacgactgagtgactgagcacacatatatacactagatcgagcagcatcaccctctcccctagaaatcatgcccactcaaaacctcag

SEQ ID NO: 53125 - DNA, 1541 bp, Bovine  19866880562930
  misc_feature (1)..(1): n is a, c, g, or t
ntgcaattgtgcggtagtttgagcttctttggcgttgcctttctttgggattggaatgaaaactgaccttttccagtcctgtggccactgctgagttttccaaatttgctggcatattgagtgcagcactttcatagcatcatcttttaagatttgaaatagctcaactggaattccttcacctccactagctttgttcgtagggatgcttcctacggcctgcttgacttcacattccagggtgtctggctctaggtgagagtatagttgatttataatgttgtgttagttgcaggtacagtacaaagtcacgtgtatatacaggttatcacagaacgttgtggaacatagccaactttaacaaagctccaccttcaacatttttcagtgatcagatagggatgcaaaatcagaaatcctgtccttcccgaagatctaacactgtgttttcttttttttttttcgatgctttagtatggtttattaagctgtgccttagtacaaatgctggggcttgcccatggtgcttttaatgtacaaagccctgacgttctgccaatttttcttgagcaatgacaccaggaagttgacagctaagtggatgttgtacacaggctcctcatctgtcatcttcacgtggccaacagccactgccagacacagcaccttcttcatctggaacttgatcgtggacttcacttcatcaactttggccaccatgttctcattgtgggtcagcaaggaagggaacttgccaaccttgttcaggcctgggcccaggattcgggggatctgcttgatcagagactctgaagccaaaaaggcatcatatttcttggccagcttcttgaccagtttcttattcttgttgagttttctcagcgcctcgatgtccgtgtgggggatatccacagccttggcctcatcacaatgctgctggtcccccaagacacacacggagaacttggggcggggagtggacttaagcctgacggtgcccgagaagcgtttgtccttctgagggtcatagttcttcaggctgatctgaagctccaccgtctccaaaaactttctgtgcttgcgctggttcccgtgcaggacttccctcactgcctcatagagggtgtcgcgggagactttgctgctcatagttctctatgccgcgataaccggaaaagagagtggagaaaactcttgagagttttgcaaggagatccaaccagtccattctgaaaggagatcagccctgggatttctttggaaggaatgatgctaaagctgaaactccagtactttggccacatcatgcgaagagttgactcattggaaaagactctgatgcagggagggattgggggcaggaagagaaggggacgacagaggatgagatggctggatggcatcactgacttgatggacgtgagtctgagtgaactccaggagtttgtgatggacagggaggcctggcgtgctgcgattcatggggtcgcaaggagtcggacatgactgagtcactgaactgtactgaactgaacacttaa

SEQ ID NO: 53126 - DNA, 1352 bp, Bovine  19866880575065
  misc_feature (1)..(1): n is a, c, g, or t
ntattcttgcctagaaattcccagggacagaaggagtctggcaggctacagtccatggggttacaaagagttggacacgactgagaacaacaacaagacttgcctgaacttgagttaccacaaactttcaatttgtataaaatataatacctgtttttttttttaaagcacaataaaatgagatatgcctgtgcagaaaactgtcaaccatgctcacacattgatgatgatcttattttctttctttacttatttgtgttttcaaaatgatgtatgatgtacgatcattcttatcagaaaaatttttgaaatgaaggcaacaaaatatttaccatcttcatcagggttttgtgcctgttatttggcaactctatctccatgttgggttgggccaagagagcacctacgctagtgccaagagttttctttgaaagtccacctgagttcaatagagtttataagcagaatgattttagattggacacccaaaggcatagtctagaaagaggggagcagtctgaggggtcttaacttcaagagaggatgaatttaaaagtctttgtgttgtcctctatactgctgacctgaattatggtccataatctcttctgaatatgtttctccagaatatttattccaattgtgcttggagttattcatgtgataacttaataccaccctccttcagttgactttgaactccataagagcagaaacaccatcaacttctttatttattattttttcttttttaccattgaaaacccaatccagagaccatacttggtacatagttgttgctcaagtctattcttgactgtaggaaacaccagagtccattcacgtataggtccattcatgtataggtaaagggacatttccctatggtattttagagatcagtggagttaaacctaacgctggaagcttctgattgctgatcatgttgcatgcagagctattgctaggcagaacactgcttcattctccatggtgtaggtcccaggagacttcctggaggacctgaagcctaaagtgagtcttaaaggataaagaagaattagtccgttagagaacagtggactaggtgtgtttaaagctttgtagtgaggatgagaggtctgggggctaatcaaggaaaaaggtttgaccatgaggttgcagtagtacatacaagctttatgaatgacactggctggttgacagagaagaaaaatctctcacagtacgagcttgcccacaggtgactcagaaaggaacttagagggagatcactaggccatttaggtctgacctaaatcaagtcacttaatattatagagggaagtacaaacagattcaagggatagatc

SEQ ID NO: 53127 - DNA, 1256 bp, Bovine  19866880581473
  misc_feature (1)..(1): n is a, c, g, or t
nacaggtggtaggaaatgacatcagatttccatcctggatctcatttggataactagaagtatactatcagaagagttggaatagaactttcattttactcttgtttctattcttatactcacttgtaaattgtatttccaggtagtggacttccttatgagacgcactcacagtgtctaaaatttcaaaatccatcagatggaaaacttgttttttagtagacctatactcattggctctgagaatgcagaagtgtgtgcagactggggtctgtcttttagatggatgcatgtatgaatctctacagtgagatttctctgtatggatgtgtttctaaatctactacaatgagattactgaaagaagacaccagggactttcccatcagtaagaagattaggaaccaaatatttcttctgaacatgggtgtgaactactctttatcttggtataatccttcttagcttagcatccaacaatcttcaaatgattcagctacattatcagagctatttagagaacatttacagcttggctttttgaaatgctcttactgatattcccaaacaaaagtgacaaatctattagtttaagctccatctatttcacaacatcccccacccttattgctaatttggcctcatttctgaattttcagagttggcgcaaattattttttagctttgattccttatgaatcctctagcaataccccatgaggtagcaggaaattacttctttctgtttacattttccaccgttacacttaaaacaaataagcctcctgaaggttttagcaacaggtctgaaagctgccatggtcttgttacagaaattccacggcttggttccactctgctgcctgtcatatggaaccaccgcttcctttcccagccctgccgcttgactaccacagtgatgagcccagagcaggacatcagttctgaaggttgcacagactaagataaatggaatttatcaggctggactgcttgcttatttcaacttgagaatttctcaaaatataaacacagagacaataatgtctactggtcaacctgagcaccaactatcctatcagcatgctaggttgcagagtgacagctggtgacttttgtgagtggcataatgacattagcctggctggaacatctccagtgctgggcttaactactcccaagccttggcaacgagaataagcaaaatcttctgagagtcttaaaagggattgctgaaaggtcaagctagtgatttt

SEQ ID NO: 53128 - DNA, 936 bp, Bovine  19866880611294
  misc_feature (1)..(1): n is a, c, g, or t
ncctggagaatcccatggacagaggagccgtgcgggttacagtcccatggggtcacaaggaagttggatatgactgaaaccgacttagcatgcatgcatatgcttcttgaattctgtacagactataaaactggcttgagatcagggttgcccagtgacttgtagatgacaaattttcagcatgtcttacttcaaaatatcattctgcttaaaatgcatgcactgacgtgtttgtctctgttctcaagttagtcacgtttgagtcttcaagaaagccattcaaatgaatcacagattatcaggttgatgtcaaccatattagggaacatgaacagccaaggtagtaataagcctcagagtgcctgcctaaaggacttaaccctaggacatgaggatattttattttccaatacttcatatgtctgctttgggatatggtgtcaagccttaactggaccatgatgtttccaaatactgacgtgtcattctgttatttctcaaggcaatgactaggctatagaatatctgcctggtagagtttctctcatgggattctggtcgctaattttattttcgctcttggggagagagatctttcagatctgtgtgaggtaatgctactcacgaaacattactttggcttctaagttggactgaaccataagcacatctttttccagtgtctggcttagaaactttgcttggtctgtcaaaaaatatgaattgagcacttggaacattgtgtaatgatattgttgcctccatccaggcataacaattctatgtagctttcttgaaataagaatgtctaaccactcttgtgtcctgatcaagacaacaatctataatgaaaattgcctaactcaggcagactatttttttaagctgcatctcatcaacagtttgatatgtttattgtttagtagggcttgccag

SEQ ID NO: 53129 - DNA, 955 bp, Bovine  19866880640597
  misc_feature (1)..(1): n is a, c, g, or t
nttatacgtatggatcctgtcaattctaaaattggatccttagactttctaacttaaaccaataatctcccttccattctaaggaatccattctaaggaaataacccaagatgtgatcaaagtttatatgcaaaggtatattgcttataataagaaacctggaaaagactaaaaatatacttgacaataaggcatggctaaatcaattctgatacatccaaatagcagaattttatgcaactatcaaaaaatattttcaaagagtaggtaatatgattgtatgtttattgtacgtttctttcattaagcaatagaaagcaattttcaacattatctgagatatttaccatgtaaattaaagaaatacatcagaatattggtatttgttacttcagatacctgaattataagtgtttaagattatttcataaattgcacttttcaatttctctactttgaatgtgtgttattactttgtagtgaggaaatggaccagtgtaactttttattattaagtttaaaaaccaaggatgtttttcattaaggaaaaatccagaatataattatataattatgaattttagagagagatgaaaagcacacaaacagaaatttggggataagttttcctaagtgagcatggcaaaatgattccagttttacaaataacttatctgcagaaaacgtagccattcatttcacagtgctatttaaaaaaggaggcattttctgtgatgtgtcaacagtagaaaaacacaaaggcatccttattatttatagctagattagtacaattcaaaggaagagtacatgttttgaaaacatcttaagggtcaaagagactatcttgatattgggttatataaattgaaatggcttgcaagagcgttgttctttcataagaaattttcatgagtagaatagatactaatccgattaatattttttaggtcag

SEQ ID NO: 53130 - DNA, 1428 bp, Bovine  19866880682851
  misc_feature (1)..(1): n is a, c, g, or t
ncagaaagatatcctgaagcctttgaatcggtggccaaagtatcaaaacttcagctgtagcatcagtccttgcaatgaatatagcctgtgagaagaaactaaaggtccttgactttgtttcatgactaaactcttattattttgtcttgtgtaactgctttcctttgtttctacattttctaacttctctgaactaaatttgctgtttaggactcagggaaggcccaggaggctaagcttttctacaaacaggaaatgtgtttgtgtgtgtgtgtgtgtcgggggttgggggctctgtccctagggaggccttgcagggtcctggtgggtttgagtttcacatgataggcatgggtcagccacatcagaaacagccctaaagactataaatctcagagacagaagttgcgagttactgatgtgttgcataaaaatattcacaggcttgcctgggaagcaggttgttctattccctgaaagacagagctgagaaaaggaagaagcagcctgagagaataagcagatgggaggaaggaactaaaagacctcaatccttgggagaaaaatagagccttcctttgcaaataccaagcaggtctattggcgccatatttccaaaggcattgtatgtggaaaatgagtagacactgactcaaggccaagcagttctctccttgctaattcaggagttatactggcttagtgccccagggcatctgctcccatccaactaggacctgcagacagtccactaactgatggttctagaaacctgtaggggactgagatgttcagcaagattctgtctagaatagatctgagtggatcaacagctaatatacctctcctgttacaggggcatagaaataaaggagaagagatacaagtaaacctaggagatatggtgagtttggttccagaccaccacagtgaagcaaaaatatcaataaagcaagtcacatacttttttcggtttcccagtgcatataaaagttaatgcttatgctatgctacagtctattaagtgtgaaatagcattatgtctaaaaaataattttaaaattcttcattgctgaaaaatgctaactatcatctgactattcaagagtcataatctttttgctgatggaaagacttacttctgtgttgatggctgctgactgatcaggtggtaattgctgaaggctgggtggctttggcaatttctttagaataagacaatgaagtttgtcacattggttaactcttcctttcacttgaatactgagaggtcattgcagtgttattcattgacctaatttcagtactgttgtgtctcaaggaatagggaggcctgctgctgctaagtcgcatcagtcgtgtctgactctgtgcgaccccatagatggcagcccaccaggcttcctctgtcccaggattctccaggca

SEQ ID NO: 53131 - DNA, 1004 bp, Bovine  19866880691458
  misc_feature (1)..(1): n is a, c, g, or t
ntgctgttttgcagtctcgggagactgattcaggctttggaatcagattgtacccagaaacaagaaacatctgtcctgcagggctattgttcctcatatctgaaaagaacaagaggctcctggtactgcttaccaacagctccctacaattagctacacagatcacaagagtataattatattcaagagcgtgtggctccccggccccgggagtctaccactgtacttcccccggcaccatggacaccaaactccagaggaatcctaagtctaagtcaggtctgtcccttggggaagcgtgtacaaggctgtcctaaactgctatctgagtgtctatgatgcgattcatggtagtttgcccagactttggaccttgggtggagtttgcaagtcatttgatgccttcagagtgtaccctgttgagcaacctgacgcaggtgaggttgactagaatgattgtgtgttctacatgctgtgacatcacgctttaagtccatttgagtcatgctttcccttggggttgtggcccatcccagtgaaaagagatttttaacaatatattcttgggaggcttaggggtgttctaagagttgctcttagaatctgaaagcatttttgtggtttgttttttcacatttggggtgtttgttttaaaaagttaaaaaaaaacacaaaaccttgttactagccttggatactttttttcctaccatattaataattttgtaggaatttggttgagttttacaccttgatttctccatcgggaagaactatgcagatgcttgttactaatgctcatgagtagagtttctagagacgaaaatgttaagagagtcagttaaaattattccagatgtgaagagttggagagatgataaagagtctgcagcaatatctcccaaaacattcaaaacaaaagtaaatgagttaagacaaaaaaaaaagtgaaagtgttagttgctcagtcgtgtccgactctttgtgaccccatggactgtacc

SEQ ID NO: 53132 - DNA, 1553 bp, Bovine  19866880773529
  misc_feature (1)..(1): n is a, c, g, or t
ncactcaggatgttcgaggacaacatgcacaggtcaattttcatcccctggatatgatgagtctctcattaagggagaggtctcccaggtgtgggtttgccagacaccatctccagacatctgcccaagactggctgggatcctggagaagcaagaaatccgggttccctctgtcttctattcttccctcagattctgctgttatctctgctgctgctgctgctgctaagtcacttcagttgtgtctgactctgtgtgaccccttagacggcagcccaccaggctccatccctgggattctccaggcaagaacactggagtgggttgccatttccttctccaatgcatgaaagtgaaaagtgaaagtgaagtcgctcagtcatgtccgactcttagcgaccccatggactgcagcccaccagctcctccatccatgggagtttccaggcaagagtactggagttgggtgccattgcctctgctttgccaatattacaagaagggttctggcaatatagatttacctgggactacttcattaggcactggcaatgtgtgtttcatttttaaacatccttaagtgagaatcagtggtgtgggcctggaaagtccttaacaacaaagcacatcagagtccagaagaagctgtacccatttcagagaatttcggcccaaggggcagcagctgaacaattctggacataatttgggatgggaatagagaagggagggagtttcagtcttgaatacagagtggacctggaaccttttaaaacagcacactctaggcatatttctgaatcttctgatataaaatattcactcaacagccttcctggagaactccaaaaagatgtgatgttccagatgtaggctcaggagggactttcttggtggtccggtggttaaaaatctgccttacaatgcaggggacacgtgtttgatccctggttggggaactaagatgccacatacttcgaggcaactattgagcccaagtgccacaactagagagaagcctgttctgcagcagagagccctctcactgcaactaagtcctgatgcagccaaataaaaatttaaaaaactaaatattaaaaaagaagaaggagcctcaggaaggtgggagttagactttccaaagggatactgatcagctttccaagggagaacagacacacctctgggcaaccaggggcttaatgattaagtccaatgggttaagaaaccatgttagtgggaaatattctggttttgtaaggaaggattggcttcccaggtggctcagtggtaaagaatctgcccacaatgcagaagacactggttcaatccctatgtcatgaagataccctggaaaaggaagtggcaacccactccagtattcttgcctgggaaattccatagacagagctgtgtggtgggctacagtccctggggtcacaaagagtaggacgtgacttagtgactaaatagcaacaaggaagaactactgctaaacgctgctcatttcttgcctcactccctagcctttcccacaaaattgaaataaatta

SEQ ID NO: 53133 - DNA, 1392 bp, Bovine  19866880791501
  misc_feature (1)..(1): n is a, c, g, or t
nattttatattggagtataacctactaacaatattgtgatagtttcaggtggacagtaaagggattcagccatacatatgcgtgtgtgcatgctaaatcgctttagtcatgtccagctctgtgcaaccctattgcactgtagcccgccaggctcctctgtccatgggattctccaggcaagaatactggagtgggtttccattccctcttccaggggatcttcctgacccagggatcaaactcacgtctcccacgtctcgtgcattggcaggcgggttctttaccagtagtgccacctgggaagctccagccgtacatatacatgtatccattctcccctaagctcccctcctatccaggctgtcacataacactgagcagagttccttgtggtatgcagtaggtctttggtggttattttaaatatggcagcatgtacatgtcgatcccaaactccctatctcttccccccatctttcccccatgacaaccataaatgtgttctctaagtctgtgagtccgtttctgtgttgtagaatgtctgctctgctgatgtattccaagtccagaacacaaagtagaagaatctgggaaaacacacctactatcattacagcaaatgctttccaagcctcggacaccctgaatgggtcctttttgcccctaagtgttctgtttaaactaacctaattaaattgcctgtctgctttcaagtcagttaattatattttctcatatattatatatctacagctatattttctttatccatgtttttatctctccgtctagagtataggtcatttatatttctttgcctacaaatagtacagtgtgtgcttttagaaggcatttataatatttattaaattagaataagtcatctgatcttagaacaagtcacatggaagagactgagaatccataatttctgtgtactctgtcttcagactaagaaaatggattcttttaagggtgaggtctcagaaatctgcctgtttccttgacttcccaaatagacttgatttttggaaatgtctttccgtttccctgtagctgagatataatatatcctgtcagatggagaccccatcatgtctgggcaaacacacctgaatttgcaggatatgggattgtcaaggagggtgaccagactcatatttcttccccttcccttatgagcttcctgacaatctaccattcacacagtcactcaggttttctgctctcttgacaaaatacaagatcataaaagaacttgggccccaccaaagagcacttgtacattttatatcaatttgaactcactgattttatgagtcctctcaactctcttggaatccttttccagtttgtttttctcaggacagatttggatctgggagactgctt

SEQ ID NO: 53134 - DNA, 807 bp, Bovine  19866880860440
  misc_feature (1)..(1): n is a, c, g, or t
naaaaattccttactagaagacgccaagtcggggacccctgtcctggaaatacggcgacttcggcgtctctggccatcagttccctgactcagggcagagtgtgggcataaacagctaccgcaaaaagcagttgtaaggctcacacgatacgcacagggaagagcacaaaaatggttgttactttttgttcagctcagttcattcacacgttcacttctgttggcagtactggaaatgcacaggaattacaggaaaattctaactattttctgaaaaactggaggtgagatgactcgggagtgacaagacatcaagtacggaggtgaccgagtcggtgagcggtgcctcgggcagtggcgacttcccaccgggacccccgccgcttgagcatccttgaccaggcgtcgacattcctcggatcccgaggccaccacgggaaggcggtgggaggaccggatccacgcgttgattggctgtttgtgagcacggggcggggcggacggaggctctggaggacgcgcgagcggaaggccgcgggcgggtacttccggtctttgtggctctctgctgcaggtccgcggctcgcgccctggccgctcctgggcttcgcggtgagggacgtgggactctaggcggagggaggatggggagggcgcttggcccgggcggcaggcgcggggtggaggattcccgctgcttcgcctgtccatccctgggtctcggcaccttgtcgtggcggcatctccgagtgtcctggggacgcaggggaggccagcaatctagcctctgctctccggcagaaaggg

SEQ ID NO: 53135 - DNA, 2259 bp, Bovine  19866881043639
  misc_feature (1)..(1): n is a, c, g, or t
ntatggctttttgcctacagtatcattgaaggaaatgttaaatttgggttctccaactgaaattaacttgtgaaaatgcaatatacttttgtccccatctaagttcatgggactcctttgaggatgaaggagctgacctgaacatgtattctacactgaattcatatttgaactttggagtgaggtgaaccttgtatgaaggaggggggaaagtaggtttcttctttaacacctactattcgcaaggctctacactagaatttttaatgtatatcatgtcattccattgtcaaaacaatgtgtagcacattaattattttatagattagaaatttgagagattgagaggcaggtgatttgcccaagttcctatgactatgatttttccatgtaggtggtagatccaggtctacctctaccccaaaggatatagaggaattactatgacctcagggcatttgggtagaaaacttgtctcctccacaagtctgtaatctccttcacaccagggttctagttgaagttgtctcagcataccccatcagcttgcagggtctcacagttgctttaaacctattatattttgatttataagcattgaaacaactgagtatattttgaatgcaaaataaatggaaaaatattttaaatgcctctattcttgccatctttagggaatagtcatataggagttgatggaggtgactataggagaatctgatctctggcaaagtcctgagtaaacttaccctatattagctacaggggttctcaggtggcgctagtggtaaagaacccacctgccaatgcaggagactcaggttctatccctgggttgggaagatcccctggaggagggcatagcaaccaactccagtaattcgtgcctggagaatcccatggacagaggagactatcgggctatggtctgtggctgctgctgctaagtcgtttcagttgtgtctgactctgtgtgatcccataggcagcagcccaccaggctcccccatccctgggattctccaggcaagaacactggagtgggttgccatttccttctccaatgcatgaaagtgaaaagtgaaagtgaagtcactcagttgtgtccaactctttgcgaccccatggactgcagcctaccaggctcctctgtccataggattttccaggcaagagtactggagtgggatgccatttccttctccaatgcatgaaagtgaaaagtgaaagtgaagtcgctcagtcgtgtccaactctctgcgaccccatggactgcagcctaccaggctcctctgtccatgggattttccaggcaagagtactggagtgggtggccactgccttctccagggctatggtctatagggtagcaaagagccagacaggactgaagtgagatagcacgcctataaacacatattagctactgaacgatattgtgaattaaaagtatgaaatgaaaaaaaaaataataaaagtcttcctggagtggcttgccatgccagtggatgtattcttggttatgagttatatacagaagctgtgcagagagcagcatccaaatctctaaattaatgataatcatacccaaaataaacagactaattaacattaactacaatgaaaacacaactactgttcaatggtcccgattgcatagtttatttagtaaaatacaagcttagaaatttctttaaatgagagaagtaatggctgttaatactaaatcttccttttttccattaaaggcctctagcatattaattacatcatcagcccatttattgattttaatgccttgcattttgctaaaaattaaattcactctacttgctttaggattccttgagacttaatacatatatgatttgggactagagaggttccactggacagttttaattaaaaaatacaatacaatgaaaaataaaactctaggttcaccaaattactttttgttcagtagggggaaaaatccagataaatcagaccttcttgcatttactttattaatgaggaaatacaatccaagccaaataaatctctttgctgagatggcaatttgttagtgctggaagttttatttcttattgattaggtaatagatataaagagactcattactcttgagtgctctgacttgaagaatgttaatatgggacaacttcagtgattttgaataattctagtagtccacttactaaggacatccatgttttattttgtgttattgtttttactataaaccttcttcaaaaa

SEQ ID NO: 53136 - DNA, 814 bp, Bovine  19866881074945
  misc_feature (1)..(1): n is a, c, g, or t
ntgtgtatctgaaactaacacaacactgtaaatcaaccatacttcaataattaaaacaaaaacaatcccaaacccactcctccttggctccagccccgaagtccagagagtgactgtttagcttgacggagcactttgaggtcatgctgaacgatgaaagacagaaagcattcgtgttcatttattcagtctgctaactaaaattttgatttttttatttttaaaaaagcacatacatgttttggggttttaaattcataattaacagtcaatagctatggccttgaaatgacttggaaacttggctcttacccaaagaatgaagaaatttgggaattcttaaaaaagttcttcgtggcattcatattcatggccatgaatgaaacataactgcaacagtctaaggccttacacatacacacggcatatatttcttcatatggtcagaaatgcaactgattataagggattacatttgcctaaatgtccatctgtttcaaacagtgggtggcttggtccctgctctgaaaataacttccatgacctgcagctcattcccatgccacaggcttggctggcctctgcagggcaccaacttctgcccagtcccctcacctccccctcaacttggctcttggtacatccacttgctcttgaccatatgccttccgtttactttcccagccccacttggccctgttccctctccccctgaccttagctctctcccatgatcctaaccatgtccagtcaggtcccagcctgcccacccagcacggccctggatccaccagggttgctgccaccatggggg

SEQ ID NO: 53137 - DNA, 1408 bp, Bovine  19866881120636
  misc_feature (1)..(1): n is a, c, g, or t
ntaaaggaagagagtctcagtatttaaaaagtattttacagtttacatgaaaggaaatagaagatattttaagatcttctgtttattatttcaaagaagaaacaatttacttattttatagtggaagtggagtgaatactttaaggattatgtgcagtgtgtaaatattctatttcaaatgcttcctgtcctatccttaccatcatcaaagtagcttctgcaaccaagtgttgtccatcctccttccaagacaactcgtggaaagcctgtcttgaaacctattcacacagtatgttgtattagacatcatgtgtattaccaggattgtctgctccttcatcagagttgtgaactccttatacatctcttttacgtttcacagtatcttttaaaaaatttttatttatttattttaattggaggctaattacgttacagtatcgtggtggtttttgcaatacattgacatgaatcagccacgggtgtacatgtgtcccccatcctgaacccccctcccactttcctccccatcccatccctctgggttgtcccagtgcaccaactttgagtgccctgtttcatgcatcgaacttggactggtcatctatttcacatatggcaatatacatgtttcagtgctattctctcaaatcattccaccctcaccttctcccatggagtccaaaagtctgttctttatatgtgtgtctcttttgctgtcttgcatacagggtcatcgttaccatctttctaatttccatatatatgcattaatatactgtattggtgtttttctttctgacttacttcactctgtataataggctccggtttcatccacctcattagaactgattcaaatgcattcttttgaatagctgagtaatattccattgtgtatatgtaccacagttttcttatccattcgtctgccgatggacatctaggttgctttcatgtctgagctattgtaaacagtgctgctatgaacattggggtacacgtgtctctttcagttgtggtttcctcagtgtgtatgcccagcagtgggattgctgggtcatatggcacatctgttttcagttttttaaggaatctccacactgttctccatagtggctgtactagtttgcatacccatcaatagtgtaagaaaggttcccttttctccacaccctctccagcatttattgtttgtagactttttgatagcaaccattctgactggtgtgaggtggtaccccattgtggttttgatttgcatttctctgataacaagtgatgttgaacatcttttcatgtatttgttagccatgtgtatgtcttctttgaagaaatgtctgtttagttctttggcccattttttgattgggtcgtttatttttctggtgttgagctgcatgagctg

SEQ ID NO: 53138 - DNA, 759 bp, Bovine  19866881253953
  misc_feature (1)..(1): n is a, c, g, or t
natccaggtggagcagtccatcagcctcctgttaaacttcctgctggcagccctttgatccgtaagctccctctgaaatgtctgtgactctctgcgtgttccgtctccccttcctcttatccttcttggtctttattccaaagaatattctggaggaaccaactgctgcttttttcttgttcagatacttatctcaatagagtttctgtgtgtgtaacataaattttaaatgctttggaaaagacttagagcgtaaaatggcaccacaggaaactggggacacttgtattttatgtgctgacctttgtttaattcatcctacgcttcctagaagctacggacacttggaagccacgtggtggcaggcctgtggagcgatttaatgaagcatgttgtggaggaggtttttaaccctctcctttgcaaatcgtctaagacagcacttctgaggtgtcataacaagaccccagagcaaacagagacgttgaacaggcttccttccttgactagtctagtaaaaatagctgtgacttgcattaaacggactggtccataatgtaccacgtaaaacaaagtgatgccatttcacgcaccgcaagtgaaacccagcctcattatcttaaacttcccctcacagacacagagaatttcagagccgtctgagatcttaaaagtcgttcttccaaacttctaattttaccggtgaaggacccaaagcacagagagattgtcatttgtccagggcaatcagcagggcca

SEQ ID NO: 53139 - DNA, 662 bp, Bovine  19866881268108
  misc_feature (1)..(1): n is a, c, g, or t
ncagaaaatatgattctgttgctgagtgtatcgatatcaagagctcaaagaagggtacctggatgggaaggacatgagtgggtgctcctgggagcatcctgcagatgcagctacatactcctgtctcctatagcaaaggagcaaaagatggcgatggctacaagcaggcacgctggcaaaaatcttaatcataggatgaaacacattgttgtctcctaattagcagaaatatcaagctgtcccttaaaagacaagttggtgatggactgcgaattagagaatcatctgattttagggcttagagctgtccagaccagacattttgcagctaggaatactgttgacttagaagggtgtgatgacatgtcacagtccattcaagatgattgaggctttgatccaagggccagtagtctggttttctatccttcccaccccctcctctgtcttcactgatagtaatttgagtaaataagcttttttaaaacattgtatgatttctgtaattaaaggtataattgcacagatgtgtccattaaatagatgtccttttttttgcttccgacccttcatcagtaccaagtaagattgtggaaagtgataattgaatacctcagtgacataggcttttctatagaagggttccctggcctggagaaaat

SEQ ID NO: 53140 - DNA, 1484 bp, Bovine  19866881278474
  misc_feature (1)..(1): n is a, c, g, or t
natatacacttctctcatatctttggatgggagaggagacctaggcattttttgcttttgtttccaaagctaaaatctgttttcattttcactaggctaagactgtgataattcaacggtccagctctagacaagcctctttgaatgttctcactgaaatgtgtccatgctcaagttcatgcaattcctttatttcctgcccctattttatttccacgtttgaacaaaacacatcttgttgaactgactgggtagcacaactgaaaagggataaaaaccttctcgggcacagtcgagtggcaaaggaaaggcaatcacttagcaaataaattatcttccagaagggtcacgagctttcaagggatgatttgcttagggctctcaaaagccaatggacccacagggctttatttctaactttgatattaacaagcagcaacagaataaagagactccttaatataaatacaaagccaagttggaaggataggaagacaggagttcaaaccgttggcctccagaatttcacagccactcgggacccaggccaccaatgacaggggcatggggagggagggtcttcctgagtctgggcctgctccgtcaaggcgggtgcacacgggggcgaaccatggcttacgggtggctcctcaacagcgtgtcaagggaacatgaggccaacagctgggaagcagtgtgagtaatggaagagaaatttccccatttctgacctcatccaagtaaaatttttaaaaagaaaattaaagaagcttgcttcattaaaagagagagagagaatgcaactggaaatcatgaaaaaagaattcaggttccatcagaaatgttttaattagcacttacgttctgtttactccagagctcataatgccaagtatctccatatcctcaattcacgctcactattggatgtgagcatgagggctccagtgacagaagatagtacgtgaaagcaaaggatcgccttcaagtagagtctatttaatttctatgtgaaggacccagacccttagcaaatccaaacgggtcctactcttaccagacagggagccacaatgagttaacagtcagctgagagagctagatcgattcttgcgattaattgctcacatagcttacttttcacaccctcccccaaagcctcatctccagtctctccagtgaggatggtatcagccttcaaagaggtggcaatggaatcaatgcgaatgagacataatggtacggtgtgcaaaaagcacgtctagtgcatttttattatttctgtcttcctctccttcttctgggaactactccttcaaaccttgtgattctaatagagcttgccaattataatattccatcctcctggacctaaagattggttcagaattaggtctgtgacccaagccaggtcactgaatagatctgtaggatttaaaaaaaattagagctgcagtgtgtatgcgtttgaggaggagttaaga

SEQ ID NO: 53141 - DNA, 784 bp, Bovine  19866881403027
  misc_feature (1)..(1): n is a, c, g, or t
ntgaacaacatgtatattatacacatgtccagctctttgcgatcccatggactgtaacccgccaggctcatctgtctatgggattttctaggcaagaatagtggagtgggttgccatttcctcttccagaagatcttctcgacctagggatgaaacccatgtctcttatgtctcctgcattggcagatgggttctttaccattagtgccaaaggacacacacatatgaaaaaattatttattattatctgaagttcaaatttaactgcatatctttatgtggtaattctactaacatagtactttaatctcagaacatatttagtgggtgatttaattttctttgctttggattgtagaagaatctttttccctagcttgctgatttttatttttgctatgaactcctttcttcaaattaattcctcagctggagccaagcatttaaaacagatcatcaggaagtttctctggtaggggaagggggacagaccccagcccactcaggctccatcctgtgttactgcttgaaatgtttaggccagactcctcatttccaaatgagaaaaggaggctgcagagaagggggactgtaaatccagtgtctttgctttgcaatgtgctgtcactgcagatagaggcaactttgcagcagaggaatgagttatgttcctcaaggtaatttacaagcttcattacagcacagagcccatttttcctgttcagaaaatgctggaacattaaagtgagattattagggtgatcccacaagggtagctaaaaag

SEQ ID NO: 53142 - DNA, 837 bp, Bovine  19866881412932
  misc_feature (1)..(1): n is a, c, g, or t
nttttccactggagtcagtggtttggttttcccttgtacagcagggtcacctccaaaactctttttaacttttgttttccttgtcactttttagaagctagtttgtaggacagctttctccccttggcatgaagttcaaatgatagctttagctttgtctggtaatcatgcctgacttctttttcccatataagcatatgatatcattttgcaggtaagtcattcactgattcatttcaacaattttatctagtgcctgtaatgtgccagcccctgtgatagtgtggggaaatgaacacagactttgaagtgtagttgattgtattaatgccaacactaaatagtgtttattaagcatctgtgtgtatatatatatttaggttcacaaatcttttttttatataagatatacagtcctaataacaaattatgatgattcattgactaatttaattcttacctaagaggaggcaaaaaatgcccaaacatacattttctgtaaagaatttaggattttaaggaaaagtacaaatgccataagaattaagttttatttccatgagtattcaataaacactctagggtgttccttcaaagtttcatacttactcatctctgcaaagagctgtcttctttctgccatggtatttcctcttttcccactatcttcaatcattctatgagacaaaataataacaatgtgtattagcctcatgctaatgaggcaagcagccatttctatacaaacacacatgctgtagtcatgcttacaaacatagacacaactattgaaaactgcatatttaaaaagaatagctttccattgacttacttaaa

SEQ ID NO: 53143 - DNA, 1494 bp, Bovine  19866881422421
  misc_feature (1)..(1): n is a, c, g, or t
ncatggattgaatgctgttcctgggggtcattaattcccagcactttcagcttactgcacacaagggcaaaatggcttcagtggtcaagagtgccctcaggcaaaggaatatagcagctgagttggtaggagcatgagtctgtttgtcattttcttcctttagagtttcaattgcacttaacaacaagaagccaatttcatcattcttaattactgttaccttcgaatcttccaaatgctggagaaaattgcatcaaccaatatatccccttccatctgtatcatgctccagttcatcctaggtgagtgtcttcttaattgggttgccacagcacatctgagatcctttcaactctactcaccaccagtaatgaggccctcactgtctgtttgctgtgtgagtcattcagttctagaatcccagcctgaggatctgctactcagaacctcttatctcactgactatcttaatttaagctttcacagaagtagattcttagaaaaagactgcagtgcaaaaagtttatttgggagatgaggcaaacctcagtaggagaactgggcagtaagacaaagagagaagacagacaataaaaaggtacatcgtctggctagataccactatgggctactaaatcccactagggggtctttgggagctctaactcacacttgagtgttatctgctcccctccagggtaagggatttggggtgtttactaattccctttcacatcagtggcgagctcctgcagagggctgctaattccttggtattgttgacctgctgcatagcggctagaaaaagcccatagggaaaggaacacaggcactggccacaggcaccagagtggtaagcgcaaggcggtattgacaaggcacttgccagcatccctgacaccactgttttccactccttaagatttttgctcagatttgatattaggtatttatgtaaaataagaatatttaaaaattttaaaaaaactaattaaaatttccagaattgccaaagcttttcaaataacaatgaggcatttccagagggctgggtagtaagtgtgatttgcaagagaagacagatttgctaaactgaagtatttagttaagctatttatttttacttctgctaataaggcttccagatgtagatgtgaaggaacagaataaacatgtttcttggatcactagaggaaggaaggaatatgagtcatgtgtgcagagacagacagcgatttgtttagcgaggcattaccactgctgggcattaatatacctgttttatttttactttttaaaatttatttttattattttatcacatatatatacatacgcacatacatatacatgtatatgtgggtgcatgctaagtcgcttcagtctgtctgaggcttacccttattgtcacctccagtagaactgctcagaaattggggaacgagtgagtcctgttgaatatgccttcaaaaagagcaatacacaaagctcaag

SEQ ID NO: 53144 - DNA, 1170 bp, Bovine  19866881452913
  misc_feature (1)..(1): n is a, c, g, or t
nattttagtggatgttcacctaagagctaagactgttaaactccaccaaccttgagtttaacatttggagaaccataaattctcatttgtgaattgttgagtcagatgaataatttcagcttgaatgtattgaagttgcacctgtagaaagttttctttttctgaaggaattagggggaaaaaagaatgactggcagagcagaaatagaattctttttctacttcagctgccttccctacacagaggaaatctggacctcaggctctcccttgcaaaatctgaaggtgtcacacatttggatgggggactaatagaggaggtgaaagagaaccacaaaccgaaatgaacttagaagtatcctggtaaaatacgggggaagatagattataagaatattctcatcagcacggatggtaaatagtaatgagctatgttgattccattggtattaatttgaagtaggtatattgttgttcagttgttaaagtcgggtctgactctttgcaaccccatggactgcagtatgtcaggctttcctgtccttcactatctccctgagtttgctcagactcatgtccattgagttagtgatgctatctaaacatctcatcctctgttgtccctgcctcctcctgccctcagtctttcccagcatcaggaccttttccagtgagtcagctctttgcatcaggtgaccaaagtattggagcctcagcttcagcatcagtccttccagtggatgttcaggactggttgcctttaggattgactggtttgatctccttgctgtccaagtgactctcaagagttttctccagcaccacagtttgaaagcatcgattcttcggtactcagccttcttaatggtctagctctcacatccgtacaagactattggaaaaaccatagctttgactgtacggacctttgtcggcaaagtgatgcatcgttattgttttattttagaaaatatcataaaacattcctaaccttgactgctccacccttactcttgctctgtcctctatctttgtttgcccacaggtccctcaacacatgtatgttcttacttcagggtttctggggactgtagttgtgtccggtggagatgcggatgtggttgaggttagagtgtgagtctagtaaataagcaaaaatcagctgctatt

SEQ ID NO: 53145 - DNA, 1074 bp, Bovine  19866881456535
  misc_feature (1)..(1): n is a, c, g, or t
ncatcttataaggagctctctcaggatctcttcccctaaccccagatttactgtgaaggtacccattcaacacttcaacaaatatccttctgtggatctactcttacaacagttcatggcactggaaggacaagaattctgctctcagaaaacctttatcttctgtggagtctcacccccaaagtgaattcctagcatttcacaattgtacaactcttacccaaagagttacactctggtgtgagttctctgatgctgcatgaggcctgatctatgcctaaaggtcttcctacattcactgcattcataaggcttttccccagtgtggatcctctgatgctgggtgagggctgagttttgattgaaggattttccacatgcattacattcataaggtttctctccagtgtgaattcgctgatgttcaataaggatagagcttctactgaaagccttaccacattcagtacattcatagcctttgtctccagtgtgaattttcttatgctgggtaagggctgagctccggctgaaagctctcccacattcaccacatccataaggcttctctccagtgtgaattctctgatgccggatgagctctgagctgcccctgaaggcttttccacattcacaacatccatagggtttttcaccactatgaattctccaatgtcgaacaaggtctgatcctcagactaaaggctttgctacaatcttgacatgcataaggtctctctccagtatgaattctctgatgtctaatcagcttggagctctggcaaaaggctttcccgcagtccaagcactcatagagcttacccccagaaagaattctcggttgtgttatagagtttgagttcaggctgaggcttcctatactttcattacattccaggaaattcttttctgtggcgatttccttggtgaagctggccagtctaaaatgtgtttcctgggaagggaactgactcagtttgttcccagacgcactgcctttcagcttctcaaaattgtccagacctcctaaagcttcttcaagtatctgtccgaaggagtttccccagggagtcg

SEQ ID NO: 53146 - DNA, 902 bp, Bovine  19866881491322
  misc_feature (1)..(1): n is a, c, g, or t
ntcctctgtcaatggacaggttgtttccaagtcttggcagttgtgcataatgctgctatgaaactaggatgcctgtacctttttgaattagtgttcgttttttcctgatgtatacccaggagtgtttatgtctctcatctagtatcttaaccactcttccagcaactttttgtcttgaaacactccacgcacccaccctgcattggtatcacaggaacctcatttcatagctcactttaaaattctgattgttcatctcctagtttttgacctttggaatttatattatgttgagagaatgcaaaatggaagcctacagttcacataggcaaaaacggaaattatgcgctttcgccttatagcatgtatcagagacatggctcctaaacatgtttttgttagatacatccccaaagataacttattttaatggaaataactcattactgcggtaaagatgaaacagggttttataggccaccaagaaataatttcttagtaggttactgagaagaaaaaaaaaatacgtgtacattttcagtgtcatgtctccccagcctaattaggatcttactcacttgaaccaggacgcacttatttaaagcatttttttttttctaaaggatccaaaggtggtgataggtgcataggatggtcaacctgatgactgcttttcgtgatagatgcttttgtgtaattatctcataaaggaaatgtaatgagagctcagtctttctgactgagacctcatttgctttgagcaggtaaatgtgccaaagagccaggtttgttccatgacttgaaacagaagaggaatagggtgagaggcttgaaaatgaagagtacgcgttgtaagtttttagtgtacattggcacaagtctgtgaaccgagggatctcatg

SEQ ID NO: 53147 - DNA, 1641 bp, Bovine  19866881966073
  misc_feature (1)..(1): n is a, c, g, or t
ntgttaatagccaagaaagtcagggatctagggaggaacagagtggctgagggtcactggcgaggcttaagcacactacccagtaatcaccctcatgatgggagcgtgggtcctgccctacctggcaccgggtgttactgatgtgtccagggcaagcaaaaaaactgcccgggaaccactgaagtgtcacctgcacggaactacttattgtgcctcttcaccagagctgtctgaaaagaaggaaactcagtgagtgcgacaggcttgggaggggacatgccgggaagcacaaagctgcgtatagcacgaccacgccctgcgaccaggtgtgggaggatgtcaccgcagagaaccaggccggattccagcctgagagaatcgggctgtcgccgaggtgcagagcaagcaggagagagaagaaagggagaccaagccccacagaacagctgtccacttctgcagtgtccgcaacaacctcaaaaatacaagcaatccttttcacgtgtaactcgataaataccactctgccgccaaagatctgagaagactccttttggtggaaagcttcaaagctagaatttagaattcatatttcatcagttaataaagaaatgtcaaagctttatgagacataattcagaaatttatttgaagctttttcaattaagaggaaaggggggggcacacttgtttgtgttttgttgcacctgctaagtcaaataacaagtgaaagaaaatctaaagttagaaaccaagtaaagtgaatgatccagggagggaaaccatctttcaaaggggcggtggggggggtggggggagaaaaagatttggaaagatactaagaaaatgtgcaaatattagttttaaaaaaataaggaatgcttttaattcattcatgtttcctctatttatgaattgccacggtttagcgaaggtcaatgacaaggagggccatcgtactgaagagggggaattccttattccagaaggtattgggagtcagatttttctgtgctgtctttccagtgtcaacaccagacttcagaagcagggttctcccttgggcttacactcctatactaaggtcgtcactgcaggccttccagcaattgtgtggcacgcccagggctgcacaccctgaagtcattctttaggatccctagcgtggatgacagggctggggctaaaacccacataaagagacaggaaggacctgtgcctgtgcagaccccctctgactgcagacccccgatgacagcttttggggagagtggctgcccaccaaagaggaccctgagaaagaaaacagcatgagaacctgggtgggggcagggggtagggacacgcagtaggagggccacgtcgtgatggtgttctccttgagtgaatgtcttccaaaactaacaacatattgtgtggctgtctaacatgctgatggatgaacactgctaggccctgaagtcctagttttgattccttttttcttccctttcatttgtgagtggagggagagcttatgtaatttttacaaaaagaattctactgtatatcctctggtgaagggctcatttgagatccatcagtgtcagtactttcagctgatatttaacaaatcttgaataaattaaggcccttgctgcg

SEQ ID NO: 53148 - DNA, 1713 bp, Bovine  19866880385520
  misc_feature (1)..(1): n is a, c, g, or t
natgattcttttttttttaaaagaaagcattttctttttttaattatttatttttaattggagggtaattgctttacaatgttgtgttggtttctgctgtgcaacagtgtgaatcagccatcagtatacatgtatctcctccctcttgggcctaaaagaaagcatttgctttcagagaatacaagtgtctgatcttgttatgttgcctagaaatgataaaatgcagattttgttttgcgcctacctactattgatcagaagaactggagaggggtttagaattttcttcacaaaaagaaaaacagaaaaactgaagtagtgtagttactggagggagcccctgctatttgggaaaaagttaatcagtcagtcctttcctaagcaagaaacaatatgactaatccttttctcttgccattatagttatcagaatggcagtttctccattaaggtaggaaatagaacctgggtagactagctgtgctcagcatcttgccatctcaccaagcgtaaacgctgaacaagaaaacctgttaaaaacacaatctgtaggatttaaagtctgcttcagaacagaggcgtcagagatttcgctgcctggccctgtagtgtcctcacagggcccagctgccaactgagggagtcgggaagagagagctgccccttagacctaggtactgctttaaaagaggtgaaaagagaagacagggagggaggaagtggggccattaatgtgaaggcctagttctgtaaggtacctacattttgctcactgtgtttctttaaagtttccatttcttgaattctgtttacttgtattagactagttttgactgcatttagctcctttggtcaagttctatttgataaagacacttaaattataaaattattaaaaatagacaagcacaatcctttctctgttaagcttatgaaaaatctgaaaagaactatcaaagagttatcaaggaagttctcacatttgaagagatcagactcataattaacctcttcatgggtagaaacggaaacaaaaattaaaatatggtaatgtcctcattcatcaggaggtctgatttctacaaaacttagatacccaggacacatttatacttcctttgtctagggattgagacactagcacagtgtggaatattgttaattcttcataagtactactgaaggattttgttaaattagtgaaaaaggctatgagtggccacagcaccataaggaaaaccatatgtgtttgatagtagaggcatgtgagactgacctcagacccatcccctggcagctgagcctgtagtaataagacccctgaccagaggctgtcaccgttacaagccaagggcagtggcagctgtctgtgaaggtgggagaacttttttttgatacgaaaagtaaatggaagggatagagcaggggtccccaacctctgggccgtggactggtacctcctgtcagatcagtggtggcattagattagaaataaagtaagccagaaagaaaaacaccaatacagtataataacacatatatatatggaatttagaaagatggtaacgataaccctgtatgcgagacagcaaaagagacacagatgtatagaacagccttttggactctgtgggagagggtgagggtgggatgatttgggagaatggcattaaacatgtatattatcatatgtaaacaaatcgccagtccagg

SEQ ID NO: 53149 - DNA, 1330 bp, Bovine  19866880450742
  misc_feature (1)..(1): n is a, c, g, or t
ntaataagcttaaagagcgtttggcaagagaaaatgcttataaaacaacattaagtaagaaaaggacaacttatgtatactatgattccaattttataaaaatagaaatacttctttgtgtgtatatatatgtatgcacagaaaaaatgccaaaggaaaattatcaaatcttgatgctagagttttttaaattgcttcatagcttgattatgagtgttttcaattttttcttttatacttttttatattctctaaattttctaccataaacatatattacctatttcttgaacttttaaatttgaaatatttcatatgtaggaaagaatatacatgatgaaaacatgtagtctatttagaataataaaatgaatacccatttactcacccctcagcctgagcagttgatatcctgatacagaatatgtacataggaaggaatcgctggatcataggatagtcacattttcagctctaatggttaatgcattattattttccaaagtaattctaacagtgtaaactcctacatgcagtgtgtaacaattcttatttctttttttacacatttaccaacatttggtttttgtgttcctttttaatcagaaaaaaaaaaacccaaaaacaatggcttaaatgaatacatacctcataggaaaaccaaccttggaaccttccattaaaagatgtcaattgtgtgaatgtcctcaatagtgtgtggatgtcatgtctttgcaggtacgccaacagcagcctcataaagtacatggagaaacacaaggtcaagcctgacagcaaagtattccttttggtaggtgcatctctccagagtgggaaggtgatccttagcatagctctcaccccaccccacttaccgtgaaattgtcccagctctttctcctcttcaggaaaaaaagaaactggtggatgttggggcaaaattaaatctttttcctttgagacatcacccttgacttttagccttgtttccagtggtttaccagtaagggaaaaaaaaattctaaaacagctttactgctaatcatttctgtcagtttcacataaatgtgtgtggtgtatgaataagctagcacttgatgttaattctgttagacattaacaccgtcagaacattgacctggaagcaaactcatgtgctgtcaatttcttatgtgttgctctagcttcagaagctcctcacgatggatccaacgaagaggattacctccgagcaggctctgcaggatccctattttcaggaggaccccttgccgacattagagtatgtgtccttccttttctgtgcactttgctccaggttgagggtgtg

SEQ ID NO: 53150 - DNA, 845 bp, Bovine  19866880516092
  misc_feature (1)..(1): n is a, c, g, or t
ncagggagactggttgggaggccactgtaatagtccagacgagtgggttaagtggcttagtggcaccaagaaaaggtgaatggtggtgacaagtgtttggaatgaggtacactttggaggtaaagtaacatgacctgctgatgtttagacatagaatatgagaggaaaagaaaagtcaaagaagatcccaaaagtttggggcccaaacaactaaagagattaaaggtatcatcactaagatactgatttctgggggatgagcagcttaagggagaagatcaatattatgaaatctgttttgaaaatattaaggttgcccatcagacttccccagtggagatgtcaagaagttggagttcaggtaaaagctcggcaccagagatattgacttgtgagtcgtcagtgtatggatgcgattcataaggatgatatctaaaaccaagataccaagacaaagtgagtgcagagagagaagaggttcatggctcttcttagagcattccagtattagaaattggaaagatgaacaagatctagagaaggatattgtgaaggaatagtcatcaagatgggaggtgacctggtttccagttcaataaatactgctggtaatgatccagaaatatcaagacttacaattgactacaggattgacaaagtggagctcactaatgtgggaaaaagcttgacaggattggtatcaagagagaaagggagaagaactgaagactcctggaggaatttttccttaaaagggagcaggagaaaaaagggacattagcctgaagggatgtgagaccaagtgaggatgctaaaatcaagatatcacaaccctcttataaaaa

SEQ ID NO: 53151 - DNA, 842 bp, Bovine  19866880559412
  misc_feature (1)..(1): n is a, c, g, or t
nattgtgggcagattctttatcatctgagtcatcaggatagaggacattaaagcagcagcaagtttgggtgggtgaaaactgaatcctggtgatatcaggttttagtactactggatatgcaggtagtgccatcacaaataaaatgtgttgaactatcctatttagaaaaaatataaaattttatgaaaaaagagttgagattaatcttcattaaagctacagttcatggggctgccaagagttggacaggactgagcgactaacacactaacaccacatcctatttagaagaaatatacaattttatgaaaaaagagttgagattaatcttcagcaaaggattctgataaatgattcaaacatgaatatgacctcaaaaatataactcacataggctatattaagtagcaaattaaaatctaaaaccatttatgaaggagggtttgacctagaacttcatgtacccaagaattattttcatacatgctgattcacaggtaatagtaaagcagatacgtggaacgcaatgagaacctcagtttaaaattatgaggtgaaatgcttctgttgaaatggtaaatgcagctctgtgctgccatttggccccaatttaacttaaatgccatatcacgagatgctcaagtcagaagactaggtctaagtggcaaggtaccattcctttctataataaatacttcctctcaattataagaactgagtcgacttagatttatccctactatatccctagaatctccaaaagcctaagcaaaataaaacttccaattagaaactcatgggtattacagctattcagcacccatatttcttaagaacaaac

SEQ ID NO: 53152 - DNA, 2093 bp, Bovine  19866880610782
  misc_feature (1)..(1): n is a, c, g, or t
naaaatgatctgcttgacaatttcagaagggctgtgcaggtcaatgagtcgcttgtggatcctcatctggaatctatcccaagtcttagaaccttcactgcaaggagttttccttgtagttattctcagagtcttggtaggcatccgaacaggtcctttcacttagagattcttttccttcgtgcctctgatcagatcagcacacaaccttctccagagacttcacgttgcagctggtgagggtgatcctaatctggtgaatggccaccactggctccacgggagtcttgccggtatctttaaaggccatggtgcggcgcggcttcctgactgccttgttcctcggccagagcgaacagcagtgagtcaggagcaggagaaggtggcatcgagctccactgcagaggcaactgcatcttcctcaaagagcctgtctttttgatccaagccaccttagcaggtgtgaagtgatatctcactgtggttttgattagcttgtccgtcttgggagagtaaatagcttgtctctccttttgagctggaaggtcaggtacctggcggcaaaggcaggtgaagattggcgagatggagactgggaccaacttattggggcatgtgaggcccttagcacgtactagagatttcatttaagagagagtagaaaccatccaagtttttaggtgtgaaaataaaaaaattgggtaaagttgtgtaatttgaaactgaaaatttagaaagtaggctttacggagcaattgctggggttggaccttgatgaaaacttttcacgtttacatcatttaatcctccaggcagaagacttggttaggttatgatgtgctgccgaggccacacagccgatcagtggcatttaggagactaaaatgcaggtctttctgagtgcaaagggcctttctttgatctcacaagtgcatcggcatttcttaccttggcctggaaccaaccttgcgacccaccgtgatctactttcttgccttgagagctcccttccggccgagcctctgccgtgcttccatcacatgctggtgtgaggatcagtgtctctggtgcagagtgagcagccagctgcgggcagagatggggccggccgtccccacagttcctttcagcttcaggactctgagccctccttgccctcacaccagggaaacccagactgggaaggcatcagtaagctgcagcagacagtcagcacctacaaaggtgttgcacagcactgctcagcgtggccaggaggaaacctttgtgttagagctgctcaggtctcctgtgtacgcgggacagccaagtgaggatagtgtttgaatttttaatatttaaatctgtgttttgaataggtaatgcattccccttgttctgaattcagatagtacagaggagcgtgcagtgagaagacctcttctttcccatccatcccctccccgctgtagcagtcagcctttccagcttagtgtctgctcttccaaaactaatttatacagcagatatatctacttatttatccagttatttccctctttttacatagatgatagtctaatcagatttactctttggcatctctcacaaaggaccccaagttctaaagaattagttgttatttctgttgagagatttgttgcagttgaaaaacatatacacatctcagagttgaagagatagttttctttctttccctttcccaaaactcagtttgccattttgtaataaactttcgatcagaattgaaaactgagcacagttcatggagtgtatgttcttagtcctggctgtgtgtgttttgcttttagtgtgtttttattgaggtatagttggtatattagtatcaggtgtacaacataatgattcaacattcgtatacactatgacatgatcatcataataagtctagttagggatgatttagtcttaaatcttgtcttaagaattgctgttgtgaagtctgacaactgctacaaaggaggtgaggtgtgactggtgtctggggttcagtttcagtgatcatcttgtgtccatactaattgaccatttcctcccttaacttgccaagaaatatcacccagacacgaata

SEQ ID NO: 53153 - DNA, 1408 bp, Bovine  19866880981715
  misc_feature (1)..(1): n is a, c, g, or t
ntaatacctaacctaattgcagtttcagcccctcccaggaatgtactcttccccagtcggtctgcaatctctgctcagcacttgagaagtaatctacctggtagactcctgtggtccccagaggaaggtgccctggcctgacatgatcagctctctgctaaagtaacatccggtcccacctccttctacctatagaagtccagaagtctttcatcttgtacagctcttcagagcctttttctatatgctatatgagctgctacctgatacatgaatcactgaatgcagccaatgaacctttaaaatttgctcagttgcattctgttttctgacggtatgtcaacatgaaaaagtacagcattgaggggagtacctgataatctgagggcataacaggcccgcccgagtttgtgcctgaaggccccagccgcggtttcttgttgggaggcacctggttaaggcccggagtcctggctatgctgcagccctgctccggccggaccggcccctgcacctcccgcagtcccgttggtctgggtgctgttctgctgctgtgggggtgcctgcgggggggcagccgcctgctgtggaggggctgtgggctgctgatgttggttctgctgctgttgctggttcttatgaaaagagaaaaaaatggcaagcttggtatggaacgaaatcacgcctgtcattgtaggatatgcatatgagactgtcagccaacctggggagaaacctatgtgggacaccaaagtgactggcatgcctggagaatggagcagccagggactacagcacccccacaggtgagtacagagccccaaagaggactcgttctctgaagttcatttagattgcacagtaatccttcctgtcagggacagacatcccactgaagacgcaggcccagaggaaagagcaactccttaaaacagctccaacagtcttttcagtcaatttggaaaaagaagggctgtgtggggaggagtcagtacaatcaaagcaaagcacagagagatgctttaaaagcagcctgcataaaatgatggcaatgacactgaacaaacaaaagcaagaatcaagaatcggggaataaaatagactgtaaaacaaatcaggaagttcatttatctgtgaatgcatatttcaaactgcagagtacaataaagtaaatacacaattaaataaaatgcagttaaatatataggaatgactacatttatccttccctaagtgcagtttataccttgtcacctttttcttcaggttcatcttcattaaggaattctcgtttggggtatggaatctggcagccagcaaacacactacaaatcattgaaggaaaaaaaaaaaaatacaagtcatgacctaaaatctataatatgattgaccttgtgcatttaaaatt

SEQ ID NO: 53154 - DNA, 1370 bp, Bovine  19866881254190
  misc_feature (1)..(1): n is a, c, g, or t
nacctaacagctaacatccacgattccaggaattccagaaaatgcacactaaaatctaggtttggaatcaagtgaaaaacccgaccaactgtttgaatgaaatgattttcagacattggacagcaggcagtacacgacagtgatttgtgagggagcgggggcaatgaggattacccctagcttactgcctggagagaatttcaggccatagcattcggaaagggaatattggtggaacccagaagtattcattaatagggaagatggtgtttgggatcccaaggagactagtgaagttagaattcacagagtggaatattggagaagacagctacacagagaatgcctggagttctacagaactcctttgagtcttcatatgtatactgagcagtggatgcatataagggaactacatgaggccagggaaagaattatccaaaaggattagagggaacaatccctagagatcacaaaggacagggaatgcagccctttcccaccaaccagggttgaaaatcttataattagtggggcactgagtaaagtacttagaagggtattgcctcagttgtggggccttagactaaacctgttctggtccttttaagcttaaaagaaagacttgaaaggatcaaactatttccaagtaacttatgatgtgccagaacaacactcaagaatattttaaaatactggatttcccaggtggcatagtggataagaatccacctgtcaatgcaggaaacatgggttcaatatctggtctgggaagattccacttgcccaccacaactactgagcctgtgtgctgaactactgaagcacgtgtgcctagaacctatgctccaccacaagagacgccactaccaaagccttgcattgcaacaggagagcagcccctgcttgctgtaacaagagaaaagcccacacagagcaacaaaaacccagcatagccaaaaataaaataaaacgaatatttaaaaaatattgaacaaggtaaaattcaaacaagggaaatctgaaaaaaattaaaccaaggcgcatcatactcaaatctctcaaaaccagtgataaaaagagaatctaaaaatggaggaaatttttatgacataaaaagaggaacaaagataaggatgatatgagaattcttgtcagaaacaaagcaagtaacaagacaggaagaacaataatctttggaagtacagaaagaaaaatattgtcaacctataattctatacccagcaaaagtatctttcaaaaaaatgaatgcaaaagaaagactttttaagacaaaaactgaaataattgatccccagtagacctgtacgataagaaatgttagagaaagtccttcagtttgacataaa

SEQ ID NO: 53155 - DNA, 2688 bp, Bovine  19866881509066
  misc_feature (1)..(1): n is a, c, g, or t
naatacaattagatcctgaatacagcgtggttttaatgtgtactgctgagcttgcagatagcaaagatacccttgagagtctaaagaagtgagccatgagctgcgatcatgcttaagcaggaggtgggaagcacatggcaaaataaacactaagccttagacacatcacaagggtcaaaggccaaactaagtctcctgctttaagccctgacccttgaagggggctgcttggccttctaggtcttggaggaagcaaagggagacctctgctggagtcaacgcctccaagggaggctcttaggaggcccacaggtggagcaaagtgagtttcaaatcaaagacggccaaacaccaaggaaaagagccaccacaggaaagacaaagcagaagcaacaagcaatgcatttatactcctaggattttggtattggaattattaaatgcaaagtttaaaatactgcatatgatttaaagaaaaccaggatggaatcattaagtgtgttcaagtacggagaaactgtgaaatttgtctttcccaagcagatttgaaaaagagccaagtaaaacatttataaatgaaaaatataattatagaaattaggaactcaatggctagattaaacagtaggccacccactccagtattcttgcctgggaaatcccctgcacagaggagcctggcaggctacagtccatgggcctgcaaaagagtctaactaaatagcaacaaagacactgttcaaaagagaatcagttaactagcgtgtctgaagaaattgctcagaatatagtacagagagacaggaagatagaagatatgaaagaggggttaagacttgggagagaggctgagatttaatatattgatcatgagagtcccagaaaagactagagagaatagatgaccaggcaatatccaaagggataaaggacaagaagctccactggtgagcagtatcaatccacagaaagtatcatgtataccttgcaggatcaatttttaaaatctgtacccaggcacattgtagtaaaattgcagcatgctaagctcaaaaaggaagatcttaaaggcaagaaacagaaaaaaaagagacaaatcatctacaaagaaataattcggttgtcagccaacatctttgtacagcaacaaaacccagaaaactagaacagtatcttcaaagtgacaagagaatataactgagaaatgcatgtacagcaaaagtattttttaagaatggatgtgaaatcatcttcagataagcattatatatgaacctcatatggtgagcgcttatgcctaagctccttttggggcacccttccaggaatgcttttttgtgaggaaaaaaaagatttaagtatgaggttaacatttacttagctgtgtgacaaagagggtttttcgtgttccttgactctctgggaattcaggaaacaattgagttattggtggtttaaaatgtcagagagcaataatcgcaatgtgcttcccactctcaattacttcaagtattgtctgattctgaggctattcttgagaactaaaatgtttttctagtatatattgtgtagtttccacgtgttcagtatgactaatgcattagtcacaagttacaatatgagagacccaagaaaaaggcaaccttggtctctggaaggactttcttctcagtgtgtcccactccagccagctatcgccccttgttactgatacccaggtctcttgctggcaggagttgctccctgagtaagccaagcatctgttgcttcctgaagcctttacttcagtaaaagctccatcctccttcatgagcagatattcccccgtatttctctcctctgttcctgtaatctgttgtctaccagtgggaaaatgtgtgagcccagctgttagagaaaggagaaagggagagacaggaggaaaaattacataacattgatgcaacttgcacaaagatatttctgtactttttgtaacatggaaaagcaggaaccaacccaagtgtccaatgcgggaacacgctgaacaaatcttagcatataaaaagatgaaatattatattgccatgactgataataagcacaagagtatgtggacagtggctacatgggactacacaaaagtgtttaatgtcaaactggtgaacatagaacacagatttggttgtgttcaaggattacaactatgtaagaatcagggacttccctggtggctcagacggtaaagcgtctgtctacaatgcgggagatccgggtttaatccctgggtcgggaagatccccgggagaaggaaatggcaatccactccagtactattgcctggaaaatcccatggacagaggagcctgataggctacagtctgtggggtcgcaaagagccggacacgactgagcaacttcactttcactttcaagaatcatgcagatatagaactaagagttcaaagaggatacagagctttgtaacttagcggtaaatatctttacttaagcattagtatttactgtgcaagtgtttttatgtttttgtttcttccgtgcttcttaaaggaggttacatttttattttaaagggtggactaaaaaatacattgaatgtattaatactagagtccaaacaggagacagaaatcacacagcgacttctacaaagaaagtttaccataaaggattattgaaagggaattg

SEQ ID NO: 53156 - DNA, 1183 bp, Bovine  19866880121288
  misc_feature (1)..(1): n is a, c, g, or t
nctgctgctaagtcgcatcagtcgtgtccgactctgtgcgaccccagtagacggcagcccaccaggctcccccgtccctgggattctccaggcaagaacactggagtgggttgccatttccttctccaatgcatgaaagtgaaaagtgaaagtgaagtcgctcagtcgtgtccgactctagcgaccccatggactgcagcctaccaggctcctctgtccatggagctttccaggcaagagtactggagtggggtgccattgccttctccgcattcatttactagaagcaagcaaagaggtggtggtttgcggtactacttgttcactgaaaaatgtgtgcgaagatttctgaacggtgaaggacgtttaggctcttcactgccctgggttgttaacaaacgaagtcttgaaggcacctcatttgccctcccctcacccacaaccacccagcccgagctgtgactgcctcccctccccccttcctccgtcgaagcctgtatcccgcctcactatttttgcttcacttgttgctcatcactgtgggaggaaactgggccttcaattagtgcgcattcctgaagcccgcggttgccgtggttacccgggccggagccgggcagctgggtcagctcgcctggcgcattgtagtcggtgcacccgggcggcggtaaacgcgctaagctggtgcgcgtgagggcggggacggggccggcggacgggaggcactgggggcccgcgggacagtgggcgtcgccgaaaatcggctcagctctggaaaaaaagaatggcagcccttgaaagccggtcaggagacagtgacggcatttttctccagagccagctgctgctattcgagtctgccggttttcgttcacagggggatagtgcctctgagttcgctctgggaaatgccccatgctcaagcccctcgcactgagagggggctgaccatggaggaaagggcagagctctgaccatctaaggcctatcaagctgtgtgccccttgcggtcagcctcggacctcctgggcttttttggttaaggaaactagccattttgatacctttgcatctgtggtatctgtgctggcctgatggatggagcacagtgagctcaggaaatcacactgggcaccaagaaactcaatttccttcttccaataaatcccaccctcctctatgt

SEQ ID NO: 53157 - DNA, 1067 bp, Bovine  19866880381026
  misc_feature (1)..(1): n is a, c, g, or t
ntctttgccgccccatgaatcgcagcatgctaggcctccctgtccatcaacaactcctggagtttacccaaactcatgtgcatcaagtcagtgatgccatccaaccatctcatcctctgtcgtccccttctcctcctgcccccaatccctcccagcatcagggtcttttccaatgagtcaacgcatgaggtggccaaagtattggagtttcagcttcagcatccctccttccaaggaacacccaggaccgatctcctttaggatggactggttggatctccttgcaatccaagggactctcaagagtcttctccaacaccacagttcaaaaatcttaggggttcacaaatacaacattttacttctcactcttattacacgtaagctgtgattagttgtggcggtgctctgtgtatctcctttattctgggatctaggctgaaggagcagcccctacctggataccgcagcacctttcccaaggcagaggagaaaaaacagcaatggaagagttatgagatggctcttaaaactttactcagtcacagcatacatcacttcccctgagagcacatttggccaaagaatgtcacaaaccaagcctgggtcagtggtttgggaaagtgtcatctcacagggaggttggttcagtgactaactggaaatgtatgatagcaatcctcaacagtatttgattgtattcctcccctactgagatattttggaatgaagtaggagtgagaatctgagagctttggatgacagctacaaggcttcatgtctgacagcaaagttccacatggacataaaacaaagagacagcagtaacaacgacaaagccccaggaatgcctgactctaggaaacagggcttttacatccccctcttaagaaacgttcagctgaactcgacagaagctaacagaggaggaagaatgggttggatccctttgctcctgtctttatttacagcaaaggacagaacactttgtcaccttggaaaccaccaacaaaggcagtgtgtaaagctataagaaatccctgtcggctctcaaagaggtggctggg

SEQ ID NO: 53158 - DNA, 1865 bp, Bovine  19866880498704
  misc_feature (1)..(1): n is a, c, g, or t
nccattgttctttgcatttcttcaagcttcttttactgcttaaggtcaaactttgtagtagatgttaaaagtgctcagcacaaagggaaaaaaaggcgagaaaaaatgactactatgtgtagtgatgaacgttttaactaaacttgtgattattttgcagggtatgcatatatcaaatctttatatggtatacacctaaaactaatacagagttataagtcaattattgatcaataattaattttagaaataaaaattttaaaaatcaggatttataactaaataaactctttagggtttgtggaatgctagaatcacacattcttaacagccaagaaaacaaaatgttattgctatgagtaggtttattttatatatgtcttttaggtgagtgaaacagaaatggatgttgcaaagaattcgttattcattcgacaccctgagatgaaaacctggccatccagccataattggttcttcgctaagttgaatataaccaatatctgggtcctggactactttggtggaccgaaaatagtgacacctgcagaatattataacgccacatctcagtaagcatttacacaccttccatctttctaatattgcagcccttatcagtggtcctcaatcttctaaagcaaaggggtcttaaccatttcctgtaccatggatcattttggcaagctggtaaggcctacgactcccctaggaatagtatttttaatacgtaaagtacataagattacaaaagaaaccaactatatggaaatacatttataaaaatattttataaaatgtggggtatataaaatataggatatatagtaatatgttggctttttaatgaatacattaaatagtaagttccagtagagagtccataacctttctgtactttcagagtagtaagaactgaatattttaagacatcagcagcaacagtgccgtgatatgaaagtatctgtaatttctatatttcttttagtggccatcacaggtacactgtgaccacttagtttattgcctacattcatcattaaagagaataatacgtttcagttagaacttaatgagaatgaaaacctctttccatcccagtttttccccatcacagacaccctgaactctatctacaagctaggacatcaggtggagactatatattttttttttgcctgcgccccatggcttgcagtatcttagttcccttatcagggtttgaacctgggccacaacagagaaagagctgagtcctaaccactgggaaaccaagaattcccaagaccctatcttaggtctgtgcttgtggagcctagttctgacccatgatggcattttctcatgagagtcagacccgggtaatttacccaacatgaaggattcacatgcagtctgagcatgtgacccagatcctcaggccctggtcctgttgtgcctgtgggagtgtgtggtatatcctgccaggaaatggacatttggagggaaggagcaatcagagagaatgaaagagaagaacataacctgaagatgggaaagggtgggaaagaagggtgtgatcaagttttttgaaattaggttagggttcaaatgaaggaatagaagggactggtacttttcccaggcagcacgggtcacgctggcctgtcgggcagcctcaaggcctcgcggatggtgatgacagtaaccagcagcaataacagcggtagcagtggcgtctggtgggcattgttggctggtgctaactggcggcttcccatgtctgaactcactcaactctcaccgcagtcctatgagttaggtagtcattttttcttttcttttttttttctggatgaagagctgatgcacagaaaagtcagaaa

SEQ ID NO: 53159 - DNA, 1550 bp, Bovine  19866880511055
  misc_feature (1)..(1): n is a, c, g, or t
ncagctgagtggttcaaacaacagggtttactttgggtgttcctgtttcttaatcccttactcattaaggccagccaactgtatgtatctgtttcattgtttaaacatgaagggatattttttttttttttaacatgaagggatattaatgcttcctggaatctaaagaacattatatgcagtaattagttcatgtttcaaattgtttcacatttatcagtatcattattttgaaatagactccttcaaagagtcagagaaaactatatgtcaaaaatacaaagcttacaacttgtcttcttactcatttactcccctcagaaagtgggaagttccctgccctgtgggacttacttattcagaagtgtttgttgagctttcactggatacagttccctgttgggtattatctgagaagagaaagaagttagaggctttttcatgccctacaggaggatctatttgtttgaaagggtctctggagtagacagaaacattcttaacaatgcatatttctgataatgtatttgtccatggcttactaatggatctgatagatcactaatcctgaaaggaaagattctggagttcatatctaatactgactcttcaaatacattgggtgaccccctcagcttatagtgtctgagatctctagagaaccaaagacagaagaatattctttagatggtccttgcattcacatgttattgccatcatggccaaatgactttacaatagtaaaggtggttgaagatttaattcacatcctcatttccaataaaacttttgtggctaggatcagttcaaaatttttttaatttgttttttaatttctataaaacaacttaacaaaactaacaatgttaataggcattttcagtgtggtaaagaatgataagtaatccctagttttagcttcatgttactattaacagtagttagatccccttcatagatcacaacctttttgtggcaaagggctttgcataactcaatgaggctatgagtcatgttatgcagggccactcaagatggacgggtcatagtgaagagttctaacaaaccatggtccactggagaaggaaatggcaacccactccagtattcttgcctggagaaccccatggacattatgaaaagacaaatatatatgacagcaaaagatgagctccccatgtcagaaggtgtccaatatgctactggggaagaacagagggcaattaccaatagctccaggaagaatgaagtggctgggccaaagtggaaacaacactcagttgtgaatgtgtctggtggtgaaagtaaagttcagtgctgtaaagaacagtattgcataggaacaatatttcataggaatgttagatccatgaatcaaggtaattggatatggtcaagcaggagacggcaagattgaacgttaacatcttaggaatcagtgaactaaaatagacaggaatgggagaatttaattcagaagaccattatatctactattgtgggcaagaatcccttagaagaaaggagtagctctcaagtcaacaaaagag

SEQ ID NO: 53160 - DNA, 2564 bp, Bovine  19866880514150
  misc_feature (1)..(1): n is a, c, g, or t
ntgatcacggagggaggagggttcgggatggggaacacatgtatacctgtggcggattcattttgatatttggcaaaactaatacaattatgtaaagtttaaaaataaaataaaagtagaaaaaaaaaaaagtgatcacacattggtatgtatatacaatggactattactcaaccataaaaaagaatgaaatattaccatttacaacaacatggatggacctagagaatattatatttagtaaataagccaaacaaagacaactactgtatgataccacttatatgtggaatccaaaaaataatacaaatgaatctgtattcatttagaaacagaaacacagacatagaaaaaaaaaaaaaaacttacagttaccaaaaatgggagagggagggagggacgtattaggagtatgagtttaataaatacaaaaaatacaaattactactatacatagataagcaacaaagacctgctgtatcgtacagagaattatattcaacatcttgtaatactctgtagtgaaatacaatctgaaaaaatgtatttataactgaatcactttgctatatccctgaaaccaacaaaatattgtaaatccattatactttgattttttttaaatgaccacctttttatacattaaaaaaattgagctattaattttaacttacatgctttgtgctgcggtttccctttggaggttttgacttttgagtcacagaatcataaactgtgagagctgtaaggaatcatagagatcccctaaactgtggttctcactgtagatgtgaacaaaattcaggtctttcgcaaagacaaacctgtaactcccagctttgaacagtctgatttcgttgttctacatatggcctcagcatctgtaatcttactgagtcccacaggtgagagaacctgtggtctgttcccttcgtagaacacagagtggaaagaaactcagagatgtctctgacatgctcagggtcattaaactattaaatgaccgaatcttgtttaaactttaattagtttaaaagtgtttcattgtttggtttgaggggaaggagaggaataccagtgaaataaaatgagaggtcatttgcaagataaacatttaacagtcaataatttccatgttttcttcctttcatccttagagttaataaataaaagagcaagcaaaaccaaaacaggagaacagaactctcataaaagcagaagaggtagagcttagagtaaagagaggagtagtagactgccttgtcagaaacaaatcaaagactagcagtgacaatataatgaaccatcctgggacagagaatgccagtaagagcagtggaaagatccatggtagtgaacatattttaatataagttataataacctttcatacttgcttttagcctaaagtattttggttgattgttattgttaatatgtatattatgtgcatgaatcatacccagctaatttgatttatgtgttttcttctttcttacagagaacctctcatctgattcagctctctccagcccaagtgccctgaattctccagggatggggattgagggcttgaaccgtaggaggaagaaacgcaccagcatagagaccaacattcgtgtggccttagagaagagtttcttggaggttggtgaggttttaacttttcatatacatgggattgtctgtgtaatactaacgttatgtacaggggaaacacaagtagtttggtttggctaaattctagtgtttggaaccagaactcttggcttcctcacattgtccaaatgagattatgtgtatgaagcactggaaaaattcttaaattcccactaataaataaggcattcgtttcattcatgattaattttccttaaaaaaaaaatatatatatatataagaataacattctaagttaatatgactacatttaataaatgcttattagaatatagaagttttttgttagaagtggagtaatatggccctgtatagcccaacttcattctcttgtttctcctcccgtttgcttattcatttaatgacatggttatgcctgtagttcagaaagtttttccaacagatgattttattattttccccttcagaatcaaaagcctacctcggaagaaatcaccatgattgctgatcaacttaacatggaaaaggaggtaatacgtgtttggttttgtaaccgccgccagaaggaaaaaagaatcaacccccccagcagtggtgggaccagcagctcgcctatcaaagcagttttccccagcccagcctcactggtaaggatgggatgcaagggcacgtgctcgagggctaatgtttacattatgagtgacctatcaaatgaatttatatcattataggaatctattatatatattcatgttgaataaaggtatatacatttatattttaaatgttaccgaagtaatgaaatctcttgttgttaacccaagaacttaactgatctttttttttaaacagttttaatcctttcctatttcattgcagtttcattattctctgattattctcttctctgctaggtttcttag

SEQ ID NO: 53161 - DNA, 1102 bp, Bovine  19866880536554
  misc_feature (1)..(1): n is a, c, g, or t
ngagtcagtttgcagctaatatcagttatctaaaaaatctttaggtgctctttattcattttgggttctaaggctcaatttattaaacttttacttagatgattaagtgatacaatacaatccaataaattcccagataacctttagctctgagttcgtattgatgtggcccttttatttataaccttattgagtaaccactgccgttaacattaaaatagtattcctagactgaagggacatatagttgtcatgtgactcacttgatctttagaacaattgtgaatgtgatgccatgtttccaaccaggattccaaagatgggaatattgttgagtttgcatttctgatactttcttgttaatttatttctaatttaatattactccatgccaaggagacttttcaaactaatcattaatagcacttcctagtttaagtgaaagctttgattgttaactggtaagactttaatcataaagttcatgagatagtagttatgaaaatgatagtattaggtaattttgttttatgtacatgacttttgtgttttcaatttattggtactagaaggaggaagggaggaaggatagaaggaaggcaatatttgctactttagtgtatcaatatgtaatttcaaaaaaagaaactgtccattttaagatatttgttttatattctttccataatgagatttcattaaaaacaaaatcaagacagtcttgcccccacatagctgaaaatagaagtaatgtacaagaactccaaattctatgatccccttgaatagttttcttgtttagatcacttataatggtgtagtattttttaatgctttagagtatatcttattcaacataattgaaatatgggagtttttaagttaatttctcattaaaacttggacaaagccgtttgtaatattagtgaaaaaccatctagtaaaagcagcctttcaacataagccagttttctcaattccaaggtcagagagtaattaataaaatcatttcattttggacagtttaattttattctgttgtatctggaatttttaaaacgtttgtaggaaaaataaatctacagtatggacttaaaatttt

SEQ ID NO: 53162 - DNA, 2086 bp, Bovine  19866880536701
  misc_feature (1)..(1): n is a, c, g, or t
ngatgatgacggggattcaattttaagttaaacacccatcaacaagctgttttagtgtttcatgtatacatttcacaacttgtttcttaaataagagaataaaagaaaaattctaagagttacctttgtctaaaggatatatttcttctttcgaacacaggtttttatgctggttttaagtttatcctcacaaagtgatccacactcatacccacacaaaggcagaatccctttatcccaaactgattagagactacagacagggcagggaatagaagaccattgtactgacacttaaagcttagtatctttttcttaatatgaaagtctattggtgatcttatttcagagagggagtatttctgagccacacggggaaacaaacacacacggcctttccttgctcctcctcctaatccactgggcttgagtcccttgggactcaacacttcctttggtagcgatttgggaaatgaatgctacaacctctaacccagtctggtgggtatcagcattttcctccctgaatccttcctcctaacctaccactcccaagggagggaccatccctgtgggcagctacagtataactgacagccctaaaatcatctgcacagactaaaattagagacgtcaactcaggaaaaggttaaattcaactacatcagagaaacagagggatgaagaggagaacaattagtaactgacactgccattctatttacacaccaaactacataaactacttaaaaaatcaagttaatgtctgcccagaggatattacaatttaccaacataaaagattaaaacaagcagcaacttttatataaaattaataaagacaaatgaaaaaaagaaattgtcagtagcatctatctcctcaatgtgtctgaactgcacgatataaactagtccattagtacagcagcttgctaaaaattgactttggttcaagcttagttaaaaaaaaaacaacattaaaaaaacataccacacataataacggtggatggacatttgttatcgtttccctgcttgcagttcactgattttagagggattttaggaaggtgaagggtactttgtgaaataaaatgggaagacaaaagaaacagaagaaaaattaacaagggaactaaaacgtttctggccttttaatattaatatgcctgtctccaacttgaatgatcacaaacaaaaacacacactgtgtctgtatcactgcctttcccaacactgagacaaatacacagaattcaagctccctcgtggacacaagcagagcaagaagaagaaaaatcacctgtaagctctctctcagccccaagcttggaaggggaaaaaagtgcagtcatggaaccactggagatgtacacaagcacccacagatgccaggcgggaacctttaattccaataagaagggagctcaaatgagctgcattgcagcgatccagtctttgggaatttttttggatacagatactataataacagaacactgacaaaaagggaaatccaatctccaggttacccttcctggagaagggaaaccttcattcctattcatctccttccataaacatttccttttcatgggctcattgacatcgtctagaaacaccctgaaaacaattatagaagctaactgccttctacaatgaataaagagatgtgtattgccatttagacctacctagcaggagcatcactaacaaaccaagaagacacgtgaggtgtgtacaaagttcctgctcaaagtctttcaaaggttcaacagatcccatatctggctaattagtgccttctccagtcagagaaccaaggagagtatcagggttagaggaaccgataagccatctactgaaaaggaagtctgtggctggaggaaaacgtggtaacctcacactcttctcatcacacctctttgggtgatccaaaccaatgaaaaacagtctagtagagttccttcaataaacaaaagaagggaaaaggttcccagtttcattttcttctttgccaagtaagttaaaggaagtttggatgaaaaacttccacaaagtggaaaaaacaaaacaaacacacccg

SEQ ID NO: 53163 - DNA, 2439 bp, Bovine  19866880666254
  misc_feature (1)..(1): n is a, c, g, or t
nccttgaagcaaacctcccttcttctttctttttccatcctcgctttctctccctcctcttcagatctcatgaaactctgggtgaatttcctcttggctccaaattcagaaaagtctgacttggatgactcttccacatcttcccagtccctggatctggccccatttggacgccgtggttctggggactcttctccttcagagggctcgggggtccggcggaaaaagtagggctctgggctttcctcccgggagcttgaggtctcactaaacatggacctggagaatgtgtgcatctctctgccttccctggtggaggaagcagagaaccgtgaagtgctttttaccgagttgctattggtctcgtcgtaggaggaggtgtcctgctcctctgaccgggatttggagaacttgtaactggaagacttagactctgtctcccgaatcagggaagatctggtgcacttttccctggagcttccagaccaatcactttggggagatttttcctctgtcctgaggccactgagccacttattaatactgttatccttctctctgccagctctgctgccacttccgtagccatcagagacagccagggaggagaaggtgtctgtttcgggtttctgggaattactgcgggaagaataccggaagctccctatggcgctgtcagtgtcctcatccctaccacccacgtcatcatcctcatcctcatcttccttgaccttcttcttcttgaaaagggagctgcgtttgttgtcggaggccagcttctccattttgtactcggacatcttctctctcagctctgtttgcatctccttctccttccggccaagctcctttaggtcaatattgtcagcaaagaggctatagataggcttgctggtccccttcactttgctcccagtaccttcagctcttgcactcatggtatgggaggacaacacagactgggtctcagagctgggtcttgcctggctttgaggcagcaggcagccacccagggcagagctgctctgtccactgagcatggagacttggtcatcccctaggcagctgcctgctggtgctgccttcatgcttacaacggacagtgggcggggcgacaacagcatttcattttgcttctgggcgagagtttcactgactacgttggcaatccagttctgtatgctggcaatggagattgtgtctccaggccccacatgcaggttaggtagaggtgtggtgggggtggaagccaagcatccgcctactttgcttagggcctgagagggatgggagctgtggctctgggcgctgagcacagatgctgtgtccccatcagcgctgactgagggggctgccgaccagaatgcagacagggggatgctcccactggcagctgagctatctgcctcccagcttcccattgactggctctcctccagtgtctgcctgcttctctccagcagctccagcctccgctgccgcttcttgaccaaggctaagtcatctcccttgctgagctccaccacctcctccttgttctcactgcccaccttcttttggtgtttcagcttccaggcctggtaggcagacagattgacatcagagaggtttttcttctccccctccacctcctccgcaccttgctcactgctgccatctcctgcctctgagtccttcttgtgaaatccaaactggattctcttgatcttccacctttccagggcggtgagtttgtccttgtttctgctgcagaagttatagaaggagctggcctcggaggccacactctcctcgtcatcctcccgcgccctgctccccacctccgagctggtgtccacctcctctctcttgttcctggagtggtactttcgggaagcctccttctcaatctcctgcagcctctggtcccacatgtcccaggtgctctccgtggacatggagtcagagcggcgtctcccacctcggttctggctgctcatctgcagctgctgcttcaggacccggatgtcatggctgctcacactctcggaggtgctgctctcactcagcgtgtgcctccttcttctcctcacgaaggagctgccattgctctcctcttcctcttcctcctccctattccacctccggtgcccttctgcctggtacctctcatttcggctttgccactcccggatgattcgctccacatcctcatcctcgggctcctcaccttgacgagaggaggctgagaacctgtcgtcctcgccctgcaggaccttgcccgtggggaggctctgcccctttttccacgcctcgtagagcctctcctcctcctcctcatcgataagggtgaggggcttggaggcctggctggccctccccaaggaggaggtactcaggtgactggcagcgtcgtcctcctcctccacggtgaagggtgtgcactctggctgccaccgt

SEQ ID NO: 53164 - DNA, 926 bp, Bovine  19866880752539
  misc_feature (1)..(1): n is a, c, g, or t
ntggtgcaatggtgaagaatctgcctgctaatgcaggagatgcacgatacgtgggtttgatgctttaaattgggaagatcccctgaagtaggaaatggcaacccactccagtattcttgcctggaaaattccatgaacagaggaacctggcggactacggtcgacagggttgcaaaaggtggacacaactgtcatgtcagggctggcaggggaggtgggaggtgagaagaggttggaagtgaagtgacggttgctccttgtgaccccacagactgcagcctacgaagctcctctgtccatagaattctccaggcaagaatactggagtgagtggccattcccttcttcccgacctagggagtgaacccagatttcctgtattgcaggcaaatgctttaccattgtgccaaatgggttgccctgggaagagaggagggctccgtaacctcggtttttcctgcttgggagcagggtagtgagggtggaaagatcacccatttccctcgtgtgagcccagcgacgtgtgttcactgtgtaattcgcttgacttaattgaaggaaagcagatctgagacagccctgctgggtttctaagaggctgacttggaggaatctttacattaaaccgattgatagtctctctgtgtctgtgagaggtgttttggcttcatgtcagagctcccatcagatgggcttgtactgtgagaggtttgaaaaatggttcagatgaaaaagttgattctgttcaataataaatgatataaacatatattatttattaataaaaaataatgatgttttgtatttatagagcatctttcaagtgtggaaactctaagttctttgtggatattaacttacctttcacacaatagagaaaaaataattttgtcaattcagcatttttgaattttcttttttctttt

SEQ ID NO: 53165 - DNA, 2646 bp, Bovine  19866880814858
  misc_feature (1)..(1): n is a, c, g, or t
ngacatttgagaggagacatatgggcataaaatggcctctcctcatctgtttggaaatgtgactagtggaataattatgttcatgaagttacacagtgtctaaaatccaaagattaactcatacttatgttctgttttctagcaaatagaactgtgcttggaacattcggggaggaaaatcttcaagaagattcctcgcagcctgaatgcacagggagaagcaggaaaaggccatggggcttgaaataacccaagtctggacagcagcctgagcatccggccctgggatagagcccaaccccatcccacaccatgaggagtccaaaaagttgagggacccttcatttcatcagagacgtgattagaaaagaaactgcttctgcctcacttcttgttttagaaattatgtttatagaacctgtaaataggtgtgaacaaacgtatttcctagagaagataccatttgttcaacaccaacaagaaactcatcatatgggcccaactccactggtattctttctttggagaaaacctcaagttaatgtttttccttctgcctctaaaaatgcttccatcagtagaacctgtcctcacacaggtcaagactgcagagaaggctttgtcgaaatggccatgtatgtacacgtgctacttacacatttccttttttggaaaaatgagatgctaataatgacaaaattcagacatactggcctagtgccagcagatggcttttctacaaactaggttagtatggaagatacagattaaaataaactatgctattttatttatcttcccaatctggttggcagctagacttttctagggtctcatttaatggccctatttttcattattattttatttaatgatagggtagcatttagtacacaagctcttctgtttctcaggctgcctgcagaagtcaccataaattatctgctgtctacatggtacaaagctcactgactcacctgatactgtttgattaattcctttaatatttttatcacaagggtggtaagagggcttgggcctttagccacagctgtttcaggacttctaaacttctatcccgcagaaataggtgggagatctttgaaattttacactatactaatttgcattcccacataagttgagtgttattaaaacattccatcaaaactacctgtgctacaaaaaaatatgccagaacctcatagacaaagccattgctagaaacgtcattccaatgtcagatctggataacaggctaccataaccacttttccttcctatagacccagctcacttgtataatattcttggcatcctgaaacacctatttctactcaggtactcattcctattattagtgacccatgttcctcattttttaaaaccagttttcctccaagaggggaactttaacttctggtgtctgattacttttcagtttgaattgtttcctcatttgcttttacctgcactgtgttctttatcatctcaaatggcatctaaatccagctacttttcattccagaagttttcattccctccaattccacttaatttatcctccactatcctggttcctggccctttcctctttacgtactgttttacttgttttgggagcttaaaggattttataagacctagtttttggttcctgcactggagccatagttgtcttgcagagaagagtagaaaatgggttcaactcccgtttcattccaccaacacctccttgagtctcatcatcagctgacagatgatgccttacaggttgcatagcactggaacttctagagtaatggctctactgtcagggttttctgggctcactcttccactgacttatgatctatgcctaacagagccccagtacaactattttgcagaatggctattaccctagagatactatagcacatactgagacacagttgtactccccagtagataggaactgagtctaacaataaactttgataataaagacaataggctccggtggtttattatctgctggcatttaaaaaaaagtcacatttcaaactctcatttacactttattctccactcagtttggtaccaatacattatacccttaaataaaaaagtctgttcatggggatgaccatgtaattactgttggtgtctatatgtgtggtttccaactggcttttaaaggtgggggaaagggccctagcgaaaatagctttttccctgtcatgtttggtgactgttctcaggaatggtatattaccagtcaatgaagaaaatccataaagggatactaaatttaaaagaatggaaacatgctagcaggttgatgaatagaaaacttggtcctattttgataaatatttttaaaaatgaaagtatgatgaatctatatgccttttaatattgtgtttttagtaattaccacgccagttgattcagttaaatattaggctacatgccaagaataatctagatatttttcctttattaagccatgagaactgaatgctgaaccaatctgttggccatagcatctaagtgactcacaaccattattcaaactggaggaatttctggtttaagtcaaagacacgatgaaacataggcatttttatagggtcaaagtgagcaatcatttagaaatcactt

SEQ ID NO: 53166 - DNA, 1186 bp, Bovine  19866880995403
  misc_feature (1)..(1): n is a, c, g, or t
nacactttagttactctttaccttttaccaatacacacaagaccacttataaattctctaaaggaataaagaaatgtgagaatgtaagaagggtattatttaccaggattggccacacttaaggagtgctaaagattagtaagtttttaacaaagtcaaaacacatttaattaaaaaagaaacaaaaacaaaaaacagccaaaaggaatagcaaggactctgattaactatattctttgctgtcctaggctaaatttatctttatttttaaaacaagcatatttaagtgtctagctataaacactcgaattcaaaaagtacgtctaataacatatgaaatggtagaaatcaagagaccagatttttgtttaaaaaaaaaaacaaaacccagtattacttcaacaaatgcatattacctgatcttttacaactttagtgccatcatgtttgaacaccatagtcaattactttgaaatgcagaattaaaatgaagacaagtttactgataaacataatgtagaattttaagtgcccaaatttatataagcaaaacactgtaggattactctaccttgatcactttttagagacaagcctgacagatccgggggtgaaacattctgctttggtacaagcatgcctggcttcctcaatggggtgcaaacaggtttctaaagagaaaggtaatcattgaccacatatttaaactcttgcccactttataacatatacttaaatttagcaaaataactttgaaacaacccatagattactttaataaccactccaagccagtaaacccaatgagtacataaataatgcttataacacctacacccaaaggcacaggatggcaaaatctaaaaatattttgaatcaaggggctaggtggtaaataaccaatccaattattgttgaaagccatttccccactactgataatctaatcctatggagtcacataacgcatgcttgtccagcggccaaaagaatatcatttgccgaagtactccaatactgttttttcctcactcaaagtaaaaaccagattgtgttgacttcaagtctcaatgatacatatgtagaacatgacttttattttgaagggaaataagaaactgtagtgaaaagaagacaaaaaaaaaatcggggctcacaaatataattaagtattaatacgaattca

SEQ ID NO: 53167 - DNA, 1290 bp, Bovine  19866881002626
  misc_feature (1)..(1): n is a, c, g, or t
nacaaataatggggctcttttccagtgcctatcttttaaaagtggtgtgataggtgtggttcttcttccacaccagtcccctaaagtattttgaagaattttgacaatagggatcaggaattgagtttctgttctttccttatagtattcccttttcttccctatcttcccagtgctaaatgtatagtaggaattcagtcaaaggcctttaatttaaatgaattcaaatgattctccccacccacctcaagcaacaaaatagagattcatgtcctagaataaatcatcatttttattatttcttatgaacaagctatttcccacagaacagcattgtaagtattaattttagaattagtggaaaccataagtaaagatcaattttttaaagtgataattcctcagaaatgtatgtcttcaggtcatagaagattacctataagcaattggtcttggacaaacataagtttgtcttgaagttttaaagagctcttttgccctgtgagaatgacttaatatgaataaaatagattcctctgggtggattgaaaataggtacatctctactatggaattctaataatctttttattcacttaaaaaattacatacaataaaattatcagtattcttttgaacttgctactttctcaaaattcagttatcccaataactttcaaagtcttaagtttaatgaatttacaaagcctcttctttcaatacatttcctaacactttctttttatatgtcttattttgaaataatagtctgtggactactttataaaacagagttttatttctattggttgtctcaagtcactttgcataatggcggttgtataatgaatgggggcaagagtgataggcagtggtatcataaatcactagcttgttgaagctcaggtcctttaaagcatgcaagagagaaccaccaattatccatctctcaagctggataaaagctacacaaacacactggatggaaacagacaacaaccaaatcagtatggctttgttaactgctctggtgttaaattagctctctctctctttttttaaagattttactatacttagccctctctccctactcaagataaggtgaagcacgtccttgttaatagtgcatgtgtggatcttaacttgactgtgtctatattacagtcagtggctcaaatcatcaagcccactgccagcacactggcatggtctagctctctatcctcttcttgccctgttaacagctgaagaactcagactatccacgacaacagtatccaaattcat

SEQ ID NO: 53168 - DNA, 1048 bp, Bovine  19866881098909
  misc_feature (1)..(1): n is a, c, g, or t
nctgtggcaaggcagctccggtgctgggcatgaggagccaaaagctggggggcaggatgggtctgaggctgcagtgatccgagaacatctctgtctgcccttctaggttatcttgcctcatctctctctgtgcctattgaacacccctttcccacatgtattaagcaagggaacgcttggggcaccatgtgcagaagtaatcagtcaaggctctttgaagaggattctctagaccccttaatgaaccctgttgacatttctctgcccttctcatatattttatcttgtaacctctaaaagaccccacccatcatctctctcatttttgatcatttgttttgtgaaaagtcaaatgccaattatgttatactgttggatttgattctcataattctaaaaggcaggtactattaatgtcctcccagttttagctggggaaactgaaacttaaaaaattctaagggacttacacagggtcatgtggccagtgaatgtgaagggacaagatgtgtgtttggtttggtatggccaatgccccaatagcaccttccccactcacctatcctttatattgaaggacagtagctattgctcttctctcaaagaaccaactgcggggtccctctggcctgttgccccacgaggtaacttgcccttcactctgaggaaggaaaaggcctctctgtttctcaccaaataatacagggctccgtgggccacagctgtttggacagcaggccacatcgcccatgccggcttcgagggtgtgagaagtgagtcaggaggctgtcaaccagaggtcatatcataatggccaaaagaaggcccacgtgtgtttcagcaccgtgtagatcacaaagaggtttttttcacacaacccgttaatccttaacgctaactcaccagatgggacggacgccttgacttggctgtgattctgaggcgtgagaggtgcctggggtgatacatccagccaggagcagagccgtgtcgggccgcgcagtctcctgagcgaggccccagccgcgatggggtccttagatcccag

SEQ ID NO: 53169 - DNA, 701 bp, Bovine  19866881168034
  misc_feature (1)..(1): n is a, c, g, or t
nataagtttctcctaggtgatattctatttcttatgctgcactggaggaaatactcattatattttgaagacaaaccgaattcaatttattttactcttgtcccaaaggagattattacttctccttaataagatttattattattagaaaacaactcaccctgttacaatgagaaagcttaggatgatcaggcagacatttatgatgtagcttcccattttcccaatgattagatcttgacatcacccagtacattcttgtcttacaataacacttaccactttgagccagactctaaatgctctataattctcacctgtgcttgactttccttaacacgatattgtatttttactttcaaaatcaacacaatttcaaggattataagaaagttgaaaatagaatgtcatcctttcgttataacctgagcttctggtaagattagagagggggtctgtacacatgctttgttaattaactttgatgctcttgaagcactggtaacaatcctaacacacatgatttctcataattgccttccaccccttgcctgtaaaggcttgttatgtagaacagaattattttgtgggtgaataagatgtgtgtcacgacgtgctgtgagttcctaagaatagaaactcctatgactaaactccccatgaacacagcaaattagagaaaataacaaatgcttttatcc

SEQ ID NO: 53170 - DNA, 2729 bp, Bovine  19866881191090
  misc_feature (1)..(1): n is a, c, g, or t
ntctgactgtttgcgaccccatggactgcagcacaccaggcttccctgtccatcaccaactcccggagcttactcaaattcacgtccatcgcgtcggtgatgccatccaaccatctcgtcctctgtcatccccttcttctcccaccttctatctttcccagcatcagggtcttttccaacgagttggttcttcgcatcaggtggccaaagtattggagtttcagcttcagcatcagtccttccaatgaatactcgggactgatttcctgaaggattgactggttgactctccttgcagtccaacggactctcaagagtcttctccaacaccacagttcaaaagcatcaattctaccttgagtcctgaaaagttagcacctgagacgctcctttagatgtgtgccactagatggcgtatcaggctaactcgctccccttctctgagcaacttgctagctccctcttcacctcctgccatatttggtgagtcacctcaggccacctgataaacactcaggaaatacttaagaccaattcagcagaaaatataactcacctagatggtatgatgagtattattaggatgcctctgccaagatttttttcagagcctgaaatcagcctactttctttgtttcttggattgaatgtatttaaaaatctgactttggggtctttcctggtggctcaccggaaaagaatccacctgccaaggcaggagacaggagtttaatccctgatccgggaagatcccacatgccacagagcaaccaggcccatgtgccacagctattgggcctgtgctctagagcccgggagccacggctactgagaccatgtgccacgactactgaagcctgtgcaccccagagaccgtgttcaacaacaggagaagccatggcaacgagaagcccgtgcaccgcaagtatagagcagctcctgcccaccacaactagagaaaagtccacaaagcaatgaagatccagcacaaccaaaaataaataaattactaaagatttttttaaaaatatgactcttacatgaagcaaatggaaatcagtagggttaaaacattaaatagttgatttttcccccacaactgcctaattctaaccctatgggtcaagcccttccttgcttcatgaatgaaatctagatccatactttctttggtcactgttgaataatacatggcattctattcaccttcaactcacccaaatagttttagttctgtaattcaaatgatgattcttttataatgatcaaactgcacaatttgtaaaattagacttcttgctctcccctattgtaggatcactttactctagaagtttgcattagagagaaatgcatatactgtctagattttcccacttagcacttccattccttcttccctcaatcacttattctttttggatcctccagggctgctgtgtgtatgtatatagatgtggagttactatggagagaacaggacaggtaagcagtaggagcaagaaatgtttttcttgactggcatcaatataatgtgacattttaccaaacatgaattcacaatcaaaaactacaaaacatataaggagataagaaaccacaagtgagaatgagcagacccataaagacttcagatattggaattactggggataaagtataaaattagtacatttaatatatccaaagaaataagaggaaattgtatagcagtaagagcaagacactattgccagtgaccatactgatttgaaaaagaactaaattgaatttttaaaaatgaataccttacagatatttattaattaaaattaaaactcaaaggaaagagattagaggaaactaaagagaaaaatagtgaaatggaagataaactggaaggaattacccagaagagagcacagaatgatgaagatgaaaaatacaaaagatggctttaaacagtatgtaggacagaatgaaaaggtctaatatacattcaatcagaattctcaaaagagagctaaaggggagaagaaatagttgacatattaatgcctgagagtttttcataattaatgaaaaatccacagattcaggaagcacaacacattctaatgtgaataagtaaaaagaaatccataaccagtcacatgttgattaggccaaaaaacactagaaacagaaaatcttaaaaatagccagagagacaagactgattatttatgaaaaaaggataattagattggtaactgccttctcaaatcaacaacaaaagcagaaggcagtagaataatatcttcagtgcactgagagaaaataactattgatttaaaattgtatacttagtgaaattatctttcaagaacaagaatgaagtaaggattttgttttaaacacaaattgacagaatatcccaccaatagaccattactaaagaaaactttatttagaaaggagaagactcttacactatagttgggaatgtaaattgtcacagccactatggagaacagtatggaggctccttcaaaaaataaaagtggaactatcatatgacccagaaatgccactcctaagtatatacctggagaaaaccataattcagcaagatgcatgcaccccaatattcattgcagcaccatttccaatagccaagacacagaagcagttaaatgtccataaacagaggaatggataaagatgtagtacctatatacaatggaatactattcagtcagaggaaagaa

SEQ ID NO: 53171 - DNA, 1019 bp, Bovine  19866881254994
  misc_feature (1)..(1): n is a, c, g, or t
ntttatctccttcccagctttaagccctgttgccacacctgaccccagggtgtgactcacacctggagcctggggagggcctgctggtgcctgagcacaagtcagaagccagtgctcacagggagggctcgtgtgcctggggaattacactttctgcctgtcagaaatgaaatcagattaaaatgccccagtcccagctccagccttgaagtgggaagaatgcaatgaatggtcaccctaagtgtggtatgtgtgcaatgagtgatggtttagggcagtagctgcaacccaggcagcccatcagtatcccctggggagtaaaagtacacatgtccaggcccccccagaccctctgaatcagactcttgagaggcagaatctggccatctctctgattatgaaaatttacccaagtgattctgatgtgaaaacctcagttcagagttgcctactggaccttgagggaaaataggtttaatgaatagttgtctccgtgactggggctgatactctgcgtgtgatttgcagctcaattttgcagcatctggctgcttccctgagttagtgtccagcctccaaattgatgtcttaactcacactttcatatgcatagaagtcgtcttgagatcttgtcaaaacacagactgattcagtaggtctagggaagggcatggaaatctgaatttctaacaaactcccaagtgatgttgctgctcctccagggactacagtttgaaaaacaaggcctccagggaagaactggttcatgggcacaggtgtgatcctcatcttgccctcatctttgccctctagggccccatcccagggtcttggtaaccagtagcactgcttactgtgatgctggctagcagggaggaagcctgggggaaagtattcccggcaaggtctaaccttgataatccctccctccttcctaacatactctagtccgtcggtcccccaagatacacccattcctggttctcctcggcattcctgggctaaccctttcacatctc

SEQ ID NO: 53172 - DNA, 1074 bp, Bovine  19866881337250
  misc_feature (1)..(1): n is a, c, g, or t
nttttaggtagtcttgagaagaaaaaaatgagtgtaagatttatattgagtaggattacaaattctggtcttcccagaatggctcaggtgaagaatccgctggccagtgcaggaactgaaggagactggggctccatctctgggtggtgaagatacccgtgaggaggaaatggcaacccgctcgggtgttcctgccattcctgccgggataacccgatggacagaggagccagttgggctgcagtccagggagtcgcaaagagtaggacacgactgagcacgcaggcacaatttcttcactgaggaaaaaaactgatctctaggagatagccagccattgtttaatacctaaagttttaatcattgttcttagcctgctcgttgaatttcttacactgtgcaagtacagttaaagctattgtcaatgtcagccaatgaattccaggtggtattgatttattcatggcaattaatgcctagggtgtacgcatgactgtttaagccaaataatcgggctgccctgtaatctaattatttcagacaatggccaaccaacacacagttaaggaaatgcaaaattcaatcatgttacagttaatctgtaaatatagcatattcaccagcattgctattaataggaagtctcagaatcttcaatctatgtgaaactgaaagttgctcatcagtcagactctttgagacccggtagactgtacagtccgtggaattctctgggccaggatactggagtgggtagcctttcacttcaggggatcttcccaaaccagggatcgaacccaggtctcccacgttgcaagtggattgtttatcagctgagccacaagggacaaagttaagtacatgactctgctttaagggcaacaaatttgaagtcatctccactaagaaaaagaaatcaaatacccttatttaaattcttatcttctatttaatctttgttttgctctttgttttaaaaagtaaattaatatgactttcaggaaggaactgaagccagtgcatctgctattcattattattttatttatataaaaggaaatttttatggaatga

SEQ ID NO: 53173 - DNA, 1329 bp, Bovine  19866881341271
  misc_feature (1)..(1): n is a, c, g, or t
nacatattatgatctgttcctctgcttcccttccttgtcatttccccctaccccacaccgtgctagagacacagtcatgaggaagaccagaagtctctatcccagagaactgctaatctgactgaggaggaaaatagtatacaatcaaacaagacagccagaaataccatgaccaattcatccagtttgcttggagttgctccactgttaaaacagagggccctatgtcccaggaatgtctctgtcttagggaaactgagatggttggtcaccccacttaaagatcaccagtgctatggggagcatgacttggaaaaagacgtaggtaataaaactgtggccgtgggaggacccaccttggactgggtggtcagaacgcagtggaaaaattagtactttgattttctatgttacagataggtatctctgtctcaaagaagttaatgggttatctatggtcacacagccagcaagtagtcttctgattttcagtccactctgctagtgatcccgatgtcaccgtctgtcagttcgggatggtgactaaggttataaagaaaacagaggccctctgccatcctctcctcctgagtggtcccgtctatctgcagccactttttggtgtattcgctctcccttttctctctctcccctcccctccaccatctgcttccttatgctggcggtctgtccaccctgatgcccctcttcagccccctgcctgattcccaccccactctccgtccctccctccttcatctcacctctctctcatactacttttcatcttcacggagccttgaagtctggaggtacattgaacccccatggttactcagttgtggtccttcttccattcttcagcagccactcaccgagcccctattttgatgcccacgacagtggtttggcaactggtcagtggtgatgccatgtgcttctccagagatgccttcctgaaccactctatccaaagacgctcccatcccagctttgccaagtctctgcactcaaccttgttttctttcttcaaagctctaatcactatgtgaaattaatttttgctaccctaaaactttttccatgtcgtcccctctggaaatcctcccctcaccatatctgctgttgtaatgcaatatgtgctttaaagcccagttcacgtatttgttctttcgtgaagccattcctgacttcttcagtcagaagggctctctccctcatttgaactcacacagcactccggatctctcttaggatactaactaactacattctgccttgagcttgagctatatttggtctgtgtctcatccctcctaataaactatg

SEQ ID NO: 53174 - DNA, 681 bp, Bovine  19866881356799
  misc_feature (1)..(1): n is a, c, g, or t
ncagagaattatgaaacagaacaagtgacaaattaaactgtacttgcaatgactttcaatatcacaggctgagtaaagctactaccaacactcacagtgagccaagttttgtgcttcacactgtcactctaaaaattaattattacgtatcctcttctggatgagtatctagtttcctgtatagtacttaaaaaaaaaaaaaaaaagaatctgataaacctagaggtttgctgattcttcttttgctgattgctacgtctgtctataaaatctagatagcactgaaaacttgagtacttgcttaactgggaaaaaaaatttaaaaacaaaagcattttatcagtcactaaatacaaataagatatcttatcaatgctcagtaaattaatatcccacagtaaaaactacgtgtattatacataaagaacttcctcaaatcagaggttctgaaactcaagacagttctcatattccaaattctaaacatactgtacatggatcagtaagtcaagcactggctccactcacgctatttttgtttccattgctattactgctaaaagagtttataagggctcattgccagtttagagcacagttagaagtattttcagtacaaaataaaatcaattaattcctaagaagaaatataaatctaaggtatccaactatctatacaaa

SEQ ID NO: 53175 - DNA, 890 bp, Bovine  19866881374571
  misc_feature (1)..(1): n is a, c, g, or t
nagaggtatatgtgcttttcttcccgacgatggatgaactgtgtagaataaattggcaagataatctcactaaaaatcttttaattaatcttattttcccttttagaaaatgctaatttctaataatgctaccatgaagtacaaatcagtatggccctaaacaaaatcaaagttggatgcctttggttccgtttctctagtaataagttgggcaaactgggatggtattgatctttcttaacaaataaataaaagaaagtatgttttatatcaagtcataaatggataggaacaatttttttttttaattctaaaagactgcctatataacttcagaaacatttaaactaacatagcactcaacatatttcttaactcaagaacaataatactgttcttctgagaagcccttttctaggtctttctcctctgtcctttagatttatacagggtacaaagaaagtttataaccaaactgccctgcctgtgataagcaggattgaggcaattacattcatcactccccaggcagggcccattaccatgggcaaatatagtatcactataaatgcatttggaattagtctttggcttaatatgtgttaaccaaattcaggaataaaataaaacctggataaagattaaggggaaaacaaagaaggaccacaatgaactgtgatgacctacctggtcttttctcttagaagcgcagaaactctaccaaacatttctttttggccaaatggactccttaatttccagactctcccatataaggtggctaaaagttaagtctgagtaccttagcttaggagattcaaagcatttcttgagatgataaaaaagatgatacaaagtaaaaaaggactaaaggctgagtcatcaagcaa

SEQ ID NO: 53176 - DNA, 619 bp, Bovine  19866881698489
  misc_feature (1)..(1): n is a, c, g, or t
ncagccgggcccattcagtgtgaatgtctggatttcccccctctcctctcttaggaccagctgcactttaagagacgaattagttaaactcgaacagcaaagactacaaatttaatgagattatgaaactcggtaaaaagacagttttgctttaaaaagagagataattggtactatatgttaagtaaacccaggaaaaaagatttttacaagtttcatttccaaaaggtttggtgctgggctgattttaggcagaacagcttttgaattaaatggggtcgtccattcaggctgcgtgacctcacagtaaactgaggtgagcatggagcttccagaaggaggggaaccgtcttggtcaccaagggacagtcacctggcccggagacccgggacctggcgccgccgggcaggactggtcgtcttcccggcctctggcgccccctgacgtctgcagcgggagtcgcaggctttgcagaggcctggaccagctccctcccatcactccgccctctataaatattcaggtattatctacaatttatttaggagctgggacgcgccaactgagaatccaagatctacaagagtcctaaatccccccgccccccgcctcagcggg

SEQ ID NO: 53177 - DNA, 998 bp, Bovine  19866880410658
  misc_feature (1)..(1): n is a, c, g, or t
ntttgtaatgcaaattataaggattgaaggactgttgaacatctgtcagacattcccaaccctttcattgaaagttgactggcctccagaagattgtatactttcaatattccaaggaaagaagtcattgtaacttttataaaagacaaaaagaggcagcaagagaattttgactttgcagtgttttttttcccgtctcttatcaaccagctagtcactgctgcttctttgatgttaaatagatgcttgtttccattgaattttctgggtgacttgtcaggttggttgtgctttactctgatggaacatgtgatgttaaaaccttttctccccctctctggaaattcttaaactggcagccataccacagttttttctgtagattttgttacagatttgcttcataaagcttaaaaatgcaaagtttaagaaacatggtattaatttaagtgatattttaagttcatactttctattaaatttgattttctattctgttttttaaatttcacttaattttcactagctattttggtgagaactttgagagaaacatctgttacgttgctccttcttagagtttacattttgttagaatatactctgcatttactgagtgctttgcttgtaaactcatttgatcttcttcaaccaatgtaagtcttatgagacgtttataaagttaaccaaccaattataattatcaactttttttgtgtgtgtaaattaggaaatttagggagattaaatatcttgctggccatgctggcatggaaatctgtagtctgaactcaatctccatggcttttccacttcaccagctcagttgaaatgagcaagcttgatgtaacacacgtttgaaagggtttcagaagacccctgaagaatgaatttgcaaaggcagtcttttacttgctgtgacactttggactaaagaattttctctctcttaaaaatgctatggtgggcactcctcatcctttcctgagctggccctg

SEQ ID NO: 53178 - DNA, 1606 bp, Bovine  19866880444654
  misc_feature (1)..(1): n is a, c, g, or t
nctgctatgaacatggtggacaaatctctcttcagatcctgcttgcaattctttcggggcccttgccagaagtggaattgctggtggctcagatggtaaagaatctgcctgcaatacaggggacacaggttcaatccctgggtcaggaagatcccctggagaagggaatggctacccactccagtattcttgcctgggaaatcccagggacagaggagactgactggctatagtctagggggttgcaaagagtcagacacgactgaacgacttacacttcaacttttttcacgtttcacagtaactctatgtttaattttgttagaaactacaatattgtcttccacagtggctgcaccattgtacactctaaccagtggtgcacaagggttccaatttctccccactccaacaacacttgcttttttctgattttttaatagtagccatcctaatgggtacattgtgattttcactggcattttcctaatggttagcaacgctgagcttcttttcatgtgcttgctggtcatttgtgcatcttctttggagaaattcaacaaacgtttctttgtcatctgcaagttgcctatctaacggctatttccccttgtcctctggctgacctctgatttcacttctccctgatgaggttcggggataagtcctgattcatctaagtcagtggttctctatcctgactaacccacggtgttacctgaatgctgccctggaaacctctggatttatgattgttagtggtgtgtccaaggccaaaatttctatgtagaaaagaggtagaaattgcttgaattattctatgcatcaaagagaacactctagtccaaggaaggaaaagaaaacaaacaaaaagttacttgaatgcttacaaagtgattaataataccataagaagagtgtgagctaataattggccatctgaatttgccactgtggccatgtttatctatgatgatagaagaaaggagcggagccatggttttgaacagacttcaaccctggactctcatgatgaaagtctgctactctactgtccaagggttttaagtttcattcagatcacaggagagacagaaaactggaaaccttggacaagctggggtatcaagagctagaccaatgcttccctggtggcccagtggttaagagtccaccttgcaatgcaggggacatccgttcgatccctggtccgggaagatcccgcatgccgtggagcaactcagcccgtgagccacaacgagtgcgtgcatgtgctgcaactactgaagcccttgagctgtgttccacaagagaagccgccatctcgtgccacaactagagaaggcagcaatgaagatctggtgcaaccagaaagtaaataaataaagagccagaccagaactgaaagcctcctgaactgaatcctgcatctgcctcagaccttccttgtggttcccagccaagtcctgaaatctgggtcagttacagagtatagatgcaacactagaaaggaaagaagttgagttcacagaccattctgagtccaaaccacgtaagtctttagagattaaatttaacaccttgatgtgatacctagcccaaacga

SEQ ID NO: 53179 - DNA, 807 bp, Bovine  19866880449250
  misc_feature (1)..(1): n is a, c, g, or t
nagacatgtgggtgttgggcaagtcgaaagacggggcagtgacaaaggaagagacacagatacggaggcttgggcagagcaacaggcgggcaggagggtcatatgggaactgctgtcccagaatgccacagggattaactcactttccggatggagggagggctgtaattttaggacggttgggttgcaaccagtccaagtcccttccgatcccttctgcttgacacaggaggtcccagatcccaccaagtactttgtcacccgctggagcacggacccctggatccagatggcctacagcttcgtgaagacggggggcagcggggaggcctacgacatccttgctgaggaaatacaaggaaccgtcttttttgctggcgaggtgggtttcgtcactctgaccctgactgctttcatttggatcacttgcttttagctgaactggtctgcattcagagtttaaaagcaacgtcaaataccttcaagtcttgtggcaacgaacggcaggtaccctgacaatatcctcctcaaattccccgagcagccatttttaactctttttgctgttttcttctggagtttacttcatgtcttaagatttttacattgttgtctttggatttaagaagttaagacattacctccagacttcctgtcaggttaaagacttagcctgtttcatctcttccctgtttacttcacaatttaattttaaattagtgtcagtgcttatatgatgtggttgcttactgctgagccaggaaggcgaccgccgattcttttcttacacagctgtttcctcttcag

SEQ ID NO: 53180 - DNA, 3584 bp, Bovine  19866880519063
  misc_feature (1)..(1): n is a, c, g, or t
naggtgctttttgttttttctttatttaaaaaaaactaacctgattaaatcagtgcttaattttcactatgggaattaacaactcagaaatttgagaaaaacggaaatagcattggctttttaaaaaaatgtacatcgtaatgggaacattcttcaattcttatgaatgtattgtaagtctgttttcaaacaatatttccattgaaaatactttatttttggttaataatgaatttctgcttttttaaaaaatttctcaagtaggattaacatctttaatctgctcctgaaatttgtttgcttttttcctgacttactttttctgaacatttcttatagatgtttatttttctcccttaagtaattatctccctccaagatcatgtatattcctctttgaagaggaagccaaatcttataacagtttcatgttgagtagttttcagaaattaaaagtgatttttttttttaatttaaaagggaaaaaaatgcttttggcttctttgtaattaatttgcttaaggtctatttcactgccagtttctttttctaaaaagctttttctgtcatttctttaataatttgaaaaaccaggtacaagtgacctctccaaacagcactggcagccccttgtttagattttcatctccaattgtaaaatctactgagtcagatgtactacctccgtcatctgtaagtagcaagcaaagagtgttgcatattgattgattccaaaggcatactgtatttttaagctgtaatttaccattgctggtaagaaatgccatttttcttaccaaaaaaattccaatgtacagaaaactttgaacatctatacacaaaatatatgtgtatatatatatgtatgcatcttctcatgtaccatttggaagttaggatggagatattttggtatccttaattttctttgtatcccctaagaaaaaagatactttttgcatacccataatacagttgtcataccccaaaaaatgtaacatgatgttaatagtaacatagtgtgcacattcagatttacccatcagcctcagactctcgtttaattgctgttttgtttctcttggtaccggatccagttacaattaagacttagcaactaagtcatattgcattaagttagcatgtctcttggattggctttaatctagaaaagttggaaggttttatgtgccactatatatttgtttcttcatagtaaatattttgagtaagagtggtatataagttggagacttccttggtggccagtggctgggaccccgcctgccagcctgcggcccctccacccagtgcagagggcccaggctcgggccctggttgaagaactggatcccacatagcacaactgaaacccagcacagctaaatacataaatattaaaaaaaaaatagtacataagtttgatgttctagttgccccatctctatttggcatgtgtatcatttaaatatgttcagttcagttcagtcactcagtcgtgtctgactctttgcgaccccatgaatcgcagcacaccaggcctccctgtctatcaccaactcccagcgttcactcagactcaagtccatcgagtcagtgatgccatccagccatctcatcctctgtcgtccccttctcctcttgcccccaatccctcccagcatcagagtcttttccaatgagtcatctcttcgcatgaggtggccaaagtactggagtttcagctttcacatcattccctccaaagaaataccagggctaatctccttcagaatggactggttggatctccttgcagtccaagggactctcaagagtcttctccaacaccacagttcaaaagcatcaattcttcggcgctcagccttcttcacagtccaactcttacatccatatatgaccactggaagaaccatagccttgactagacatgttaccttctgtttttttactgtgtccttggcttgttttctgttacaactagatgttccagattattttgtaatttccctgccaaatgcctgaaatctactcgatgtccatgaagtctcatactttttattaggaaatggcatttagaaacccgaaagtgggcatcaggaatacattattattttatgtaatgctttgaatgaaaaaatgctttagaaatttaaaatgctcttgttaaactaggacacatcattcattataagaagcacactgattttagagatttaaaataggaaaaactgtgaatcttagaatatgtgaaatccagtatacttttttgacttgaaatagagctttatatttgatgggttgtttgcagctaaatggacagttaaaggacaccttctctctctacagattggatttacatttagtgtgcctgtggcaaaaacagcagagctttctggccctagtagtgtttcagaaccaattacaagcagttcaggtaagatactttttctcataatagtttacataaaaataggttaatatttcaaattacttcttttacctttggccattcttgtaaatgcttttatgtgaatataattagctccctaaatgtgaataagttacagcttgtgaaggggatggtcacaatagcaaatttatccagtttaatcccaaaaaagtgacagtttattataaatgaaatctcagtataggaaattcaagggtgttccacattgtaattacagtggattccatctctgggtttctcttgagttcacaagcatttttatgcataaggattataccagcctctgcagacagtagtagtacataatttctcaaaaaaatgggctctttctcaaaaaattatatatgctgaatagataattagaccataggaatttgctgtggtggtcatgatgtgtgctctcaagtattgggtgcttggggaatgaagaatcatctgggctaaactgctcaggtcaagaattgagaggaagggcttttcccccagcaaacagcaaatacaagacaacaagaggaaaagcctgatgcactttgaaaatagcaaataatttgtcatgagattgagaggtagctttaagttctaaagattcttgagtgctatgctaaataattgaattttaatttgaatgataggaaaacactgcatgatttttatactcggggggggcggggtgtgagatggttccttgcagtaacagcagtgtgttgagggggtgtgggtgggagagggggtattatgggctgaggtatcagttatggggctgttgccttattcagaagtgtttctttgactatcttctgagtttgggaatcttaaaaaactagatcttccctcatagatagattaaaaaaaaaaaaaatcagaatatcaaagaaccaggacccctaagctgagaagatctttggtttgtatggtctggaagacaagagtataggttctgcaggtagcacagaataagaatttgactggtatgtttgcagtcttaacttctgttgactaaaacagccctgtgtaagagaaagtaacaagtatatttcaggtgtacttaacatatgacttttttttctttaatgttactgtgaattcaagaaggaataaaccattcagattt

SEQ ID NO: 53181 - DNA, 940 bp, Bovine  19866880554285
  misc_feature (1)..(1): n is a, c, g, or t
nctccttggagctgcctgcctgcccatgtacactgagcccgtatctccatctgaggccaagttttgtcactaatgttctatttttaagctctaaaatggggatgaaaattactatcttctcctatctattttgaggaaattttgagcaacaaatatttagtgacgtaaatattttgaaaaatatgtagtatttacacgtaatttcttttgtcttattaagtccaaaatgatcaaaactggaaaagttggatagttacctctttaacagttgtttttatgaactcttttctttcagttaagtcataagcaggataattttcatatacctatagtgaaaagggaaaacaaaagtagatttaaaaatccaataacatactctctttggataatgaaatctgtgctatggacaaagaggtacatgtagctttgaacagtacatgctaaccaccactggttcattcaccatgtagaattctacagcaaatgagtagttttaataatactgtatataaagcagaaaataaactagcgtgcaaatattttcagtgttttatatagtaggagtacagctgaattaacaatatacatgcatgaggaaaccatctagaaagatcttagctaagtggattaaattctttatattggtaggttacctgtcagtcatcttttaaaggtatccttttatttcttctgttacagcatctaatgcatttatgattcctcaacttcaactctgatgaatttcagcctccacatcactgctccatcccttccccaaagctatcactgagatccagttatatctttgagtccactcctaaatttttagcctttagatttctcaacctgatacttgctgcttggtttcacagtgactcctggtcctgacctgcccatatacacctagcggcttcactcctactgtacaattcaaggtcag

SEQ ID NO: 53182 - DNA, 1122 bp, Bovine  19866880637473
  misc_feature (1)..(1): n is a, c, g, or t
nacgaacaatcaattgaagatttggtcagtaaaagaaggtacgtacctgtgtttgtagtcctttaagaccctgttagtgtaaaaggtggccgcgtcgttcatctccttgacataaggaccgggtttgggggactgagagaagagggccatcacccaagcatagaaagaaaaaaaataaaggataagaaagaaaatgccttaaagaagaagagaagcaatggagatgtcaatggaaaactggaggcaaattttgttctgtaaggatcggtgaaatgcttcctgcatctcagaacacaaagccctgaacttcaagtggggttaagaaagagctgctgcgttcagcctgaaaggaaccttcctttcaagaaggatgaaggaggctggaggtggccacaagtttccccaaacactccaaaaacgcgacgaggcacaggggcgacgttccagccggactcaccacggctatccacccaagggcaggaatgctttcgctgacagctgagagatgattaaacatcgtactcccccggttcctctctctgaaagtctggatctcctgaatcttttccgatattggtttcagaagtgcagccacgtcgttctgtaagcaaacatggagcacggttactggggaccgacagaaacgcagtgcctccgttcacactgacctaagcaggaggactcagcacttgtcaggggctttcagaagagagcgggtttttttccctttatggccatactgtattttcactgtctgaagtatgaaaattgcatggatttcttatattgttaatgctgcttccataggcatggggaaaaaaatccagcagtacagtatggcccctgttttttttttttccttttcaaataatttttatatgaggttacattggtgaagctatatttgattgagagtggattttatttttttaatttatttatttttaaaaattttattttatttaactttacaatattgtattggttttgccatatatcaaaatgaatctgccacaggtatacaagtgttccccatcctgaaccctcctccctcctccctccccaggcccctgttttgaagacttctgaatgcaacccagtgaaattgaggtgcagatcaag

SEQ ID NO: 53183 - DNA, 1135 bp, Bovine  19866880714732
  misc_feature (1)..(1): n is a, c, g, or t
ntccagaggctaagactctgtgctcccagtacagggagcacgggttcgatccctagccaaggaactaagatccctcatgctacaaggaggaaaaaaaaaaaaaaaatcttttcaacaaatagtgctggaataattggataccctcatatcaaaaaaaaaataaataaataaacctcaacccatacttcatgttgtagacaggaatcaactcaaaatgggacacccaaaaattaacaacttgtagaagaaaacataagaaaaaaaaaatcttagttatcttgattaagtaaagatttcttagaacacacacaaaaaaacaaaaaacacaaacctttctcaaccaaccaagtagtatttcataagtgcctatagcagagcagttacaggtactaagagaagtgttgaccttttgaataagcaaagttgattgcttttgtttttcaagtaactcaagatccacagtaacttcatctaaagagccatcaaaggaattgtatgttgaactaaactgacatccaccacaaaatcctttttctcttgaactctacgaagtctcctttctctgtgcctctaagaaaatagctacttgtaaatagagtacatgtagcaacaatatacactcatatatatttttccacatctgttgtcttatttaagagcaaggcgttttggagtcagaattgagttccatttgtgactgtcagagtaagtaaatgtgaccttggataaatctctttagctctctgggtcttagttttctcatccttaaaatgagatacgtaatagaaattaccactgggccgttgaaaggattaaaggggctaatattcacaaatttcttggcactaggagtacataatccatcaatggtagatttcattattattctttaataatggcccccacctttgttaagtctaccaggcagttacagtcatctctattgaacagatgattaagtcattgattcagggctcaacaggggcagctccagggcttctggagcaggtcccaggacccccaccacaccccatcacccccagtcaaccttgtagacttttacagaatgggccgcgctgtccagcacaagaagagaactctccttggtgaaggtcagcgccacgggatgcgaaag

SEQ ID NO: 53184 - DNA, 1289 bp, Bovine  19866880852177
  misc_feature (1)..(1): n is a, c, g, or t
ncattgggattcttgggtcaagtagaaaataactgcacagttcatgagacagaccaattttttttcagtatcttaaacactcccctattttgttactggggtgaaatgtgagaatttgctgggaatcataaacagcataaaatacaagatttgcacatctaacactattccagtcctcggttccagacactcagagccacaacatattactcttactcataagcatatcataactcagtcagtgaagggccaggcccctcccccacatctgaaaccctgcagctttaaagatctcctgttttgtggaaaggggagacgggcttctaaatcttagaacgacttagatggttccctcgctctcagaattcacagcctctctccaagagccattaaaggacactgaaaccaattaagccacatattcaacttcttggaactatgatacattcggatggctgacccgggaacaccaaacaaaggatttactgcaacaaatgttgactataaaagccaaaaaaataagagaactcaggaccagttgaaactctgcctttggtttatcctttgtatgttctggctcgtttctggctccagtaagggtgcagcccaggctctatagtttccagggtgacatgacaagcagcactcaggggctttccatgcacagtgtcctcgaaggcaaatcaggcattcccttagcaggcttgccctaggctgcgccacacaatgaactgatctttgccacctgctcttctcctgcaggcatgtgggaccagagctctctgtgctctcctttgcctggcatgagtggcagctgcatcgactggagtcacagcctgacactgtcttcaggtgtttccttaagacaggggagatggtcagggaagggaagggagccaagaattctggaaaatctcacacttgccaggcactggttgttcccactcatttaacagatacttagtgctcagtgggcttccctggtggctcagaggttaaagcgtctgcctggaatgcgggagacctggggttcgatccctgggtcaggaagatcccctggagaaggaaatggcaacccactccagtactcttgcctggagaattccatggagggaaggagtctggcaggctacagtccacggggttgcaaagagtcggacacgactgagcaacttcacttcactcactttaatgctcagtttaggacaggctcaatgccaagggtccccaaatttatctgaactttaaaatatctggggatcggttagaaattcccaagcaggaacact

SEQ ID NO: 53185 - DNA, 885 bp, Bovine  19866880870841
  misc_feature (1)..(1): n is a, c, g, or t
ntattaagcatatatttttatatttactgaaatggactgtggtgactttggataataaggaaaagtttaatattaaagccatgtttatcccagtataattaacatgttaacccatgggataaatgccatcaataaaaaattatgaaatactttttgctctagtgttaaattatagtgaaggtaaaagtgttagtggaagggaatctttttatagaagttaacagtggtcagttagaagagaaattccaaagaatacatttaaggtgatttggacagctcctatgtctgaaggtacgctcgctgcatttttgtctggtgctaggaatcacgcctactttgcatataaattgatatacctttttaaagtagaaaataaatggaaacaaccatttctgtttgtacttgtatcttccttcatcggtgactagacaatgtttattgattgaatttttggagatatatacctaaagtagcccacaaaaacttcagtggtccttttgtgcgatttcttttggattgttttacggattattatttttttttaagaagtagatttgttacggcccataaaagagctcttgggcaagagcatttgacaactttattcttcaatttgaacatataattttatggtgacttttatttttactgaagttgtggttagagtctaaaatcagtactttaacatgtttgagcttttctatttccagtgaaatgatttctgttatggaaatgtcttaggccatcatcaagtgctagctttggagtcggaattttgtatttataattctcaacttattaaataataaatgtttgacatgaacctgtttggagggcagaagatgatggtgaatactaatggagtaaatggaaacgtgtggggtg

SEQ ID NO: 53186 - DNA, 2074 bp, Bovine  19866880969827
  misc_feature (1)..(1): n is a, c, g, or t
naatacctagactttgaaacacataaatacattaaatgttttctttggtgccttttatgtattcactcacctgatcttcacagaagttctacagatatggccatagttggtcgaatctgcagtgcctggaaggcatcatttaaatgtagattgtaaaatgtatcccagtgtctaagatgagtttgggggttgaatgttaaatttagccaggtctagtattattacctctactttgcagatgcggaatcagacacaggaacgataagtgatttgtctgagaattcaaaattgctcactggtgaagtcaggacttgaatcaggaagtttggctctaaaaacctgtattctaattgactgcttcacaaaaccttccataaagacagagcaaataaattgtaggtcaagtactgtgggggctgccgattaatcagattggccaaaagatttggagaatgtgattgctgagagaggtttagactcctgagggaaattttcctaagtagaggagagggaatgaaagtaatgaaaacttaaaggttgtgtagaatttaagtgggtgtggttttttactttccttctcagttttcccagggcctcttttcattacctccaaagtactggatgatcttgtttgccttaacttccaaaaattgtctactgttgcaatgtcaaggtctgtctttttgagattccctgttttccagagtacctaacatctctttcctgtacccagtatcttattttcagggcagctgaagtggtttttagcacctgtaaggctaaagcacgtgatgtgaattatttgattgcctctctgctcaagatgaaacacatgagtttctacagagtttatgttactattcagctttcactgtttccctgtgccagcacttacattatgaaaaagatactttactgaattcctaccatgagtttgtcacatagattaatggccgccccctccagggttcttgcctggagaatcccatggacagaggagcccagcgggctgcagtcagtggggttgcaaagagtcggacatagttgagtgactgacatactaaggattttttttaaaactgtaattttgtcattttaatctccatatgtggtgtattttgcttttatttgattagctctgagttagtgtttaagaaacaggatctggagtaagatctgtttgaagctctttattttatcatgtgactggacaaaacctctctgagccttcatttcctcatatgtttataaaaagttattgagaaactactttgcactattctaggagttagggatacatcagtgaacccaaaaagttcaaaaaaatccttgttctcttggaatttaaccttttagttgggagagactgacaataaataatagaatattaatagtacttacattttacagtttttttcccccaagagtaaagtcttctgcatataaagttttctctccatagtgtgtaagaaatgtgagcacctattatttttaaagtttgattctttacctcacctgactagtcctgtgttgggataaaattaagttccttgaatgttactcatctcagaagtggacagttagtaataatttttcactggtgatattgactaattaagttcctctagtattgttgaggggtgtggacaagtagaggaatgacagttagtcactcatcaatgtatgtactttgtttttatttccaacagccaccaaaaaagacatccaaaagagaaaagcccaaacagaaagccactcctaaaagtaaaaaatctgtaaaaagtgctaatgttaagaaggcagatagcagtaccaccaagaagaatcaaaatagttccaaaaaaggtacgttagaaatgacacattttcagcaaccctaaagatacaacttatatgctatagtatggtttttaaacatatatgaaaactaggtaaactgtgaagaacattgaggggagtataccagttttgtgtatttataatttttcaaaattgacaaaaatttcagtgtgtgttttataggtactgtagagtggtgatctataattttttaaatttagtaccttttcaagaa

SEQ ID NO: 53187 - DNA, 1116 bp, Bovine  19866881030360
  misc_feature (1)..(1): n is a, c, g, or t
nggtcttggtttaaaagtgaaatttacaaaaatagttattgcatcagggtactgttggaactatggtgagttttatcttttttttttaattgctttagtattttcattattttggttttaatcagttgtttctcattaaaacacagttttaactgtgttaaaacctgaggactgttgaagtcctcaggttgacttttgtgctcaccctggtctgacttcaagtgtggacccaggagtgacgtgtttttcactctcactttgggtcttgcggtcattacttttcctagaagtttcaccttggagcttgagtcttctggtacagtgtaagctccagaactggattccacagtaaactggatcctgtggtttcctctaggaagagcccctcatggggggtggtccccgtgggtggggagggcaggtggggacgggagcttgcactcacccgcctttgcgttccaggggagcggcactgctcggtgagaggcagtgagcacttcctccgaaggccacagcatctctgctccggtcgcctcccagagcaccagcccatctatcaagcacgctgcagctcagccggacctcacaccagcacagagaagccgcggcttccggggccacctcctcccctctcccctcccgagccgggagaagcggcacttggtcactcgggcgactcggcagcctctgcttccttccagagaaccgaaaatcctggcttcacaaagtgacagtatttttgtttgcactcactacacacccccacggtgtagaaacctccacagagtcaaccagactttattcttgtacaattttaatcagttcttactgtagaatctggagtcaatgctctaatttttttttttataaataatatatattatgtatatgaaatgtatatctatagtatgtctggagagacaggactacacactgaaatggataaaagtagtttgtagaaaatcgtaaggtactggactttcttacaaagcagctcgggcgatctctcagaacacaagcagatgaaagagatggtcttgcctgagaatgaggttgcaaatccctctctgcagcagggggttacagaatgccgttctttataaccaaagaacttag

SEQ ID NO: 53188 - DNA, 1497 bp, Bovine  19866881047982
  misc_feature (1)..(1): n is a, c, g, or t
nttattgtaaaactgtagcccggtaagttcttgggacacaggcatttctcaccccaacccacctgtcagcctcacaaacgtcctactctaataaatcacttcttatctaccgctttgctcttgctgaattcttctctgcgctgagacataaaaggactgtggtaccagagctctttggagcctggtttcaaaactatttcccagagacctagatgctgcttggttcttaggaagaatcatcagcagatctaagcatcccagtttttcacagtttggggatacttccagaagaaaggcttatacgattaagatgtattcccaacacatgtaaattacaaaggaaggttcttaaaaaattgcttgtattgatttgtttaaattattgttaaacattgttaatttatttggagaaaccagttcacctttctaaaaagtgaatatggctaggtaggacatgtcaggttggcaatgtcattggcctatttttttctacagtgagattaggagtactgagctaagttggggctcttataggattacatcctagggagtgataatagatacactaactgaaaatcgttcacgagtaatgatggaaagcactcactccctgggatggtagttaatatttgtaaaagtcagctatgcttattgacttgattcaacaaaaagtcatgtactgttactatgacagcagaatatcactccacattaaataacaggacaaaggttctgaaaaaggaggagggtgggcagactgagcagaagcagagaagtgaatgtagtctaagcagatacccatgattcctttttcttgggaaagtaagtttacactgaatatcttatcccaggtttaaattattgagaaatgtatccttccctttaatgttgattaagcagagccttccctggtggtccagtggctcagactccacgctcccaaggcagagggctcagattcaaacactgatctgggaactagatcccacagaccacaactaaagaccccacacgtcacatctaagacctggcacagccaaataaataaattaattaaaataagtaaaagagattaagaaatgacagaaaaacacaactattgtatgatttcaattatcagtggaatctaaaaaataaatgaattaacaaaatagaaacagagttatgtataatagagaacagtcagtagtcccctggaggggagggaggagaggggaatagaaaaataggacaaggagatgaggagggacaaacttccagttgcaaaataagtgagtccttggtatgaaatgtgcagtatgtggaatacggtcattccccagaggatgagatggctagatagcatcaccaactcaatggagatgaatttgagcaaactcctggagacagtggaggacagaggagcctggcatgctacagtctacgggggttgtgaagagtcagacatgacttagtgactgaacaacaacatctttgtatggtgacatattgtaacca

SEQ ID NO: 53189 - DNA, 1358 bp, Bovine  19866881238068
  misc_feature (1)..(1): n is a, c, g, or t
ntggcaggatatgtattttaattgctcttgattttctatgtacgagtattttcatagcagatagtggggactctcttgatgaatgatacagcgtatttagtgagccagtcaatgaacggatgaataatgccatgatttgtttcttctatacataccattaccctaattagtaatagtgagccacaggatcacttcccccagtgactggtaggttacagaggaaagaacagataactgtctcaatagtctcaataaagagaaaccacaatctaggaaagtctggtgtgaagatagttaaccaattatttttgaatttgggtggacttatagagaaagtcggagaaggtgatggcacccactccagtactcttgcctggaaaatcccatggacggaggagcctggtgggctgcagtccatggggtcgctaagagtgggacacgactgagagacttgagtttcacttttcactttcctgcattggagaaggaaatggcaccccactccagtgctcttgcctggagaatcccagggacgggggagcctggtgggctgccgtctgtggggtcgcacagagtcggacacgactgaagcgacttagcagcagcagcagcatagagaaagtagtccattgtgactttttattgtttgcagagagctcacataaaagccaactgcccagccttaccctaagaaaaagcttgacagtcttcaatttcctgtcacttcaagtctattttctatttaatgttaggctcgtgatctttgaaatcccttggatctgggtttctcttatagaggagaaactccccatgagtatttctgcatctttggtctagttagaagtttaaaccagcaacccagaagacttggctcttttattaacctgaaaatattcccaaagtagtatttatttgttttatgaatttgctgtgggaaatttataaaactgtatagacaatatggagttttttaaaaattctgaaaacctaaagaaaaagagccatagagagacttccccagtggtccagtggttaagactctcccttccaatgcagggggcatggatttgacccctggtcagggaattaaggtcccacatcctacagggtgcaactaaaaattaaaaagcaaacaaaacaacaacagcaaaatgaactatggaaaaccgaaggttcacattggagggagcaggcatgctctttcctatcacgggaggaagacactgtaggtctccgtaggaaaaactaatcttgtgtctccttttaaatggaaatttcttctgcaaaaatctggctttccacctgatctaggattataccagtgagtgggcaggcgagggaaaggcagtgaggggtag

SEQ ID NO: 53190 - DNA, 2002 bp, Bovine  19866881246234
  misc_feature (1)..(1): n is a, c, g, or t
ngacaggcgaagaggataaaggaaagggggaagaatgagggaacagacaggcaaagaactagagtgctccagaaactgtgagaaggggacagggagaaagcatgaagcaagctgaggcagaccgagtacctgtctgagctgaaggacgccgcctgtgttgacgtccttggcctggtgaagctccacggcgggcgtactcccccccagtcgttcagctccaggatggagatccacatctctattctgcgagtaacttcattccacctgcagaaacacgtcccagcaaacaaccaagtcattattcttttaacatttatttattcttatttatttgactttgttgggtcttagctgcagcatgcgtgtgtgctcagtcgcgtccaactctttgcaaccccgtggattgtattggctgccagtctcctctgcccatgggatgatcctggcaagaatactggagtatgttgccatttcctcttccaggggatcttcctgacccagggatcaaacctgcacctgctgcattggcagctgaattctttaccagggcactacctgggaagctccttagttgcagcacctgggctcagtagttgcacagggtctctacttgtggctcatgggcttagtcgcctctcaacatggtggagtcttacttccccgactgtggattgaatccatatcctctgcactggaagacggattcttaaccaccggagcctcaggaaagtcacatccatgacattattaaccaaagacattattagcaataggaagaagcccctagtcactgagcatttattatgtgtaaggcactgagctatgtgtatcacaggttattttcctatttagctctcagaacaacctcgtatggtataggttctttttatttgattgaggtatgacacagtgaactgtctagctctcaagtgtagagctggatgagtcgtgacaaatgcacgcatctgtgccccttgtctggccatgaccatggcaggcttgctcaggccccttcccactcaattcccacaccattcgcactagctgtataacctcagattcgttttatctgctcaagaacttcatataaatggaatcatgcagtagtgtgctcctctagctctggcttctctgattcagtacaatgtttgtgaaattcgtccaaatgggtaagagtgggacacagtccttttccttttttttgttgagtaatattctattgtgcaactactaacacagttcatcattctcacactgaaggacatctgggttgtttacagtttgggggacattatgaatagaactgccataaacatttatgtaccaggctgcttatggacttacattttcatttttcttgggtaaatacctagaaggacgatttctgggtcatgggagaggcaaagaatcaactttaaaagaagataccctcctgttttcttctataagctatatagttttatcttttacatttaaagtcgtgctccatctccaattaagttttgtggaatcatgtgaattaagatcaaggttgttttttcccaagtaggtacccagatgtttcagcctcgttgaaatgatgttcctttgccttttgaattttcccaaaacctggtagttcctttcattattcccatttcacaaagcaggaaataggctcacagagtcctaattctcaaccgctgtccaagcgcaagccttgaccccgcgcctgaagccctcagccaagcacacacctgtcatgcagcgttctcgtcttagcatgaagggaatcgacttcccagatggagctgccgttcccggtacaccggtggccccacacttcgatggccagtgctccatctgaaatgaactccaggaattcttccgttacgttgaccacgtaatcctgggataagtagggaaagggaacaggacaggaattatgcagaaaggaatctgtgaaatttccttgttacctttcactttagagtatgtaagctgatcccaaccttaaacccat

SEQ ID NO: 53191 - DNA, 1283 bp, Bovine  19866881258215
  misc_feature (1)..(1): n is a, c, g, or t
ncaacccactcgagtattcttgcctgggaaatcccatggaacagaggagcctggtgggctgtagtccatggggtcgcaaaagggtcagactcagcgactaaacaaagcaacaactttatatataaggttaaaaatctggaatccttgtataaactctctaaagacatgatgctttcaccataccactttaatatgtatctttccatagtgaaattcccctagaaacagctgggtttacctcacagtcattaaagaatatgaaagaggaaaccacgacatttcagcctaaagatagcctttaaaaaaaaagtgagatatttgacctgaatgtgcaggaatcctcacgtcttggaatgtactcatagacgcataaaagctttctgaatatattctgaaaaggccaatgcacttgctatccagctatagaacagaatcccaggctgccacaccaactttaatttttaccctaaagctgctagtccaaagaactcttcttaccatttaagatcttctcaagtttgcctccttaaagcaagatggcttcagtggtggtgctgacatctacgcaggtgtctgtgtggtttctgcactcacgtgtgtctgttgtttctctctcgtctcccacaactagaactcaggggagaaggtgagcaaggtgagcttggtggacctggcgggcagcgagagagtgtctaaaactggagctgcgggagagcgcctgaaagaaggcagcaacattaacaagtaaggggcctgtgcgattcccacggtaaaccccagcgtcccaccagcttcctgtgtgtctgggcaactggtccccttatcaggggtcagatggctctgatcacaggtgattcagagtgtgtagctttactgaactgggttaaagaaaaacatcagcctgcctctgttgagatgcatgaggtttatttaagtgaaacagcacgaggcagccgggctccaacattgtccatacaaacgctcagaatatcattgtataatgtaatttctcttaggtcaatgcaagtcacagttttatatcaaatcatatcttagatctaactctaggagcttattctaaagagaaaatctacttcaaatcccttcataaggctaatacttgtcttctcttggtggctcagtggtaaaagaatccacctgccaatgcaggagatgcaggttcaatccctggattgggaaaatcccctgaagaaggaaatggcaacccactccagtattcttgcctgggaaatcccaggacagaggaaccgggggctacagtc

SEQ ID NO: 53192 - DNA, 851 bp, Bovine  19866881331170
  misc_feature (1)..(1): n is a, c, g, or t
ntttattttttctctcttatagaaccatgtgtcactgacattaagcttgcagctgctgcctctcccataagccagaagtaggggttgaactttgttccaagaacacacctgttgcttaggggaaagaaaaaacccacatacctgattgtacagtatggaaatttgagaatgacacaaatgtccatcaagttaactcctgtccctgcgtgtaaaagctgtttcacagacactaacgatgaaaaagggcagccgagctatgatttaacgtctgtcttgatgtgttggctgctggttgggcttaatttactgaacagtcaatagtctattgacagaacagaccacaaaaaaagggaactaatagctacaattaggaagctctgttgaaccgaagaacatagcaggtttagaaaagattagatcttgtaaagccgccttgtatgcggcataaactgaagggcttatttaaattacccttcaacccaggaacgctgacacagcttgcaccctttttaagagataaacaaacaatgcacaattttataatacatgtttagggtaaatatagtcctcaatgtcaaagaaaaagatcccccagaaactgggcctgcagaattgtaagcccttggtcaacaatcatttatccttaaatggatgaatgtcgtttgtttttttttttaaacaaagctgtcctgttgttattcatggtatatggaactaatcttaggtctgtttctaaatgatttgagcatcatgaaacaactacaaatcttatagctcttcctaactcaagccctttttggagatttatagaatttacatattaatgtttgtaaaggtcggaacatttattt

SEQ ID NO: 53193 - DNA, 1020 bp, Bovine  19866881496591
  misc_feature (1)..(1): n is a, c, g, or t
ngttctatttaacccaacagtttccaatgagtccttactatatatgcaggcccagttctaagagctttacttacattatctaactcaacccctcacaacagatttccactttacagatgagtaaattaagcagagagaactttccaagtcctggcagaacaaggattcaaacccagatgctctgagtggattacagcacttttttctaacaactatgtccatttgtttttgctgacagtattaattaaacatctaggatacagcaaataaagataaaagtaaaaaacaactcagggatttctgggatgagttatgtattcaatctttcaatatccctccttctcaaaactgagaatgctcttcagccatccaataccaagcaggacaaaatatcacacagaagctaccgaaacagcaaaaaccacacaatcttataaaccagtgccaggcaaaccatagtctgtggcccagactcagtcctcagcctgtgttcatacaggcctcaagctaagaacaattttcacattttttagagttataaaacaaagaacacgcaggaacaaaacctaaaatatttactatctggccctttacagaagaactttatagactcctgatctaagctactgaatacataaaggagctttcacctccctccaaaaaaatagctaaatgcagaaactgacttgaaggacaaactgcctctaggaaaataaaatgagtggattcccttagctccaagccagaagacaaaacctctgaagcacatcccccaaacaagggcaaaaataagtagttcccctctcaccaggaggtggcagtagattcttcaagaggcaaggttctgatttgcccatgggctcaagctttttgtggcggctattaagaaaagcagcttgacctctccagagctcactttctggacctgacaatctgcataaaaaggaaatgggaaaggagactgaacaggcaacaagacctaaccacatactctttagggacctgttcactcccactaga

SEQ ID NO: 53194 - DNA, 696 bp, Bovine  19866881510142
  misc_feature (1)..(1): n is a, c, g, or t
nccccccgcgcccccccccccccctgccttccagtaagcattcccaacatcacagagacaggaagtcctgtggtttagtctgtaagaaaaaggttgctgaagaaagaacatactgagaagctctaattggtgaatgccccacagtaacttcagtatgcagtggacttcattttccgtctgtccttatatttaatatttgcctgtgttttaattttaggaataccaagaggacaggaatgaccttgtgatttcagagactgcactgagacaggtggcttacattttcaagtgcggcaagtctactctgcagataaaagggaaaataaattccattataattggtagggcagaactatggatctgtactcattatgataaattgcttttataaatatgctgtctgtatttaggattttgttttgttttgttttcctagacaactgtaagaagtttggcctggtgtttgacaatgtggtgggcattgtggaagtgatcaactccaaggacattcaaatgcaggtaagtggtcctttcaaccttgcccagccaccaccagaccatcccttctgtttacaaggggccctccatgtccaactagaaaactcttactgtcttttctctagacacagctctgtcttcacctcttctctgaagccctctcttacttctggacagtgttaattcccccttttcacc

SEQ ID NO: 53195 - DNA, 2139 bp, Bovine  19866881512953
  misc_feature (1)..(1): n is a, c, g, or t
nttcgtgctgtttttacattcgcttaagttaccacccttcagttagttaactgacaatgaatttttctctccacaacttcaagcaagatgccattttaaagatcagaagttaaaaggaaaaaatgtaaactttagatatacctcagcagagctaaaccagaagtcaaaacaggaaattgcaagtcagtggaacacatgcgaaagtcacaggtactgcgtgactacacaagccagttatcctgacaagcaatggcaaagacccactaactgagccagatctctcattctttcagtcctcagctgcacaaccaaaaaactttgtttttgcccagaaaccagtggacgtttaatcaaaatacatcagtataaaacatgccatgtcatgaagctccatgctattcatgatgactcagcagctgctgctaaacacagaggtgacagcctaggatagctgacagcaagcaggtggtctacaagttcacagaagttttgataaggactaaagaacatccttaagattttaaaaaatcctcaaattaaatcttcttttgtatatgcctggatacttttctttggtagtaactgccaatactaactgttgttgttcagtggcaagtcgtgtccaattctgcaaccccatggactgcagcacgccaggctcccctgctcttcactacctcccggagtttgctcaaactcaagtccattgagtccgtgagtcatgctatccaaccatattagccaatactaataatacctacagagtagattaagaaactcccacctttaatctcaattcaatagctacaaatgtactttttcaattaaatggctgtggcaataagctgaatactttagacagggggaaatgataaattaccaaactttaaaataaaactgcacagtctgaaatcatatcagctctaagacaatttggatcacaagtgttatgctgttaaggcatcatctccctcaaattaagtttttatccaagtatatttaaaaataaggtgtgactttggcttttgccacctagaatataggagcttctttctaaactctgtccagaccatccaatgatctgtatttacatttcattttttatgtagtaactttctccctaaggaaagcactcagacatttattttttcagaaaaaccagaaagcacatgtgtcaaacttcctcccaacaaaaggattaggttaaagggccaggcttgtgacctgaattctaatcttgctcctcacaaagaaaatttgaaaaccaagcctatctgggggaacactggtgggaggtgatagtaatgtcaagacttgtaaccattagtagagagctacctaacattataaactacaaatttcactattaggaaacttctcccaaatctttacttttaaaattctgtttttaatgatacaatttaacaacagcaccaaacatgtttaactgttaaatatttattatcatccgaataaagcaatctaaaagtctacctttaacagtatgcaacaagttaccagacccttttgctatactcttttttataggtttaaggcccacacttacttcctacctcactatcagtgaaaagttttataagtgacttttattagaaggttttcaacattttcccactcaatcccccgtaacaaacaagcaaaacttaatttaagatacttaacttaaagatacttaaagatacttaactttctcagaatcaaatgtctgaggataaactcatatttttataatttcaaacacccacaagtgcacaaggtggttaaatttcaagaccaccaacattcctgtagtgtcgaaagtacctaaacttctagaatacccactgcaatattaaaatattttgtgcatgagatcagaactggagtcccggtcaactgtgcataatggccaattctagtctccaaaataaaacgcgcgggtgtgtgtggggaggagggggaaaaagggtggacaaaagtggggagggaaaagtctcgcgacggaaaaaaagacgtagtgcggagagggactttcaaaatgccccagtgccactaacgatatcccggttgaagaaaaaaaataagccaggactcttatgatcggggagagccacggggagatggagaatttaaaggatg

SEQ ID NO: 53196 - DNA, 657 bp, Bovine  19866881565995
  misc_feature (1)..(1): n is a, c, g, or t
ncaaaaatggcaagagtacagttagctatgtagtttgaatgagccctgtgtgtatctttggaggcggaggtgtgctgtaagagggagaaaagcagcccagagaaataagcaaacactgatctctgtaggaagctcaaggttctcgctactccccccttacctcttaccccatctcatcctcaaactatccccccattcccaacctccagaggtacaactatgggggatgcaatgtgagcacagggggttggtcactgtgcagagctgatacaggctagtctaacgggggagtgagcagtggggtatgatgtgtacaaaatgtaccagcaatgtctctactgcaggatagcagtatctctatgtatctttaggaagactatctttgaggatgaatgtgctcattggcaggaaggtgaggccaagacacgccgtctaaacagacctttcagaagtacttgcaaagcacacaggacatgtggctgtacagcctgctttttcacatttccggtacttcttctccgacccaccatcttcatcctcatccgtcgtctccgtggcctttttctttgcctgagaaagaaccagctgaggttaagatcaacactggcgtggcccagggtggaggtggtgggaggtttactccgaaatcacttccag

SEQ ID NO: 53197 - DNA, 723 bp, Bovine  19866881724931
  misc_feature (1)..(1): n is a, c, g, or t
ntgaggtttatatccctgatttggatgatactggatttcagatgtactaaaacatctgttactaggatatgcaccagaatgccttatgtcttcctcacaggaaatgttgtttatagacatcttctgttgttttagtattgttaatatgtagcagatgcctggggcggcgaggggaccgggtaggggagaagggggacgcagccttgagcaccttagaattgttccaagatttaaatttgtttctctttgaatttttattctataagaacaaataatgaggtcttaaagaagaagagatttgtgccaacttgtttgcatatcagttgtgtatatattagggtgaaatgacacttgtctttatcatcatagggtttttgacatgtaaagactgtaaaattgaatgtgattggttaactaaattgaactgattttacagaatgagtaaataaaaattaactgagtacatcctacatattaaaacagtgcttttactggttaaagacgtagctgcttcgggagttagattctaaagactttcagttcccagagaacattttaaggaaaacctacagtatggcaaggagatagaggaaagagatttttttttaagtaccatattgaatccattatagttcagaaaactaaggtactagtttctgacattttggtgagacttagttgccaggtttcgagggaaagatatttcaattagtgcttctttat

SEQ ID NO: 53198 - DNA, 1326 bp, Bovine  19866880689727
  misc_feature (1)..(1): n is a, c, g, or t
nacatgagtagctctgtatttaggtttttaaggaaccttcatactgttctgcatgagtttacatttccagcaacagtgtaggagggctcccttctcgccacaccctccacagcatttgttgtttgtagcttttttgatggtgtccattctggccgtccagcttctgagtgcatcagggttctcattaagccttttaagggatggttgtgccccacctacgcaccagtaactcactctcagtgggcagttttattttcccagatgtgcattatgctcaggagggagttatgactaattaactcataaaagaaacgtccacatgaatgagccactgcaaagcacctgttgttaacagccgactgtctcccacctaggcgataaagagtctgagaacacaggacctgttttctttattgaaaagtgtgtgatactaactgccttgggtttgcacacagtacagccctctcaggcaaaggggcagacgcgatttatagccaatgaaacacgtgtgccgggcacagatgagcagcagccaccagtgaccaggctgacctgggacgttcatgggcctcaggtgcttctgccttttgaggtctcttcctccattaaaaaaatctgaattttataacagcatcagcataaagatagatggaatccaggttaggtttattattacgtagttagcatggtaacagtcatatgtattcatttttcttccttttgagttaaacagtacgtaaaacttaaaatttgtttgtgtgctgccacaggtgggaggacatgagccagggtacctactggcacatgagccagccctgcccaaggtgacagacagtggccatcctgaccttggctggcctggtggtaacggagtactagccccctttcacttctttttttcttgctgcttttccccaagcaacagggggacaaggcaccgaagtgaggccagccctctatcagctgcttacagggaaggcggcatccatgtcgccacccatggactcaggagccaagggcggccgtggttgggaagtgtccggtcccgccactgacacacccgtgtccagcaaggctgttcagtgcagagggcttgatctgaagaaggcagtggtgccggtagtcttcccagtggatgctgtcttcctgcttctcctgcttgaaagctttcaaatctcacttcgtcaacttttgtccaaaattacagcttctcaaaaggtgttccctttcacacatttaatctttgcatcaataatgcaaaggagataatagtatcaatatcttcattttatgcatgagaacactgaggctcttcttttaatgttt

SEQ ID NO: 53199 - DNA, 1881 bp, Bovine  19866880731540
  misc_feature (1)..(1): n is a, c, g, or t
ntacacgtaaggacctgctggatagtgcagggaactctactcagtactctattcatgacccatacgggaaaagaatctgaagaagagtggatatatgtgtgtgctgtgcttagctgctcagtcgtatctgactttttgagaccccatggcctgtagtctgtgaacatatagctgattcaccttgctgcacagcagaaactaacagtattgtaaatcacctgctgtccagtaaagatttaaaagaaagtggaaggcatcagatccactccagtctcccctcagggtactctgagcatccctcatggctggatcctaactggctcacattctgcccctcagggcctctgctggggtatgagagcttcgggaccaaccacagcctttctgaccaggagcctccaagctctccaaggagggccagagccgagtctggctcctgagagacgcaaccgtggtgaagcagagacatatcattcctacccttcagcaagaagactgaagcctgtgacgtcactgctgggaaaaacactgagacagtgtcctccaggaggacctgctaggaaacacgtgacagaaatcttgcttctctttagatgtcagttttgtctgtgagaagacaggcgagaatgagaagagtgaggcagagggcaggagacccagatgctggagcacacggctctgatgaggccagggatgtgtgagtgagacaccacaggctgagacactgttaccctgctgcagcacaggaagtgttcacggctcagggcgtacacacggagagcctggggtcactctactgacacctcagggtgcacagagagtccctggggtcactctgctgaccctcaggatacacagagaccctggggtcactctgctgaccctcaggacacacacagaccctggggtcactctgctgacacctcaggacacacagagaccttggggtcactctgctgacaccacagggagcacacagaccctgcggtcactctgctgaccctcaggacacacagagaccctggggtcactctgctgacaccccagggagcacacagaccctgggtcactttgctgacacctcaggatacacagaaacctggggtcactctgctgaccctcaggatacacacacacagagaccctggggtcactctgctgaccctcaggacacacagagagcctggggtcactctcctgaccctcagggagcacagagagaccctggggtcactctgctgacacctcaggacacacacacacacacagagacctggggtcactctgctgactctcagggagcacagagagaccctggggtcactctgcggaccctcagggagcacccagagaccctggggtcactctgcggacaccttagggagcacagagagaccctggggtcactctgctgacacctcaggacacacacacacacagagacctggggtcactctgctgaccctcagggagcacagagagaccctggggtcactctgtggaccctcagggagcacccagagaccctggggtcactctgcagacaccttagggagcatagagagaccctggggtcactctgccaacaccttcaggctgctctctcaggagacacatctccaggctgcggtctggctggtggtgtcttctgttgaggagaaatgtgccgcgtcttagcagcatgctttttcatctctagcttagtttgttttctgagtataaaagaccatggttttaaaagacttaagtcactgagcgcaatcttcttgtctgaaaggaacttaatgtttcactaataaaacaactggatgtaaaatgcagtgtgcagaccccacaataaagaagatattgtctgtaagggggtttcacatttccagggaa

SEQ ID NO: 53200 - DNA, 2319 bp, Bovine  19866880803237
  misc_feature (1)..(1): n is a, c, g, or t
ngggctagataaggttgtatactaccccccccccaagattccacagggatttatgtaagtgctaacgtgaggccagagtcttcatgtttttagagaaaatcattccagattagactgaagtcctggggctctggactgatcaaaaacagatccagtctcatgatctttgctccccagaaaagccacgtttccctaaagacagcattgcattacccaggagaaaacaccgggtccttccactgctgttgttattttcctgaccagtgccaccagcataacatctactcctgcccagacttgttccttaaacaaatatctgctgagagtttacctgtgccaactggacattatcacaggttctgaggacgtggccggggacactgacagcccgtcccagccctgtgcatgcaggtgatgacccacgtgatgcgtgatgtgaggaggaaccccacgggctctggccgcacagaccatgcacacctcaggggaggcttggaggcccacagacgagatgttcagcctcaggcctagagagtcaccggtgtgaggctggaggtgaattaggatgcagggccttcattccaaaaccagtccaactggcctgcagcaggaaagctccagaaagggcctgggtgaggctggagaggctggtagccagctccaaggtcaccgagagggtaaggaagccacgggcttccagcaagaaggtgcatggtcagggttatactctgaagagaccattcctgggctgcaggactgttgcttcccagcttttctagtgtattatggaatcatttgttttactttatcactgtctgccacggaggagcaaagaggagctcaaagaagagaatctgtttcgaattgaaaggaaaagctgtcataatcaaaaagctgactgcttgctctatttttatatgctccatgaaattttatagcactgagaaaattttatcttctaataatcctggtgtctgttgcagagttagcgtggtttatgttatagagtgctttttttttccctttcataaaatacccatagaattttgacccatcctgtgaccaaattctggacacaaaggaggtattttgattataatagtgtgaaatagatcagagataaggtaagagaaaggctctggcctgttagcatttagctaatctatttggccatcatccaacagaaaattttctctgagattgcgagtttcagttactaaaagctaatatatattcagagacaccaattttagctcacactcttttctagatttagactttgctataaacttcttccagtatttatagggggacatgtccatgtccatgttagtcactcagtcgtgtctgactccttgcgaccccatggactgtagcccagcaggctcctctgtcctggggattctccaggcaagaatactggagtgggttgccattcccttctccaggttgtagggggacacttacctataatgaccaaatctaagtacttgtatttttgaaattgtattgacccatgagtccatgaaacataaacatgttctgtttaataaatacggttcttcctgcagacataggaggatggcaatctccatctttccttccaaccccagttttaccaggtgctgtaagaatgtgctgagcaaaagagttgtatgttctttttaacaaggtacagttggtttacagcattgtattcatttctgctatacagcaaagtgattcagttatacatatatatattcatatgtattcatacatttctttttatattcttttccattgtagtttataataagatatggaatatcgtcccctgtactatacagcaggacctcgtttatccattccatgtctaatagtttgcatctgctaaccccagcctcccactccctccctcccccacccttggctaccacaagtctgttctctgtgtctgggagtctgtttgtttcatagttaagttcatttgtgtcgtattttagattccacataaagtgatatcatatatttgtctttctctttctgacttacttcacttagtatgataatttccaagtccctccatatggctgcaaatggcatatttcattcttttttatggctgactagtactatagtgcggatatgcaccacatcttctttatccagtcacctgttgatggacattaggttatttccatgttttggctattgtaactagtgccgcagtgaacattagggcacaggtgtcttttcaaattagagttttgtccagataatatgcccaggagtgaggttgctcgagcatatgtttcttagtttttagtcttttaagga

SEQ ID NO: 53201 - DNA, 1309 bp, Bovine  19866880834748
  misc_feature (1)..(1): n is a, c, g, or t
ncccagggagtggggggaggccttctcaggattgtgattttagttcaataagtgcagttcagagattgatgcaagaaggcatcgggttcaagagtgaagtcaatttttcctgaagttaggaataagtctgtaaattctggttatatgaaccactgaagaattattgcacaggggtcattaaatcatgtgcaaagctgtgttagaaccattctgtctcctcagtttattagttacaattacattattaggctccagagtgttggacaaactcattcttttagctttaacattgcagcaaacgacctggcaacagatttaacatttttctttgaaatgtctaagattaactctttaatcattggctgaaaatctctttataatcctaccagaatgctagagctattaaatactttgagttcttagtcacttagaagtcataatgatactcttcagaggaagaggttggggagaggaggaatctctacttctctcctctgtggcaggggtccagttcaagagatgggaggtcatgatgatgaatgtctgtgtattatgtgtactgatcacaggtacacattttgcgtcctattcaggagagttacttctgaacaaaaagtgaaaacttaaaggtagcgactgtgcacaatgacctaagggctgattttcctttagttttgttgttttccctcagcgctgagaatggacagcatatgccagggcagaagagggtgggaccctctgcacagaagctgaaaggctgagaagttgctgtgttggtggggggacaatggggactgagcttgtgaaacacacacacacacacacacactcctgtagcgaatacagacaaaagttgggattttgttaccaaaagagtggtgtgacttctccaagaagtgtgggaaaaataaggatgatataaacaatgaggggaaagagtaggatattcagaaagctatcaaagaatcattgacctcatggactgtagcccactaggctcctctgtccatgggattctccaggcaagaatactggattggattgccatccccttctccagcggatcttcctaatctaatcctaacctaacctgcatctcctgcattggcacgtggattctttactatctgagccaccagggaggcctctgctgctgctgctgctgctaagtcgcttcagttgtgtctgactctgtgcgaccccgtagacggcagcccaccacgctcccccgtccctgggattctccaggcaagaatactggagtgggttgccatttccttctccaatgcataaagtaaaagtcaaagta

SEQ ID NO: 53202 - DNA, 1785 bp, Bovine  19866880980467
  misc_feature (1)..(1): n is a, c, g, or t
nccacgcccacagccgctttctgggggctccaccagcatcaagcgcctcacctgccctgtcatcgttccttgcggctccatttcagaaatagccagctttcagtagcgtcactgggtcctcctatgtctgagctcaagagatcgctcttttaataccagaaactccgcctgttgggatggcctctaaaaagtgaaagtgaagtcactcagtcgtgtctgactctttgtgaccccatgggctatagcccaccaggctcctctgtccatggggttctccaagcaagaatactggagtgggttgccattcccttctccaggggatcttcttcacctagggatcaaacccaggtctctggcattgcaggcagattctttaccatctgagtcaccagggaagcacccccccaccctgggatgtgcactaaggttcttttcaattatccgaaaaccttttcattttcacttagaaaaatacccaggatgagagtggagagttctcagtattctagcatagaacttaaagcaccgtggtcccttatggttctgtaagaaacttttattatgaatctattattttgttagtttttatttctattaataaccaataagcaaatatatagcaaaaagtccattgtgctttacttaagtagtgataaagagcaaattagaggtacatagataattagtatcatagcgaatgatctttttgaggaattttacagctgagccctaagaggcatcctacttgttaagacaaagaattgattccatttttctcttagtatttggcacactgagatcattaccaaaaagtatttgctaaagaatatctaatgcacttgttttcctgtgcctctgttcattacatgaacttcaactgagggtctaaagaatcttcacacaatcccacaaaaatgcactcatactcagtacaagttgaaaaaacagtagggcacttctctgaacacaaaaagaaaaacatctgcctttgaaggttttaaaatcctgcctaaattggcatgtgctttacattagtcctgtgttgctcaaacttccacgcatgtgtatgtgtacatgtgctcacaaggcttggagatggggtgtgtgcctgtacctctccagtccaagctgctttccttgaaattttgggaaatttccctaatgtaaacctccactaagtagcaataatgaatatatgtatacatgaagtgtatactttacatatacatgaaggcaccaaggaatgctttcatcatattttagcaggttctcagagttgaggtgggtgaattattccactgtatttcgggtatagggtgctttgtaagaaagcagtttagggtgatcttttcagacgtgcattcctgtaagggaaaactctcactaaacaaagaaaagaagtcatatcctggcttgctttctgcagcagctgttagggggacaacagagaaatgtctccaagtggctctactttgtcccagcagaaaggtctctctgtcaccttcctgggtgagcattttatcagcacacactcagtggaacaataagcgccttatctgcagaggccaggtccaggctgatggaggagctggcagccgccccgtctacatggcaacgggcaaatattgttcccggcgcccggggaccagtgtgaggccggatggtgccggaggcgtttcaataccaggagcgccggtgcagacaggccctccttaccttctcctcttgtggatcctgaccatttcaagatagatctcatctgcgactgtaaattctcggggactt

SEQ ID NO: 53203 - DNA, 5484 bp, Bovine  19866881012612
  misc_feature (1)..(1): n is a, c, g, or t
ngttttcacagagccctggtttgagttccctgagtcacaccgcaaatctcccactggcgatctattttacctatggtagtgtatgtgtctctacaccactctctccacttgtctgaccctccttcctcccagacctgctccctgggtccataagtctgtgctcaatgtccgtgtctccactgcggccccacagataggtgcgccagtacctctttccagattccattcacctgcaggttctgagcgaaataaaacgggagcacttcccccacctgaccctccttgcctcctccccctgaccagcactgtcccctgatgctccacccactccagctccagaccaataaacttttacagcccaacagaccagaaaccagaaacgagtgtggcttcacagatgcaaagagctgaagcttgtaaactggctactgaaaaccaaaggaataactggcccttccaggggcctcccttgccttcttcctctggacatgggcccactgaaagtttctactacctacatgtgtgcgtacagggtatcgcatctgataaaggacatgaacagatcttgaaggaagtcagatacaataaatgattatgcatagaaccaaaggaaacaaattcacattaggaagtatgcttttttttttttctgtttccatttttgctttttattttacattttcctcaagagatggccaatggtatgctggggaaaaacagatcctgtagcaactggccttcagtgcgtgtgctctggccccgtggaaaccctggaagtccacaatgtgggcagaagcaggaaagtctaatgtacttggtgagaattttggtgctaaaggccttttttggtaaacgaaaaggtgaatattattacctacttctgagtccattctcacttcattcttagttttaaatgtagaaaagtttctggttttaaattgacttccactttctgattagtccagagagcagtattttgcaggtcagcaggcaagacgctgccctcggggtccagctggtgaggatggagtcatcgacgtcccggtgtccagggagcattcacagcacattacagacacttcacaaatactcttcacgtgtgagcttccagacacctaggggcctctagtttcctcttaggattgtgcatactgttcacactggaaaatcacaaaggtaggacctgggtagaaacgaggcacgtcacacacacaggtctctgtagttttccaaggtctgccacatggctcctcctgagtgagctgcttctcctgaccaaagccacatcagcacggctgacgttggaaggctggtctggggccctggggatttgaggtccacaggagggcatcgtgtgctgttgggtccacctggtaccaagtctccctgcaaggtccacggctccagggagaaatgccaccggggtggccgcgctcctggccctgagcgtgtccctggggcccacgagctgctgtccccaacaggtcagtggccccggcttcagccccagggacgcccaccagcggcatgcggggacacggatggaggtgcccaaggactggcagagcccaggcccccgaggggcggatcaggccagggaggggcacggcccccaggagaagggtgctgcaggcatccgtgaggagggagaggcccgcaccgcaggcagggacagccactctgctgtttgcgagttaaaaactcaagctttagaaaaacgtggactcctggtttccttctctattaggctccgagcatgcctcctggcttcctttggggtgaaggggacactgtgctggggtctctgccccaggagctgggctatgctgctgggacaaggatgggctggggctggcctggaggagttctgcagcccagcgggaggaaagggacatctcaggtgccaggtgccccaggacggatgtgacacctcagcccggaggtgcgcggggccctggctccaaaaccaacagcgtgccgacaactcagcaggtcacacagatttcatggatgcggctgcgtgtgaacagctcctgagcgccacgcaatgttcgcaatgttcgtgccggccgctctgtgaaggactcctgctctgagcacggacggacggatgtccctgcgctgttatcccaacacccctgttcacaggtggaatgggactttttccttcttcgggtatttcatcctgggtagggggaggtggaccctcactggtgctgtcgacaaccctcattcattgactgtgtcctctctgaacactctgcaggaagaggtctttaaccaagctggctgcaggctggcttaggaggaagcatcactccctgggggaagacagagactcttctcggctgtcttgtggaggattcacagatctcagataacggaccacagaaaccactgtcacgttcgtcttccgttacttggggttgatcctgtgaggtggctgaggctggggcccacttctgaagaacctaccctgccctgggagtctcgtgttgctggggcatcttgtgggcactctcggggccttatctgtctgtccaagcttgagccagccctgccatcctggcgttctgctctagggagtcctgacatctcagatcctaataccatctcagcctgcccctgcaggaggaccctggctactcttaccactttctaaaccacaaaagatttagaatcagactgccaagttcaacaacaaacgtagataaaaacgaggatctgttggaatttgagctatattacactgaacttagagactggcctgggggcacgacttctgacagtatgctggtgcacagacatggggcacctcttcaactgtgccttttaaatatctttcagtccaaaaaatgatacaagtgaacttacatacaaaatagacccacacacttagaaaacaaactttcctgttaccaaaggggaagggggggtggataaattaggagattgggactgacatgtacagactactgtctgtataaaatagagaaccaacaagaagctactgtcttacacagggaactctactcaatattttttaaaactctataaggaaaaagaatctgaataaaagtacatgcataactgaatcactttgctatacatctgaaactaacacaacactataaatcaactcaactccaattataaaatgtacagttttcttagacagaggtggggaggagacagaggagaaacaccccacgggaccatttctaagcttagctgaccagctgtccaatgtcatcatgcctggcgatgcaaaacacccactgagacaagctgaaaatctgtcagttgttccttaaaccatctacaaaccttgttggtttcccaggttcccatccaccattctgtcttctcccgtgcactgtttggttttcccagtctattctgacttctatcaggcccagctttctcagacctttatatgatcatggtcacacagcagctgtgcactgagtatctgtttagccccacaggtaacctcaataagaacctgttcatcactcgttttatgaggccacaggggaatggaatcaaaggcccagagcaaactcaggatgagacgtgcaggtgcctgaccttggtgaagacgggcgggaggcaggcggcagtgggtccatccggccggcagaggaacaaggtggggctgggggcctggagagcagaggcatgtgggtcagactcggaacacacaaatcacgaaaagatggaccacacaggcgacagcacggccaccgacagggctaagcgttcactgctcacctgccagtgcctacatggcaaacgctaaacaagtccagtggttcacagaatggtttctgcaaatcccactctgctttgggggttgacagggagtttctactacacgtgccaccttgagtgacttctactgcttgactctttcctcgtgtctcatctcagatgtgctttctctacggttcgcacacccaacataccacagagtacataagagctagtcgctcagtcatgtccgactcttttgcgaccccatggactgtaagctgccaggctcctctgtccacagaactctccaggcaagagtactggagtgggctgccattcccttctccaggggatcttcccaacccagggatcaaacctgggtttccctgcactgcaggcggattctttaccactgagccaccaggggagccctgttatttgtaaaacacccacgggcgctggtgctccgtggctggagggtacactgatgttcgttagacacacttatgactcaagaatgagctcacgttgcaagagtcttgggtttacagatgcccatcatagcaccaaggctaagtatcatatttgatttagagacatctagattctaattttttacataaaaaaaggttcaggtcttctgtgtttgcaaagtgaattcactacaatgacccagtcatgggtactgttgttcttcttggataaagcagtcttacgatgaaatgaaagcaggatgaaaatgcacagtgaagtgaaggaatctgaatattcctgtattatctgttaagctctcagaggacaggtggacttctgagctctatcaggtggactctgtagataaggcagacttttctcattttctgctttgttttaaatgagctaacgaatttggctacatgggaagatggcacatatgtgagggagaatcaagcggtaatagccaagacagataccactttatcagagtataagctgaaaaagaaattcccaaaggaaacacagatgttgattaatcagtggtgtgtctcagattaaaaattatttttagtgcattaaaaggaagaacttaacttatcattgtctttccacccagttgtgtgtccattgaggagatacttcaagggaggactgctgctgctgctgctaagttgcttcagtcgtgtccgactttgtgcgaccccatagacggcagcccatgaggctcccccatccctgggattctccaggcaagaacactggagtgggctgcaatttccttctccaatgcatgaaagtgaaaagtgaaagtgaagtcgctcagttgtgtccgacttttagcgactccatggactgcggcccaccaggctcctccgtccatgggattttccaggcaagagtactggtgtggggtgccattgccttctctgcaagggaggactagttggggtctttacactgaagagtctgattcccctcgggctgtggataaggctcacctgctgaacagggactgacagaggctggatcacagctgtggtcactcctgacttgggagatgatgatccaatggtcaaggacacggaagtggttttcttctgagctctggaaagtaaggagtgaagtcttgggtcagaatttcctaagcaggaattattctttgaaacatttccacagaacaggccagtttctttatgtttgctcaatctgcttcagctgtactgcttcagaaatggggacccacaacccata

SEQ ID NO: 53204 - DNA, 1329 bp, Bovine  19866881167112
  misc_feature (1)..(1): n is a, c, g, or t
nctggaagggactctaagaagtcatttagtcatgttgcttgcttccagcaggactctatctaaaattttgaaaagaaaatatgccccccacctcactttactattattattatttttaataatcccagagccagagagtgtgagtgcgttctggagagaagggaaatgagggatgagggcccagcgttgaggcccagggctgcatgtctggcctcagcagacagagtcccatccccgggggaggaggtggaacaggagaggccagtcctggacaggctctaggcctggggggcatccagtggggagagctcagcaggggttgttgtgccaagagggagaaagagcagagtggctcaggaaagaccctccagttccctcggggcttgggagagctgtgaccgtggcccagggcccgggggtctgctcagagacagcacaggcttgctgttcgtctgggagggtgagagctggccgctcacgcccaccctctgcgtggggcagggaggacaggctcgtccctgcgacagtgcctgccgggcccaccggaggagccccagcctgtccgccttcccagtgccaggtgggttctggcgggcttccaaggctcagggtcattggaggaacgaccaattcagtctcctgttcccaaattactcagctgactaggttgtcactttagaagacgtgtctacctcccactttctcctggtttctctcccggggttagatgttgggagaacaggagcaactttggagccaggagcctgagtgatggcgacatctcaacagctcagttacagctgagcgccttgaggctcagtgtccccgccctgaagtggggaagtaatagcaccccctcccaggaagttcggtgctcctgggatccgagggaggagtggggagaaccatccacgtctgcggaagcagccctgcgtcaggtcttgtctttgagctgtgagtcacggaggtttcttttttctctgccttaattccatacgcaggcccacctcagaatgatggtggtttttccgtccttgctacgtgtcaggcacataatcatgtttaatcctcacgaaaacaccatgaagtggatctgttacccccattttattacgtggaaatgatgttctaatgaggataagcattttgcccaagatcacgggctaataaacagcagagggaaaacggaaacccgggcagcccacccagtcctgcgtggagacccggggccttccctgccgggcacagccccacccttgtgttcccgaagggcctgtcagctggataggctcctcctctctgctgctgcccgaccacagcctccgcacc

SEQ ID NO: 53205 - DNA, 1682 bp, Bovine  19866881258258
  misc_feature (1)..(1): n is a, c, g, or t
ntgtgtgtgttcactttatttttttagctctttattttatactggagcatagttaattaacaatgttatgttcatctcagatgtacagcaaagtgattcagttatacatacacacatatcctttttcaaattctcatctcgatttgatgttgtttagtcactgagtcgggcccagctcttcgcgaccccatggactgcgggtccacctctcacctccgtacgtgactactggaaaaaccatagctttaactatacggacctgtgttggcaaagtgatgtctctgctttgctgactgttctgtcatcatagctctccttccaaggagtgagtctttagtcatattctggggatgtgatcacggaatttcttctaacagtagtttgaccacatggaggggaccctctctcaccttttggtgctggcagtaaatttgtgacacaaaccacagtgtactttccctgtcatggattttgagaagcaaagtctgtctcgttccacaaatgccttttctggtggatgtgactgtggataccgccttgttctataaaagccaggaggtcacttcaaggagaaaacttgacttcccaagaaattcacaaagataagcttgggctatctttagtttgcttaaacataattcagtatagtaggaatgttagtttgcttgtgtttctgatctggtacaatctctgaagattgttaacttttttatctctctgaaaaactcctaatcttgaagaatacatagttggatgagcaaagaaaaaaagaaccagtcaaggtgacttccaggtattttggaggaatgtgtgcttgttctgaaatccctgtatctacaccacactgatcctgtctttgattctaaccttctttaccaaatactatggagcatattggtgactgtccaaaaactcagtatatttagataaccagacaaccaagcaggataaatagaactattcatctgtgtgttcatctttgtcctttccagggaattgtttaattcctagtgtgtgagtttatcagatcaccctgaatgatgttactttgagataacttcataacaaaggaaattttaggcattttcagcttggaaaagagtaggtgccttaggaaaagaaagcagaggtgtgagaactggccttttgtcccggctttaccctgaagagagggcttggaagaaggggtagacctaagagagcctggcaagtgtccaggggaggtgagccactcctcatgttagctcacaaggaaaaagtcagtgaaagaaaaatcagatcaaattcacagtccagcccacagccgaattctaggtgtagctgccatcagatgtgtgccttgttgcagtttgacagctgtattcaacacgcttcccatcccccacctactgcatgttaatcccacagtcagtaagttcctcgtggaactttgcaacactttgtaagtaaagtttggtatatctgatgccattttcctagtaaacaactctagtaatttaatattaaacattaggttattttcccctgaggcacaaaattttaataacatattccccacaggtagcaacatagctgcttcctatacatttttataaaaactgtccagaatttttcaagcgtttatgtaactgtgcatgaatatgattcacacacatgtgctctgggaactctccctacttggg

SEQ ID NO: 53206 - DNA, 4201 bp, Bovine  19866880203080
  misc_feature (1)..(1): n is a, c, g, or t
ntagctcctggggtataaagcttgctttcataccccaatacctttctgtagatgttcaacacgtttggttaacttgaatatgttatttaaagtggtaaccttagcacttttactgtaacacaacaaattatattgttctagatatgacatggaagaaaagttatgaccaacctagatagcatattgaaaagcagagacattactttgtcaacaaaggtccgtctagtcaaggctatggtttttcctgtggtcatgtatggatgtgagagttggactgtgaagaaggctgaacaccgaagaattgatgcttttgaactgtggtgttggagaagactcttgagagtcccttggactgcaaggagatccaatcagtccattctgaaggagatcagccctgggtattctttggaaggaatgatgctaaagctgaaactccagtactttgtgcacctcacgcgaagagttgactcattggcaaagactctgatgctgggagggattgggggcaggaggagaaggggacgacagaggatgagatggctggatgacatcactgactcgatggatgtgagtctcacatgagtctgagtgaactccgggagttggtgatggaccgggaggcctggtgtgctgcgattcatggggtcgcaaagagtcggacatgactgagcgactgaactgaactgagatatgacataactcaaatgggtatgtcactgggctagtatttagctacaaaaattctaagatatccaaatattttcacaggactcttaatgttttcaattcagtgatatgaccttcatagtgtcactcacaaaatgccactgagtgccttatttctgaagcacatagatcacctgcagcaaacaccaagactgtggtagctgagtagctgggagcaggtttggtgggctgattccttttcctatgatgacttctcttttcccactatttgagtaactaagtataaagaagcatacttgactcctattggatgtcttgggcttcccagacggcttattagtaaagacccacctcccagtgcaggaggcatgagtttgatccctgggttgggaagatcctctggaggaagaaatggcaacccactccagtattcttgcctggagactcccatggacagagaagcctggcgggctacagtccacagggtcggggagagtcagacacaactgagcactcacgcacacatatatgggatgtcttatgggagcagagctgtttgattacctgcattaaaccagactttgctcttctctgatgttcaacttttcttgcttaataattaaggatgaatgtggcaaactgagtgcaggtttatatattagatttatagatgaaagctcatacagaagagtctatgtggttaacagagattggaacaacttccctggctccagactggagacacctttccctcaacacagcaaagaatcactctctactgtaactactcctctgtttgttaaacttattaattgcatctgatattctgtctgcgtcagtggtcattactcattaactcctctgcccaaaccagtgtgtcaactttgaggttttactatgacactaaatgattccactggatctggacacgagatcatgggatggactctggttggactgaatagtacccattattccttcaacagagagagcagtaggggaaagaggaaaggtctatagggaaggaacatctggaaaacacaggaagcaagcactagaactacttttcctatgatttcatttgtcagttatatctcatataagctgagaagtaaaaacaaacaaacaaacaaaactttgactctggtaattctcaaagacttttttggtcagctgacgtctgccaacatgctctgacttcaagggcacaaaatttttgatactaattctgaggaaagtgtgaagatgtgagacagctacaatttattctctgctatactattacaaaatcttgtatttttatcaaactgatttcattaagggaagatcagaggctcataatgagtggataaaacacaaaacagtacatttttattctttctgagatgagagaacctcagtgtcaaagccaagggtcagaggagggctagcaggggttgcccagatgggtcagaggcaacaaggaaatggtgttagatgttgcaggtatggaagatgggcattatgaaggtacccagacaagtgtaatggacagagatgaactaatgaaccatcaccagtggaattaccctgcttatcgggaggaataacagagggagaatcattttggattgctctgattttcactagattgtaagagtgtcagaaagtaactcaaaggcagaatggtatcctcattgaatttccatccattcattgctttgtctacatgactagcaaaagattcacacatgcttcccaatattaactctgggataatgaataagagttcattaacactcaggataagaagtgtgacaaaccaagctcttagccaagaaaggcaagtggacatctaaattgctcttctgtttggcatgttttgacttgtgacattggtaatctccccacatggttccagggctttactctgtgtgtgtcaaactgggcaaaagcttaagctttcactgaaggttgagtaagtagtcctgagattaaaatagtgcccaggagtcctgaatatactgggacatcacactggcttaattaagctacaggacttaagtttctctttctttatagttaggctaagagagacatggaaacagacacagatttaacaaacttatagacagaagagatagaaaatcttgcggttaaggcataggggatctcctatcaggctgctattatgagaattccaactcccaagcttccttgcatgtaagattgtgcaagatacttattatgctctccagactaggctcccttatcttcaaaatggagattatagaaactactgcacagggctgttgagagaattaaatgagataaggacttccctagtggcttagtcagtagagaatccacctgcaatgtgggagacctaggttcgatccctgggttgggaagatcccctggagaagggcatggtaacccattccagtatgcttgcctggagaatccccatggacagaggagcctggtgggctaccatccatggagtcacaaagagtcggacacgactgagtgactaagcacagcacaaggtgtccatagtatttagaagagtatcctgtaaatggtgagtgctcagttaaagttaattgctgttatatgtttaaataatttcattggataagaggcagtactacattgcatttctctactcatgctcttgggggaaattgagcctcttctgctacagaatctctcccagagaatcctatactgttcaacactgagggcttctagtcctcttgagactgaaatcagtgcctccaatgatacaaggtcaagggtctcccactatatggcattcatggttctcaaagtgttactagacctcttaactttaagaaggaattcatggaattaccttttgattgccaccataggttctttccacgtttatattttaataaactattaaacatttttcttaattctccaatcatttatatatttttcttaggattttatttcaaaggtgtatagatttagccttgacaatttccctttaggattccagtctctgagaatctaaacttcagccctctctaggatcaaacatgtcttttaagtacttcccatgctttcacctttttcttggacttgaaatattataatttgtaagtagatgtcacattaggaaaactaaccagattaccctgaacagtttatataactatatttataataactccagagatgtcatttttgtcttgaagcaacacagaaaatgaaatgctagtttatttttgagaatctctaaagaaggagatgtctacatttctacttgggtgaagttcacagtggtttaagcactatctgacaatgattcccaatggaatgagaaaaacgcagagcctcagacaggtatgtgatcacaggcacctctaatgctgatgcttgcaatggtactagagctgagaggtggagaacaggaagtgggcacactgttctgccattaccacaataactgaatccaacctgatgactgaagaaagtctcgtttttggacagatagtttaga

SEQ ID NO: 53207 - DNA, 871 bp, Bovine  19866880460877
  misc_feature (1)..(1): n is a, c, g, or t
ntttggtgaaaggatatctgagtgagagagggtttgatttcattatccatgagaaagagtataagggaattctgagagaaggaaggtgagatggtattctgagaatgatattcagtgagtattccgggagaaatctgtatctactattttttaaaaatgttcaggaaaacttgtgttattcttacttacagctttccagttgcattatacatgtttgtacatccattggaaaattcttgagatccattggacaggagagtgttaatgtcaacctgaaagaattcaaagtaatcattttataaagaaatttgtaatatcatcagacatgactgagcgacttcactttcacttttcactttgatgcattggagaaggaaatggcaacccactccagtgttcttgcctggagaatcccagggataggggagcctggtgggctgccgtctatggggtcgcaaagagtcagacacgactgaagcgacttagcagcagcaacagcataatatcatattaacattctattgttcaggatacaatggaaaacaatgctgttttggttatggctaacatctactcaagaaaattttctccagcttgtatatatagtgtgaaataactgtatcctttaaataaatctggttttggagggaagaaaagctgtatatataaacatctaatcacagttatttatttgtatatttatgctttcctttagatagtactggagatatctaagagtggtctctatttccagaaaagacccttttaaaaaagatatttgagagtaagctttataaaattaataccaaaggccaaaagacaaaattcccccaaatcatagagacaacatcattgaggcaagtactgatga

SEQ ID NO: 53208 - DNA, 1841 bp, Bovine  19866881098550
  misc_feature (1)..(1): n is a, c, g, or t
naaaagttggatataactgctcatattgattatggtaagtagtcattccctgctaaaagagtaccatttttaaaataaattataaagcatcctttttatgcaaaaatgaaaatatagataggcccttatatactagaatattatatgggtagttttaaatatctgaattggaaaagttagatgtcaaaatatgtttccatctttgcagctacatatatcagactatagagttcttttgtacctcctctagaatatttgcgggggcggggggaggggggcagagaaaagaggtaagattaaagtcctctttatctgacaataaactataaaagtcaaatgtttgcctaaagaggggattcaagttactaattaaaaataagatttttagatcttcagatttttacttatccatcctacctcccattgttattgagagttggctgtattttctttcttttactccctggcctgattcaaagatatcctggagcattccagaagtattgaattcactgttctgaaaggggcacttactgttgtcaggcagcgtggaactaaaccattcaaagtgactttggttccagaattctgcttctgtgcttttatgaacatcacccaggctctcagcaagcagctgtggcctaataacaaaatagaattctctctttaccagagtacccttaggacataagtaggcatggaaggacactgaagtacacttgtaggtgcagggaaatgaagagaagtattttaattaatattccacacttgctttcattgactgataaataatcaatgtcagtttggttgcttaaccaaccaaaatataatcaaaagatcatcctagtagatgtttttatacagaactcacctacatgagtcatatttcatccaggtcttagaatgactcttgccatgatttttaagtgctagcaatcagaaagtacctatggaggttgattatttttccccctcactggagcactgtcatcagatgtgttatttgggtttatttaagcctgagaagtaaactaattacgtttgatgttatgtttaaatgtaagcggtgtttattttaagtacctgagataagatgtatataattgttcaatattgtaataaatctacttttccataatttctagttctgtacttaacattttgatagcaagcatcattaaaatattataaaaataagaatacttacagccacagggagcaagattctccaaaggacatcgttcatgtcacggatatgggtaaccaaactccacagcagctgctggcagtggctcatggggtgggggagaacttctgcacagtctgtggtacgattgtctagcacgctgctgttatatgcatgatgttgtgatctcagctgtttgaaagtcttgatcttgtgcatgagcttgtgtaccttgtggcaggtgaccacattctagtaaaggaatgtgctaaaaaccatctgtttacattaggccatatttcccctgcatgtacaagttatgtgtgtgattttattccccagcattattataataaagtaattttacgtatcaaccagtaacttattccattgagtaataaatgttttcttgacagttatttgtaaatttaaaggatgaaattggtagtgaacatggtttaactttataggcttatttttgtttctatatatgtttataaatttttaaaataataccctcagtaaagtgaagtcgctcagtcgtgtccaactctttgcgaccccatggactgtagcccaccaggctttctctgtccatgggaattttccaggcaagagtactgggagtggattgccatttccttctccaggggac

SEQ ID NO: 53209 - DNA, 1187 bp, Bovine  19866881189949
  misc_feature (1)..(1): n is a, c, g, or t
natagtttggtgaaaatgtaaaataatacattgttttcagctcaatgcttctccgtgactatcgtctatcaatctttgtcgtgcgtgcagttttgaatccggatacaaaattttcctgccagaagtcaatgcttacttctcatttgttttcatttcctgttgccttcagagctccacacagagaaggtgctggatctgctatctctaagacattctcttttcccaggcagattgtttatttaatgaaaaagatagaagaaaggtccactctatttgtttggagttatataaatattcttaaaaaggaggatttcctcatttgttccacttcagccttcctgttcaggaagagttttaaatgcacttttcatcactatatgatgacagctagagttacagttttgtaattgtaccaaatatattagagacattggaaataaggaaggcaagatgcaataataattctgaatttctttccatatatattataaactcaggattatcacatatatattcaaaaccagtttatcattataaagccaataataaaaaccagtaaagtgctataataataactaaaatgtgggtgtaaattatgaaacaagaaaatgataaatcattgttctgtatgtcagtcttatggttttattttcctctttatttcacattcttcttcacatggagtttgctcaccaagttgtcgttgctgcttagtggctaagtcatgtctgactcttctgtgcccctcacggattgtagtccaccaggcttctctgtccatgggatttcccaggcaagaatattggagtagggttccatttccttctccatgaccacattgttgctattgctaagtcacttcagtcgtgtccaactctgtgtgaccccatagacggcagcccaccaggctcccccgtccctggaattctccaggcaagaacactggagtgggttgccatttccttctccaatgcatgaaagtgaaaagtgaaagtgaaatcgctcagttgtgtccgaccctcagcgaccccatggactgcagccttccaggctcctccatccatgggattttccaggcaagagtactggagtggggtgccattgccttctccgaccacatagtagttgaagtcaaaaaattctgtaaaaaggatcataatagaagaatattctcaatggaaacaatt

SEQ ID NO: 53210 - DNA, 1373 bp, Bovine  19866881258284
  misc_feature (1)..(1): n is a, c, g, or t
ntatcagcttgccaacttttggattgagatccaacccagtccattctgaaggagatcagcccctgggatttctttggaaggaatgatgctaaagctgaaactccaggtactttggctacctcgtgtgaagagttgactcactggaaaagactctgatgctgggaggggttgggggcaagaggagaaggggacaacagtaggatgagatggctggatggcatcactgacttgatggacgtgagtctgagtgaactccaggagttggtgatggacagggaggcctggtgtgcttcgattcatggggtcgcaaagagtcggacacgactgagcgactgatctgatctgatctgactgagattttggtgttttcagtttttagtttattaatcaatttgtggataactgacttcctaagactactgtcttccaattcatgacaatagaatgtttccactaatttaggacttaaatttttttttcctggtaatgtttagcagtttttactgtagggttcttgcatataatttcttatgattttatttgtaagtaggttttgtttttggatactgtcataaatggaatttattttttgaacttaattttccaattgcttgtggccagtatatagatgtataactgattttgttataccaaccttgtagcttatgatcttactaaacttacttattagttctagtaattttgttttaggttcattagcattttctctatagtcatgtcttcagcaaataaatgatttctttttctctccagtatttataacttttgtcttaccttattgcaatggctaggatcccctagtacaatgctgaatagagagcaagcattggtgcaatttcccaatcttttttcatattttgatgataatttttaaatcataaattgatgttaatcatgtcaaaagtttttctgaccccatggaagttatcatatagttgttcttttttattgtattaatatagtgattgtgcttatatgattgattttatatattaaaactaccttccagttagttccaggataaaccctccttggtcaaaatgtatagatttttaaaaatattgttgaatattatttgctaatttgtgttaagaattgccctttatgtttaagcaggatcttaatctgttatcttctctttttaattattttggatcatccttgtcatcctgtcatcttttggtagtaaggatttgatatctgtatagcagtgtgctctctaaccctagagtccctcttctaaacaagatagtagtttgcatctttttatagtaataggtttaattaacaaaaatgagtttataacatacatcaatattaagaagataaagtgtaaatattcacaaatcagt

SEQ ID NO: 53211 - DNA, 2610 bp, Bovine  19866880527547
  misc_feature (1)..(1): n is a, c, g, or t
naatgaaaaatttatgcaggtctggtaaagtgcgtgtgtgcttagttgtgttcgactctttgcgaccccatggattctagcctgccaaactcctctgtgcatgagatttttcaggcaagaatactggagtgggttgccattttctgcaccaggagatcttcccgacccagggattgaacctgcatctcctgtgtctcctgcattgcaggtggattctttctttacctgctgagccatcagggaaagcccattttattgtaccttttgatcccatctctttgctttgcccacgtcccagctcctggcatccaccactctattctctgtttcttttatttttttgatttatttatttttttattgaaggatagttgctttacagaattttgttttctgtcaaacctcgacatgaatcagccatggttacatatgtacatctctgtttctttaagttcaacttagatttaagtctttgatccatttcaagttaatttttgtgtttttttgccttttttttttttttaactgtaaagtatctcttttgtgtttgggcagtcctatacctatgagagaatctatctgtctgtatagactctaaaaacgctagtacgtttctacctcagttccctttgcaggtaggctgcagacctttgacatagccatttggatattttagcagagggcattactccaaaaagaagagtgggccagaatccaacctggtgagggggggaagacagtggatgtggtcacatcttgttttcagagccaaaagtgacctcttgtgtctggtgacaccatcctgtgacttgagttggcggtattgaggtcgtgctgtgatgtctgtgcctaaaaggtgactgcagtatggtgctggcaggaagactttctgtggctttatctctggtgtttctgactctgcacgttccccatttgcttttctggctctcccagagattccttgtgctattaatatccctttctgcttaaatgagctgattcgggtgtattgtttgtcagtcaggtagttgataccgggataatgtaaggcaacaggcagtgggggcatctgaggaccagttctgtgacatgaggtgggtttttctcctggctgtgtgcctccatgccttggtctctgaccctcttgggcatctccgagcttaacagtattcattaaagtcatcgcttttctaattaaattacctatatatggctttgactgttgaaagatgctgaaaatgaaagatattgagagatgttactgctgaaagagtaaataggagtgaatcacaaagtgacaaatatgttgcatattaaaagtatatttgtataattttttattattcatcatgtaatattaactttaaattttagactaagggaaactgtatatctagatattattacaaattaattatttttgcctggcaaaaaaaatgacgtttataggtctctaagaaaatactaagaaactactgactagatactttacaatgaaatttcacacaggtttcagaaatgaattaatatctattgtcggatagtaatatgtcaaggattttatttctgaaaaatattttgattaatcttcttgtctagatgtttaaaatttatgctcacttatttgatcatcatgggacagttaacaaagtatcaaaagatttcatggaaatataatcacatattcatatctgtttataaaaccattttggttcatatatatttttagatcatgaaatatcatatattttagcagtttgatttttaaaagtttatataatcatattaaaatattgtattttttctgagctttgtcttagtaattttgtttttttaaagaatctgtgcataaaatatgcaatatcctttaaagtaaattaggtttgtttgtttttcttttttgctttcttgtagttcaaatatgaagatagtttaaattccaattataaatttaagtataattgtcaattttgaaaatctctctgaaatgtagaacaaatggattaggtcagaaaattaaggatttaaagaatgccctttgttgcgtaaatttaagtgctcactgtccttacggcctaatgctcgaaacagtcacaaatttttttaataaagctatgctaaaaaaaatccaagcaccacattggtattaaataaattttaatgaattgcctgttctctcacttctctgactaaattgtacccttttacataataaaatgtataattttcttttactaaaaaataaataattaattattctatttatcatattattttattaaataagtaaataatagtaacttttaataactgttagtatttttatttaagatgcatacttaagagagaaataatgtagtattttaaatatgacataatctaccttaaataaagaatacaaatgattatgtattcattttaatatactttgcaaaattcaattatttttctttcatgaactggctttggttacttattctgaatctagatataatctaaatatagttgtatctttatactatatattttatacatcaaactaagattaaaagtttgacatatcattttgaaagggtcttcttgaacttcttataaaactcttgagtatat

SEQ ID NO: 53212 - DNA, 1289 bp, Bovine  19866881046230
  misc_feature (1)..(1): n is a, c, g, or t
nacctatgatagttttgttttggatcttataagcaactgtctttttctttgctctgaaaacaacacaggttctgccccagcaggaaaatataaaaattaaataaaaagccacaaggttattaagcatcttaccctctgggctggctgggctgctccggcggctcagtgttacagacacatgtgtaaacaggagaattccctgcatccttttctcatctgtatagctctggggtccaggccaacaggattatttccagcattaaggccactccacactaactcgaagaagattcccattggttgtgaagttttatcaaaaccaataccacaacaccctccgtggatcacaagtgagcgatccgaaaggaaatcgtttgactgttccctaactcagcaccgtaatccaatgcttctacacaacctatttgaaattttactgtgcataataaaaggagaaacactcaccccttcatcacccaccagtgtgtttaatgtttaatagcaatttgcataacttgcagcagtaacagaaaaattggcaaacaaaaagaatctatctgcaaaagatttaaagaaagattataatgcagatgacaggaacaataggaagcatcattggttcagtctgatctttattagactgtgtccccaaagaaaaaagaatatgtaataaaccacttgggtatagaaatcaagatacagaaaccgtttgtcagaacctttgatttcagtcgtgtaggcaagaactgtgagctgcagactcctgggcccccagaaagagctctctggcccttggcctgggggaaaaaaaaacaaatggagtgaccttccagagacatgatgcagctgtcaggaagtgttctgatgaatgggtgatggcagaccacaaaaaaaaaattttttttctagttgaattaacagcatggaatgtccaaagtttttttcagaggagagggcagaaaaaacagtcactgtattcttatattaataaatagcatgaaaacagcatttgaaagttagggagttaatattttcaaatgattttattctttctccctttttaatccagaggaatattcttggctgtataacctgcttgtgcttagccgctcagctatgtctgactctgtgcaaccccatggactgtaacccgtcaggctcctctgtccatgggattttccagaccagactactggactgggttgccatttccttctgcgggcgatctttccgacccagggatcaaacttgcatcctggggtgtctcctgtttgcaggcagattcttta

SEQ ID NO: 53213 - DNA, 1820 bp, Bovine  19866881095696
  misc_feature (1)..(1): n is a, c, g, or t
ntttgaaagacagacttcattaaggaagatagtgattagtacttactccctttctttcctaagactttttggaaatcatccaaatgcccctgcaaagctgaaatttcaggcatttcattctccagaggcagatttattgcctgcagtcttaatccaggtctcactgtacaattttcagaaatgccattcttgaataaatcaggacagtctagactgagtttcatctcctcacttaattttaatgggtcaataatcaaactcgcttcctgaaagaaaaaaaaatacaaaacaatggttagtgttgaattttaaaactaaatatatagaaatcacgaaaaaaacatttttgaatggaaataaaatgttatgattcaacatcaaatttttattttcatttattcatcattctctaatagtggtatatggtcaaagtttaacttataatttctcaggctttttttccctttctatgtcttaccttattctaataaaacaagtatctccacagtgttttaaaagttttaatttacaatgaaatctacattatatctaccataaaccctatacattatggaaaagcttaacattttagatggaatcatagaacagcaagatattatttttttgttttagaggtagaattaaatagaaaggagtaataatataaacagtaaatagtgtaaactatttaaagagataacatgaattcgtagtttccttaagcatgttctgtgggttgttaacgaaagaaagtgaaagtgaaagtcgtttagtccagtccaactctttgcaaccccatgaaactatacagtccatggaattctccaggccagaatactagagtgggtagccttgcccttctccagagaaccttcccaacccagggatcgaacccaggtctcttgcattgcagatggattcttttaccagctgaaccagaagggaagcccagtatttatcaaattacaacaggaccatgcaatcccactcctgtgaatatacccagagaaaaacatgccccaaatgatacatgctccccaatgttcattgcagcacggtttacaatagctaagacatggaagcaacctacgtgttccttgacagagtcatggataaagaagatacatgtatacaagggaatattacacaaccattaaaaagaatgaaataattccatctgcagcaacatggatcgacctagagattgtcaggaaaaacaacacatgtatgactgaatcactttgctgtacagtagaaatttacacaacactgtaaatcaactataacttcaataaaataaattaaaaaaaagaaattggaactatctcaaacatcacaaccatagagatgtgctgtgctatgttgctcagttatgtctgactctttgtgaccccatggactgtagccctgcaggctcctctgtccatggggattctccaggcaggaatactggagtggatttccatgcccttctccaggggatcttcccaacccagggatcaaacccaggtcccccgcattgcaggcggattctttactgtttgatccaccagggaagcccaagaatactggagtgtgtagcctgttccttctccaggggatcttcccaacccgggaatcaaatcatggtctcctgcattgcaggtggattctttaccagctgagctaccagggaagcccaactataaagatagttccatttaataagtgatgcacctatgtaattgcaaaaaataaaaaatcagggtaccatcttttacatggttactctacaagcactgtgacatcgttaggctgggatagataaagccaggaatatt

SEQ ID NO: 53214 - DNA, 1511 bp, Bovine  19866881120285
  misc_feature (1)..(1): n is a, c, g, or t
ntggtcttaactgagctatccctgtatagggatttcttccaggaaaagataaaaccagaatttttggatttatgaggcatgcatcgctggaaagtgtcctgtcagctggaatagagaataaagatgttcacagatagactactagccatggccactgtgtaactcccttagagatcttatcttttatctttacaatcctctttaatcatcattctcaaagtattcatttgtgtaggctaattaaatatcagctgacttctctgtaatatatttaaaattttaaattagtattggttaacttaatcagatactaaaacatctgatttcaacctatcatttttctttaccactttatgtttctattagtacaagtaaagtaggttctgagtagcctaattttctttcataatacttataatagcctcagagttaagtcagtcatatcagtgttctgagggttaccttgacgatgtcataaattatccactagtagttcaattaattctgacttacataatttagtgcttacattattcttaactacgtttgttttaaaaggtcttgaaggcacttgtatgagcaaagtgatgtcccataggcttcattgttcttatacatttatagaattctaatatggtattttatcagtatcactctttctcatgataagctaatttatgtcttgcaaagaacaagttgaacagattttcatgatgcatgggacgatagatgtgaaggttcacttcagtgccctggaaaatctaaaatcttcagcgatgtacgcagcagcctctcaggtgataagaaaactagtctaggatttcacctactctccccaggtgctgcagtgttcaagaatctgcccgccaatgcagcagacacaagagactggagttctatccatgagtcgggaagatcccctggagaaggaaatggtaaccgattccagtatacttgcctggaaaattctgtggacagaggagcctggagggctacaatccatgagatcacaaagagttggatacgactgagcgactaacactacaagtatttaaaacaaatatttataaaagaacactgtaactgataaactactagggatgttgctattatcacaagaagatagatttctaaacaaagtccctaaaaagacaccagacaaaaaaacaaaattttcaaagaaagatttaaaagttacaatttcatatttagcttaaggccaattttaaaatacctagcagttttctctacatacagtaaaaaaaaaaaaaagtttcaattatgtaaagaattagttacttattgttaaatcaaggtattatcagtcagttcagttcagttcagtcactcagtcgtgtccgactctttgcgaccccatgaatcgcagcacgccaggccttcctgtccatcatcaactcccggagtttactcaaattaatgtccatcgtagtcggtgatgccaaccagccatctcatcctctgtcgtccccttctcctcctgcccccagtcc

SEQ ID NO: 53215 - DNA, 1523 bp, Bovine  19866880548561
  misc_feature (1)..(1): n is a, c, g, or t
naaaaaaaaaaaaaaaaaggaaccccagggttttaatagctgtaagtgaccatcagccccacaactttattttcacattgccatcaaaacaagccccttaatttttttttaatggaggatagatccttttgaaaaggtgactcaataaatgctatgtggaggagggaggagggttcgggatggggaacacatgtatacctgtggcggattcattttgatatttggcaaaactaatacaattatgtaaagtttaaaaataaaataaaattagaaaaaaaaaaaaaaagaaagattctttttgccaggcaaagtggaatatttctgaaagtaaattgtatttctgagcatattaccttgtattgcaggtataagactgaaattcatatcacctcttgaagatcagacagtgaaagaaggtgaaacagcgacttttgtctgtgaactttctcatgaaaaaatgcatgtggtctggttcaaaaatgatgccaaactccacacgagcaggactgtactcatctcctcggagggcaagactcacaagctggaaatgagagaagtgacaatggatgatatatcccagatcaaagcccaggttaaggacctcagctccacagcaaacctgaaggtcataggtaaatctgaccagctataaccagagagctgacttttggatggtgggagtgggtaacagttaacattttgcaatgtgtaaccctttaatttcactttgacgttctctgatcatctgccaaatgtcccttacagagggctgacccctacttcactgtgaaattgcatgacaagacaggagtcgagaaggacgagattgttctcaggtgtgaagtgagcaaagacgtgccggtgaaatggttcaaagatggggaagagctcctaccttcacccaaacactccatcaaggcagatggcctgcgccgcatcttaaaaatcaaaaaggcagatctgaaggacaaaggcgaatacgtgtgtgactgtggcacagacacgacaaaagcaaacgtcactgttgagggtgagttacacataatttctaaaggtaccccatctgaatctgcgattgctttgttcagtcattcttacaaaactctgtataaatttcagcccgactaataaaagtggaaaagcctctgtatggagtagaagtgtttgtgggtgaaacagctcgctttgaaatcgaactttctgaaccagatgtccatggacagtggaagctaaaaggagagcctttaactgcttcccctgtaagtcgcaatgatctgatcacataggtgggggtggggcgcttgcttgctcagtggtgaaagatgggtacatttctggtacaaaatctcttgattatttgtaggaataaccagttatgaaaatgatgtttttctttctctttcctcctcacctcactccaaacaggactgtgagatcattgaagatgggaagaagcatattctggtcctttataactgccggctggacatgacagggcaaggtctccttccaagctgccaatg

SEQ ID NO: 53216 - DNA, 1037 bp, Bovine  19866881289993
  misc_feature (1)..(1): n is a, c, g, or t
ngtatgtaattggaattatttaaatagatcatatcatcaacatcatgatcatggcttgctgggcaaagatgtatgaatcacaagtttaatccaatagacacaacttcttctcgaagcttcattgtatcaatgatttttttctaagaatatctacctacttcatttaatgtaaacataaaaaagatgataaacagattgttgtggtaagcataaaataaagccaaaatacttgaagtacagaagcttgtacttgaagttcagtgcaacaaacttatctctctctctaaaaatgaaagaagaagagagactattttaatagaaattctaaaagtactgcaatttttttaaaatgcttacagttgtaaagaagcctgtagttgaaaaaattgaaaagacttctcgaagaatggaggaagaaaaagttcaagtcaccaaaggtattattattatttaaaacatttcatgcttctgggtagtagctgaattggtgatttttttttccccaccacattatattttttataccttccaaatattccattgttgttattcagtcactaagtcatgtctgactctttgtgaacccatgaactgcaacagaccaggcttccctgtccttcactatctcccagagtttgctcaaattcatgtccattgagtcgatgatgccatccaaccacctaatcctctcttgcccccttctgcttttgccttcaatctttcccagcatcagggtcttttccattgagtcggctcttcgcataggtggccaaaagtattggagcttcagtttcagcatcaatcctttcaatgaatatccattacgtacatctatttttcaaaaaaaattttctctgtaaattggaaggaatttgacttcaaaaaactgataataaaacatttcaagtaccatgtacacaagtaattgtttactaatatatagtcacatgttaattatttatatagtcctctaaattaagatttttaaaattttgtgcaaaacaatattcttcacaatacaaatatatttgtacata

SEQ ID NO: 53217 - DNA, 1053 bp, Bovine  19866880540221
  misc_feature (1)..(1): n is a, c, g, or t
natcattttagccagattttaggaacatctgactaggctccaagtctgcaggaagaggaaaatataacaggacaaagagctgggggctgcgccatctcgccttcatttccatcgctagcctggcttttgaagggaaaatgtttaaacgcctgtcttctgtgttgtcactagcactggatggagctgagttcaccacttaaaaacacacatttaaaagctcatctgagtggctgccaccatgttatcaagctgaacacatgttgatctgagaagattagaaaaattgttcccagtgtctggggaggcagtgcttttaaacaagtgcttttcaaagaataagccattaagaagcacttggcacacatgtagcccctgaacctgaaaacaaataaaactcacatcagtacccaatcagtaactctgagcagtagactagagaatctggctggcttattttagagatgcaattataaaaggttgctattccatttatttttcatttcctgaacacttaatgacgggggaatcaaaaatcatttttatgttggacctgcacattttttattaaaatatagttgatttacagtattgtgttagttttaggtgtaccatatagcaattcatttatttttttctgattatattccactatagattattacagtatattgaatataaatcctgcatttgtagcatttgtacattcttcctaatcaactagggaaaaaatcacattctccttcatattttactttccttttccaaaaaggaattaagtttttgtggaaatttaaatttgttccttccatttaccaagaaaatggtattactcttgttttcaatctgttctatctcagtttagtttcaagttgagactttatttcatttccagccatgtaaagagtggctgggattcctctattacctcttacttttggacataattgcttggtgaggcaataagcctactgggtaaatcaaactctctacttttcactctatacatatgcttcagttatgttagaagaaacccatatacaacacttccttctg

SEQ ID NO: 53218 - DNA, 1310 bp, Bovine  19866880589426
  misc_feature (1)..(1): n is a, c, g, or t
nggggttaataatattttggtcccaaacatgtagtcaaaaagaggtcacaggcccttggggagctgaaagaaatattgaaagtgattgatccttgacaatttgttaaaatccaagaacctttgtttaaacaaattgccaagtgtatatctagccccacattcagggctatcgtggcatcagtgtacactgtgttgaaaggcgtgtatggaaataaacagcaccatgtgtgatgagctgtcagccttgtaggagacaggtcatcagcaggagaaaaagaaagaacagaacgtgaaggactgtgggaaaaaactggaggatccagagaggtcttagctgtgacaggataattccaacttactgaaaacaatgacaatgacattactaacctgcagagtcacacatttatggagtcggagatgcagcaacagttttctttactgtgcaactttatagtagagttcacatttgtttcattattacaacagcactgtgtatacctgtctctaagtaaaggaccaaaaaaaaaaaaaaaaaaaaaggacttcaaagtctagacaacagatggacttctcagagcttggcaaacataatcattgttctacctctcttaaaaaaagtagtcttcaaagatctgtcaatgatggagaagaaaatggcaaccccctccaggagtcttgcctgggaaatcccatggacagagaagcccctaatgggctacagttaacggagtcataaaagagttggacaggacttagtgactaaacaacagcaatacatacacacacacacacacaacttgttgcagtggaaaaaagaatctgtcgatgaagttgctgttataaatttcattattgggagttccatcttcagctcatgatttccaggtcaccataggcatggatgccaaagcgggcagagtggagaataacacagaggaagaagcttttatgagctagacttgggagtggctggatctcaggagtttcagtggtgagaactcggtcacacgccacttggacctgcaaaggagggtgtgtccacaaaggaaaggaaatgagttttggtgaatagttagcagtctctgtcacagatgtttctggtgaatggttagcaaaatctgtcatagatgggagcagttctgaggataagacatctgacttgttcgtctttgcaaagtggccaagcctagctgtatctcaaagagaactggaattcaagtactcaaatataattcaagtactcaaatataattgttaaaaaatactttatgaaaaatattaccttgtaagagatccatattatggataaa

SEQ ID NO: 53219 - DNA, 2153 bp, Bovine  19866880707307
  misc_feature (1)..(1): n is a, c, g, or t
natttcagagtgtattttagacattattttagtatttggttgtttatgaatattactactaatgcaaagaagtatttgtatacattctagataatggtttttttgatatattaagctttcacatgggaaaagataagaaaattaaaagtgaaataatttataaaggaagagtggttgaaaagcaatttgaaatcttattgaaatggatttctttctttattgggtctggtcccatcagggaaacataagtactaagtcctattgatttcacaagatatatgattttagatctgagattaggtgcacaatcagcagtttctagagataatgacaaatagctgggaagtcagggacgtgtcggatatggactaagctgcttgaggatatgggttgtaccttacacatacttttatgtcctccgctgtggagagcactgtgtactagttgaataaatgtttttttttttttttttaattttgtctcctaaattaaccaagtctagaattgatatttttctaaaatacggctgattaaatctattaggtaagcttgtatcagtaattgcatagtttaaaatatttagataaccaatgtgtagatctgaacatggaaatcacattgaatggggaaaatcagatgggactcttgagagcatgaaaggtgaatgtgtgagtgatctcacattcatctcttattgcaactggatatacagctgaaatacttactgtcattttttgttctgatcgctaagccttaaaacgtagactattttatataggaaataactttataaatttgttgattctaattaattctttttgtaaaatgattttgcattaggagttattgatggtaagttttatccttggaaattggtctatatcaatttatgtatcttctgagtgagttccgccttgagaagcagctggcagtcctgtgcagtaatcagaagagacaggatacattttggcttgttagagcctgcagggtcagcctcaggtcaccaagtttaactggaaaacaactcacttagactaagaaagagcaaaagttcatctttatcctcattttttctgtaagccttttcatgtctcctggcatatttttaatttgggacaaattatagcacaatgagtttattttcacagtgttgagagaatagagaaaattttcaatgaggattaaacagtctgggaataaactcacctaaaataactcccatccttttgcttgaccttcatactctttctagttaatcattcactaattcgataatttgacataaatttgttgagtgtccaccatgtactagactctgatctaagcactggggctgcacattgaacacaatgataaaacaaatgtttcctcccgccccctttttctttctgtgatgggcagggtacacaccggttaggcaccatgggttctggaggcttgcattaaagtcctggctctgatgcttactagctctgtgacgaacttgtctgtccctagttttctgctctgcaaaatgcaagtaataatagtgcctagcttacacggtgctgaagtgaggattaaatgagaagatatgtgcaaagtgctgagaacagagtctggcacttaacaagttccatgtcagtattagtgtagctagttattattattatttagatgtttaacactttgaatgcaccatttgtagttgatgcctttaattcttggtcaccacttcctttcgaacctcctttcggtggatttctgactaaactgaaatgttgagacttcctgctgctgctgctgctaagtcgcttcagttgtgtctgactctgtgcgaccccatagatggcagcccaccaggctcctccgtccttgggattctccaggcaagaacactggagtgggttgccatttccttctccaatgcatgaaagggaaaagggaaagtgaagtcgtgtccgactcttcgtgaccccatggactgcagcccaccaggctcctccatccatgggattttccaggcaagagtactggagtggggtgccattgccttctccatgagacttcctagaaggttacaagtgaacattcttgtgaatccagaaacctttcatttgtccatatttttctagttttgcaggatttaagactctgctcccctatcctctcct

SEQ ID NO: 53220 - DNA, 904 bp, Bovine  19866880738023
  misc_feature (1)..(1): n is a, c, g, or t
ntgattcttgttgagaaagaatcacccaccacaaaactcacctaaaatgaggataaataaagatattaaatacttctcatgtttaaaataaagctacatatttcatattagttgtattatataattctaacacagcaatttatgtcatttgatgtttatcaagaagatgaattaaaactttgattaatgaaaagaacatgtttcatatttatatattctctttaatcttttgtgtgaataagaaaggaacattaatctctgacaaagcaaaaagaagcctcagtgtggggagaataaggaataaaccacaatgttaacagaaatgtaagaactgatgatcattttcagtttctaggaccaacttctagctattctgaacatttatttttgtctttcaatttgaagtcctatcaggaaatacaaaaaggaaaacattcatttatggtcttcatttccagaataaatggagcctcattataaaatatccacactcttctactgcaattaatctgttcacaagaagaccaaattcagaagattaatggatcactaatgaggactgctgtccatgacagaatgactaccatcatcacctcagtcacggcactacatgacctaagtgttcagtttcttccacaacaaattgcaacacataactgtggcactaattctgtttccaaaacagcttggcattatgtgttcctgaaattttatttatattctttttcacttttgcaattataaatacctatagttaagggtcatggaaaaatgttggtaaaatctgtcctatagccctaaatgggcagtggatatcaacagtatttgtggtgttcttgggacagcttttgtgcttcaaattgtttactaaaggagctaattttaggttgaataccaataacac

SEQ ID NO: 53221 - DNA, 2037 bp, Bovine  19866880740423
  misc_feature (1)..(1): n is a, c, g, or t
naggcctttcttaacagagtgttccgggtggtaccttcgattgacttgcagttgattacagggatgaaacaaactgattcgccatctcagtgtttccgaaggctttggagaccgggagattacaaaataacggagcctccatttatcccaatggaaaaagaagacaatatagtttgatttacataactgatataagatttagaggtaaaatatgcaagagcactcagtgactataagtggtcattcttataaggtcactgctgatggggcgcaagcagaacgccacagcccagctggagaagaaaggcacttcgtggcctctctttgttgtctttcctcatcttgtgacatcgcagacccaggtatgtatgtttcaggtctcctccaaaaggactgaacagtctcaggtcaggatggcagctcaccacccattggctcagcgagttaggacagtcacgtcaggtcagcattgtgtccctatagtaccccagatctgcttatgcttctcagtctgaagggctgaagaaagtcctttgttcaagcctagttcgatttctataaaatacatatgataatctgactctagagataggtatattgatgatatagtgatggattcactaagagttgttatatattttgaaaaaaaatcaaacccttaatgagtagcaagtctatttaaagaacacctttctttgttgaaaatagaaatgtttcaactttatttggaatcatatttatttaatgtgcaccttaaatgtcttgaaatatgtcattattagctaagatatataaactcctaaaggctagaaagatgtctgcttcattaatttttttagcacacccacaataatgccatgaacaatgagatttttaatccatttacatgctacaattgcagattggagtataaactgtgtctcatactcataaagaatgctatttcattcttagtttaaactttaagaaccagaaatcaaatgaagcagttctattacaacagcattgaatatccttacatgcagcacaaatggataattattggtttattttaatttttaaagtatcagtactaaccaactttctatgagagaagcctgcccaagtaggaaatgtgaaagatgctgaaaactacatggaaaaaataaaaagtcattttaagtcccttgctggaagataatcgtgttgaataccttaatatttgtttcctgtgtgattcattttaaggtgttattaatatgctctaatacttaatgcatcttaagacattcaaatgtttcttaccatgatttccatcctttcagttagtgatcccatgttcttcccaggaagaattattgtttttttatctttcaatgcattgaaatgtgttatgagttaaaggaaagagtgctgtgagcagctggtgactgcctcctattgagaaggaaagttgtgattactgcaaaggaaaatctaatccatcttgccccagtgcacttggtcttccagagccaggtgaactacctttgactgtttccccaggattatgtcacccaccaaggtaactttctttttcaataggcgatgttaagaaacaaaacaacaccctttaagttaatcacttttggaaaatagagaacggctttatattccaaggctttgatgtgtttagtggttcctgtaaggctctgcctcccttttcattttgattgacaagacctttcctatatatttgagcaatcaagcagcccagtcacagagggtagaggcatttacccagagcaaacttgtaccactcactgcgactttccaaaatcttgagtacaagtttcagctttacaggcgagtcagctccagtaagatcaggtaagtgcttctccatacaggaacttcattctgcctgagggtaagtccagagagccttgctaaggtgacaggtcagaagtaggaactgggagataagtttgggaataaataactctgcagtctaaatcataatgaattggaggggtgttcttcaagtggagagtccaccctcgtttcagcattcaggta

SEQ ID NO: 53222 - DNA, 1810 bp, Bovine  19866880749383
  misc_feature (1)..(1): n is a, c, g, or t
nttgtcgtttagttgataagtcaggtctgactctttgcaattctttggactgcagcacaccagacttccctgtccttcattatctcccagagtttcctcaaactcacgtccattgagtcagtgatgtcattcaaccgttgcatcctctgtctcccccttctcctcttgccttcaatctttcccagcatcagggtcttttccaatgagttggctctttaaaattacaaatgaactgtgcttttaagaaagtagaatttctgcttttcaatcaaactgattaggaagagaatatggcagacctatctttttaaaaaattattattcgttaaagtgaaatttcctgctccctcccttccccactgtatgcctctttcctctcttgatttcacactctttcccatgcccaataataacttgattccaaagaaggatctgatcataggatgtaaaaaagttgcaaaggttaagccaaagtgcctcaattttccctctcacttcaactgaaagtgcttctcagcttgtcccatgggagttctcattcattctctttaaaggatattttccaagtataactggtactaaaatattgcccctccctatttcctgtattcattgtcccaaatgtgtattttggtctatatccatgaataccaagctctggatccatctatgccctgcttccaaaatgatgtgctctatggaacagggactttggccctggggaagagactcttccaaacatccagggattcttgtatctcagagtgatttatttcctagcttttaattagagactgtgaaggcttctaattagtcttatttgcttacagttatcctggaaacacccaggtaggcactttatttttatttcaactgcataagcaaagtgcctctttgcagcatgaaattacacgaattttagtttaagaagtttctagattcacactcctgttggaaaaatcctgtctttctagttctttatgctcctggaggaagcacatttaaaaaggagcatacagtattggtcttttctgtgaagaccttccgtgacacccccccctagttttttgggttttgtttgtttgaaatttttgaaatgtgctttcctctcttctatatttcaagttctatttctcttctcccccgtctagttgctgaacattttcttgaatacacacacaccccacctaaaagaaaacgggagttttgtaagtcaaagcttgacgtttagagaaaacaaggacattctctctttgtaaatggaaatcaaccatgtataaactgtaactctgcagactttgagttcatcctttacaaacaataatgagcatttagccctataataaatgaagtgccgttacctggttttgttacattattgtgtggttgctgctgctgctaagtcgcttcagtcatgtccaactctgtgcgaccccatagacagcagcccatcaggctcccctgtccctgggattctccaggcaagaacactggagccagttgccatttccttctccaatgtatgaaagtgaaaagtgaaagtgaagtcgctcagtcgtgtctgactcttagtgaccccatggactgcagcctaccaggctcctccgtccatgggattttccaggcaagagtactggagtggggtgccattgccttctccttatatcttgctaaagagccactcctcactgatgtggatgaaaaattgagaacagtgtgtttgctctgccaagggagaattttccagatgtgtgcactcaacaggcaaatggttccccaggtcatcacctccctaatgggccacagagat

SEQ ID NO: 53223 - DNA, 929 bp, Bovine  19866880875509
  misc_feature (1)..(1): n is a, c, g, or t
ntgtatatagtatatacaatataaaatatacacacacacataaagttactgtgcacttgttaccaaattctatgaaaaaagataaaacctaataaaatagcagattttaccttggaacctcccaaaatattttatatacactaaaaggtacttgctgacttttgagatgattcaacgtttttctttgtctctatcatctcccactaaaatagcatatacataaacatcttatgcaaccacaagctcttcaaccaaagcatattctggtctgaaaagtctttggggaaaaatcattaatctggtatcttatttattaggtcacaatatggcttttaggtagatttagaaataaatcccaaattcttagctctaacccctcacacaatatatttcttcaaatattgtggtgtatgctttggcaacaactccttgctttgcattttagttagcttattctaaactgaatttcaatgcaaattttttaaaattacataaggagagaatttctgtgctttggccattggcctactactttaaatccatattcaatacaacacaattcccatagacacaagaatcgcaataattcttcttgagttatagtcattaaaaggatgaaccttatagtatgtaaattatcccactaaagctatttttaaatgtttttaagggttttgtttcattttgtcttgtttttttagttcatcttaaaagagggcaattcataattgctctgtacacaacaaagtgttttcctgaccaatggctcctttccttctggtcatacagggaatcaccagattccagggtcggggaaggaacggcgtcagagggcgctgcgggggaacctgaagtctgcgtcactcctggaaccaccccgggccacaccttaccctgttgcatcaatacaaacacacagactctttgct

SEQ ID NO: 53224 - DNA, 1404 bp, Bovine  19866880887096
  misc_feature (1)..(1): n is a, c, g, or t
ntaataatgaaaaagtctgaaatattgcaaaaattaccagaatgtggcacacagacatgatgtgagcaaatgctgttagaaaaatgatgctagtagacttgctcaatgcagggttgccacaaaccttcaatttttttttttttaaagcaatatctgtgaagcacaataaagtaagcctgtatagccataccaggctctctccctggacctggacttgttcccaggtccatctctagccattggctaagatgcatctaagatcctgaatcagatagaatattctcttctacttgtccttctactcttcctgcctgtttcatgacctgactgaaaatattgccactgtctagagctttctgctgtgcttcactcccaggtatagatgacagcctacactggaatcaagctcatcactgaccctttggatattaggatttgcatttacttgctgtccagtttcattggagccaaactgtaggaagagcggtttgaaaccaaagagttctaaactggaattttggttctgacactttttagctgtgcgaagagtcagacacgactgagtgacttcactttcacttttcactttcatgcattggagaaggaaatggcaacccactccagtgttcttgcctggagaatcccagggacgggggagcctggtgggctgctgtctatggggtcgcacagagtcagacacgactgaagtgacttagcagcagcagcagtgtaaccggagacaaattattgacttcttcgagccttagtttcaccatctgtcatttgggggtatagaatacgtatcttgaagagaggattactgatttcctatgacaagtagctaaagcagagcctcgcatatagctggcactcaagcctccccagcctgcctgatctagttcgtctgtcccagctcctttctcccattccactagcccacaggacacagattctgtcctatgtctgcagagttgcatcaactatttcaggctgttttttctctcttgatttgagctgagttgactgctttaacttcctgagcttatgttttctttttggcccatatcctttaaacaaaaactcttttttaactgcctctagtttacacatctgagccacctttgatctatttctttctagcataagagccatttgttctcttttggaagtaagttagatgcattttcaaagaacactatagtcatctccagagaagacattggcctgatctccccaaagatgaggtatagggtggatgacattcattatattcacatgcaaaggatgttcttagaatagggggacatttcttgtgcatttttaaggctgtaacaatgctttgaactgcaaataggatgtaatgtgatggtcctttgtgataagagtatttttgcaagatttcca

SEQ ID NO: 53225 - DNA, 1913 bp, Bovine  19866880893723
  misc_feature (1)..(1): n is a, c, g, or t
naaaaataaaatacaattaggaaaaaaaaaagaaaaaaaaaaaaaagaaacctatagcacagtattttatagagtagaagggagtagctatgatttttttgacagtgactgagtaaatttctgtaaaggagtcttttagtttagttaatatttatcttttgctttcattgttaataacagctgcttgctagcatggaggaacaatgcttccacattctccagcctttagtctaggaaaaggttgcactgtcttgtagttaagattcaccacaagagggcactataggttctgccacaggtaaactaatttatatctgtttctcttttctgtccttttcctcaagtttgggggttaaaactcaatgaagttagctgtcactcttggcagaaaatatctaaaatagaagacccataagaaagtgaaatgaagaaaggaattgcaatcttatattagttgatgataaccaacattttctgactgactgaatgtgatattagtaaaaacagtttatggaaacaaattcaaattttagattagtataacattcgctttagcagatgaacaaaatgttattgtaaccatctcaatgtggtgatagtatatataaaatatgaagttttgcagaataattatgtataaataatgttcacattagaaggatgaatacatattttctgtttcaacaaaaaatttcctcatcagatgtcttaatataattttgattaagtttgatcaagtagaatcagttcatgataatgctttgattttattaaaagatagtttacagatttacagatacttacctaggatgttacatgattctagtagttcaatgttatacaaactttaaaaatgaaatacagagctaaaataaatattcttcaaagttttccaaacttattaaactctcaaaaaatatgattggaggtatagtactcctttaagaggttttatttcttatccgtcatcaagtttgaatcttggttttagggattttttttttctttttggtagggttagaaaccatattttgagagatgctctgaaatgtcctaaacaaaatcaagttttagtgggaaaaattaaaatgtgtcatacagtacttttgtgaataacatagatacagtgtgatcggagaaggcaatggcaccccactccagtactcctgcctggaaaatcccatggacggaggagcctggtgggctgtagtccatggggtcgctaggagtcggacacgactgagcgacttcactttgacttttcactttcatgcattggagaaggaaatggcaacccactccagcgttcttgcctagagaatcccagggatgggggagcctggtgggctgccgtctatggggttgcacagagtcagacacgactgaagcgacagcagcagcagcagcagtgtgaaaacaaataaacctgaataacaaatcacaaaaccagtggtaattattgtggaaattgaggtcaaagaaagtagtctttatgtgttgtaagaaatggacatttgtaaaatatttttctttactaatagaattttaaaaaatccagtctcatgttcttgccacacacacaataaagcagaatagtaactatgtgaaacgatggacatgttgattagcttgattgtatacgatatgaaatcatcaagttatatactttaaatatatacaatttttatttgtcagttatacctcagcaagcctgaaaaaacatcctcagtgtatttcactaaatatgctagcttaataatgtaggatataactccttttcatcattgaagaaggactaaaaagagtcatttgaatattctcattttatataatgtagatgttttaatattagaaagacttggtctgaaagatagtgatcaaatgaacactgacaatattgtcacatatttcag

SEQ ID NO: 53226 - DNA, 1710 bp, Bovine  19866880932968
  misc_feature (1)..(1): n is a, c, g, or t
nttttcagtactttttcctgtgtatgtttgtatatgtatgtatgtcttttcattcaaaatgattactgattttttgaaaaagtgttccctgttacatacttactgtagaaaatttggaaaaaaattgaaaaatacaaagcagagagagaaaaatcccaaagatagctagtatttatattttggtatttttaccctttttttgtttcaatgaatgtatcttaataatggtaaaagagggcttatttgatccagaagacttcatactttaaatatgataccattaattgattgataagctaatcacaaacacaagcaatatttcctttttgtgaggatgaggttgacacattctccttgaaaaactgcaaaagatctgtcttactgttatatggtgaagagagttttatcgagtagggatgtagtaagaagaaatgaaggaagaagaatgtttgcaagcgcaactcacctcatcgtcgtcagcatcgtactgggcatagtgctgttcaagcagctctctctggcgcctttcttgttccagcgtctggcttatcaactgggcaacctcactcacttgtccaggtttttctcgcccaataacaaatctacatgaaagttaaagagaactggtatagtcaggctctccagcaaaaaaggaatgctaagcaaagtaaataagcttcacatttcatcagagtatatcaagcctcaaaaaaataatattacctgtttttttaaaggtatgcttgggtagaaggaaaggttagctgagcaattaaagtgatttttgcagccacagaccaaaggaaaagaggaaaagtaaagaaccacaaaaattattactttaggagaagacaaaacagatgtaatccatcctccagtactttacacatttttgatgccctacaaaatgaaagcaaggtcataattttctgtaacactgaactttagaatcatttccacagttacattctctttatttattttttattcaagtaaattttattaaaaattaactctattcaattcctttttgctatgttctttgtcttccaaacttttaaaatcacaatataattttcgtccttttcctttctaaagtttttctctaatacatctctcctaattttaatgaattaatcactttcacaaaagactttttttatttcacaaaagactttaaataaatgtttttacctttctcttcaagtaaagttatatgtttttttttgtcacccctcatccaaaaatgtccaaatatgtgagttatttactggaaaatatttcccactttgcaattaatcactgtttgcagagaggaaatataaaaagtcataattgtttcatagataggattttcttcttgtccaagactattctagcatctgccaatttaaatctttttttttttttttttttattttatgatacaatagaccagttagacctaattgatacctataggacatttcattccaaaacaatgaatttcacctttttctcaagcgcacatggaaccttctccaggatagatcacatcctgggccataaagctagccttggtaaattcaaaaaaatagaaatcatcccaagcattttttctgaccacaatgcagtaagattagatctcaattacaggagaaaaactattaaaaattccaacatatggaggcgaacaacacgctgcgaataaccaacaaatcacagaagaaa

SEQ ID NO: 53227 - DNA, 2175 bp, Bovine  19866881049798
  misc_feature (1)..(1): n is a, c, g, or t
ncaacaaattagtgatgattcaagaggaccatcgtctaatctgtatcccctttttacccttcagcctttcaccttcttgtctagcagagtctgcagttccatcttcctatggtgtttatgaccatgtggttgtttaaactgctgattgtgggttccagcagaaagacatggtgttattatcctaagagtttggcaaacaacccccttaacttataaaacaaatacctgcattataaatgcatcaggatgcaaaagttaaattataaatgtttattatccttccctttcccctagtcctcactccctgcccccttctcctgaggagggaaagtgcctttgggtactgatttcctctcctccaaagcccaaaggagagcaccaatcaagccttggctttcctgcgttggccaaaggagccatctatttaggaaggtgtgctggtgatgaatgaaggggaggggcaaaacttcacggctgtggtagactaggaaaaatactgagaaaacaataatttttaagaggcagtgctgtggtttatgggcttctcagatggctcagtggtaaaggatcagcctgccaatacaggaaacacaagttggatccctgggtggcaaagatcccctggaggaggaaatggcaacctactccagtatccttgcctggaaaactcccacggacagaggagcctggcgtgctacagaccatggggttgcaaaagagttggacatgactgagtatgcacgcatgctgtggttgacggtttgaatccccctttggtccctttatcttttacttaaggtcagaatggtttatgaggactttggggggttagtgtcatgtgtccttgaacgtgaaaccacactgacaccataccacatggttctccacttttgctacattttttaaatacttgaaaatgtacagaaactctactaaattaatggtctctcatctaaaacctgacaaaagagtatcagcaaaaccatgaacaagaattcaaagcctcatattgttaatcctctgacccagttgaactcagataccaagcatttcatgaaaccttcctccagctttgggtgacaatgaatgcataccacaggctgtgagagtagctgtcattcagagcattcctttactggctatgagcctctccttaataggactggctagcaatgaacttcacattgatgataagcatccccaaaattatacttttcttttcggatggtttgaagaaaaacaactggggaaaaaataggtgaataaggatatagaaatggtagatgttaccttacagaaattctgagaaaataataaagttatacaagacagtctcttagatattcattgcaggaaaagatccaaggactgttttatctcaaattgtcacacatcctcctttgatcataaattaaccagcaactattaatatttcttgacagttcttaagaactagaaaataaagttgctacctgaaaagaaccctatattagactaaagtaaatgaaataaataaagggagaaaactacaaatacataacaaagaccctgaataacaaagaggcagatgagtaaatataatgcagaacaacaaccatgcacaaaagcagacaacagaaaaatcacttaattttctccaaattatcttgtaacacttaggaaaagaaattattgagagcagaaatgcacactgtaaatatttacatggctaatttatttcactctgcctagacattgttctatatttaaaaccaatttactgctgttgtctttaccgttcatatactccttttggtttacaactaatacatttagcagattccaccatcctcaaatgcacaatattttcttgggtaccttggaaatgcaaatacaggtagagcattagtggttcctcataattctctgaaaaagatgagttgctctgcaatacacagttcataaaccttcactgcggtagaccgattcatcacgtgtgtcctccttgtaaaaacataaacttggtcctacagcctaaaataaatctgggtaagcctgaaacagaattacagaggggaaccaagaagaagtggtagaacttacatgatgggagacaacttagttaacattgaatccaatctacatataacagcaataacaatgacaaagtaactacaactgttgagcacccaaata

SEQ ID NO: 53228 - DNA, 1419 bp, Bovine  19866881385101
  misc_feature (1)..(1): n is a, c, g, or t
nggtgatctcactcaagatcttccaacttaattccctctgcaaagatcccattccatgtagagtcacattccacaagttctggctggatatattctttgcctctggacaagtgatagtgaaggcttgatgatcaaaaataatgtgatataacttgacctgaataggaacctactccaatggagctaataaaataaaaaattacctttgtctttttttttttctcttaagaattggcaatttctactcagcaagagactctaagactgcctctttcccacatcagctgaaattactgttaaccatacaatcttgtccctggaagccctgcctcctatccacccaaaaaattaaaacacagttttaactaaagttgatcagaaagttggacaaaggctcttaggaataactacaaggcaagaccactcacaattgagggcactttcctaataaaaaggtaaaaagtgaacctttcaaaagacaaagaatatatgtgcatgacagtggagaataagagcctagctgaaactgaggaatatactgacctagatgaaatggaaacatgtgtaaggatggatgctacaaatgcaatagcaatttcccaagcagaagaatgagtcattcggtcaactgagatgttaggacactaagatataaggacatgcccgtggcatccaggaaatcatactgaattaagctcatgagatacataccaagttaggcaggcatgatccttagggcactcaaatgtctatagatttttcatcctggcatttgccatagagaaacattccaggttagtagagaccaaacatgaatgccaagcagcactcttgagccttgggaggaccccaacctgggaccccaaggctcaccttcagggtgtgtccccagaagtggacaaagtcatggaatcccatggccagcttgactttttggcagcagaacagggttgtcatgagggccttctagactgaagcatctttatcatgtgtcaggatgcttggacagcctggctgccaccctaggggacaaccatcatcatcctcctcctcctctcaaaggtcagactgctggagggaactcacaggcagtggcccaacagcctgctggggaaaacatgttttcaaatggattgacaatcacaaagcacaaacccaacaccaaatgatctatccctaatacccctctaggccactcacagtcctccttggtcctccttgctgctaatattttccagaaaccccaagcccaaatcttcacccagtggcttggcttcaatttgctctattcgctcagcagagggacggaaccccacaggcatataaatacaaagagaaaagaaacctatccatgatgatggaacaacagcgtcagaacagcaccaaccaaagttgtcctaaaaggtaactgtcatcaag

SEQ ID NO: 53229 - DNA, 1603 bp, Bovine  19866881426368
  misc_feature (1)..(1): n is a, c, g, or t
nagatgagatactttcagaatatactggatgtggtatttcacctctgcttttcattaactgactacttcatgtcccaacattctttttaaaaaaatttccctgctgccttattagtgtcgatctttggcttgaaaaagtagcttattttcctttatatgtattttattttttaaatgaatgtgaagttattaaaaccagattctggaagctttttagggctttttaataatacatctttgagccctgagcatatagaatttctaattttgtcttgtgtttgcttgtttttccagctggcatattgcatagtacagtttctggagaaagatccttcactcacagaaccagtaagtatttttttctataattttgaaaaacttcagaaaaaccacttttcatggagtatataagaaaaatgaagtgcaatttgtttttctccttttcattttaggttattaggggattaatgaaattttggcccaaaacatgtagtcaaaaagaggtaagtgttcagtgtcagtgtgttaatagctcactagagcactgagataataggcatctgtaaagatgcattatcttagctaatcctcacggtaactcagaataaggcaggactgtaaatattctcatttttactagttaggaaattgatagttaggggttaagtagccttcctgggcatactaagtttaggtgattaggccagagccttcccgcctgactcctgcaccctgggcttttatcctggtctgctcactgatgtccgcttcctacggagtatggaggttttgctgtcactgttgatagatgctgtagcaacctgcccagatacccactttaaagcatcatgtgggtgagatcttactatgcacaatcttaaaatatgttgcagacctttagtttcagctgttcacaagtggccctggaaatccctgatttataatcatttgtacttttgccaagacctcaccgggcatgtgcagtgtgaggttgtggtggaagcaagtcttgcaaagtgagcctcgctgagcaccagatctataccaccttttctgaaaggttagaaaccatgtggaaaacggcccggaaacaaaggtcagcagttggttttatatttggagagtgttttagaaggaattcagaatgtttcttaacaaatggtaaggctcgacaatatttcacttttgatggaaacaccctccttctcaaatcagcttcagttcgccacaaccctcctttacatattttcagaaactctctaatttcttaatacctgttaggtaaaattaaactagtcattgctgcccagatgcatcttaagatatgaaaagatcatttttcatattttaattgcgtacttgatttttttctaggcagtcatttcttcatacctaaataggaaaatggtttttatttctctctcagttttccattatatttaaaacaagtgactgtactattgatttggctccattttgtgatctaaaagctctggttctgcaagcacagggtactgaggcaacgagattcattgtgctcaatagcgagcgagtgtgtacatatgtacatgtaagcgtggacaatgggtcagcgtgtgctgag

SEQ ID NO: 53230 - DNA, 926 bp, Bovine  19866881534564
  misc_feature (1)..(1): n is a, c, g, or t
nacgaagtcgttccaaagcctcccatctcatttcatacttattttaggaacaatggctgagttcaccacttcattgccttttgccagtttctcctagcaactgctctcagatacagcgaaaatcatgtttagcttacaaaatccaatttagaagaaaaccaagcaagagtttaacttgtttcatcacaattcatgtaattatagagatgctttaggtttctctgcaccctgactttcctgtcaagtagtttataataacagctaacatttatggagtgtttgcaatgcactgggcttcatgccaagcgctttacacaccttgtcttaattaatcctcccagctaccccccaaggtgtacatatcattacctccactctcctagtggaaactgaggctcagagaagctaagatcaccccccctagaaagtggcagggccaggatatgaaaactgcgcttaaccaccatgctcttctacttcccccctctaatctgaaaagaaacccttaggtttggggcttctttgtttatagactgaagccccgtatcttttttaaagactttttttgatgtggatcatttttaaagtcttgattgaatatgttacaatattgtttctgtttaatgttttggttttttggccgtgagacatgttggatgtcagctccccagcgagggatcgaacctgcaccccctgcagggtgaagtctcagccgctggaccaccagggaagcccctgaaggcccctattgtaatgtgtatactgtccccatgacttagatgctttgcaagttcagattttttatattcttttgttcagtacttgtcaatttccaaaatgtttttcatctgagaggacattttatttatgagacattttcatgtcgtacccatttcctattatttacactctagagtcaactacat

SEQ ID NO: 53231 - DNA, 1489 bp, Bovine  19866881579114
  misc_feature (1)..(1): n is a, c, g, or t
ntctcctctgggcatgtatgtgtatgtgcttagttgctcagtcatgtctgactctttgtgaccctatggactgtagcccaccaggcttgtctgtccatgggatttcccaagcaagaatactggagtgggttgccattcccttctccaggggatcttcccaatccagggatcaaattcaggtctcccacatgcaagcagattctttaccgtctgagccaccagggaaacccttctttgggcacagccactataatttcagaaaagcttaagggaattagcattcaaatttgctcctaatttctacaaatatagaaaaacctgctagggagtggatactattttcactgtggttttctccctgtctgctatgtaatagtgtcataaatcaggtacatctagcaggaggaggagacgtaggtgattgtttagttctggaaaagaagctactttctacagaaaggatttcaaatagccccacagcaaagccagcactcaaacaggtttcctgtgggctatttcccctccgctgctctggacccaaagccaaagtgaagaagagaaacttccctatcacaaaatctcaaatctctggtacctcaagctggtcttatagtgatcaagcagtttatcatgttccaaaaagttgtaaaatctaggctattgtaaattaaagcattttatgaatttgcttttaaaaagtttaatcggatttactttagagattaagagaaaaataagagtcaaagtggaaaaaattagataagcgatcacatgagaaactttggaatactcaatataaccaaaagaattaagttgtaactacactatcttaactgtcagaccttaaaatattttatgccatattttgtgctttcgggacatacgttgaaataataaaattttatattaatctttattttttacttttaaaacatattgattaaaaaccacttttaattcaaaatacagattgcctaacatatttaaaatctttgaatactttttcttcaatctacttccataggaaaatgaaagtacatcaggatagcaccaattgttatggaaaaatgaatgttctaatgctactaatttcagcatttcatttataaatggcatggggtgaatatatgagaagtggcaagaacacttctttcaccggttgtgcaactagtgggtttctttttttttgtaaaagagaattgtgacgcaccacattgttaatcagctataccccagtacaaaaaaaaaaggtaaaaagaactgagatgcaattgcactacattttataatgttcacagtaaagaaagttgatgaatcttcaggcaaatattaagtaacatctgtagccccaaagtctagacggcaattcagcgtatttccccagcattattcatttggttaaagcagagaaaagggttacaatagaaggatatacaggttgttctaacaacagcaaagacctggttgctggacgcccagctaccggctt

SEQ ID NO: 53232 - DNA, 1157 bp, Bovine  19866881685221
  misc_feature (1)..(1): n is a, c, g, or t
ncctgggataaattcccctgatctggtgtataatcctttatatgtattgttcattcagtttgttaatattttggtgaggattttttttcatctatgttcttcagggatattggcctgtgattttcttttcttatgttgtccttgtctggttttggtatcaggataatggtactaaaatcaaatgagtttggaagagttctctcctcttatattttttggaaaagatagtttgtctttctttaaccatagtttctcttataagccccaaaccagtatccccagccatttgctaaacatatccatggtagaatgatgacatgttaaagaaatccattccctttcttttaattttagaaaatataaaaaccagtaaactcagacacactctgctcccaaaatactattatgtttcctgccaaattcattctgtctgatctaaatctcttggggttcctatattaatatgaaagtattcgccactttggtaactatctctttactaatatactaaactaagttcttaggctgcttcttttgtgattataaattatcaaaaagcatatcaaaactatttcagaatgtaatctattccataagaaaactggccgggacttttaaagcatcaataacatagcaaggggcttgggggttggggaaggatgaacagaccactctagactaaatgcaaactggatcataatttcagaaaaagaaaagctattgaagacatttgtggacagttaaggaaattttaatatgaaatttagattacattaggaaattaatgtcaatattcttgggtataataacagtattgtggctctgtaacaaaatgtccttaagaaatgctgctaaagcaattacagataaaatatgtctgtaattcattttcaaatggttcagggggaaaaaaatatatgtgtagagagagagagaaagcacagtagcaaaatgttaacactgttaaatctaggtagaggatagaaggtattcacattgttctttcgactttttagtatgttttaaattcttttgaaataaaaattgaaataaaattctctatagaaaaaaaattttttaatgataattgtgccccatgctataacatacactttttcaaactgagatggtcattttggttttagagataagtaagt

SEQ ID NO: 53233 - DNA, 1797 bp, Bovine  19866881729645
  misc_feature (1)..(1): n is a, c, g, or t
naagaaccttaatagatctgtcaatgatgatccctgagggacccaggaatgactctaggggaacagaagagagcagggctgaaggtaaggcactgaaggaggggctgaggacacgtcctcacctgctgcttagcttagggccttacttggtaactggctggcattttaaagggggaggaacacaggaaagagtttgggttataagcgtgaaccaagagtttattctgaactttccagtgactccttgcatgactctgcagtcagctaccaattgaattcttgcatgtcatctgtaaaatgggcagaaaaacagcacatcttggcctcccagagatgattcccaaatagacagacgcatgtcaatcaaattattaattttatcaatgcttcgttagaagggcaatatcatatttctttcagattacttttggaagattccaagtagttgttttttgtttgtttaacccataacaaagtatagatatcccagctctatctcatttcattaagaactttaatactttggcttccctcatggtgcagtggttaagaatctgccttgcaatgcatgggacacaggttttatctcaggtctggaaagatcccacatgcttcagggcaactgagccctgaagtgccacagctactaagcatacaccgtagggcccctcatcctcaacaagagaagcccccgcaccacaactagagtggtcccctctctccacaagcagggagagcccgcatacagcaatgaagactcagcacaaccaaaaataaaagtaaagaaataatttttttttaagtgagtactttagaatcagtccaagcgacatgaaggcattgccaccaaagcctcttttgggactcacctcccaggtttcacagcggccccagcaggcatccgtggtgatccgaaggcccctgcagcccggcttcttggccagaaaagtaaactccctcactgcacagcccacaaatgtgcgcaggttctcactggaggtgctgatgacacagccacagccagccaggagcaggagggtcatggggccaagaaaaaggtacaccagcctcatgctgttcctccgagagggaaaggaaggagaatttattaatagatctagctacctctatcaatgcaatggacatgaacttgggcaaacttcaggagatggtgagggacagggagcccttggtgtgctgcagtccatgggtctcgaatagtcggacacgaccaggcaactgaacaataacaacaacctccatggataatgtgttggtcactatcaaagggacattgcccttagaatttcaggtcactaaacacccaaccctccaagggtatcctaaggcttttccttatggtatcccaactgctggatttgtgcattaaagaagtttgttccaataacctcttcagaatgaatacagaatatgactaacaccgaaagtaatgcatatcctaacatgatacatgaacacacacgaattatttttattcagatccaaggtattcggtatcatgctacatgcttcactcgaaattatatttccagtgtcatggatgagaagtggagagaggtagacaaataataatggcatgccccatatgtattgttactaacccaacccagcacaaaaccataaaacttggatatgcagaacagccctcacatccgacttggtggccattgataaaaatgtgtcctagttgctacaaattccctttgatctaagcctccactgtaataggcatcttgtgactaaatttaaacttgaatgatggaaagcatcaggggg

SEQ ID NO: 53234 - DNA, 1273 bp, Bovine  19866880852076
  misc_feature (1)..(1): n is a, c, g, or t
ntttatattactaaagtaattctgaaagtcatgtatgcaactctatttcaatggaaaacacactaataacattattacatgtaatttaaaatcaacctgtgaaagtgaaagtgaaagttgctcagtcgtgtccgactctttgcgaccccatggactacacagtagatggaattctccaggccagagtactgaagtgggtagcctttcccttctccagaggatcttcccaacccagccattaaatccaggcctcctgcattgcaggcagattctttaccagctgagccataggaaagcccaagaatactggagtgggtagcctatcccttctccagcagatcttccccacccagaaatggaactggggtctcctgcattgcaggtgatttctttaccaactgaactatcagggaagcctttacatgtattaaaaaaagtagaaaatactagcaagcatcatcagcttttatattttagcttttaactaggcattataataaaagtaataaactctgttttacctcaggagctgaatcttgtgatatataaaataaattaagattaaaacatgcttttcactgagcttttacattaaccttcagttttccagtaggtgaccatgttcagtaattggccataaaccaatagtctcacatgctgatagtgctgctagacagctgtaggagaagttagtttgatgaaatacaaatgaaagcataatagaaaattcatctcagaacaaatgatttcttctgtgcctggccttaaactccatgagggcagaaactcctctgtttgggactttatcctatgtatcttttcatcaggattcaaattggtctttctcagaataagagttattacaaaagataaattttatttgaagtgaagttgtgtatgactctttgcaaccctatggactatacaggtcgtggaattctccaggccagaatactggagtgggcagccttccccttctccaggggatcttcccaacccagggatcaaacccaggtctcctgtatggcaggcagattctttactagctgacccacagggaagccaaagaatactccagtatttgaatggtcctttatttctttcctttaaaagtctttgtactaaaccagtaatctggtgagtgaatgagttacctgagttctgtgagtcactttaacaaattaatcaaacccaaggaggagatcatgggaacctctgatttatacctagtcgatcagaagaataggaagcaacctgtgtttgcaattttcct

SEQ ID NO: 53235 - DNA, 846 bp, Bovine  19866880815765
  misc_feature (1)..(1): n is a, c, g, or t
nacaaacatccaaaatgcacaggttatgtacataaactccagtgagctttattaataactccagttactgttattcaaagagttcatagaattttgaatcctgaagggtgatttacttgatgacaattgtgaaacattctcaaacctgtcacatgcagtaattctgtcgtctgagaaactgttaatggcatttgcaagcgtggcagaaatgtaacaaattgtcgccaaaccatttgcttgtttgaatgccaaggtttccttccccactcacatgtggtgtgctgctgccaacagttatcaaaatactcccacagttgtcacagcgagaattgttcagggagtaactatttctttattcttgttgtccctctacttcattgcttttgccacttgtacttggaaagttacttgaataacttgcataatgtcagtatagaacagttagacactaagtaagggattaaaaaaaaaaaccaagactatctgagacacagccatggtgggttttgtccctaagtcatgtccgactcttgtgatcccatggactggttgcctgccaggctggtctgtcaatgggattttccaggcaagaatactggagtgagctgccagtttccttctacaggggatcttcctgacccagggatcaaacctgagtctccttcattgcaggcagattctttgccactgagccaccagggatgcctaagacagttctagatacatatacagagtgcagcaagatcaggaaggatgtttttcatacttttaccctctatatgttcctaatgtttggatttttacagacagactatgctgtttgtgtaatgtaaagctgcaataaag

SEQ ID NO: 53236 - DNA, 1508 bp, Bovine  19866881056056
  misc_feature (1)..(1): n is a, c, g, or t
ngaagaaatgcaaatgtcgaaagtggccatgtcctcaaagcacacctggctgtgtgaggaataaacagattttgcgtggggattgggagatctgaaattccataggcaaacctagatgcaattatttgctttcccccacattctccattccctttgttttctcctctgcaaatgtttccttctttctcagttcctcttcttttcacactgcagaggactcgattctagtagtgaggaaaacttgggaaacaaatatttgggttgtattctaaatcagttgtcatttgttttccgtttcctctgttacattagctgggctttgtcaggagagggggtcgcacactcaagccttagcatgtgaaacaaaacagggatgactccccagcaatatgatgtgctcaaccagagtgtttgctgttaaaagagtctaactttggtaacagagtttttaaccatttgatgcttgctctctgaaagaattggttgccaattgcaaccaactttgtagtataacaaattgtacaactatttgcccttcttggaactttgaatcaccccatagatgctatttgaaatcttactttggtataaggaatattttgtaatataaaattttccttgtcataaaattatccatctttgatggttgcattatactccactgtatactgtagcaacatgtatgccatcactatccatttgttaggacagcagcagcaagttattccatttcttactaacataaactctgctgcaatgaacatctttgtgaacaaaagcaccacccgcatttgtaaccctttccgtgggatagtcaccttgaagtggaattctttggccaaagaacgtgaacattttgagggctgttggcacttattgctgagttgttttccagaaaagttgcactgtcttacaactctatatccactactcctacccctgtctgcagcctccacacaagcactataaaaataaaatgtgaaatgcttagcatatggcacttggcacctagtagtgactcagtaaaaggtaactgatgatgttgaggttgaacaagtttattctcacattgtctctttgcagaggtgcagggtttctaagctcttctgggttgtacatcatctggacatcctgaatcacctatttatgtcccttcccactgcactgtggagggactgactagctatgtgtgtgtgtgcacagtagagggactgatgagctaatgtgacaaacttcttgaaactgtcattggaaggaaaatggcctagttttacctgccctggattttcaatagatgtctaagactgtcgctcagtggttctgagctcaggctatacaatagaatcatctggaagctctgtaaacaataccagagcgtggccttagttggctgagggcggggcctggacgttggcatttaaaaaattcttcccaggtaattctagtataagcaaaggatgagaatcctaacccaaaagatgaatcgtttagaaattccaggcaccacg

SEQ ID NO: 53237 - DNA, 792 bp, Bovine  19866881430679
  misc_feature (1)..(1): n is a, c, g, or t
naatttcattttaatggttatgttttttactggtatataagaaaattaaataaaaatggggaaatagttcaaggaagttgtctaaacttaatccattttaattttcaaaagtgtaatttcattatttttcacctattaaaatggttttggaactagaatttgtatgactacatcaatataggatcatgccttttagtagaaataagtgtatattcactttgtaacagcaaattaatagtatcaaaatatctgtacctttcatgctgagtaaagtgagagctgtccctgatggcttggttatgagagtcaatcactgtgacttttctttttaaagaaaactttatagcatgcagttgttttggtatgcaaatattaagtggttggtgctgaaaataagcaaaataagaaaacacagagatatataaagttgtggaaggatctaacttataattcatgtgtgaagagatccttagtaacaagtctaaaacatattctactctgaatatacagctaatgtcattcctggcaaatcagtaaggtaagaataaaaggatatgttgaaatcatatgctcccctaaaaaacaaaacacaaaatccttcagtaaagcataccttaagggaactttccccagagtgctgtcttcaggttagatctgactaccagaggaaacaggtttgtcatataatgaaggatgtctattgtagttatgtatctagtgcaggtactactgcattttggcagattttaactcaagataagaaggagtagtttgacactcaattactaaata

SEQ ID NO: 53238 - DNA, 593 bp, Bovine  19866881617697
  misc_feature (1)..(1): n is a, c, g, or t
ntttggactttgaagagtgctttcgcttttgttataaagaaaatgatacatacgtgtgaatacttcaaaactacattagaattttaaacaaattttaagatagtcttcaaatacacttaaaggtaaaaatatcatcctttagttgccaatttctctacccttttccacaaataactaggatttaataaattatttcccttaaaaaaaaaaactttttactttcagattgatattctgaaactccagctttataactgcatgtgtgtacacgatcatttttctctctcttgcaggtggcgcaaaccaggaaggggacatctgtggtttaagtcctctatgtctcatcctccgagtgctggaggcttgctgtgggctgtgtgctgttaatgctaatcgtgataggggtttttacctcggactgactcctacatgttagcattaacagggcacagtgcctgttacacgcgttcacatggaaccaactgctgctgtgggacggtgacaaagaagtgtgagtcaccctgctggatcaactctgactgtaggctttattattttctgttaatctttatctggtcactgggatgttccac

SEQ ID NO: 53239 - DNA, 1570 bp, Bovine  19866880796960
  misc_feature (1)..(1): n is a, c, g, or t
nagaaaagtagaagtatgagaaaggtttggcaaattaatgagagtcttgataggagtattcttgtggactattttcaatttagtaaggtatttccaagtttatactaataaataatttctatttatttaaagtgttgttgagaaagaacaaaagatacataacatgcctttgtttctgaaaaaaaaaaaatacattcagtaatttcctagtgtaacacatgtccagagaacacactgattatctttcaagtgtgttgtacttcaaatggcatgacctttagcctgtgaacctgaaatgatcactcttttgaacatcatgggcactaatatcatgttctcctacttgaaggcacattaaccagaatgattcatccattcatttcattattatttatgcatgtgtgtgttcaaacttttgtcagttgtttccttcccattgactaggacccagacagtactgtcagtatgaatattttcatgaacaaaacaaaacagaatgcaatcactttgtttctgctttaagtaaagtcattcttggttttgttttgttattttatcaacaaaatgaataaatatatgatttataaaaaagaagttgatccaacatcttcatgcagttattctgtacatgagtttgtttcagtttcaacctctgcttattcaaatattaaactcttaagtctctggtcttatcactgtgaatcatgaaattatttcatactataaacatcaggaggatgaaaacagaaaacaacaggtgagagtgaaatgcatttgtacatctagtacacagccagggcagtaaatccagatacaaatgtttcctggtgggaggaaagagcatccaaagacaaagacagggcttccctgatggcccagtggtaaaggatccacctaccaacacaggagacacaggtttgatccctggtctgggaagattccacatgccgcagaacagctaaacctgagcaccccaacttttgagcccatgtgctccagagcttgtgctccacaacaagaaaagccatcacagtgaaaaacccatgcactgcaactagagaaaagtccacacgacaactaagagccagcacagcaattaaataaataaacaaaactattaaacaaaacagaaataggaggtggcagacagactttaaagtggccccgtgatctctacctcttactgttaatgaattcataaaattattacctccctatgctacctgacctaacttcaagcttacgcaggaccatgattaaccaacactatggcaaagggctaccttaagtaagattctgtcttgctagaaggttctttctagtttccctctctcttctttgttggaaacaagaaaactgtcattatcttaaagtcacaaagaactgaaggcaggcttccctggtgactcaaaaagtaaagaatctgccttccattgcagcagatgagggttccatccatggatcgggaagatcccctggagaagggaatggcaacccactccagtattcttgcctggagaagttcatggacagatcctggtagactatggtccataaagttggaaagagt

SEQ ID NO: 53240 - DNA, 1279 bp, Bovine  19866880934318
  misc_feature (1)..(1): n is a, c, g, or t
ncggtgggaaaccctgacatgtgctcccactctgccaggccgtcatccctccctgttggagcagagtccatggaagacagcgaaaataggtcatttaaataaaatccgaagttttataatagccaaaatgtccagatttcagaaagcagtcatcatgtcaagaagaagaaaaatctcaacttggatgaaaaaaggtagtgtaggcaccctgctgtggagataatagaattgttcgaattatctgatgtggccaccataaaaatgcttcaataaacaattacaaacacacttggaacaaatgcaaaattaaaaaaatctcagaaaaatataaagaagaaccaaatggagattttagaactgaaaagtgtaataaccaaaatgaaatattcagtggatggattcatgagaagaatggaggggacagagaaaagaatcagtgaacctgaagacaccaatagaattgacaccagctgaaaaaacagaaaagagactgagagaaaaatgaacacaccctcagagaccggtgggactataacaaatgcctaatatatatgtcacctccctgatggcgcagatggtaaaagcgtttgcctacaatgcgggagacatacatatgtcaccagagttctggaaaaatagagtagggtggaagtgaagaagtactcaaagaggtaatggctgaaaactggccaaatttagcaaacgccataagcttacagattcaagtagctgagaaagttcaagcaggataaacccaaaccaggtggcgcagtgataaagaacccacctgccaatgcagtagacatggattccatccctgggtcaggaagatcccctggagaagaaaatggctacgcactccagtattctcgcctgggaaatcccatggacagaggaggagcctggcaggctacagtccgtgtggtcaccaaagatcagacacaacttagtgactaaacaacaacaaagaaacagtagatacattagagccaaacttacgaaaactataaagaaaaaaatgaaaacagaaagaagtgataccttaccttcaagaaaaaaattaaaaatgaaataacagcagatttctcagcaaaatgaaatataacctactgtatagcgtggggcactcaatgctctgtggtggcaaagaggggatatatgtatacatgttactgaatcactttgctgtagagcagaaactaacacaacactgtaaagcagctatattccaataaaaatttaaaaaacaaaattcagaggccggaaggaagagtcacag

SEQ ID NO: 53241 - DNA, 917 bp, Bovine  19866881209610
  misc_feature (1)..(1): n is a, c, g, or t
ntctctgtagcttctatgattagatagatagtgatatttgcagagtgaagtacaagactaatgagagggcaaacttgctgatacaaatgagagttaattgtaagtctgaaaaacaaggactaagagctgccaaaatgtaaaaataaaatctgacaagtaataaaataatgcacatctctaaggtattcattgtgaaacgtaggactagtcaatcaattttggcttctaaaaatataaacacttaaaaatttcagtttaactgaagatttccttaaaaaacaaccctgaagtttttcatatagtcaggcattaaaggtgttttttttattctattttaaataggctattgtcgactttggaaaagttcttctatcaaaatctaatatatttggagttgcaataattatgtttctgccaaagtgtgcaaaagacagtgttctgaacagtgtattacatcacttcataatgagtaaaagtcacagaatgtccagcatagcatcttctggaaatatagctttgtacataagattgatagcaaagcagaaataaatatatattctcttaggaaattaaggtatctgcaatacagtctgatagaaagataaacagttgcaaaacctgacaaattttttctgacaagcatatgatgaaatataagagtttgttgaggtcaaaaagccaatacctccctcaacaaaaccaaataacacaggaaaatagatagactaccactagtctaaatttatctgattaattttcaaatcttcaaaaccaatttaacaacttcattggtcctgaaagtgaatactcaggacattattatactcaggcatactcaggattttacctgataacagatcttaagaactcttacaataattcctggacttcatcttaataatttggaatagccaacc

SEQ ID NO: 53242 - DNA, 666 bp, Bovine  19866881235564
  misc_feature (1)..(1): n is a, c, g, or t
nctatctaataaacatctgttttttctatgtgcatttgtgatgccatctttatcatgcattaaattttcatatattcatgaacatgactctgagaaacattaggaggatgcagttggcaaaatttgccatcaggaagatgaagtagaaaataaatgtctatgaatgactggtcaggccacataaaatcacatcaatttcactcttgcataagacattgatcctgcccttatattacccagattgctaacataaaaagttgataaataaaagtacagtggaatttaaaatgtttctttgaaaatattatctctttgcttctcctagtcaaggtctgaaacaaccaatctcccacatactgtgacttttcagagacttcaatctccctacagatttcccgagctggttgcatttgttactgttgcttatcagaatacacacgtccctttagctattgtagccactctaagtttatttctcttagcagactgagtttgccattatttgtcataagccagaatctgctcaatgccctcttcatgtgtctcatttttcctaaaacttcccaaactatgttattataatcctttcttctgtgctgcagccaaggagtttttcttcatttatagaaaattattttgtcatttttcttttcgggtgggcttaag

SEQ ID NO: 53243 - DNA, 3605 bp, Bovine  19866881253841
  misc_feature (1)..(1): n is a, c, g, or t
natggagactggcaaatgcaaaattgtcaggggtaagggtgcagagtggagaccactggaagggtagatgtttcagctcaagtctgaaggcagtgtagaggcagaattgcctcttttcaaagcaccccattcttttcagctgattgaatgagacctatccacattatgaagggtgatctgctttactcaaagtcaaaacttcacagcaacatccagactggtgtttaaaatacatgagtattgtagcctaagttgacagatgaaactattcctttgcaatttgtgatatacatatcattggtatgtcgaatacttatttctcaaactgtaagagaagttgcactttaagttgcagtgtttttctcatcctttctcatagaactttactagcattagaaaagaaaggaacattatctcctgtcttgagacagacactgagttaatcaccctagagtaatactatgaatttcttgtgagaaggatgtgatggcattgataatatgtttttaccatgaatgtttgttagttgggcttgtagtgggactatgtatgctaagtaggtgggtgtataaaaaaaacctgagacatttcatctataaatatctgattataggccaaataattaaagattaagctgttcacaacctaatacttgttttcttgaatgaataaaagcttttaagtgaaaaaaatttggggaaataaaaacttttcttcatgaagatctattagaacaaaaatacaaatacttattttcttaatagttatatatttataaaatatactgctaatattgggaaaagtaaacatcctgagtctttgaatgtattgttctttcatgggtagtcaactatttgagaaattaaggcctgatctcttttgcctccttctttttttctccttttctttctccctccctcccatccttccttactcctttgtcttttttgcaagaactgtctattaattttcatttaaatacatacagaaaggtaagttaaaaaataatgttcaaatttttatgaggttttttttttttgcattacaattatgtatttgtagggagaatatctaatacttacttttaacaaggttttatggtattcataactgagtgaaatatttaatcacttttaattgtttcaaaggcatgatctactttatgaacagtacattttcttttatcctaaattcttatgatccaaaggataaaactatttaattgtttaaatgtttatatgactttgaatttagcatgtaagtagttagaaatagctctgattgctatgacacatgaaattagtagcatagcatacatgtaatgaaagttccgattctactagcttgaactcaggcagtatctactcctttgttgctgatgttggtaagcccaatacagaaaatagtacaacagaaacttcaaatacaatgcaatggcactttcataattcataatacatataatgggaagtttgcacatatgtaacaaaaagcagaaaatttagctaataaatctccaagacattatattcttttatttcagtttctttctttttttttcctctacacagacattattctacatttcaggatcttagatagttaatggatatttaaaaatctgcagaagttgttgttatccaaaacacacaaaaacacatacaaatacaaagtgagaaagggtccaaagcttattaaaattacttatcaaaaaagcttttactgttttgcccagaaacattggtgctatgataatattatgctaagaattcctcaaatcattcaatgtttcagtggatccaaacatgtgtgtggatgttttttgatagtttcatagtttagattggcattgtgtacatatgttaatgtttgtggatataaacaagtaacagaaacagcaaagaaattattttcagccatataaaaaacttgatgtcaaatagtgaagaaagatatacatttttattcttacaagtctctatttctaaatagacatataatactaattgtaccttgaggatcacataagcatcaagaatattttaatttctaaagttatgtaaaaaattttgtttttatgcatatttttacttttttctgaatttttttttaatctgaggtcaaggttttcacatatatcaaatatcacatatatcaaatattctttatttgtccaagaatcataattctgactgtattcttaaggagaggtcaagttccacgcaaaaagtggtcagtaaatcagttggcattttctggagactgtctactgtctgatttttattttttttaagacagaaaattgctggcacttctatcatttctacaaaaatacagaagccccagtagtaacttaaatcatctcagatgcttaatataacattagttcaccaagattatggcatcttctgaaattcaattcttaaagtctaggctttgaataaaaacaaatctctttaatataagcaatgctgttttcttccttccttcttacttttcttctttccttcctactttccctccttcattttttgatgcataattaaagtagatcaatttgtcacttagtaaatatataaaagtcatcatcatattgctttaccatatttctaaaaaaatatcataaccaactcagtaaaatatgttcagacaataggacaagagaaactatgttaaatatcattagtttttcaaaatctgaagaacacaagacattacagtgaagtatcatactaagaatctgatgctgtagactgagcttctaactttattttggtgataaataataaatcttaacagaaaactttgctcatataccttcataagaaattgaatataaggactgtgcaacatgaaaaatatataagaaattataataaaatagaagtccaaacagtcaaggaacatgtgccattctaaaatgatctatattgtttaaatagggtataactccctccctttatttaggacaaaatattcacagaatatatttacaaacaattcagaattcaaaacttagttaattagaaccaaattccacggtggaactagaggaagaatggcatttattttatttgtgatcatgtggaagaacagacatgaaatatagtaagactctttagcagcatcactaaatagaagactggagatggtatgatcattaaattttggattaaaatgtggacagtatttttcccccagctttttattactgggacactataccttgttatgaagcatatttgctttgtttttatattttcttttttttatttattttttatttttttttatttatttttttttttaatttcaggtatacacgtgatccccatcctgaaacctccttatattttcttatagacattttcctgaattccccacaaaggcattataaattcaacagatagttttcctctgtgttcctctctgctatgaagtctctaattgggtctttttcaacaaaagaagttagtagtgtagagaaccagaaagttgaaaaaaatcaaataagcaaagaacaaatagcatccatcctctcagaggttattctaggaacattctgagtctccgagttgtacactctctatgtgcaggaaataata

SEQ ID NO: 53244 - DNA, 1219 bp, Bovine  19866881307707
  misc_feature (1)..(1): n is a, c, g, or t
ntggactttccgggaacaactgtcaactgaagggcatttatcactgaagatgtctgctatgggggttttgatatttcaccaaaagaaaaaaaaaacagggagagaaagagagagagaagaaagggagtgaatttagacatgcagaaggccaaatccacaagtatttgtgtggctataaatattaaaagtatacataaatcatgtgcatggatgcactactctctcttcccacacccagcccataactatactactgatttctggaaagctaggacatttccgggcttccctggtagctcaactgataaagaatccgcctgcaatacaggagatcccagtttgatccgcaggttgggaatatcccccagagaagggataggctacccactccagtattcttcaacttccttggtggctcagacgacattctcctgcaacacgggagacctgggtttgatttttggtttgggaagatctcctagagaagtgcatagcgacccactccagtattcttgcctggagaatccccatggacagatgagcctggcaggttactacagttcatgggatcgcaaagacttggacacaactgggtgactaagcacaaaaacatgcatataatttttgcatttttctctctgataatcaattccttaagcataaatgcttcttcctgtaacattttatcagtaaattaattctctgtgactttttaaaaatttttgagagcgttcctgttggaaagtatggaagtcagaagctgaaaaatttctgctgataacagcggtgtacctggagccagaaaagaaagggcaagggaagttaagagagcacagaaaccatcagagatgaggaggacaggtatttgtataatcttgccagttgacttcccattttagactgaacatatgagacaaccaaagcatctgtaattggagacagtgaggagacatttcaaaatacctgtgttacctgaagctgtattgctattattttactcaagattaagaagttcattcaagttagtagtagtgtgagaaaggtgttgaagagttgatcttaggaggaaaaagaggaaaattggcatgtgaaactgaagctgtgcccgatcacactgatgctagggacatcaggggattatgtctcctgtgctgcaggtaatgagatttgactatatttaaagatcaaacataaggcactgctttaaaagttgcctttt

SEQ ID NO: 53245 - DNA, 4027 bp, Bovine  19866881652041
  misc_feature (1)..(1): n is a, c, g, or t
nggaggaggattaggatggggaacacatgtatacctgtggcggattcattttgatatttggcaaaactaatacaatttgtaaagtttaaaaataaaataaaattaaaaaaaatagctacaaggttataaagtacaacacagggaatgtagccaatattttataactacaaatagaatataacctttaaaaattttgaaccactatattatacacctgaaacagatctaatactgtatattgactatacctcaaaagtaaaaagaaaaaagaaataaagattcctgtcttgcagatcaatgagtgagagaattgagtcaattaaaaatcactaatgaagaaaaaaccaacaatctctttatattttggtttaaatctaggatcagctgtagaatttgaccaccaacataacataacattatagtatcaagtacctagaagcaaagtaaaaatctaagtcaatatttctgtatgaatttgtgaggctcattttgtagtttactccttgaaagtgaaagtgaaagtcactcagttgtgtctaactctttgtgaccccttggactatacagttcatggaattctccaggccagaacactagagtgagtagccttccccttctccagatcttcccaagccaggtctcccacactgcaggtggattctttaccagctgagccacaagggaaacccagtttactccttattatgtagttatttcaaagggaagttgcccatctaaagtgaaagtgaacttaagacacgcttttctagccactacacatccttagaagacagagtcagacttattttgctgctgctgctgttgtcttttcctcagtcttgattccactgattacattctgatatttggaggaatacatgatttacctggtaagtgtatgagatggaagttaaaactggaacaggggtaatgatgctgcctgatgcaaactgttgagaatacccttctactaggcagtgatccccatcaagaagaaatgcagaaatagatgtcaacctggtccttgaagcaaaaattgagtaataatttcatgtttttgctaaaaagaatattacaaaagaaaaacacaaagcactgattttgaacaatgtcaaaatgaacaatgacaaagaaacaatatcaattttttgatattgttaaagttaatttgttaatcaaactgaatttgcatgtaacatgcagatatttcaatcctgaattattgtccatcttgtctttttgcacccagagcttttattagtatatctatattcagaagagagcttactgttgttttaaacatttatttttaattgaagaataattcctttataatgttgtagtggtttctgccatacaactacatgaatcagctgataagtatatgtatatcccctccctcctgagcctccctcacacccccttcatccctctaggttgtcacagagaacccggctgaactccctgtgttatgtgttatacagaaacttcccactagctatatattttacacagaagagaccctactctaactatatggtaaattatttgaaatacaaacatatataataacaaaatatttagaatttcacataaaggtttcataagaattattcacttaactgtatttaaatataaagaataaagtgggtttattattacaggtatttgacacatactctatgttgattttctatattatgagtgcttcatgtgatacataggcttattttattagaattgtatttaatataggaaaaatgttactctgtatagatatttctgatctatcaccatagccacactcattagattaatctggcttttctgtattactaaatttaatcacatgctgaaaaataaagattttcaacatgtggttgtcattcaactagatttctttccagttttacttgcaaactaaatttcaggcataaattacattaaaaaagaaaatgatccattaggtagcaacatttctcttgagtgctccaggatcaaactcatcttggtgattatatttcatttattcttcagtacaggttaggaagatcattctcatttttaacattgttagctttactttaaaagtacagaaacatttccaggtaataaaacatgtttacccagttacattgcctcaaggctacaccacctacaccatatagagatgatcaaatgaaaccatcattctttacaacagctctgtcataaatgtttactgaaatggtgctgtcagactacttgaaatacagtaggccagagtccttgcacacatttcagacttctattctatggctaccctgtgtcatccctcaagctccctgtggtggaactcacaaaaattggtaatgaagcagatccttggtcagcagatcagcaatatgccaatttcatttatttcagaaaacagaatataggctaatctttaaacagagttataagcattcgagtaaaaacatttccaatggaagatataatttgtcatcactttgatgacttaactgaagtagcacacattgcatatttatttaattctttttgaatctgctttttagtctcagataatcacataataaagaatataatttttaaaaatggaacaattgtttcaaaaacagagaaaatctagttttaaatatggttaaaaagaccaaaaacagtcaatatacaaatttttttttttttttctatagcttcagttcagttcagttcagttcagttcagatgctcagtcatgtccgactgtttgagaatctatggactgcaacacaccagtcctccctgtccatcacgaactctggagtttactcaaactcataaccattcagtccatgatgccatgcaatcatctcagcctctgtcatccccttctcctcctgccttcaatctttcccagcatcagggtcttttcaaatgagtcagttctttgcaacaggtggccaaaatactggactttcagcttcagcatcagtccttccaatgtatatgcaggactgatttcctttaggatggactagttggattgccttgcaggccacgggactctcaagagtcttctccaatatcacagttcaaaagcatcagttctttggcactcagctttctttgtagtccaactctcacatccatacgtgattactggaaaaactatggctttgactagacagaaatttgttggcaaagtaacgtctctgctttttaatatgctgtctacgttggtcataacttttcttccaaggagtaagtatcttttaatttcatggctgcagtcactatcttcagtgattttggagcccctgaaaataaagtctgtcactatatccactgattccccatctatttgccgtgaagtgatgggaccagttgtcataatcttagttttctgaatgttgaactttatgccaactttttcactctcctctttcactttcatcagaaggctctttaagtcttctttcctgtctaccataagggtggtgtcatctgcatacctgagattattgacatttctcccggaaatcttgattccagcttgtgcttcatccactccagcatttctcatgatgtactctgcatataagttaaataagcagtgacaatatgcagccttgacatactcctttcctgatttggaaacagtctactattccatgtcaagttctaacttttgcttcctgacctgcatacaggtcaggaatttctcgagaggcaggtcaagtggtctggtattcccatctcttgaagaattttccacaggtttttctgatccacagagtcaaaggctttggaataatcaataaagcaaaattagatgtttttcagaaactctgttgtttttcaatgatccagtggatgttggcaatttgatctctagttcctctgccttttctaaaaccagcttgaacatctggaagttcatggctcatgtattgttgaagcctgccttggagaattttgaacattactttgctagcatgtcagataagtgcaattgtgtgatagtttgagcactctttggcattgc

SEQ ID NO: 53246 - DNA, 1755 bp, Bovine  19866880859592
  misc_feature (1)..(1): n is a, c, g, or t
naaggtggctttaagattggcatgtatattaattttagaccgtggtggtttagatatagaatttcttctgtaactttgaggcaggtgttgtaggtcttaagcttttcacttgaattaaatgtggtgacagcaacaggacctttggaagtatttattctactaaacttacagctaatagttattaagtacttagagtgtgtgaacactgtgataggagctggggatccaatttatgtggagaaatgcagtttctgtgatgattttgcatgagaagtctggattaggtggagcacattttctgcttggactgcagcaagattccaactcaaaactcgccagggttttattcaaaaatttccactatcttacctaaagattaagggtcaggaagaacagtgacaatccttgctgttatcgttgtgctgaagtgtgaaatggagtattttcctgccatatcaacaaacacggatgtcacagtcatcactgatgctggccctccaaaagtgatttcctgagccctcagggcaatcaggaaggaggataccggcacaatctggcagtcgtcaggttgcagccactccgtgtgatgagcactgaggaactccaaatgtggaaaacgtaggatgctgtccccagatagttgagatgcacatgaaaggaatgatttcagtaaacccagactcttgcatcttcccatacgtggaaagtgctaaattcctcagcttgagacatctggttttctctgctgctaagtcgcttcagtcgtgtccaactctgtgtgaccccatagacggcagcccaccaggctccgccgtccctaggattctccaggcaagaacactggagtgggttgccatttccttctccaatgcatgaaagtgaaaagtaagggaagtcgctcagttgtgtccaactcttcacgaccccatggactgcagcctaccaggatcctccatccatgggattttccaggcaaaagtactggagtgggttctctgctggttttctctactgaacagtaatcttttgatgtcctacctgcctttgttgcagaacttctgtgtaacctggctcctcccctagtcttgttggagcaattttttcagggttccttgagatgctgtctcccagtcttgaagtcctaaaatttcccactgaataaaacagaactctcaacttttaggttgtgactgatttttaagttgtcaaaaggaaggacaataaattgacctgtgatagggtagaattggtatttagcactgttgtctttgcaggaggttaagattcattcttaatctcaaaaggaagttagttgtgtcactcattgaaaattgatgtgtgttgggtagggcaagggcaggagagaaagaaatttatgtgtgtcaaggcttatataaaatgtatttatgttttatatactttttcaaataacatgcacgtacacagtcaatcttgcaataacacgacatatgcatttctaaaaatcaccacattatgtaaatttcacaaaaacaaccccaggccttgtgggaaaaatggagttagagacacaacactcaaatactttgtctctgacacatacaaagaagacaggaacctagtaaaactgatagcacacttttacgcatggtaatggataaggaaatacataaatactataataaatacggcactttaccttgaaaaagacctgaagtttgctagtgggagtgagtgtcagaaggattgcagcttgtgagtttttgcagaatgaaa

SEQ ID NO: 53247 - DNA, 645 bp, Bovine  19866881236213
  misc_feature (1)..(1): n is a, c, g, or t
natttaagaatgatgagagaggcatttccctggtggtccagtgaagactctgcactttcaaagcagggggatgcaggtttgatttctggtcagggaagtaagatcccacatgccatgtggtccaaaaaaaaaaaaaagaatgatcagggagaaaaaggtaagtaaaaattaagccagtcatagtgtgagagaaaagtgaaatatacagccaagagtctaattttttctcactgtaaatgcttctaaataactgtatatgaaagtttaatttgcttattgactgcaacagtttgtctccagtaccaccactttgtgaaatgaattgactaatatgtcacgtatctgacctctttctccatattctcccaatattccctaagaattaacctacctttttcttgcaagttttggttaatcctgtggtagttacaatgaaagaataatagcactaaccatcgtttgtgtgagcaggcactgtgtaatcttgacaacgtcccttcagactactctgggagatccatgttatccctgttgcacagacaagactgtagaaaacgcccaattgtgtgctctgcttatgttctaccaatcagtaaaggtacttggatggcaaccaagtaggactgttaaacccctttaaataca

SEQ ID NO: 53248 - DNA, 1226 bp, Bovine  19866881544225
  misc_feature (1)..(1): n is a, c, g, or t
ntaaaaaaaattaagccgcattaaggagtgagtcttcttttttacaataatgtaaaaatgaactgtttacatttttttaaagcattgtagttttaaaaattaagctgttttgttttgtgctgttaaatttggaagcctttgtaaatactgatgtaatgtaccaatgaaataacatctggggttgatggaaccctgataatgttgttgatggttagcatatgtttctgaaaattaaatatgtattattaaaagttggtggccaaaagttgttaaacatgtgactttattttccaatgacttcagtaacttgagaaatgtaagaaaataaaagtcgtgttttataatttgatttttagcaagcagagatcacattttggacccctaaattataatgtattagctacatacctttaagaaaaatagtttttaattctagttctaaaatgaacactgctagcagttcatctctatgcttatacattctttactgcagttgttttcagtatgtaagtgagaagctgaggagacatgatcatatccatattaatcagcatagtcttgagtgtcccggattttctagttcattccgtattgtttaccttggttttatttctatgctgctttcttgctcttgccagcaacatgctttctccttcctctcctcccacctccctcactgtcccccacctctctgctcactttcctgtattctgcctgacagatcaagttgttatgccattggctttctaaccaggctctttcttagtctcagggtctggatggcagtggaattggtctagtgtctcagagaactcagtgtcttcaactctctgaggctgcttgctttcactgacttctgcctgatgccttgtagtcttgctgtggtgctggatgtttcaactgcatataatcggggtgttgccatatgaatatttcctgatgggttttatgtggtgtcttgaacaaaaaggcaaaggcaaaatagttgggatgcaagcttaagagaacaatactgatacttctaaatttagttttgaaaatattggtttatcattatataaatatactgcaaagttacaagtcagaaagtgagtttgaaaaggtagcatcaagatgtatgtaaagaaaaattgaacagcattttcccctaaaatgaactgtattagaaactcactatattaagtggtgtggtattataggaaggagcacagattctagaattagat

SEQ ID NO: 53249 - DNA, 749 bp, Bovine  19866881656909
  misc_feature (1)..(1): n is a, c, g, or t
ngtttcaaatgataactatgcaaagtgaaaaggcctacgccatcagaggggttaaaaaaggttgaaagtcttaagccttccctcagcccttacctgaagacaatctcttcctcttctgaactcctatcagtcttactgttcattataatatgaactagaatataataaatgcagagtagtacatgagctaactctgtataaaatattttctctacacctggaaagcaaggcccatgttttctacctcttgataggctcccatagcacctatttatagtacctagctctgttttttttccccctgggtttcaggaggcagcaaacagggaatgagcaaaagaacagtgagaatcaaaactttgtttcctatcaccctcctgcttcgaaaaactcattcctttcacagcaactataaaataaaaaccagatgttttagcatgacataagaggcattcccataatctggccctaaatttggtttctagactcatggtcaaacattccacacattcctcatctccacgcctttgtttatgcctctcctcttccatctctgcctgcccaaatcttatccatccatcaggaaccagttcagatgctacttcctccttccccattcctatcctcaagcagaaagtaaagtctctcttgttttcctgtaatagtttgagagtttatttgaaaacttattacattcagttttgtgttcatctaatttattctactaaaatgtaagttactgaggacag

SEQ ID NO: 53250 - DNA, 737 bp, Bovine  19866880592045
  misc_feature (1)..(1): n is a, c, g, or t
ntattttactttctttgcattgaattaatcatggataggagaaaattaattcactgagtttgattctagtgcatggcagcagaaatgaaaggagtaaaatgtctttcactgttttcaatcttccatgctcagcagaaaaccaggattcccatgctctctactattaaggtaaacataaaccctagagacttggaatttccagacaatccaaaagctattcagtttaacatagtcaatcatctatatcaaataatttggtttatttcacttaattctcctgaaatgtaacttccctcatattatgtgacttattccacaatacatctaaagattctgatatatttatgcacatgaatgaaagaattcaagatgaatggctattatccctttctacttttcctcgaacctgcccaattatgaagaaaattaatctgtttttaggctcagctatcacaaatccaggaccaagaaagtccagtgtatagtacagattagtgaaaaccaagaataattttcttccatttgaccaagggtgaatccataggactgttcctatggacctcatttaatcttgaagataaagcttgttttccaaatcttccacattaaaaggccaatccaaataaccacctcttactataaaccacaaattttcactataaatactggagtcctgcaaaatataccagagattttctcataactatattcctatgcctagttcctactagttctca

SEQ ID NO: 53251 - DNA, 1710 bp, Bovine  19866880692420
  misc_feature (1)..(1): n is a, c, g, or t
ntcattatttggtaactgtactggactcttaggctttcctggggctcagtggtaaagaatgggcctgccaatgcagtagatgcaggagacgtggctttgatcccctgggttgggaagatctcctggagaagcaacccatttccatattcttgcctgggaaatactatggaaagaggagcctggtgggctgtagtccatggggttacaaaagacttagaccataacttggcaactaaacagcaaccaaaaacttctttctgaagttttttgagatttcatattacaggtactctgatttcaaatcaaaacatcctattattatttctgtcaaacttttatgagcaaatccaagcaaataatatattttacatgctcaataatgtgttttctttagaaaccttttctaaaacatgcatataacaaattagaaggcaatggaagaaatgtttgttagttcaaaggtgcttttcttccatcactaaagctataaccttaagtaagttgagtgaaattatctctcttacctcagacttctcatctgtaaaatggggataataatcacaacttacattgttgtgagaattaaatgagcagatacatgtaaattaaatgagcagatactggttagaacagtgctaggtaaatagaatgtagtcagtatacattagctcctacagttatttgtgctattatgattattattcttcttaagaaataggaagcatttactaatgtatataaatatgaaatctgtttcaaacagatctcatgttaacaattgtatatcagctgaaaagagtacctcctgatttttagtttgctaaatgatcagtttgttatttctttctcattatgaaataaatacagctacactgtggaaaaaatagaaaaatacaaaaaaattagtgatataacagccgtttctcccaaatttgttaaaatcttaaatatattttaatacatttggattgattttacttataaaattaatttatatattacattgtacacttataatgaattaaagtcaattttatcaaaatatggtcatattttcagaatgtgttgcaataaagagaggaactccttatgatatgtattgtatgaaacacatgaactgaggacaatatcatgaactatcctatttcatggcattcacttctcaaattcagtacaaaacttatatgaagaaaaattactaacatctgtgtgactgtattctttgaaaacctcgcatctttaaggagataattactatggtttcaaatatttacaaaataacatttaaagtgttttgactgtgtactcaattggcacagattattttctaagtgctagtgaaatacattcaaattgtttgattctaattaaataacactcaaataagaattctttacataaacacaaatgccagatgtttgaagagggtgatgatcccttaaaaagcaaacattaaattatgaaaaatcattaaagttattttcctgggagtgatcttagattttctccttttatgctacattgataattgttgttgaataaacatttgcattcaaagtagacattaatgctcaaatttactctgtaaaatatgccttttataggagtataaatattttctgagctcattggtaacttctaattaaaagggaagtcctatttcttttggctgttgggccctgctatgttctgtgtgctaacaaacaccaa

SEQ ID NO: 53252 - DNA, 1885 bp, Bovine  19866880778018
  misc_feature (1)..(1): n is a, c, g, or t
natgctgtacaatattaacagtctagagaagtgatttacttttccatcttgcagcagttatgaggtcacctggattcaaacaggaatttagataaatcaagtctgaactttgtattgtattcatttttctctgttaatccctcaaaactgaacagcaagttttcttagatatcatataatgttttttgttgttgtttaaactatagcctattaattatcaccatatttctaaatttttatgcatttagtgattttaaaggatatcttattttacttttatattttattacattggtaatatattagtagttcctgatattcctgagtttacctctctctttagaacatgcattattaaactatattttctctttctctctatgcccctgtttccttaaaatatatgtattattgtatatgtgaacagacatatatagatcaaatgtgtgtatttgatgatgttctatgactttatacagattcttgaagtaggagtttaatgttttttgcaacataggcataaatccttatgagcatacataataaatcatacatggaggattgcccaatttacttaaaatatgtataaatattttatataccacaaattttaaatttatgattttagattatgtaaattataattattttccaagagattttataatttcttaatagtcctgaattctatggtataatatattaggaataagaaagaatattgctctaataaaattggggaagatcccacattcaatgtaaaatataagagagcttgaaaagcagacattctagtttaatcatctatttgcatctatttgctaagcaagtactgaagagctactgtacatgagacatattatatatgctagtaattccttgtctaagaaaagagatataaactttgtctttaggaaccatgaagtttaggtagtaaagttacagtacctatattttgctagtttgttgatataattggatatttattcatatcacatttttttgagttagagaaatcaactttagatttgtcaggtgatgttagattgacttcatggtcctaattcaccatggagattttattccagtgttttgcctgcttttttttttaatgctcaggttctcaaagtctcaaaactggatcataagaaaaaatgacatctccaggtgacttggcatgcataaattggaaattaataagacatttaattttatctaatatttgatatttgataaaatgctaaatattttatctgatatcatttgaagtttgaacttaaagtggtgagaatagagagactatgctgtggtgtttcaagatatagagaagaattattataaagtttgtaaatactaaatactagagtatatatataaataatcatacagacagtttatttaaatattccacccagatgcttaatattcttcagaggttagtttcctaaaccatgtgcattacagtaattcacagaggcagtatgtatgagctgtgaataacggtattatatgaaatgctttctaatctgtaattgttaataggcctccagtgactaccagctcaggatttaagaattgaatgtctcatcaagaataattcacaaccggtcaatgttctgctgatgtaataacatgaccttgatctctgtaccagatcatgattgcaaaataattaattctattccttagtccacattagtagtgatggatgacatcatttatcaagacattgggaagttatttaggaaaatttcttatcatatccttaacccctttgctacctacagcaaagtcaggtttgtaaggtcggtttttgctagtctggaaggagatttataatcattgttctgtgctgcctgcataatatataagccttgggagtatt

SEQ ID NO: 53253 - DNA, 1998 bp, Bovine  19866880955898
  misc_feature (1)..(1): n is a, c, g, or t
ntggtcccagctgctgctagagctgcacctaccataaggcataagaccctatttttctctcggcccaaaatatttctcctctctctcttgtgttttgttcattggctagtaaatgacctcagtcatcagcttgaggcacttccttagttcaccttttcctgacttccaaagactgattccactcttaaatactctgatgatacattgcatatatgtaggtatgtagttgcacaattatttaatactttggttcatctcaacttctccagttagagtgtataccccatgaaaatgtgtcacgtagttggtgcttcatatttgttgcaaaatgaatgacccctagtccaaagagataatgaatttgatactgcttctctggttgtagattcttttaaacttttaaggttaactattgagttaattaaacctttatttgtcctctgtcaatatgttaacataggtaatgctctgcctccttgaacacagctgaattctctagggtataatttattcctgctctgccagctgaaatacagactctctgaccttctctttcccctagtgacttggacatttatttagtcatttatggttatttaagtgtcagattatattatttttgatatttgtcccataggacattgccaaatatacctcaggattacatttctaaaagaaaggcagaagcatttacaaaagcaggagaaataccaattgaaagcacattacaaaaatctcatttctattttctctactacaaaaccatttctactgcaaaacaaaatgactgctaacgtcacatttataagtgaatatacatttttgcttaacttttaaaaaataacagagacaactaatatgtttgaccttctaataaataatattgttttattgtaccattatgtagtcatcaatgacatttactatagaataaaaaaggtaatgcaatactaagaaaacctattaaaatctaataaaaatatactcacaaatcatagtaagtttccttcagaatatccagatggcttaaaatattcttaaaatttaatatacactggatactcaactaaatttcttatctttgttgaaatatctaacaacacatcaaggtaatatgataattcctgaaataaactaaggcaaacccttatgtgcagtcagtattataagaattaattgttgagaatttcgcttataaggatcagctttaggaaatgttatttgtgaaaataggtgcagcctataagtagttttctaggaaagtttaaagacctcagggggatctcccgaatcccctagttcactcccatcatgctgcaaataaaagagggagaacctgagaggttatgggtcatgctgtctctggacagtgatctcaaactgcagaggtgatagttgggtgtgggggagcagtaatgtgagccagcactgcctgatctattaaccttgtagttttataattcagtagggctgagggagtggaaccagctgcaactgatttctcacttcatctgagcgtgatgtgactgcccactgaaatgtcaaaaaagaaaaaagaaaatggtattaaaaaaaaaaaatccatcatgttcgtccttacaaagaaagtttcaggtatacttcaatttgaaggaaaaacaaatatttatagatgactagtcctgctaaatatactagtgaataattacttcatataaagaaagtaattactaatagccatgttttgtattttaacaaatgtatatcgaatccatactgagggccactctgagaaaaaaattgtaactgtgaccttatggtatgcagacttatagtattatcccaaattttccaaaaggaaatgaggcttccttaaatgaaataatctctcagagatcacattgccagcaagtggtataaatatagaaaaccccagaaggtcttaagggattgtaatgtaggatagatgtactgactcttttacaatgactagaatatagcagaagtaatggaacaggg

SEQ ID NO: 53254 - DNA, 814 bp, Bovine  19866881066102
  misc_feature (1)..(1): n is a, c, g, or t
naaatataccaagggaaaaatataaccctcaaaaaaacagaggagttcctcacaggcagtaaaataaaatcctctgtggccatttctgctttatgttaaaacctgaatgttatgaataaatgtaacactgagttgaaataatttcccatctggtggctgaccgaactgtcttttccttttgttgttagcacagcggttaactatttggaagcaaaaatgaaggatttgtcaggtgggctgcaaagaagagtctcacatcaaactcggaaaaactatgcaaaatataccctcagttctacattgttcccaacaactaaaaaccggcatacaaatgaaaattagacatcattacagcttactatctgcgtgtgtttgtatttctactcagaactataattcctagcttatgtgtgttagtcgctcagtcttgtccaactctttgcaacccctggactgtagctcacaaggttcctcttgcctctccaggcaagaatactggaattggtttctatttcctcctccaaaggatcttccccacccagggatcaagtccagatgtcccacattgcaggcagtttctttaccatctgagccaccaggaaaccccatttcctagcttacatatttgattacattgggaaaatgttaatggtcacccagtaatgctgccttaaggaatccccaaaagataaacacaacacacacacacacacacacacattaatttccatgcttaaatatatggtagattgatgtccaggtgctgttatgtatatttaacaatacaattagagatttatttaataatagctat

SEQ ID NO: 53255 - DNA, 869 bp, Bovine  19866880448244
  misc_feature (1)..(1): n is a, c, g, or t
ntgtttttgacaccagcatccgacttccctattgttagtgcaaatgcactatttccttctgaaagactatcccctttcagcttttggctcatgctgtttccttaaagctagttctatctttagtattaatgtagacacatgatacagacctaaaccaatcagaataccagtttgtcctatccacatggttggttttgatatgtccatgtgatgcccttggagacctgagactgcgttgaaatggcaaacagactgtattctagtcaaagagggaatgattatctagggatggaaaagggggtcaagaagtggagagagtcaaacagggccttagtgactatgtttgaccttgtatacagtcatgtcaggtcagagtccacaattttcagatccctaagctgatgaacttctctgtgattaaggctaatttgggtcaagtttcctgtcacttgcaatgtaattaacaaatacaatcaatattaacgatttatgccctctccctgttactagcaagaaaaaaagtgtatcttattttttgcttactgctttccgggctacccttcctggtctgaatttctctgacatgtctatacttggctcataccaacctatacacccttcatctctaagtcacacactgtcagagacttactttgtaagggatgggttatgcttatccatactaagtagtctcttatgtgacctgatgttcatagttactctattctcattttagctttcatctactgttaagcccctttcaagtgggaaataaaaatacactttttaaaaattatacccacagcatgctttcctgtttctgggttatagttcaattataccatatcatcaagctgtctttttcctca

SEQ ID NO: 53256 - DNA, 1517 bp, Bovine  19866880541367
  misc_feature (1)..(1): n is a, c, g, or t
ntaacaaagaatagatttttcaggacacttggaatatatataaggtttaaggcacttgaatttgacagacttgacaattgttaattgctttttcccaaagtatgattactgtaaagaagaaaaaaaaacctgtgtttagttacatcacacatacacacctatacacacagtctcccccacctccaaatcttctcacctaaatgcatgaatatctgaattatttacacatgtaatttcaagtgatgcctagaaaaagttccctaaaaacatcttttttaaaaaagaaataaaaattccactttagatatagcagttcaaaacccagtacataattaaatacatatgatggatcttactgagtacttaatgcatggaaaatttccttcgacaattcaaatttaaactcactttagttcttataaatcttgcaagagtataatcgacctaactttttttttcaaaacagctaatacattactttcatttctatttggattttcatataaatgagaatacggaatgagaaaaaaaatgctacctagtaataatcaacagagaagcagcttgggaaaaccaagtgcattttttttctcctgtgcagtcttttgtataagtttttggtgattttgaatatgattcattacaaccaacatagtaaatagggtaaaattaatttttgagtcgcaaatgttctgatagaaatcagcagagagaaagctccaggcagaaattaacaatttttctctggagattatgaaaccaattttccacatgccaaagatattagtaaatgcatgtgcagagctatctagataaaagaacatttttctataactttaaggacaatttctatcagaccacagttctattttcctgactcatccacagataaccggcccagaaaattggactggagtcaaagaagcactgaagagggaaccaggtgttctggaatccagttctgtttctgctccataagattgaattagctctggttaagttttctatgaatcaatcttctctaaaagagaggataaaactagatgatccctaaaatagcaagaaactcaaaaattctgcttctggcttccaatgctagccatttgagaaaggacaagtatcttgcctaatctgttttctatcaaaatttctccagttgttatacttcagacaccaagagcaagcataccatacactcatgtaataaaaatcacgtgatagcacatttcttctgggaccgattttctcaactcagtcttgctaaaggtctttgcctacagaaatatttagccttttatttacatttttgtttgacactgacttcaatcacccccattacttttcttcaagcccctttcagccccattgatctccttacaacatttctatatatcagctaatctactcctctctaactaatctatttatcaatatctaccactctttgaaccctcagttgcaatttttatcttcttggatctttcctgaactaatgaaactggaacataatcgaataa

SEQ ID NO: 53257 - DNA, 3110 bp, Bovine  19866880851460
  misc_feature (1)..(1): n is a, c, g, or t
nttcttgcctggagaatcccagggaagggggagcttggtgggctgctgtctgtggggtcgaacagagtcggacacgactgaagcgacttagcagcagcagtagctgcagcagtagccaaagaagtgactgtagagtgactgtcagttgtacattccagatgttttatatctccttgataatgttctagcccaaaataggccttttacccttaatttgtaagaactctgagtctaaaaagaaagcaaaatggactttgatttagtttataacttaaaaaatgcacatttaactctaaatcggatatatagatactttctccacatcctcctccacactcactcaagtacacacagccatacacagatttattctgctggttgcaatttagttattttcaccccttgtgtaatgcaacaaggatacctttgtttgctagcttgcttcttcattaatttgagattaatgcattctaaaaccaaccaaaaaatgttaccttaggatttgagattattgtaatgtagtttggcatttagtgattcttataaatgaaactgaattgacaccaagttcaaaagtaccatgagcatatttaaatatttctctgatgaactgtgaacattcaccaattaatcctctgaatacttccaatcagttaattttccagcaattgaaaagaagagaactacataaaggcatgttcccagtttgatgtgtgtgtctgttttatccatttactgtaagaataaattgctctgtattgaactacttatcccttttattcataagtttttcatgtaatcatgttcttttcattagagattagaaagctaaaacttagtatattgtaatatgagaaaagcttggtgtttcatatttttcaatttcaagtaatacagacacatgacttttgtgcaaaatcttcaaaaggcacaacatgaaaaaaactataatcagtcaacttagtacatatcatttttcatttaacattttttcatttttggaaatgtaccgatattagtacatttcactatttggtcaaaagagtagataatggtagtctcattatatgtaattattaaaactaatgtattttaatgtgttcctttgtggagaaattaatctcatttaaaattaaaaggatagattttgcttttctatatcctttgtgcgagcacatttcacaggcttccatggttacatctgggtgcttagtactgagtatttttttaagtttaatttagagttaaaaataatagttcaattagtgacaaaatctgaaaataatagtaaatattaattaatattgtggattaagccacaaaaaagaaaataaacttaaagtaagattacttacttataaggattttctctcaccaactgtacagagctatgctctgtattgccatgctgtgttgtttttttttttttagtattattttgaaccaaccacttcacttctttttagtaataacaaaactgattaatatatcttccacaatataagtagagactataacaaagtaaacaataacaataaggcattaatttagcactgattttttccaagtgttcattatgtcatttaaacctaattataagccaaaagtttgaagtcaagtgggcctaaggaagcattactatgaacaaagatagtggaagtgacagaattccagttgaactatttaaagtcctaaaagatgatgctgttgaagtgttgcgttcaatatgtcaccaaacttggaaaactcagcagtggcaacagggctggaaaacgtcagtttcattccaatctcaaagaaaagcaatgccaaagaatgttcaaacagccacacaattgcctcattccacttgctagtaaggttttattcaaaatccttcaagctaggcttcagaagtacatgaattgaaaacatccagatgttcaagctgggtttagaaaaggcagaggaaccagagatcaaattgccaacatttattggattatggagaaagcaagggaactccagaaaaacatctatttttgcttcattgactatgctaaagcctttgatttcatgaaccacaacaggttttggaaaattcttaaaaagctgggaatactagaccaccttacctgtctcctgagaaacctatatgcaggtcaagaagcaacagttagaactggacatggaacaatggactgtttcaaaattgcgatagaagtacatcaaagctatatattatcacattgcttatttaacatatgtaaagtacatcatgcaaaatgcggggatggatgaagcagcaactggcatcaagattgataggaaaaatatcaacaacctcagatgcgcagatgataccactctaatggcagaaggtgaagaggaactacagagcctcttgatgagtgtgaaagaggagaatgaaaaagctggcttgaaactcagcattaaaaaagctaagatcatggcatccagttggtgccatcacctcatggcaaatagaagagaaaaaatggaagcagaaaataaaatgtcactgcttgggctttaaaatcactgcagattgtgactacagccacaaaattaaaagattcttgttccttggaaggaaagctatgatgaacctagataatatattaaaaattagtgatatcacttgctgacaaagatctatatagtcaaagctgtggtttttccagtagtcatgtacagatgtgagagttggattataaagaagactgagcaccagataattgactttttcaattcttgatgctggagaagacacttgatggtcccttgtactgtaagaagatcaaaccaaacaatccttaatgaaatcaaccctgaatgttcattggaaggattgatgctaaagctgaagctccaacattttggctacttgatgtgaagaaccaattcattgaaaaagaccctaatgctaggcaagattgaaggcaaaaggagaaggggatgagagagaatgacatggttagatggcatcactgaatcaatagacatgaatttgagcaaacttcaggagacagtggaggagagaggagactggtatgctgcagtccacaaggtcacaaagaggggtcagacagacattacgactaaacaac

SEQ ID NO: 53258 - DNA, 1226 bp, Bovine  19866880853085
  misc_feature (1)..(1): n is a, c, g, or t
ntgctcaaagtcatgtccactaagtcagtgatgccattcaccacctcatactctgttgccaccttcttctcctcccttcaatcgctcctggcatcagttccaatgagtcagctcttctcatcaggtggccaaagtattgaagcttctgcttcagcatcagtccttccaatgaatattcagggttgatttcctttaggattgactggtttgatctccttgctttccaagggactctcaagtgtcttttccagcaccaaacttgttcaaattatgttgtagaaaaagcacttctctcacaaaagtctatagatttctataatttctatgtaggacatacaaaattattacaattaaatacaccattctctttctcttttggttggctctcaaattgtagctcttaatatttaaaacttgaaggtatatcatggatcatatctaagagtttataaaggcaacaaaaacagcagatcgattgcaacataatgaattttgatccaggttctgggaatgttcttgtgtagagtcttcaaaccaagtttgaattcttccctattccaggcaaaattccattgtcatattctattcattcaaacatttaggaatattacggcatgccccagatcctcatccaagatttgtctaggatttttacaaatagtttctgtcttctaagatagaagccctttctatgattaaagacatttaagctaatggagaatagacacactctttagattcattttgcattcatgagatcattcaagttctttaaaaaaagtcatcttctaatccgagcatgactaatgcatttctaggttgtggtcataacacttgaggctgaaaaagaaaaaaattaaactcttaactttagatgttttgcctttatgtttgccaccattggaagatttttaaaagtttgatcagaacagggcttgttttacaggaggttttcctgtgaaaaggaagtgggtagagggaaatgaaagttaatgcataagcagagttcagttactctgcttctcctagaatctatgcatttcttctgagttatttttaaatagatatgttagatgtcctgttattctgaataagtgtctagttttaactaggcaaggtacgtaagtgttttaattagatatccagatacaccatctgagacttttttcccccagaaaataaaagtaatttaatttcttcttcattaaatataagggcagtaaaat

SEQ ID NO: 53259 - DNA, 1288 bp, Bovine  19866880897847
  misc_feature (1)..(1): n is a, c, g, or t
ntattccatatttagacaaaaagatgtctctgggctattacaacttgtgcaaattgcgtccttagttccatgtccgagtgctgcaaggaaaaaaaaaaaaagtacattttcaaccaaactcaatttaagttgaatagaatgttgatttaagacaaatttgagaagaggaagcaatagatatgaattagcaggctatttatttttaatataacagaaaagcacaagaaaggaaggaaaagtgaacataccaatagctatggacagttttcttcagtgtagaggaacaaaccagaaggactatcatgtaaatgataacttaaaaattcaagaatagttaattaaagagcaacttatttatttagtgctgatatgctaggtttgcactaaacagcattgtagtattctatggatgcttagctatttaagatattttatttctacagacttcttatgtccctgtatttcttgaagtacagtcaggaaaacatgattactagttgagaaattgtagttgttagttttccatattgagaaaaacattcccaaactccaaataggaatcacactgaacattttagaacaattaacagggaggaggtaagacatatcacgcaccaaaaattatttattttcagttacttaaaactttttattgtttgaaacagtcaaatctagcgcgatgatagtggtttggtgatcctttatagttctaatttgtagctaaagaaatgtggatctcttcacttatccacaagatagctggtttaattgtctttcccagcaggaaaaaatttaaaatgcttcttcttggttggtagtgtgtatgtatgtgtgcactcagctgctgagtcatgtccgactctttgcaacaccatgaactatatagccctccaggaaatttctgtccatagaattttccaggcaagaatactggagcggttgccatttcctctttcaggtgatcgaaccggtgtctcttgcattggcagacagattcaatggcaacccactccaatattcttgcctggagaattccatggatagaggaacctggcaggctacagtccatggggtcacaaagagtcggacaatgactgagcgactaacacacacagggttaaatattcaacatcatcattattacatctgaatcactatttacccagaagttttttaatgcaaagaaggagtcaggtctgatgctgactattttggaatatttagccctaactatctggacacaccataagcacaagcatgttttattttactagtttcccatattcat

SEQ ID NO: 53260 - DNA, 1445 bp, Bovine  19866880909284
  misc_feature (1)..(1): n is a, c, g, or t
natatttaatgatgagaaatgaggctgcccattatccaagagtgccattttaaacagacttttctgtttcagtgtggtgctatttatgaagcaaacccttatattaaaactaccacctccatattgatccctcccctcagctcacctttacttcctgcacagatgagccgtgtgattgtttttttgtatttcatatattttttaaaagtaacgtatctgaatgtagaatgtattttactgattcctttatttctccagctctgtaaacaatgaaatagttgttttttcaagtcgatcactctcagtactatagacactagcgtaagatcactacctggtgtaagaagtcttagaatttactacaaaacaatgtggaatgttttttgttaaatccacacaaagactttcttcgactcaatggtgtggggcactatgacagcacagagtgtcaacagataaacggaaatacactgttacaatgctattattagtatttataagagctctagtgctcttgataaatgaagccacattaattagtttcaggattgtatttccactttggcatatccactagcacttctgaacatgcaattaaaatatttcaaaatgtcacttatgtttccattctacaagaaatgcatactgattatggccacttgatttatacttggacacatacatttagaaacaaaatgtgttaacattttagggttaggaaatctctcctacactgcttgcaataaaaactgatgaaaaacaaaactatcaatgctgatgcaaatgtataatgatagcatttttctgagtatgaaatatgtccagttgtatataaatgattcaatcctggtaagtttgctttgcttttattttggaaaatgtaaattcaatgagaattttgggataatcagagaaagcagacagctttttggacttctcaagttagctctctgttaaacaaacagcatcactgatttgaaagttagtaacccatgtattgacattaaaacaaattaccattctctcttaaattatgggagattgattttcatctttgtccaataaataccagaaatcctttgattcatactaagagtggtttaaaacaaagttgatatattttctgttttctattaaaaagaaaattacagtatagattagatagatgaagatacatgtatacatataaatatagatgtatgtgtatataataataacaatattttccaaattgtttggccaatgtaataccagcttgatttcttgtacagatgtagtcagagagcaaagtaaagctacacaagggaccccctgcactacttccttgatctcaggaagagggaagagatgtctggacaaatgtagaggcatgttgctaattgctttcctataaatgataaattgagttttggagaagaacaggttgtatatcggcagatcccaac

SEQ ID NO: 53261 - DNA, 758 bp, Bovine  19866880920089
  misc_feature (1)..(1): n is a, c, g, or t
ntaagggaacaaattaatgccatacattgtcagggatatatgtacacataatattttggggtagaaccaatataaaaggttctataatatctctttcgtattattcttggcaaattgtattcattaccttcttatatgacttgaaagtggtataaatgtacagatttttgaacctatacctcagactggttttttctaatataaagataaaactaatattgccagaataatgagaaagataacaaaccttttctgcacttttactagtggtacaaatcacccaacacaattagaaccagtagaatttttaaaacgttaagtctaatctacataccatagactattaatgggaaagctaagaagatctgtgacagttcccccaaaatttataaaatggtcttactagagacaaacacatgcttccaaaaaacttccctttattttgtctcagatagaagactggccaggaatattgtctattgttcatatttctaaccaagtacctctccttcaatgtacttattagagtgtatagtctatataaaatctacttttccatttaattcaaaatcaaactttaagaaattctgaattctgttggaaacatttaaagcatgttctgttctttataatgtttccctgaattggaactgcagtattttaaaacaattacaaaatattactaggataaacatcatacacaccatgggcccaaattttctagcaacaaaatctctagaaacattttccttttttca

SEQ ID NO: 53262 - DNA, 969 bp, Bovine  19866880955281
  misc_feature (1)..(1): n is a, c, g, or t
ntttcacaaataacctgcctttagaaaaacaaaaaccagtgcatgaataggagacttaggtttgagatttcacatggatttttaaaattatatttagaaactttgtaaattattggactagacctttattttcttgcaaaaaacaaacttaaaacataacgggagatagttctcattatatagctgtggcctgaggtataataccttttatagtatatgtctttgagggagcttaaggctctttgtagaagctatctcattatttctcagagaatttaagttagtaagggataggtattattttctgcattttatagaccctgagcctaaggcacaagagccagaggtcagctaacttttctgaggtcaatagggaatccataaggttgcttggaatagaatctttttttaatttttctgtagtttctaatatatatatatatatatatatatatatatatatatatatatatatatatgtttataggagaaggcaatggcaagccactccaagtactcttgcctagaaaatcccatgtttggaggagcctggtgggctgcattccatggggtcgctacgagtcggtcgtgactgagcaacttcactttcactttcacgcaatggagaaggaaatggcaacccactccagtgttcttgcctggagaatcccagggacggcagagcctggtgggctgccatctatggggtcgcacagagttggacacgactgaagcgacttagcagcagcagcatatatatatttctcattaaacatacaccacatggaccaatggaccctgcatgtaattccccaacaagttttactgtttgccttgcctttgtgattttaattttatttctctattaatttcttgttagtttacttctagtctcggatttatttcgttttgggaaactttatattattaggcatattttttgcttgccatttttgctggcatcttcaa

SEQ ID NO: 53263 - DNA, 1538 bp, Bovine  19866880967514
  misc_feature (1)..(1): n is a, c, g, or t
nctgtctaaattagaagaaaacaaacatgataacacaaaagatggtgagtaatatcttttagaattttttcatttgagaatgaatgtgagtttatgttgccgagtctatctcgatggggtgaggtcgggtgaaccaggcctgattttacctaagcaattttatgtcatcttaggtggaatgatcttagcctagaatgtgggatgatgtgggtaaggccagtgatttcaagagcaaaataagatctgtgaagtgtaattgagttttggagataatttgtttgtgctgtagaggacaattacataaaaaataggttgggcattttaatggtcctgattacctcactctgtgagagtggtgcgctcgttgtgagacctgttgaatgcatgtacattagaaaatgactgaattttcaagttggaagagactttggtgggtcatgttactaaagttctttatgtcctatatggtagtagcctcctctatttacctttcataatctccattttactgtagggccacttggaattgaaataacctctgaaaaaaaaaaaatctacacacacacacacacacacacaaagtaatgtaacaagtcagttgactgactcatatcaaaagaaacattgtgctaaataaccataatagcctacaaattttagcaactgcaaatgaaatattggtgttcagattaaggaaaattggaacacttttcatttccataataataattctgacagttaaagagagaataattttagttataaaaagattttccttttcatcttaaaaaagtgatatgactaaattatcacaaagactggaacttcttagattttctataaatgttaagcaaattacaaatagagtcatcttaatttttttgttgttgttcatatgatctttgcagcttttgctttagtcacgtatgaccttttatggttagtgtagctactaacacaagcactttgttaaaaggaaacactgacttaaaatatatcattcattatgcactttggttaaaaatgtttgaaagtcactgacaagaaagcttgtttaccaacagagacagattctaatcctgattcaaaattttgggagggctggggatctgcagttttaatagggtgattcttatacagatgggttgagaactacattttaagaaatgctgatcaaatttacagtagttaccaataaagctggaattactgagccacaattacctgggacattttagagaaataatcctgcctaaacttgatttacataaacacacagcaggtgtttgggtttattttcttattgctttgctgccagaattcagagagtaattggagccctggtttcagtctacttagagatgttgttttgtttgttttattctgtttttcctggagattaaaaaacctgattataaactctgttagccctttgttaaggtttctctaactacatatacgtttagtttatacaatcaagttaagaaacttaggatcagaaacaaattctaagaactaacatagttagctttcaaccc

SEQ ID NO: 53264 - DNA, 1065 bp, Bovine  19866880974012
  misc_feature (1)..(1): n is a, c, g, or t
natagtattatagacattattgctttctctctgccacatgggaatagtaatgaaagcattaatttaaaaaaacttattcccaaacatttataacccttccagtgattatgcattataccaactaaatcatatttctttatatagttctatgaaatatagaatggaaaaggtagttattacccaatgtgaataatctagatcttatggtgactctaaattatggtctccaaaagtagattattattatcacttataatatatacaattcagtgaaggcacaggaaaggtgaaaatcacctgtttttattacctatcagatacacttacagggatcccctagcatgatccttgactgtcatcttgacatccctttcatgatctttttcacttttgttttcaaatacttttccttattgtcccactttcagaggaaatcttcaacattataaacactgatgcccccagaaacgctgcctctttctgttaatctcaatagccctagagaggatagcaaaataagacatttcatttctacattttcacttgacttggcttagactgataccaggtgacactatacttcgggttgtggatgttgtttggggaagaagagagtaaaataaaagataaaattatcatttcaaaagtggctacattttggggctaccttatctaccagctttcatttaaagtaacaactctaagaatgattgcctactgctggaattctcaatatcttatttcattttaaataattctctgctactggcagatatgaaaacattaatagggcttgaaaaatgctccacaggggtaatatttaagtcattagggtcagagccatgtgaagtttttcatgcataaagagatgagttcgttatggcaaagtattcctaccatgtcttttcatttgtaatatagaattatgcttggttcgtccatattttactgtgagactgtacagattgcaacatacacacacagggaccatctcatatatctttgaatcattcaatatgcttggggggggccttgcatttataaaaagtatgctcaatgcattta

SEQ ID NO: 53265 - DNA, 733 bp, Bovine  19866881011834
  misc_feature (1)..(1): n is a, c, g, or t
natggcttctgtctttaagagacctgcatatattttcctggatttactgttaaggagaagtaaataccagaacccagtaactcacagagaagtcatcaaataattattaaagatcattcagtgcccagtagcaaagtggttcctaaaagactgagattgcagtcaattctcaaaaattcatggcagtgagaaaagccttgtaaaaatgattgccagtcacagaatgtagatagactctgccaattaggtagcaattcataacactcattcacatattattttaagcttctaattaaaccaaatacatttgtaaatgtagaaatcaacttttatgggtttttggagataatgttcagatcacagtatgaaacacctcagttataatacaactcaaacataaagggctgaagggattttaaaggggccaagtcatcacaaagtatgtctaatgtcagagacaaatgaattatagattaattcactccctgtcacacttacacacacaaagagagaagcaccagaaaagagcaaatataacgtaaagaggacaatctatccatcaaaaagaatgatgaaatcgtatctttattaagtatctaaaaataaatgataataagggtgagaaaaattgaaataataaatgaatgcttttgcactatattagtgataaccctggagggttctctatattcatttgcttcatagaattatcctgaggaaggaaatatatgca

SEQ ID NO: 53266 - DNA, 746 bp, Bovine  19866881068353
  misc_feature (1)..(1): n is a, c, g, or t
nactgactattaaatctgttctacatttagttgggttttcaaggctcctgcctagaactttttgaatgttctttcctttttggtcagtgacaccttcacagtttaaggaaatatttctttctttttcatcagttgctcgtttaccgcgacggtctgtcaccttcctttcctcctatctcttcccctacgacacaccaacttgaacctgggctccaaaggcactacgttagaacacttctgttcacataaaatcgccttgcctcatttaattaaaaaagaaaataattgatcattattcagagtacattttaaccatcattatcatgtaaacagcattgtatacattaaaatatttaggtatttggttttcacatttcactgtacatattagcgtgagtgatgctgcctattttaaaaatacatgttagaatgaaaccaactgaagcctagctgctcagtgccttttcaaaaatttgtataaacatctaaatttagaaattgccattatctaagtgtcatttacctacaggtaatgcaatttcagaacttttagagttgtaaaaatctatcatcatttccctacccactgcttccacattcattctataatcttgccatctgcttcactgaaatggcagacccagagggcagggagcatatcttatctgtgcaatgctgtatgtaagtgtggattctctgtcagcatttaagaaataatagaacttcaaatagggtgatttagcctc

SEQ ID NO: 53267 - DNA, 1699 bp, Bovine  19866881238432
  misc_feature (1)..(1): n is a, c, g, or t
ntgaattataaaagttttagctctcaaatgaaatcaattacctataaactcacatcgcatatttagattatcccagagagacaacaaaaagggatttttttttttttttctcccccacttcataatggccggggagaattgtttatttgtactggtttcattgcttatcagttatttgtcatctttcagttaatctgaaaattgctatgaaaaactctttctacactactccctgtatactttgcaaaaatattaaaattgaaaacagcataaaattctgtgcattacctattttgcccatccttgagcttacttacagatttaaagagtctaatattcagtggtttttaggaaataggtgacatatttcaatctttattccagtaaacaatccatattgcttatataatacttgactcaaaatgtgaaaatcaaaccaaaccaaccaacaaacaaaatataaaataatctctgaaaactaatagttccaaataaaaatattaatttattttttaaactctccaggatgtcatgaaccattaagagacagcaatttttgtattttctactgtaacttgagggcctggaatagtgccaggtacatcttaggtagcaatatatatatatatatatatatatatattttttttttttaagactggataagtgtccaaatcatgtgaataaactctttaaattaaatgaaattgtgaatttaaaatgtatttgataataacaattagcgagtggcctgaaatcactcctcaaaaaggctaaaaatcggagcagaaaaaaataaataatcccaatattatgcacaatagcttgaaactctgttggttattaaaatagggaaggagatcagaattaatatattctcctggggatttagagtcctcagggactcaccaggtttttttttttttttttaagttcttcagactataatatgaataaaaaacactgaaatcatgttttcaagttctttattaaaataagtatttaatgcaggaaaaaaatccaagtcataaatgtgactacagggaaacaatcatcaaaaagtgttgggagactctgaattgtatttgtgtagatcataaaagtcttagaactggagttaaacaggaagttagaggtcatttactctaatcttatgtctgaggaaatgattctttcttcaaatacaatatacacaattacagtacattttcatttatctgagttctgagttactcgaaagctcagctcactattttcccacttgacttttatgaaaaagaaagaaattataaataggaaagaaaattaatacacttaaagataactctgggatacttcaacaccttgaagtgtcttttcagccatcagaaaaagatacaattatcttcagtattattttagtgctaactctttgacttcatacccaggtgtggaaactctaccttatgtggatattgtgcactgtaggattttccttggaatacatgagtattagataaataaggcaagacacaaggttcaaatgatgctgaataaagaaaagaatggacagtatgtaggaacagtataaattgtgagaaatatagaaagaaacaaaaaaggaaagaaaaattaaaacttgaagatacagatataacaagagataaaagaagggactggaaaattcttgattcttggggttataacataacacatcact

SEQ ID NO: 53268 - DNA, 730 bp, Bovine  19866881291962
  misc_feature (1)..(1): n is a, c, g, or t
nggaatgagagggaactttaatttacacttatcactaaacatgataaatacaatttacagtttaaatatctaggttgaaatcactttaaacatctaggtagtatatctttgatccaagagtatattttttattaaatagataaataagaaacatacagaatattcaatcatgcattattcttaatatattcttctacttccccaccatgcttcagaaaatgttttgcctcattacctaaataggtttaatgatacagtaagcaaaattacgtacaataaaactaaacactaggaatttcagagcttatagtgtgaatttttaaagtcattagctactctgccattagaaataatcagacatcaactatacaaaatcacaaaaatctctgtagtgccaagaatacctttatcagtaaacctaggaattgttttccatgtggaacacatgagatttttaaaaattattattaatacacaaagggcacctgcacacaatcagctgaaagcagagtctgttgctacagaaaatcaaaaggctcatttctattaactaataaggagtctttgcagtctaaacactcacttcaaaagaggtcatttatatctttatatgaaaataagtctcccctaaacatcaattatgcaaaataagatgtgtaagtttttctaatccaaggcacgtacatttttatcatttcaaaacaactgaggatatatttgacaaagatga

SEQ ID NO: 53269 - DNA, 1470 bp, Bovine  19866881367554
  misc_feature (1)..(1): n is a, c, g, or t
ntaaaaaaaaaaaacaaaaaaaaattaaatatcttcaacatttcccatcccccattacaaattaggagaaacatacaacttgtttggcctgctgactttcctttattaagtattattttaaaatgacttgattaaaaatatatcattcagcatatattatcacctccaacatgctatgttaatgcagagatgtactgaggaaagagttcaacattatgcacatgaatttagaaaaacaacttgtgtcggcatgtatctcgagatataagtgtctaaatcaatagacagttatttttgtgtgatttaagtctttgtcttcaaatatacacagactttatcttaataaacgcctgaggatttggcctgtcttcatcatcagttttaaggatcttacctgtcatgaatatttgaaatttactacctgccatactaatgctttctaaatatagacatagtctaaattctaaatctatcaaagcattatctcttatactaaatgcattttaaaacccaacaaaagctccatctaaactgatacttaaattattaaggactaaatgtacagccaaaatcctttccttccgtgacccaacttattactaatattattatataattaaaaagtaacttgttatataatggaaaagacaatgctatgaatttcagaatttcaaaataagtgtattttgttctcctcaagcacttaattttaccatgtttatctttagctggtacttttccccataaaattacctacatggaaataatgtaaaactttcagattgattgatagattttaattgctctggtatgaacaacaacaataaaaatgtccagcatgtgcttaaatcatgtttagaattcactgattttactgttatatttctgtggcaattagtggccagtttagttttgtggaatagacaggataaattgagagttttctaagtctacttaaatcattttcattactgataagaaagcgatttgaatactacaatagggagtataatatcttgaaagatgggtttcatttaaaaccatggattatcacctttggaaaagcctttgaatcgttttgttaaaaaaaaaggcaggtgccaaattcagacttttaaggactacgctattctcatcaattataagttttgttatcccccaatattatacaagccatgatgaaactgtttataatcaactatactttaaaaataagattgaatttttccagttatctgactaggtgaagagatgttaccaagtggctgccacatttctacaatttttttgaggaacccacttgtcaattcacagaagcatgtcccaagataagctcaaaatgtctgagcaggtgtgataaactaacaaagtctctcagagagacagagaagtgctttgtctctttactttatttggctttgtttcaaagccttttctttttcatgaaagttctagctcagtctctccgtg

SEQ ID NO: 53270 - DNA, 833 bp, Bovine  19866882038009
  misc_feature (1)..(1): n is a, c, g, or t
nttgcctttccttctccggggatcttcccaacccagggctcgaaccctgatctcccgcattgtagacagacactttaccgtctgagccagcagggaagtcctgttgcatggccctgcataaacctttctctacccgaacattggtgtttcagtattgtttggcctcactgtgcatccggcacaaaaatttgcattctgtaacatctctagttatttttctttatgaaactttgaatgtaatgattgcatttattgagagaaatttgcttaaaatgctcatgaaacactatgcttagtctattatcattttggttaaaggaaacagagggagcaatggaatcttcatgaaaaaaatatttaataccacagatggtaccctccatatgggaaagcatatttgggttgttaagtattgtgtctctggcctgaccagagcacattaaaccccagttaaaatcaaatttcatgtcaaagcacctttgaaagagaaatagtgaaattccaaaggggaaaggtgcatagaacagattaataaaacccattagaaggtgtttgaaacactgttacacgttgaggatgtgactttggtgagtgagaatggctaaaaatgccacttgaactaacttgccacttgaattatcactttttaaaatcttatattaaatatgaagagaaaaattaaaggtatataatttttctgaaagcttctcagtgtttgggcagagaaaaccagactatgtctttttaagggatattggtttatagtacatttattcttatgttatagaccattagtattatagaacatcatattaaaacaatattcaaattga

SEQ ID NO: 53271 - DNA, 2997 bp, Bovine  19866880649588
  misc_feature (1)..(1): n is a, c, g, or t
nggggtgagagaagccgcgatgccttcgaaaggcctggggaggggctgatcgggctggactttccctctaatgggggattcatggagtgtgttgtgcagatgagtgaggtcatctgacctagatcatagagggaccactctggttgttatgttgagaaggttggagcaagatgacccatgagcaagctatttcggtaccagtggaggtagagaggagtgtttggattctgctgctgctgctaagtcgcttcagtcatgtccaactctgtgcgaccccatagacggcagcccactaggctcctctgtccctgggattctccaggcaggaatactggagtgggttgccatttccttctccaatgcatgaaagtgaaagtgaagtcacttagtcgtgcctgactcttagcgaccccgtggactgcagcctaccaggctcctccgtccatgggattttccaggcaagagtactggagtggggtgccattgccttctccggtttagattctacatatacgtattttttaaattggagtttagttgctttacagtgttgtgtcagtttctgctataaagcaaagtacatcagctgtgcatatacatataacccctctttgtcaccacagagcattgagttctctgtgctatacagtaggttctcattgtgtacttggtcgctcagtcgtgtctgactctttgcaaccccgtggactgcagcccaccaggctcctctgtccatggggattctccaggcaagaatactggagtgggttgccatgccctcctccaggggatccttccaacccaggaatccaacccaggtctcccacactgcaggagaattcttgattgactgaaccaccagggaagcccaggttctcattagttatttgacacatagtcgtgtatacatgtcaatcccaatctcccaattcatcccagtcttcctttccctccttggtatccatacgtttcttctctacatctgtgtctctagttctgttttgcaaataggttcagctggcagagcctacagaatctcctgttggattagagagacagtgtcagagaaagatgggtcgaagatgaccccaaggttttgtcttgaacactggcggaatgcagctggcatcagcttgacagggctgactctgggcaaagaggtttgctgaaaaacatcaggtcctatgcttttaccctaaggtcatgtttctacacatcggtatttccaataccaagtacagtgcctgctaggcagggagaaaatacacactgagtggacaaatgagtgagcagataattaaacacaatccccaaaggaaggcaacctgaggtcttgctatttccttgggttctacccaggaagcacagggcaaaagtcctctctgcttgcagaccccccaaaactatctgaatttctctcatcctaaatcatttccattttcagtcagtgtagtgatagagtaatgcccccattctcagagcagaagcggaagctctcttgttttcctctccgattatcttcttccatcccccagtccagatcatcttgatctgtttccaagaataagaaaaactgcctaattctatattttttcaaatcaaaaggttttatgcttggttttcagctttcataatgccaaacataattgtactcttagattctctgagtttagaccagctgatttaaatgtggcaagatactattttagtttattaaccagcagcatagtagtggcttaattagggcaaggggagaggtgaaaaggaatgccaggaatgaaacacaccagttaatctaccaagtattatgctgctactttttgatcattctgatgaaacagctttgcccctggaataggctctttctatacaatcttcttctaattgttatcagcttgcccattgatccacagtaaattagtctaatgatatttaagtaaaacagattctgtccatgaaattatacaaactataacaatgttgacactggtcatactgtgcaagctaataattagacattgtctatgtcattttctgaactttcaaagagaacattaaacagtaaggcatttgttaatggcagaacattttcaggggaaaaatggctggcatgagaattgagggggaaaggatcaacataacacagtgataagaatgaaatgtgaaggggtttctggggaaagagcagagaaatggttatttcaataataggaccgagcatcctctacttttgaattctgccagcattaatactctatctaattaattcttttttataggttaatctccatctcttgttcgtgaagatgctaattccctgtgagctcattaaataactgcagattcttcaactcatgagggagaattcctagaacccttgaaatttctcagattcataaacatcatgctaatatatcattttcctgatacaatgtagtttcatataagtgcaaaataatatgcaaattatccagctctcacttgatgatcagcttctgtcctggctgaaacacgtactgaattcatttcataaaattttgctttttctaattttcataaagaacatatggctggcttgtttatatcatagatcctagtcagcaatgaaattaacattccactcttatccaaaaggtctattttctggctaagaaataatgcttttttagtctccttcacttacctcatcattccaaaagttgtcttcatttcagacatcatttatctcttttctggcagaagaaaaaatgttcacacacacacacacacacacaagatcataagttgagcccacgcccaaatgcacccaccctaggctgcacactggcttctggtcacattagtgtccaagggactgagacctgttcaccagcctctaggattcacattagtttctcagcaaaattacaaatgatttcatttcatgaactttcatgtcacctgcaaaatgacaactacaagtgttaaattcagaagacgaaggttttactctggttc

SEQ ID NO: 53272 - DNA, 1710 bp, Bovine  19866880728539
  misc_feature (1)..(1): n is a, c, g, or t
nacagacacaatcacatttttacagatttttttttttttggtagtagaaaaagctgtgtttttaaaatacttaaaaggaaaaaatagaactgaaattacaatataaattctgtaaagaatgcacttcgaatgtatttttgtcttgaattcacgtaataacagtatgatgcatacctcatatgagaagacattactaacacagctacaatgcttccctttcatttaaataccacacaagtaggcacataacgcttttgtttgggaagagtacataaatacgttcatccccacaatgacatgaaatgtaagcaagattttgtataaaatgacgtttaagtgtttctaatttttcccacaataagacatcaatttcacttattttttaagaagcgtcggtattattaattccaccctctaatttctttctgttctttttgatcagtatttgacatagttctactataaaggatctgttctcatagacaaagactgcaagctacaaagggaagctgtggaagtttctgagatcagggagcctgaatatgggaccataattaactgacatagacagatgtgtggatcagcttctacgaggtcaatgcagagaaagcaatttctgtcatgtggccataaaggatgtttccataaagtcatctctagaactcaggaggggaatgaaagtaatcatttccctgtgggtgcttcactctgattcagtgtagacctgactctgacatttgtgagacagaaggttaagatgacaaatacaaacaaggattacatgtgtagaaatatttacccgttaaaaatcagcctaaaaactatgaaaacatatgaccactttaacaaattacctttataatgacaaagtagaaaaatgtatagaaagctgtggcttttataacattgcaaatcagtaaaacagcaaatgactaaatttaaatttttgtatagatcaggatgttttgttgatgcatcagtaagtcacaagacatataatttgtaaattataattaattccatgaagtttatttctcatatgttcctttccacaaaatcaataattatggtgttataataaagatacatatatatacatatatttgcccaattatatcagtaatcacccaaagaattatttacagtagagatcaagtgactatatttcatccaaaatgtaaatgaatgtttacacaaaaaatacaaaatcattttatatactttataaagatattttcttccataatagagttattaattaaaacaaaggtaaaatacgaatttcatttaagatttaccaaaacttttatcaatttaagttgctgactataactaaaattagacatccatttattttttgaaaatgtaattaagtacagaaataaaactatttgtaaatccagggctcaatgttcatctaatttccaacataaagaattgataccatatttcacacacctagacctacatatttacaaataagagtgggcttccttggtgactcagacagtaaagaatccacctgcaacttgggagacgtgggttcgatccctgggttgggaagatcccctggatctggcatggcaacccactctagtattcttgccaggagaattccatggacagaggagcctggtagtcggatacaagtcagctactaagcactgcacatgaactatttgatgtcaccaaattttcctctgccaacac

SEQ ID NO: 53273 - DNA, 2397 bp, Bovine  19866880826068
  misc_feature (1)..(1): n is a, c, g, or t
ntcaagctggttttagaaaaggcagagaaactagaggtcaaattgccaacatccactggatcatcgaaaaagcaagagagttacagaaaaacatatacttctgctttatcgactatgccaaagcctttgactgtgtggatcacaataaactgtggaaaattctgaaggagatgagaataccagaccacctgacctgcctcttaagaaacctgtatgcaggtcaggagataacagttagaactggacatgaaacaacagactggttccaaataggaaaaggagtacgtcaaggctatatattgtcaccctgcttgtttaacttatatgcagagtacatcatgagaaatgctggactggatgaagcacaagctggaatcaagattgctgggagaaatatcaataacctcagatatgcagatgacaccacccttatggcagaaagcaaagaagaactaaagagcctcttgaaagtgaaagaggagagtgaaaaagttggcttaaagctcaacattcagaaaatgaagatcatggcatcgggtcccatcccttcatgacaaatagatggggaaacagtggaaacagtggctgactttatttggggggcctccaaaatcactgcatatggtgattgtagccatgagattaaaagatgctcactccttggaaggaaagttatgaccaaattagatagcatattaaaaagcagagaccttactttgccaacaaaagtccgtctagtcaaggctatggttttaccagtggtcatgtatggatgttagagttggactataaggaaagctgagcactgaagaattgatgcttttgaacagtggtttggagaagactcttgagagtcccttggactgcaaggagatccaaccagtccatcctaaaggagatcagtcctgggtgttcattggaaggattgatgttgaagctgaaactccaatactttggccacctgatgtgaagagctgacttattggaaaagaccctgaagctgggaaagattgagggtaggaggagaaggggatgacagaggatgagatggttggatggcatcaccgacacaatggacatgggtttggctggactccagcagttggtgatagacagggaggcctggcgtgctgcggttcacggggtcacaaagagtcggacacgactgagcagctgaactgacctgaatgagatttaaattgttttcaactttctgtcacttgtgtgtgtatatgtgtgaatcagttattttagactagtatgcttttaaagggactgtaatctctacacatactaatgtcatctcacactgagtataatataacttggtcataagattcttccaacatatgactttcagctgtttgaaggaggctttagaactacacagtattcacattttgatagagaaaaaaataagaatgtttgctctatcttttctaagatggtaagtcaaagagcttaaatttgtggagaagtaccctaggttttggtttaaggtaaaacaatcttatagctatttaagtacaggcagctcatttcttcaacaatgcagttcccaacactttttctgtctttttcaaaagcaaagtgtggggattaagctcattattctaaacagtgagtaatataggtggaacttatcttttgcttcaatcgcagtgcatcttttacgataatacacttatatttccttgtaagggatccataatcattccacaagagaattttctcaaccacataatgtttcttaaccactcgaagaattattttaagacacttaaatatctttcaagtgttccctccaatttttatttttaaatcctgaagtatctagtgagcatatagttctttcttataactattttcttttttagaatgggtaaaaactcactgtcaacacattagtgcaagactgatgtagataatttcaaagccagtagtcatggtgttcaaaagtagtgatcctttgcatgtaaccacatattacattttgaccatttcattgattgaacagccactatgagctgacactatattctatggttatgaatatgagccagacagaagctctgcagtcaaggtgcttatggttgggtttacgagataccgtgtaatacaagctgagaggtgggagatcagagaaggattcattaaagaattatttcttaattaggttccaagcaaggaagtcatatttagacaaatgacaaccggtttttgttccacaaagaaagagaaagcctgtgtaaacgggatggaaaagaaagggccaaaaatatctctataatgcaatccattttgactgccaaaggagttcgtgctgggagatatgtaaaaaggagtgtcataaacaaagtatgtacaaatcctgagttataaattatgaaggaaata

SEQ ID NO: 53274 - DNA, 1077 bp, Bovine  19866880864426
  misc_feature (1)..(1): n is a, c, g, or t
naactcaacctgtatatttaatgcatataattttaaaagtttcgaatacagtaaatatttttaccttccttccttccttcctagtaatacaaggactttaaaatccttcagcctcagatataatctaagttatatgctaaatttttcaggacgtggggtctacttgattttttaaaacccagtgattagatattattttgttattaaaaacatggtcagtgtatatttagattaatgtttttgcttttttcctttgcttaccattttttcctcacatgtcagatctttatccttaaaatattacttatttcctgaggtacatcatttgatcttcctttactgagggtctgttttggtaataaatacttaggtttcatgtgtctgaaaatgacttttttccttcgttcataaggaataatttaatataatagataatttataataatggattagaatggataattctatttaaaagttattctccctaagtcctttaaaggtattccattttcaactgacatgtattattgctgttatatcagctttaagtaattgtgtttccttttaagttatctgtccgtttttcagattacttgtaccatctttgtcacctgttctgtattttaccctatgagctatctcggtgtgaatttcttttttattttgttgcttggaattcctgggtaggaaggtattttccattgtttctgaaaaacttcagccattgtctcttcaaatattgcttcctatttccttattatatataagttgatacatgtaggatcttaatacctgtacttcattatccatttgtgtctttgagctgtaatttcttcagtctcatcttcctatttactacttctctctccagtggaatcaatctgcagcttagtccgtccgtttggtttataatattaagaactatagattttttcttcgataagtttcatttggttacttttaagttctccttggttaattttgatcatttatttttccttcatcatattttcagcttcatcttttaaaaattatcaaaaatacaatcttaactttgtagttaataaacctaatttc

SEQ ID NO: 53275 - DNA, 1784 bp, Bovine  19866881124265
  misc_feature (1)..(1): n is a, c, g, or t
ntgttagtcctatcttgtcccttgagttacttaccctgaaaatcagggtcttactgttttccttgtaaatggttcccacacacggtctacaaatgaccagtaaagactgacttttctttgaaaccactttgaattttaatggtttcattaaatacaaaaaaccaattgtatttgttttttgttccaaagaaagcttatacacagaggcagtagcatagaagcaaactcagtggacagtttaccagaggtgggaacaggtgcatgtcacatggaataacccatacattctgacttcatcaccttctcaggttttgagaaatgtacagagaatttgcagcaaagaagctgttgaataacaatagcaacactctgtatttatacagcacctttctttcagagagttcagagtgctttataaacagtatctcattaatcttcacaacttccctataaggaagtctgtttcagctatcattactcacatctttatcaacaaagaagcagtagcctgcagagtggctaagcaacttgtccaaggtcactgagggccgtgagtggcaaagccaacaataaaactcagagctttgaccttccagtttagtattctctccaggaggccaccttgaaggaagagaaacttctcacatgcatattcataagtttcccaagaaaaagctaccatttctcaatattttcatcagccaaaatttgaagctaattggtggccatttcaaatcaaatccaacggctgatggtgatgaggaatccctggaaccatattgagagagcacacagacctcactctctaagccttgttaatcaactagagaccagcagttggttacacaaaactcattaaaacaaccagatcagtgaacatggaggagtgggcagtgaccacccaggatgggaagaccctgcatgaaatggctaaactgtcaattctttccccccaaatgtaagagtgtaatattcattaggataaattgctactacttgattgaattattatcatttattgggtactagacacatgctaagggctgtgcacttgtccttaggtagtttatagtctagtggaaaagtgtggaaatgggtgtacacaagagagaagagagttggctaacactgcttggggaaattagagaaggctgggatgaaacaccaattcccagggttcttgtccaaccaagcctttgatttgaacaaggcatcttcatttcctgaactttcttccacttttcttggaatggcagacatgtttaaaccttcatagtcagcttaaccacatctcttagagaggtccttgtgacctttccaatgggggttcttgttgtcagtcaagggactgtgttttcctaacagttttcagcttagctgatgaaatagagctgtttgttaacaggtttatgatataactccctctccaaactgtaagctccatggaaaaaaacagaataaagattatacaatgtattcagtgaatggatggttattgttcagtgaatggatgacacctgttagcttctctttccttctctataaaataacaatgatgatgcctacctcttggcattgtcatataaattaaatggacaaatacgcaaaactgcattatactgtgttatgtgagtgtgtttggagtcgtttcagttgtgtacgaccctttgcaattccccctggactgtagcccaccagtctcctctgtccatgagattctctaattaagaatactggaatgggttgtcatttccttcttccagaggatcttcccgacccagaga

SEQ ID NO: 53276 - DNA, 999 bp, Bovine  19866881170461
  misc_feature (1)..(1): n is a, c, g, or t
natacctttgaaggtattatgaaggattatgaataccattggagaaggcaatggcaccccactccagtactcttgcctagaaaatcccatgggcggaggagcctggtaggctacagtccatggggtcgcgaagagtcggacacgactgagcgacttcactttcatttttcactttcatgcattggagaaggaaattgcaacccactccagtgttcttgcctggagaatcccagggacggggagcctggtaggctgccgtctatggggtggcacagagtcggacacgactgaagcgacttagcaggagcagcagcatgaataccatgaagggttatgaaggattaactaaattaaaagaaatgacttacgcaaaatacctagggtactaacacagagtagggacacaaaaatggcatcagtgacttttattaatgtttatggtaaaactttctaaatactatctaacgtgtagttagtagttttctctagtgtttcattggtctgatgattctatttatttgatcatccatgaatcatgagatggttgacattaattggtagatgttctgcttacctatcgatgtgtgacataacggttttggagatgtctcctccagcttcttgcaacactcggataatctgaaacggtgcactttgattccttccgggatgaataataacaggacagccaagctgagtctgggcgtgagctgttgcctgcagaacctttctttcactgtcagtcagaggccaggagcaaccaatttccccaataacaccacacttgatactggttccatcggctccacagagaatttcattaacaaggacatcagtaagctaaggaagagtgagaatgaaaatttataaactggattttatcaacagagagtcaatacagtatgtgaatgaatttattcattgagtcactcattcttttaaaaatgtataaatatattcaacattcgttcagttaatatggcaaatagaaaggcattt

SEQ ID NO: 53277 - DNA, 1283 bp, Bovine  19866881221674
  misc_feature (1)..(1): n is a, c, g, or t
ncttcacctgggagcagtctcacctggactcaatttcactgttcaatgctaggagacagaacccaaaagaggagttttcttactgtattttgttgttggtgggattttctatttgcttttgttttcatcctagagttttccagttagtgaaacacttttgacaatgcctctcttgcgatgaaaactggacacatatctctttcctcagccataatgaggaaaaggaaaaatctatctttaatgtgaaataaaaggtttcaaatggatcttttgatcccgatctttcttacttaacccaaatggtatgagccaaagaataaatagattcatgataataggcaactcagagaagaaaataagtaacttgtcataaattaaagtgcaaggccatactgtattttgattctctgctatgcttgtctttattgttattaagattgggaaactaccttaggtagtatttctgatggcttcatggtccttctttctctctcataattaaaaacaatattaaagggtaaatgtcagagttgatgggaatcaatgttctattagtgaagattgtctctaccatgtctcaaaaggtatcagcagcatgttctttgactggcatacagagagaagtaatcagagaaaaacaaatatcatatattaacacacatacgtggaatctagaaaaatggtacagatggacctatttgcaaagcagaagtagactcacagacgtagagaacaaatggatatcaagggggatggagaggtgggaggaactgggagattgggattgacatatatacactgttgatactatgtacaaaatagataactaatgagaacttacatataaaatagataactaatgagaacttacagtatagtacaaagaacattactcaatgctttgtggtgacctgaatgggaagaaaatccaaaaaagaaagaatataagtgtacatattgctgatttacttttctgtacagcaaaaactaacacagcattgtaaagcaaccatagtccagtagaaattaattaaaattttttttctaaaaaagcatatatcttcagcatcttcttaaatgtcctcagggagtagccgttcattgtcagccaaggttgcctttgtaagacagtgcaatgaaaagtacactgttctccctcacttaaactaaaattgtatgccactgtgacacatttttcttgaataaatcaattattttaaggaaatacatatgtatatgtatatactcatatatggtaagtatataactatatttattttttt

SEQ ID NO: 53278 - DNA, 730 bp, Bovine  19866881238901
  misc_feature (1)..(1): n is a, c, g, or t
ncctggggttgcaaagagttggacgctactaagtaactaacacatactatcaaatctactgaatatcttagcttagctttgcctcagaacacctacatcagcctacagttgggcactatcatctaacacaaagcctgtttcataatgtagtgttgaatatctcacataattgaatactgtactgaaagtgaaaaacaaaaaggccgtatgggtacagaatggttataagtgtacgcattgtttacccttgggattgtgaccatgaagctgactggaagctgcggctcactgctgtggcccagcatcattagcccaggaaaagatcaaaatccaaactgcaaagcatggtttcccactaaatgcatatttctttcacaccatcatagagtccaaaaccattggaagttggagactttctgcactacaaaaatggcaacatcctttgcatccctctaacttgactaaacctttcatgaggaccctcctttccttgggaactgggctgatggaggaaggtagaaagggagagatcattgaaggaggaattttaaactaataaagatttctctaagcattttttagaatttctgaaggtcttctttggaaaaatacttaacctctcaggttttctttatgatacacccacgttttttaagagaaggtggcttgtgggtataaagagcagcttacaagtcctgtgtgatggagctagcaggtggggcttgatcag

SEQ ID NO: 53279 - DNA, 1350 bp, Bovine  19866881313894
  misc_feature (1)..(1): n is a, c, g, or t
ntgatttctgaaaaaaatagaagtcaaacttgtaaagttggtaacgataaagaaattataactaaatcatgacagacttgactgaaatgatcccaaaactagagcaggacaatcgtataagcagtatgatcctttagtattgcttttttagattttgaaacaatccactgaactctgtataaagattcaaactaaatatggatgtaatattacctgtttgcctgatgtcaaacttaaaaacaacaacaaagagatcctgcaaagcataccttggcaaaaaacacggtcaggtgagtttcactgccaacaatccaaatagggaattttggagatttcaagtaagagccaacctagaacaaaggtagtaaaataagtaaatgaaaattttatattgcctgttaaatatttaccaacaaatgcttgaagcatcactaaagtgcctaattcatatttaaatggaataatgggattgtgccagaatgccttacccataaaggtcaaacgttaaatgtaaaaatgagtgttataaagactgtcagggcaaagcttatactgcatcattccactagaataataataataataatacagatttaacacagcaaaaaagaaattagtgtaaccctaagaatcattctcatgtctcactgaaaatcttagataaaatttaggccacttctaggaatttcagcttggtacttcaaactctaaaactataaatctgatgataattactttatcaggaaaataatcataaattaacaagtgagtagatacatgaataaataagagaaaaagccttaagaacatcctgtcttcaaagaacttagagcaatataataaatagactctctaaagcaaaatacatacttccatctaggaatagtaaagaatccttcacttgattctttatggcaggaagtaagttcaaagttacacaatattaattctctctaaaatacattaaaaagttatatgttatagcctgcctccaaggttacacacttaacctataaaaacaatagcaccgaaaatttaagggtatcatttttgtgtgacagagaaaaagcaagcttaaaattcaacaggtgaaaaactgacttgtgaaatctgaccatgttcacatcagtcactcacactgttagatggacaaggactctgaaaaacaagtaaccttaccaattacatttgctggagttttcttttctcacacaggccttcacccgccccccaacccccactggagctgggaaatcccaagtggctacttgcagcggtcagtcagggtcaactattcatcactgagcggccaaaagcctcgccatggtgtcctgttttcaaccaccttat

SEQ ID NO: 53280 - DNA, 1689 bp, Bovine  19866881441173
  misc_feature (1)..(1): n is a, c, g, or t
ncatggctttaagatttctatgcaggtatgatgaagaaactagaaaacaaaagcaatagaagtaaatgtttcagactattaaagggccagcttttgtatccaatttatcaatctcggcatatccaaaaggtttttatgtttttttaatatggtaaaagcaaatctagtttcaaaatgtgctaatttcctctaaagttatttacaaaaaaagaaaatccatccattgcttaaagtcatttttccaatttcttttttacacattttgtttctcattatcaaataaaaatctgtctccagcttttataaggctttcataaaggactcccttcactgaacagcagaatgtggccttttctttttatctctctaattaaaacattgcaacctggggaagctatcagttagttctcagtaaatggcacttattttgatctcctttggtaaagcgagaaaaatggtgaagtgaacagaaatgtcctgatccctaaaattagatagaaacccactaatatgcaacctacagagccctctgggtcttcagaaatggcactcagtaatttattttgacataaatcaacttgctttcactcttcagcccagttgtgctgaggtcatttttcagaggaacttaacagttcaagattgttcatggcttctgaaatcctacatttatattttccttcttaacagattctctgaagtttgaatgaaagaccatacatcatgatataactccagtacttaatagactcatcattctagctaccactttgtattcttaatattttgccctaagccttattgtatttggtcaacatgattgtctgaggttattaggttttgggggttttgctttcaaaagaagaagccttctcctctatcatcaggctcatacacaggatgttaataataaacaaaccaatgtctctacacctttccctatgtcttaagagtattaataaggtcgtaataacttactaatggtttgcttttaaaaagatttcttttaagacgaattaacccaaataaagaatacaaagcaaacagcttaatcagctcatgtttagtgaacatcctttaatattatgactgcttaagtacaggataattcagaaacagtttctcaaaaaacttagtttctagcataagggtccaggcaggtgctcatcaaagcaatatgtatttgtatggcttgtgtgtaaaattcatgttaaatctctgaccagaatatgtgataagggctatctactggacatgttagaaaactagcataactggtagttgtgtaggaagtactcaattcataaaatgtatttacttaaaagtggccaaatttcttttattcaagaaggtaggccctgcttcagaaagtagcaatttcatgaaaaagaagcattggatttagttagggaacttgaatgtcattcctagacttatgcactgaaatctgcaaaatactgatgaaaggaattaagacacaaatacatagaaacaccccagtcatggattggaagatctgatattgctaaagtagctatgctttctagtatacagtccgcagattcagtatatcgaaccaaatggcagtttttatagaaatagcaaaaaaaaaaaaaaaattgtagaattcaaatggaaccacaaaataccccagatattcaaagaagtgttaagaaagaacaaccaaga

SEQ ID NO: 53281 - DNA, 1181 bp, Bovine  19866880692553
  misc_feature (1)..(1): n is a, c, g, or t
nacatttacagcagcattatttgtggttaccaaaatctggaagcaaaccaaatattcctcattaagtgaatggataaacatactgttgtagtcagcagtaaaaaggagcaaactattgatagcttcaacaacatgaatgaatcctcagatacattatgctaattaaaataaatcagtctcaagaggttacatactatatgattccattcatatggtattctctaaaaggcaaaattataggaacatggaacctctcagtggttgccagggactgtggatagaaggagtgtctgaatgcaaagaggtagcaaaagagaatctcgaggggtacaggaatttttctatatcctgttagtggtggttacaaaaatctatgcctgtgttacaaatctaaagtgaattttactatatgcaacttaatacaaaataataaacaattctgaggtactgacattttactaaatttgataaagataatttaaaagaaactcaagaaaagcaggaaaatggcagtcatgggagtatataaaaccatgtggttggtcccagctgtttcttaaagagaaaaggtctgtttccttttggttaacatgtcttcctcattttcaggtaataacaactctaaagtcctaacactgctgttagtgacttagatgtgttcataaatgaaggctatgggcttataaaaatcacctctaaaaactgaatcaactctaaatgaattaactctattgaactgtcaatctaattaattgtatagaaacccatcattaagttgactctaaaacccttgagtcaaaaaatggcaaattcagaggccatgtataaacatgacctaagataaaagaaaaattgttctgccagatagtctcagtttttttcatatttgtaatggtaatgatatttttttgttcctgtagtcttgatttaaatttctgaaaggaaccaaacattgtgatttttcaaagggttttcaagcaactatatgaattctttctgatccagaggatggaaatatttgtagtgaatccagtttgagtaacgtggtggccttgtttttgcatttagcaaagatggtttcatcaatcacaggaaatgacactcctgacagaaagaaaataagatgtaaattagctagaggagagaacagagcaggacattccattggaataagaagggct

SEQ ID NO: 53282 - DNA, 832 bp, Bovine  19866880751782
  misc_feature (1)..(1): n is a, c, g, or t
ngcttagtgtattatcttatagagtctctctattcttttaaataaccatttaagttggtttccaaactctgggataacaggaagcttacataagctactaaaggcaactgaaaatccatagcaaataataagttatttgcttagatttcctgggcaggggatgtttccatcaggttatgttagaacagcatctacctgagcagagaaatttatttctgtatttactgaaagctccctatgagtaaagtactaaataaacagtgtacttagacaaggggttacaaaggcagcaagatataagtcccactttcaggcaatttgtactttagtttgactaaaagtaacaataatagtttatatttctatgacagtttacatttttcagagttttaatacctaacctcatttcatccttaaagattcccatgaccactttaaagacgaggaaactgaggttccaagaagtaaagactttttctgaatatcataaattgaatacataaccacaattcaaacacgtcttctgactcttggttgaactgtctcatgcattatagctgcatcttaaaaataaagatctatgcctttgctttatcaaggtagaagggaaggagcagaaaaaaattttttgattgatttccccaatcaatcagggcccagtcgggggctgttatagtccatctggctctgacaaaaaagctatcaaggaatgagtagaaaaagaaaactgtttttctaccatccaaaagagccacctgggaagccccaaagaaggaagtgggaaaaaaaaaaaaaaaaaacagaaagtattaagaagactgaactagaatca

SEQ ID NO: 53283 - DNA, 929 bp, Bovine  19866881109540
  misc_feature (1)..(1): n is a, c, g, or t
natttgagggggatgactgatgtggatttatcttcttcaaacactggttcacagtgtaggtgccacacgaaggggtttgagtgagagaatgacactgaggtttaacagaggtattggaagtggaaattggtattggtctggaaatccatatgccacggctatagactgaatatctcatttttcaaatgtatgctgatacacatgttgatttgttaatatatataatcaaattcatttggcattatccattgctttaatcagttagtattagaattacaattgctatcagttgaatacctatttttaagaaaagtataaccactgtttggagaagaaaatgacaacccattccagtattcttgcctgggaaatcccttagacaaaggagcctggtgggctaaactccatggagtcacaaaagaatcagacatgccttagtaactaaacaaccaccaccaccacaattacactaattaaacaatgaggtccttagagtgacctggttctactgctttggtgacctttgtaaactaagcaaattttaagcgtataaatgccttaagattacaaaattgaaacctaaagacaaccggtcactactggttgactcaaagagttaactactctttgagctattgccagtccatcaattcctaactttcactctgccttttctctataaaatctctccccaaagttcctgtcagtggaacactcctaaacacttccaatttggccctccctaatttgaattaaaatttgctcaaataaactctttaaaattttaatatgtctcagtttatcttttaacactactgcctgaaattactcccaatattaagaattgagaggttacagagcttggggaaggagttagcaatacagatttgtaaacacaataaagtcagacaaatgatcattctaacaca

SEQ ID NO: 53284 - DNA, 905 bp, Bovine  19866881139937
  misc_feature (1)..(1): n is a, c, g, or t
ntttgagaagtcatgtgttgagaacatgtcaccctttgcataggaataaaagtgggaatctacacgtattgaaaggattaaccactcttgaaaatatctttgtattatagcacttgtcttgcacaaaattaacctgggggaggttgtttcttctttgatttgacagctttttcaaagttttcaccctagtaaaggacaactcttaccactctgttgagctggttaagaagataataagcctaccaagcaaatgcaattatttctaacatctcttcttgatcatgagcaccactttctggattataagatgaggagaaatcctttggtgctatctagcagctgtcttgggagtgatgaacatggtttgagtgtaaaaaacaccttttcaattgtattattctgaatttgagatctgaactcagaggaaagcaacatcttaatagtttccaagaaaggtccagagagaagcaataccatataaaaaccataacagaattttttccataatgaacatttggaatttagttcatctcagttttttaccgttttctatagttacaaaattccccaaagcataaaatagcggaaaaattaacagactcttgagaatgtatagtcaggttgaatgaagcaaaaatcacttgccatccaagtagaatatgctgaaagaaaataataactttttattgctttacattcagaacagacagtactctagtgacattttattttgtcttctgagttatcagtataggtagacctcattttatgacaatcctctttattgtgcttcacaaatatcgtgtttttacaaattgaaggtttgtggcaacctggcattgaacaagtctcttggcatcatttttccaacagcatttccccgcttcatatctctctgtcatatt

SEQ ID NO: 53285 - DNA, 2485 bp, Bovine  19866881142304
  misc_feature (1)..(1): n is a, c, g, or t
nttctggcggaaatgaaaagcataatttagttgagttatgtggagagagttttgatgtgggccaggcatcggaaaagcaacaaggttagtgcagtatgctggggctggtaaaggaggttagcaaggggagagggcagctcctgactctggagggatgcaaccagatcacaatgacccagccaagaaaaagctgggggaaagccatgtcttcactgccctccttgtttcagagtttccataggtgcctcccactggccaatataaccagaagcaggaggccagggagcccactgatacaggtctaagagtgattgtgcaaaggcatggagaagagtctagctcaccctgctgacaaatttgtcttgtaatcctgtggataatggaaagcattaggggattttgacaaggacagtggctgtttcgaagagattactcaggccgctgtgtggagacttgactacagtaagattcagtcactataaaccggctcctggccctccctgatgtggtaaagctggctgatcatttgtcctggagcacacttaaatgtcccatgctggtgtgtttcttgaggttcctggtgtgtcatggtggtctggggtggcagtctggcagctctgtgggatgctggccatggcactatttctagtctttagtttgtgtgtaacttgacactgagtgtctcgctaaggctggccctcctcatgtaaaactgcccccaccccccgtccctgtgctgtgtgtggctcagtgagggggcatctgtgggagaagcttactcttgtttctgttttaaggcatcatgacaatcctggccattcctaggggctggtctcttgaaattgggctttggtgaaggaaaattggatttgaagaaactttatgaggaactttcataatagggttgtcttctgggaagaagacgtacgttcaagtgtgtgtgcacgtgtgggtttgcgggcagtgggaggacaaaggaaggagcgtgacagagggagacgcagtgagagcactccacatttgagtcctgttcttccagaatgttttgtagagaatgttctaggtgtgccttgcctgagttgaggataaaaatgaaattcctgaaaaattaaaaaaaagaaaaagcccacaaaactctccttcccttttgtgtttcagatgttggacactgggatgctgtatatgatttctgaggttatctgtagttctgattttaatgaggattaccctaaaaatctaaagaaagaatattgttgagttgaaaaccagtttaacttttgactccatcttaaatctgggctatatagttgactggatgcttgaagtctgaatagtgtatttctattgccaaatagaattttgatagcatggtaaggaatggaaaagaatgattttggtttcccagtcattttaagaggatgttttaaaaaaataggttacagttttttggattgaaattgctagtgaacaaatcaaatgctaatgatggatattttaatactctgttaaaggaatattgatctaaattgttcaagaatctttgaatcattggttagtattcaagagatggcctgtcatgtaatgagatggcttttaacaaactcattaaaactcattcaattgactaaaaataaattgaatgtgtactattcataaggcaagtgagggaaactaaaatgcataagatgtagtctctgcccccaaggaggttgtatactgtaataatctttcacttcagtgtaatcaccttgggactgtattgtcttttttcaatgggatcaatcttgctaaacatttaagaactactttgaaattgtctttggaggcatcttaacacattcgcacatgtacacatgcacacacacacacacacacacatgtgcaatcattgtcagtttcatttctgtagaacagtggtcagcaaagtatggcctgctggttaaatccagcctgctgcctgtttggcatggccccagacctaagaatggtctttacatttttaaatggttgaaacaatcaaaacaagaataatatattgtgacacatgaaacttgtatgaaattcaaatttcagcattcataaataacatttttattggaacacagcaatgtttattcgtttatgtgctgtcaatggctactttcatgctacagtggcagagttgagtagttttgacagattccatatggccttcaaagcctaaatatttactgtttggtcctttaaagaatcatgtctttagaatcagatgtctctatatttatatattgatattatttataaagaggcttcagttagattccctaccttcttccataaatttgactctgaataactttttccaagttttcaaaactcacacttttcattcatcagaggtaaaatattttacttcactttatgggcattcaaggaggactttttcaggctttgaagtaatccccaaagagtttccccgttctctgggcagtggtcagggttccta

SEQ ID NO: 53286 - DNA, 1352 bp, Bovine  19866881239091
  misc_feature (1)..(1): n is a, c, g, or t
naattaatgttcttattctaaaaggcaataatcacatggttctgccaagattataccctagaatatcatggaagtctacactagaagttaggaggactagtctaaggaggactggtctaagattactcctgatgagaaaaatttaaggacagaaacttaaatcggttctatccagttcagtttaatctggatagcctatcagaacaatctgcttccccaatctctgctactaaaagcagttgagtgaattacttaatcttctctgtgcttcagtttactcatctataaaataacttctcctgtgaagttaactttggtcaagaacatgtaactatggtaaaaaaaaattttttttttaatcatgctcaatttctttacaaagtatcttggagttcttccaatctcaccttaaatgtcaaggatatgcaccagttattgtaacagatattgccagctacattcatttctaatgatggggtcttacttaccactctaatgttatgctttttggaaaagaatttttttcagaactgtgagcctccttagatatgggcaaaaagacattctgcctgagctttcattacctgacatgccatttcccccacactcttaagacctggtcttgccatttgactaatggggcagcatggcaaaatttgctttcaggctctccatcctgtctaagccacagatctgaggtgcagtagaagacgtgcagatgctgctttgcccagactttaatctctctatgctgaaaaactgacaaagttgtttcctgccctaatgattgtgaacagaagatctgggtgataacatagtctaaatcacagaaacatttctcacaggtgagtatgacaaaaaagaaccaagaatgttgtgttggatttattttctagccacacaacctgaaaatttcccaaccatgtgttgaatcattcacccatatcatcatccatactcactagagtaatgcacagccataagctagaccataagaaggccaccttcaaaataatctccttgcttattaaagtgggactccccagatcatagagggtccagagggtccatggacatatcatcagaagtttgtgaatgttctgtgaaattctgctaattcaatatttcgactttgatggtaatgaaaaagtattaaattaagcatcatccatataatcctactgcccaattactggtgagccgtgtcactgtgtttcaatgcctctatacgtggacgaagtttatggttggatgttacacaaccactgtactgtcattacttctattagggttctccagagaaacaatcaatagggaatagatagatagaagaggaaatttattatagaaat

SEQ ID NO: 53287 - DNA, 706 bp, Bovine  19866880543126
  misc_feature (1)..(1): n is a, c, g, or t
ngagatccaagcagtccatcctaaaggaaatcagccctgaatattcactggaagcactgatgctgaagctgaaattccaatactttggccacctgatgcaaagaactgactcttctgaaaagaccctgatgctgggaaagattgaaggtgagaggagaaggggacgacagaggatgagatggttggatggcataaccgacttaacggacatgagtttgagtaaactccgggcgttgatgatggacagggaggcctggcatgctgcagtccatggggttgcagagttggacacgactgagcgactgaactgaactgaatagcatttttttcctgttggtcacaaagtggcagaaactgcttcaggcccaaagcagaatcagatggtagcaataaaactgccaccaacttcatccaaatattctccaaagcctgttagggctctgtaagttgactagacagaaaatcacttggcaaaggcagcagccctttctcctcacgctgccaggtcttttcggcccagttggcaaggtcaagaatagtagggaatctgacagaaacttgccaactctttaaccttgcctattagaattattgacttaccaggctggcacaaataactccatcatcattttgctctagccacccatacatgtcatctatgggttatactttcagaaaccggaaattactaagcagacataggaag

SEQ ID NO: 53288 - DNA, 2122 bp, Bovine  19866880564596
  misc_feature (1)..(1): n is a, c, g, or t
ngctaagtcgattcagtctgtccgactctgtgcgaccccatacacggcagcccaccaggctcccctgtccctgggattctccaggcaagaattctggagtgagttgtcatttcctcctccaatgcatgaaagtgaaaagtgaaagtgaagtcgctcagtcatgtctgactcttagcgaccccatggacagcagcccaccaggctcctccatccatgggattttctaggcaagagtactggagtggggtgccattgccttctccggtgaccaacctagagagcatattaaaaaggagagacattgctttgctgacaaaagtctgtcttgtcaaagctatgtttttttccagtagtcatgtatggatgtgagagttggaccataaagaaggctgagcactgaagaattgatgcttttgaactgtggtgttggagaagattcttgggggtccatcaaactgcaaggagatcaaaccagtcaatcctaaaggaaatgagtcctgaatatgcattggcagggctgatgcttaagctgaaactccaatactttggccacctgatgcgaagagccgacttgttagaaaagactctgatgctgggaaagattgaaggctggaggagaaggggacgacagaggataagatggttggatggcatcatggactcaatggacataagtttgagcaagctctgggagttggtgaaggacagggaagcccggcatggtgcagtccatggggtcgcaaagattcagacacaactgagtgactggacaacaacagcaagtagaaaatgataataatagtggtagtaatagtaataataataaattttaagaagttcagcaaaagaaaaatgtggggtatctggaaagtatttaattgctatatctgatctccaggaagggttcagtaaggaagagactattgtacttagcttgagggatgtatagtacctagtcaggtgacagggtcaaggaagaagacttcatccagagagaacagcttgggtcaaggccttagagtagggaagaagtgaagtaagttcaaaggttgcaatgtaatggtgtggctgagtacagaggaaaaaagggacagaatatataagatgatgccgagaggtaggtggcttgggactgcctctttctaagcattttaaaggattttggttttatcctagaatagcaggaaattgtaccaagaatttatacagaatttggtttggtttttctttgctcacacctttgtttctttggggttaatacctagattgcaaggtacatcgaaatatattcacgtttcaaaatttggagtatatacggccaagttaccctcaagaaaacttgtaaaatttactattcctcctgcaatgtgtgatgtagcttaattatacaaactccagtgttgggcagtaaacatttaaaatatttccaatatagatggatagtgacatgattgctgctttgtgtctattttattgtgaatattgaagtttacacatgtatatatgcagtttttcagattgtgtttcaaaatattaaaaatatttttatcagtattaaaattttttttatcctaatacattttctgttatttccaaagaggattatagcattttagtcaaatgattaagctaaacaggttgttcaacttagagaaaatgtgagtcattaccaagtaaaatctcaagaagtttgaagtaattgagctggtagcttacttttttcagagtctataaaaaattaaattttccaaaaattttctcagtttgttgtttcttgcatcctactccttctctctgggtgttcttttcttcttactgaattcattatttaatgactttttcaatatgagtgtgtgggcgatgcatttcttaatctttgtatgtctgaaacgtctttattttgcacttattcttatatgatggatttgttcccctcaatccttagacgctgtttctccaatatcttctgatatttattgtcttctggtgtctgttgtgtgctatcaatcctatagtcagccaaaaaatcattttgtctttggtatttggtagcttttaagattttatctttatcttgggttatatgaacctccccgtagtctgtttagttttacttatgcca

SEQ ID NO: 53289 - DNA, 1324 bp, Bovine  19866880608050
  misc_feature (1)..(1): n is a, c, g, or t
nacgtactccttttcctatttggaaccagtcttgttccatgtccagttctaactgttgcttcctgacctgcatacaggtttctcaagaggcaggtcaggtggtctggtattcccatctctttcagaattttccacagtttattgtgatccatacagtcaaaggctttggcatagtcaataaagcagaaatagatgtttttctggaaccctcttgctttttccatgatccagcggatgttgacagtttgatctctggttcctctgccttttctaaaaccagcttgaacatcagaaagttcatggtttacgtattgctgaagcctggcttggagaattttgagcattactttggttaaatctaggtatgctgacctctttagaaaagaaatggtttctttccctgcaaactgaagtttgggaatttcagagctgggaaattgtgtagtagatcttaatgttataaatcacttggacaaataaaggataatgctattttggaatgcgtttgtagttatgcaagattgttgttgtttagtctcttaagctgtatcccactctttgcgaccccatgatctgcagcacaccaggcttctctgtccttaactgtctctctgagtttgctcaaactcatgaccattgagtcagtgatgccatccaaccatctcaacctctgtcactcccttctcttgctgtcactctttcccagcatcagggtctttcccaatgagttagctctttgcatcaggtggccaaagtattggagcttcaacattaatctttccagtgagtactcagggttgatttcttttaggattgactggtttgatctccttgctgtccacgggactctgaagagtcttctccagcaccacagttcgaaagtgtcagttcttcggtattcagccttctttatggtccaattctcacatccatacatgattactggaaaaaccatagctttgactacacagacatttgtgggcaaagttgatgtctttgtcaaagttaatacactgtttaggtttgtcatagctatttttccaaggagcaagcatcttttaatatcatggctgcagtcactgtccacattgattttggagcccaagaaaatgaaatctgacactgattccacatttctcccatctgtttgccatgaagtgataggaccagatgccatgatctttgttttttacatgttgagttttaatccagcttctttactctcctttttcacctttcagaggctctttacttcctctttactttctgcccttagagtggtatcatctgcatatctgaggtcattgatatttctcctggcaat

SEQ ID NO: 53290 - DNA, 1261 bp, Bovine  19866880653212
  misc_feature (1)..(1): n is a, c, g, or t
naccacagttcaaaaacatcaattcttcggcgctcagctttcttcacagtccaactctcacatccatacatgaccactggaaaaaccatagccttgactagacagacctttgttggcaaagtaatgtctctggttttgaatatgctgtctatgttggtcataattttccttccaaggagtaagcgtcttttaatttcatggctgcagtcaccatctgcagtgattttggagcccccaaaaataaagtctgacactgtttccccctctttccgttttcaagggcctgggtatgtgcttaatttggttgaatcatataggtgggacaggaaggactcagataaataaggcagaagctgtactgtgacaatctcactcattgttcttagaggagaccttggcatttgtattaggtgcagccaaaaatgatataggatgttggaactgtacatccacttgactaggacttgataattttatgcaagggaaagagatggtttgggatgtggctgacaccagaaggataacttagaattgttccaagacaagcaacatcagtaaacagtgtggggtgtgagtcaaccagattaattaccaacttttgtctgcatatgtaagataaaatagttgagccaatattaattagagttccactcttctgattgggtccttggaaaaaatagtaataataaaacatatcacattaagtataataaaccacattaaaatagtaacttaaatgttctaatattttttacatgaattagtacttttgctctcaattagaacccaatgaagtaagcactacattaccccattttacagatgatgcaactgagtcaaagagaggttaaataattagtctaaacacataccaatagtgttcaggaagttcacaggattaatcctaataaagaaaaaaagtgtcaagtttacaatttatgattctaaggggaagaaaaagttgcttcctgagtctgtagtgatgaaaacctgctacatgactatgtggggttggggaactacagcttctgctaaaaatcctaaaactcatttatattaccttgggaagtctactatatgtacacaaaaacatagtatctgaatgctagagaggaaacaaagaggattatacttgatatttctcttttaagagcaatcagataatattaaagtacagaatgtgtactgtctatcaattaggacttaaaaaatcactctggtgtacgttttgctagcaagcatgcactcataaagctcttgg

SEQ ID NO: 53291 - DNA, 1073 bp, Bovine  19866880757757
  misc_feature (1)..(1): n is a, c, g, or t
ncatctccttcccagagcgtcctaactctttccaccttcctctcaatgtggattctgagaaggatgcacaagccgatccactcagaattttgcttcctgtctgtgggcgggatgtagcagagttggggaccccccacctatgcccgcctcgccacctccggttcacctctctttcgcgtcgctagtatttacccagtacaggtgttcctaaccgtctaccccaccagtcgcagcctctccaatccagggaaaggagtaggacttggcagacagaccctgggctgtggagtcaggctgggctattatggaatcctctctccagcagtgatttctgtgtggtctttgatattccgtttccttacgtataaaacggaataatacccccattaaagggttaatgcatccataatgttcagggaacaatgtttattggatgcttgtcaaatgctggaaactgtgcttagttagccctaatacataatggtgaagaagaaaaagagaaacagatttctgttctcatagagcctacagcaagagacacaccagtcaaataacaacagacacccttgaaactgccattgccataaggagagtgcatgaccttgagacctgtggtgcgaagatctgacctaggagcatccctttagctcagtgattattcttcccttttttccctttgattcccactgtttggcacatggtatgcactcaggaaatacatatggaattcaatgctatgtcatggtcataacagtatcacgcagtttcgcactaagtttttgccactgaaaatatatttgaaacatacataactggctgctatgtctggaaagatgtgcaggtcttatcagaaagtactcattcaaacccagagcccatcatgaagagtctcaagaaaggttcaaagtgtttcttgcctattcacatggggttaccttagtaaggtgtgcatctcagatgagcacatgaaagtcctctttgcctcatccctctccccttactgttccactctctgccgtggtcccagctccattctaccacttccccttgatgcatagctgcaggacacccat

SEQ ID NO: 53292 - DNA, 1101 bp, Bovine  19866880823109
  misc_feature (1)..(1): n is a, c, g, or t
naaaacatttcttggcacatgcacaccatgaatagaacaatcctgaatgtagtgacagcctggctacagaggtatccagcttctggccccactggcaaaaccacctttgaggtccatgtcccgagtcccttcacatgggagcttctggcttctgcatctgttggatttgcttctgtagctggtccttgtccagcttcatcttggcttcgagaacttgcctgagggatcctatgctttcatagatggcggtaaaccctttaagaaagggtaaatttcacaagagttaatattaaaaaacaacaacaacaatgctgtatcaaatcctacagcagatactactgcttgatttgggcaaaaattatcaatagattctcaaagtactggaataaaagtttaatgggaaacagaatagttacatagtttcacagtgtctccctacagataccaagggaaacatgaaatattaccatagagaaatatgacagacaccactttaaccaagggtcaaagctatcttcaccaacactgggaggatccaacattacgtacccctgatgaggaattggaaagaagcctgggctctgcacgctaagatagaccacctcagcgctgtctgcacctaagtgctctctgactcaagaagctaaattctgtgtctcccttagtaggatgctcatggtcttctttcttcacattgattttggagaagggatttcagtactgcttcatgacatcattactggaagtagagtccttcagtttcagtctgctaaaagatcaagccctgagcctctggagtgggagcactgactctaagaccctagactatcagagaactcctaaccttttagggagtatcaaatagtgagaactcccacaaaggaaaccacttgaacacaagacctgacatcatccaaccaccagtagcaccctgtgcaggacgcctcatccaaacaacagacaagacaaaaatacaaacccaatcctcagcattcaagattaccacgtcactcagccctgcccatcagaggaaataaaaaaaaaaaactcagcacaaatctcaccctatgtgtagcttacacaaaactggaccaaacttag

SEQ ID NO: 53293 - DNA, 1811 bp, Bovine  19866881071008
  misc_feature (1)..(1): n is a, c, g, or t
ntggagaaggaaatggcaaccccttagtgttcttgcctggagaatcccagggaacagaagagcctggtaggctgccgtctctggggtcgaagagtcacacacgactgaagtgactttgcagcagcagcagccctcattttcccattaacacattttttctgtgttgtgaatgcattctgatgttcttttatgaaactcatttcattgccctatattatcttcttcctaattattttctaaaatacatgagcagtgctttttctttcactaatggatttgtctggggatctgcactttgtattcatctcaattttttccttttgttccttttcatttcaccccagataaaatgcaaataatcatgccaacttctgtataaagtcttatctgactagctccatcatgtgtctagaatgagttttacaattttgaaagttttcacttcattgctactatgatctcaaataagaataaatatctggtaagatattactgagttctcttttaaaaaaaaggcataaatgaagaaaattggaaaacctttcattttaaaaagtgaggattttttgggaggtgaaatttggccaaaaatctatggtgaccacgaaaagtctgacatttcattttagactgaacatcaatctattttatagttaagggaattgaagctcagagaaattaagatcttacagacagttgagtggaaaagccagactacaaattcaacctagtttggtttatcattcaaactaggccttttggactgagagggcaatggcaccccactccagtactcttgcctggagaatcccatagatggaggagcctggtgggcggcagtccatggggtcactgagagtcggataggactgaacaacttcactttcacttttcactttcatgcattggaggaggcaatggcaacccactccatgttcttgcctggagaatcccagggacgggggagcctggtgggctgccatctatggggtcgcagagtcggacatgactgaattgacttagcagcagcagcagcaggccttttgggaatgcaagaggggtgcacttaatcatttcattgagataaaggcattaaccagggctcccccaggtagaggacttcccaggtggctcagtggtaaagaatttgcctgctagtgaagaagaaatgagtttgatccctgggtcaagaagatcccctggagaaggaagtagcaagtcactccagtattcttaggagaaggcaatggcaacccactccagtgttcttgcctggagaatcccagggatgggggagcctggtgggctgccatctatggggttgcacagagttggacacaactgaagcgacttagcagcagccagtattcttgcctgggaaatcccatggacagaggagcctggtgggctacagtccttggggttgcaaagagtcagacacaactcagagactaaacagctcccaggtaaaccaggatgtcatcccagccaaaactgacaaagaatcttcccaagatgaggatggagcagccaagggcttaaagggattcttcatgaaattataggctcttccacatcattacactctgtattccatgctcagactgtgaattagtggattctgctttgctaacccaagtgaacttttgtgcttttagtaacagtctcagttctaatccctataccttaagaaaaacacaatgatagagacaaagatccagagagggataactaatatggtcaggagctgtggatcctaatggttggcagtcatggcatctttgaggatttgatgaaagctattaattctc

SEQ ID NO: 53294 - DNA, 1808 bp, Bovine  19866880426687
  misc_feature (1)..(1): n is a, c, g, or t
ntctgtctgtaactatatatcataaatagtaacacttcagactttgagcaaatgctaggccattgatatctattttttttttttaatgaggaaaaatgctttatttatttatttttttattcttcttttatttctaaatttttaaaagaaaatccatcctgaaccctcctccctccccataattcttgtaagaaaattaaaacaattcacttgatatatttttatccatttacttctaattttatatgcaaggctataattcctttactcaagcctttctctaggtgcttaagctagaaatctatgtgattctatcacacaacaaagactcaaaaattctaaatttctagtaccaagaaacagcatagaataggggacattctttaaaaattagttcagagatattacctctttgcaaaattcaaaaccaaatataaccatctgtgaggttaaagtgaggccaaaaaaaaaaaaacaatcagatactacttttttcagggagtattacatttaaggaggaatcaaaaagctgtgacaaaatagtgtataataacacatacgtatcacagtttattaagaaccatatgatcaaatacttgaattcctttattcatattaccaaattaatcaacagaaaaattaaattatattttcaactacatcttaaattatgttactcaatttttcaggaaggaaatttaatgccttagtgacatcagcatttaaaaaacggtacagaattgcttacaatttttatctaccttttgattctcaccccactgttaatatgaaaggttgctaacacaaaatgtgtacgtgtattctgtctagtatgcctatgtttatgtggcttagaataaaacagtatttctacacacacttctaattcttttaaattacaaatgctaatatttactattttaagaagtaccaaaatatccctaaagtacacaggttgctcttaattaaaaacaattgcttttgcaaagagtgttggtggaaccaatgggcaaagaatgggccaagcaaaaaacgcctagattaaaccacatggtgggcctgtttaaagggacctttaaactgataactgtagcagcggaattccgtgattaaaatcatttagagcccgtcgttcagttacccactgacacaactgaagaaaagcccaccagtgaaacagaccgatgaggacctcacgtggaacacggcggccacagctggtgacagggggttgtacaattgagatttgctgagagaacgaacttaaaggctctcaccaataatggtaataataaagataaacatgtgaggtgatggctgtgttaattccgtttcacaacatgcacctacatcaaatcacaatgatgtatgctacatacctacaactgtatttgtcaattatatctcagtacaattggaaatagaagtaaataaataaacgagaattatcttggtttgatggataggtaaattttggcactttgaaaattacatattctgacattgaagtgattcctcctggtttcaaatccagatgccagcatgaaactcaccaacaacgtaatcctaggccctgaacctacccccttcctgcctggaaccgacttccatgcttctcttatttgaataagcccatggtaactcctgctgcaatttccccagagacactgcttctgtgaggcctaatgtggagggacctttttttctgtgtgtttttcctgttatctcctactgaaagtaaaatgccttttgaaaaaaaggtgatgtatcatattacaaaaaacatcatttgtcaaaaaaaaaaaaaa

SEQ ID NO: 53295 - DNA, 1207 bp, Bovine  19866880492205
  misc_feature (1)..(1): n is a, c, g, or t
ncaggctacatacagtccatgggatcacataagagctggacacgactgagcaactaagcacaatatataaactcttaagtggttgtacatgtaaggatattaaattaaagcaaaatatagtttcctctatttaatatgcacttctaaggaaaattaaggccaaattctcaaaatatttaagaagtcctagtatgactaatggaatgctttgggagcaacaatgatattatcaataatttaatcacttttatcccaactagatttagttcatacatatattcaccacacaaaacttcctgcgctattttgggctttcttcattgagcttaaaagccaagaaaaaaaaatctttatggagtgagttaccagtagaaagtatttcagtgtgcttttgtagtcttagaaaggaaaacgtactctaagaaatgaggtcttgtaaagaagtcactcctaaaattaacatgcttttattgcagttaaaaatatttagcaagagtttaagttacacttaagggtagcattaaactttgttttaacttcagttgaattgcttgatcctattaatctagagttatgtacattacacctacagattgcaatgctcgtaaccatgtatgttttatcacttgtgttaatacaataattcatattttaccagacttacttagtaattaaaatctacacaaaccaaaaagaccatctgatgtattaaatttaataataaaccacccgaagacaggacagtctctatgtctgtactcatgcaacactactctcatttttaaatttctgtgtaattaagccgctattcccttgggatcagtaactcctgatggtgttattgctgagtgaatgacccatggaaacaccaagaagaatacactttttactgatcagcttatgaaaatgaccagtttgattgaggtttggaaaaacagccttgctccaacatggctgtggtgggttatgtatgcagaaagcaatcagtatactaaatattcaatttttttttttattccgagatatgggtacagccacctcagaagaacaagtaaaatggaaaatgtatattcaatctaatgtaacaaacattattaatagggcatcttaagtaacctgtgatcatgaaatgatagcactggataagcatctaagaacacaaaagcacagttagatttttgcttaatgatattaatcttgtcttttg

SEQ ID NO: 53296 - DNA, 1661 bp, Bovine  19866880574203
  misc_feature (1)..(1): n is a, c, g, or t
ntaacttgtctgaggtcatccagcaggtgggtggattccggtttgaacctagatctggctgtagcatgagctgctccgctctgcatcccccaagggccctcgttctgatgcatctgctgcaagaatcggtcactcccctctgagggctctctcttgccccagcggcagaagttccagacaaatggagaagtcggtagctctggaagcagagacagagttggagggtacgcaccccagctctctcgcttctcaggcggggtaccctgaggcatatgtccccctccctccctcacttcctgtctcctagctttgtgggattactgcctacccaagtctgattctggtgtcggggtctgtttcctggaacttaaaacctagccagccttgtaccatgctagactgctgtgagaactgcaggagaatattggagaaaaggacgttcaaaagttgcttttcaggtcttcctgagttccctttgaattcaaactatataagccaggtgtgttcaggtctgcaactctggggagagagcggtgaattcaggacactgagggtttgtagagctgtgaaggccaggtggcttgtaggttcttggttttgtcctcagccacttgcgagtcctcggacaagtgtggaaaaccccggaggcctgcttcttcctcagggattctgactgagatttggggtctgggactcgaggtagtccagcccaggttgggctgatccacagttggagctggaatgcatcactacacgcagcttccaactttgcataaaggaaataaaggccctggatgctggcaggcaggaaaaggcatgatggtaaacaaggaaataagatgggcagagataagggctgtgcagtcagttccaggggaaaacgtccgttataatgcagcctcttgggtcaagtccgagtgaaaatccccacaaactacaatgtgcccagggctaaacatgcagcatcatggtgagtttttctttcccaggaccatcgggttaaattacagctctgagttgtttcttctcaccaacacaatacttttagacatttaataacttctctgcagacccagtctcacccttcagcggcagtggcaccttgcctggatggtggctgtggcatcggctgaaataattcctactactttctcagaggaatttgtgaaggggccagatccccagtggaacttgagaataaagtgacgaaagcatcccacgtggcttttctcccctgaagtcctccatggctccctgcctgccgtcaagcttgggctgtgatgttaatttttccatctgctttggctgcaggtaatttggagacaccgacgtcatcagaccatctgttcagtaaaactgcagcaaggcttcccccgccctgtgttgttgacgccttgacaaggactcagggctcttctcaatatctgctgggcagagacaaaattgtgttgcaaacagtcccttagcatcgcatcaaagggtaaggacagaatactaataccatctgtaattatttgtgtaagatgcaggtgtaatcaagtcactaaaacccacgaccagggaaagcaggcagttggcatgtgagtggccacacaacctgatttgctttcttcctgatggtttcctgacggactgggattgtacaatctgatctctccagc

SEQ ID NO: 53297 - DNA, 677 bp, Bovine  19866880734600
  misc_feature (1)..(1): n is a, c, g, or t
ntgtacaatcttttcatacacagcgtctgcattctcgatcagcgccttgagggactggatcatctgcaagggaaacacccgggacaggcggtcacacggacagctggatgcaggagggtccctgctcgggccaggccctcccccggcgtggctgagcgaacgcagccacaggccccccacctgacaccccactcaggttcacggggaaactgatcaagtcacacctccctacacgagcgataagaccagacggtgaggaatgtgtccccaaggtgctcacactggatgtgaccctcgagccagcaccgaactgagtccctttcagtatgaaaagaaatggacacgggtgcacatccgatccgtccttcatgttaaaacctcatcaccttatagaaagctgcagcacccaaacgcctcactcaattcacccaagttgcctccgtttgagaagcggtttaaaacttccgatgaggatcaaaaacaacatttatgtgatacatcaggaatgctatcccccaagccagtgtctgcagcgtgcctatgagtgattttcgaattccagcgctgaggtcctgctccactgcatgtgcttgattcaggagctatgcctgaattaagaaaaagcaacagggtgcagctgacccattattttattcaccaaagtgctggggaaagat

SEQ ID NO: 53298 - DNA, 1875 bp, Bovine  19866880817353
  misc_feature (1)..(1): n is a, c, g, or t
ncggaatatacgcatattctatgacatagcaactcaacttcccaatatcattttaaagtacagaaaatacatttatgggaatatacataagccagagaaagccttgaaagaacctgtaaatctctttcaacaaaccaccaaaaaccccaaagacaaacacatcctttaaacccatattatatcaggaattctatcagccccaatatgaaaacctccaaataattctatttatatttcatataatctattagcatggattaatagaaataaaagcctaagcaactcactgtatttcctccaagaacaaacattaaaccattttaactattagaaaaattacatctccttatgcccacaggatatcagagcttagaaggaagataaaaaaatcacaagtagcagggaaccatatggagagagtcacagagcttgtgattctaatggtagctgcaaacgaggtcacttatccctccacggccacactaactggtcaaaagcaacagaagcctcctcagcaacctccataaaagcaggctgccccagcctgggcactttcagtttagagcacagacacctgctacccatcagtctctgacgagacagcacgcgagccgaccagcactacgcggttcggcttgctctcatctctcctatttataaacagagccttcagagtatatgcatgcgcgagtgcagcatgtgtacacacacagctatctatagcaaaaaaacaaattctcaaaggtagctgtttggaagaccatatctcgtgctattaatactcacatactgcagtattacataacaattttttttccaattctgttatgctaatatgcaaatagatgaactcaaccatagctagaagctaaatgtactgatcagtatggccttgtgtgtctctaactacaaaagaattttacatgatctctttctgctctaaaaatcccatgaatctacattattaatcacttttaaatccagctgctcagtttccggggtggtaatatccactattcccaaatccgtatattcactgtactccaagaagatgcctgaatactgaattcacagcaaggaaggtgctgaaggcatattctgtaattttataattacttgacaattccaaaacaatagtagggacagatgtcaccagaaaaaaactcacctaaaaacaaatagttactattatctgctttaccttccaggaccctaaaaactgtaagtcaaatttgtaaaaggaaaaaaaaaggaaatgatcctcttctattaagctttgaaatccatcaaaggagagcagagagaacaaaactctggtttgcagatcagacacaaccctgtggtgaggaggactggacgatggctacggccttttattggttagtccacgctggcttcatctcaagattcagccacaagaggtccagctgttttaattaaaaatcagccgtatattctaggactggtagaaatgactgattgaggaacccgaacagcttggacaaacaggaaaacaagggaaaagtcaagtctacattacagaagaggaaggggaaagagggtgaaaaagcaggcagagcgtgcgcctccaagtccatcgcgtggtctgggcgtcggcttagccccgcaagctcgtcatcttgcctggaaatcctcacaacttgaggaacaggcttccttgtgcgtaaaaagggaccaacaaccgctccccgcacgatgaggggcgacttgcgcgagacgagtgagggtcctggtgcctcaccctcaccagtccttgagttgcagggaaagggtgcatggcaggtagaaatgcaatgaaaaggtagcatgctcacgtcacgggtagcagcatgtgacacaatacgctgagggagt

SEQ ID NO: 53299 - DNA, 3050 bp, Bovine  19866880995251
  misc_feature (1)..(1): n is a, c, g, or t
ntggttctttccctgacatagtaacttctttgatgctgaggtcttgatgtgtatgtaacaggggaaattaaagtgcctagtagagtacaatgtcaatgcaattagatagagtatgtggaagaatttgaaattgccttcaatctccaggtccgattatgggcaccttgggtttttaactgtaggttgtatccaaaataaaacatgttatcaccatagttctccagtgtcaaactcaggcttattgcctccataaacactttgcacactgatccatcatctctgtgttctttaattcatccattctccctgcaaagaccaaattaatctacactgacatttcagccataaaaatgagccccaccatctctgctctgcctcctttttccttttaaacacacagcttaaatcttaagtcttttataagcccctttctccaccgtggtgtataaacatttcgttccaacagtctactgttctcactcttacttgtagggaaattcaaaccttctgtctagggcagggtgttaggaagcagtctggtgagtgactcagctccaggccggagatgctttggccgggagctccagtctgaaccctagccatttggtcactgcttgtcataagacaaatcctttaaaccgtagggatttcattatcctctttggtcacacagggaagaaaacggctgccctgcctccgaacctgccccctgggatgggtgcagaccaacactgacaagttaaaggaggccaggaatgctgatcaaaaagtagcaatttgagctcacaagccatttcccccaaaggtcaattagacccacaagatttctccagcacacacaggaagtctcagcctcatctatatttaatgcacttcccttctcactggtccccataaaggtgagtttggggtgtgaaaaccatttaccagtaaaagtttccatgcggctacatttcagagccccagtcaatggcctcctttattttcactttgaatgtaataagtgtctgctcaatcgcaaaacctggatatttgttgaaacatacacactccatccccttaacgacgttggcaactgacttcaacgtacattatgttggcctggggattccgagactacccactaacccgctggtcagctcgctgtgtgctgtaaaactctttagtctttgcagcgcgtctcacaagctaatgattcttaagagaaagaaacataaaaccatgagaggacagaaatcgtgtccttctaaattacaatctggtcaagagaaaacagagaggctagcccagcgaccagtgactgtactggggaaaaccatttatccatcgagaaaggtggatgaggaacgtggctaccaggttggaaatgggattattccaatgcaccaaaatgaaagaaagcgttagtggaattggagggttcctggtggggctggctcaagagccctgcttgattctggcctgagtagagggcagggatgggacacgtatgggttagtgtccctgggcaaatgcgcatcgtttcaggcctcagggcaggccatgtgggcatcttgagatgagcaggacatctgaaaagcagcctctcaaccctaatacaggcctaaacatatgtccttcgggggtgagtaaacaggtcctggggtggacctgcttggagattcaagttttatggatttgtttcatcaagactctgtctccaggatctggaggtaggacttctgtgagcagggttcattggaaggactgatgctgaagctgaaactccaatactttggccacgtcctgcgaagaactgactcattggaaaagaccctgatgctgggaaagactgaaggcaggaggagaaggggatgacagaggatgagatgggtggatggcatcactgactcgatggacatgagtttgggtggactctgggagttggtgatggacagggaggcctggcgtgctgcagtccatggggtcgcaaagagtcagacacaaatgagcaactgaactgagctgaaccaaactccagccctcaccatcacagacatgctgatacagagcttctatcatcccctcttccctggtacatcagacggtacagatctgcctgcagtgccggaggcccaagttccatccctgggttgggaagactccctggagaagggaatgctaccagtctacccgctccagtctccttgcctggagaatcccatggacagaggagcctggcgggctgcagtccttgtggtcacagagtcgggtgtgactgggcagctaacaggttatacagcttcccgggtggtgctggtggtaaagaaccgcctgccagtgctggaggcataagagactcaggttcaatccctggctcaggaagaccctggagagggcatggccacccactccggtattcttttctggagaatttcactggacagaggagcctggtgggctacagcccatagggtctcatagggctgtagccctcacacgactgaagctacttagcagtcaagcagggaaagaaggctgacaggtgaagcctcaggcccatagatgagagacaagcccatctccagttaagagtttcaggaatgctccggtgggttttaaccccatcctgcccagaggcggttctgactcccaggatacgtgggaaacgcgttgcctccatcgttcctcacgagaatggccgtgctggaagggaagcggatctgggccccctcagacggtgtgcacagctgaggcagaaagcgtagagcagaagagggagcaagccctgcccgttctgtgtgagaggcggggaggccgggggtcccggccgcgggaaggggcgaggcgaggggcccagcttacttcggctcctgctgcaactcgaggcagaagtcctgctgaggcctgagccgagcctcatccggtgggacagctgaccgcaagctcctccagcgcctctggaagcaacgaaacaacactcgcgttacgtgaaggcggcaagaggactttcagcagggatttcaccctgccggtgggcaggagctaaccacagggctttcccagagctg

SEQ ID NO: 53300 - DNA, 1949 bp, Bovine  19866881100223
  misc_feature (1)..(1): n is a, c, g, or t
ncctcacctgtactgtttttaaaagtatttggaggcatctccatctccgcagaaaagtgtgtctttttactctggcgttaggagattgagtgaacctaagttgtatgcgtttagttttcctttagttaaggaactgtgggtgtagcacatagggtttcatcacttttttaactttaaatttgagctcactaacattcagaggcaacgtagaaaacagattccagttctgctacagacgagctgcttagctgaggcacatgatctctgctcaaagtgaaaaccagtggaagtaaatacaagtgggaccaagattctgggacagtagaggcgaggaagtcaatagcgaagatcagagagactacagggctactgcttaggaaagataaaacgggtaaaccttcagccagactcatcgggaaaaaaacagaaagggctcaagtcaataaaactggagatgaaaaaagaagattacaactgacaccgcagaaatacagaagatcagaagagactactgcaagcagctctgtgccaataaaacggactagccggaggaaatgggctcgtccttagaaaggtagagtctccggagcaggaggaaaacagagtgtgaacagaccaatcgcgagcactggcctggagcactcccgcagacagaaggttctggggcagactcggcaggcgggggcctgggtctccccctccgcgtgcacgcccttcctttctcggggtgccctcatgtcctgccgccgcctccagccaggggtcctggtcccgcccgggatgagggccagctcccgccagctccccgttgtttctaggcacgcacccttctccagcgatgctttctcataggtttgtctgccggcggggagggagagacagcctccatgtgctgtagagagaacaggggtggttcttggcgacagccgatgttggggaaggagggaggcgcggtctctgcctcagcctggactggggggggccgtcttgtgcctgtggcggggtcagagccctgaagtcacccagcagagcctgtgaggagcagggccgtgtttctgccgccacgaggatgcagctgaagccaccgcttgtcccgtggatgtgggcatgcaagcacgcgaggatggtactaacctgctttgaaacttggcttttccctctgaatagcaaggaggttccaaacatgttgttgtaataaattagaaagtggtggtccagcgttaagcaatttgttgagaatggcagaataaatgatcacaatgctgagaaaatgctgtatacttatttcagtgaataagtgggtcagtacctccatttatctttgtgattcctttttactaggggcagctttgagatatgatttataaaaattataaatgtacttaattagcgtgttgtccttatgaaaggtgaaagcgtgttgttgaaggtaaagataaccctcactctgaaactcatgcatttctttcatgcccttatgcatggctggttataaccttaatttcatgccaacttaaatagatagaatacaatctaaatttaaaggattggaacagctatagtacagcatatcttatggataccattactgcagttttaatctcttctgcacttgattgttctagcatacaactgtaaagaaatactgtgccatccagcttttctattgtatcttggcattcatatcacaaaagcctctctggttcattttgaaactttgagggaaacgatacctgtgtgatttaaagtttaattacttaacttctgcaaattgctttttcgaagtataggtatttgaaaaataaaagtggttttaaaatttcagacctaatgaatagcttaatcacttttcaaatggtagaagttttattcaaaatagattctctcaagggcaggaaagttagaatgccttgcctttgtatgagattttgcatgctctttactttatt

SEQ ID NO: 53301 - DNA, 880 bp, Bovine  19866881154686
  misc_feature (1)..(1): n is a, c, g, or t
ntgtccctgttgcggcagcgcaggatcgagagtgtaggcctcgtcctgagccacttcaggtaccagcttgaccccctcccctgccggccgcgtgaccccagacggacaagaggccacggctgaggctcggtccctgtgggcccagcgtggtggtggagggtcagacagggccacgtgtaacacgcgtgcctccaagcggcgctcaaacgcccgctcacggctttctacagtgcggaggggcttcctttcacgggtatttctatggcctgccgctagtgattagaaataaaggacatggaacgcaggaagaggagcagtgggacccctggagacggggcgatgggcagggcaggctgtggtccccgggtttcccgcccgaaaccgcagcttccccaaagttcctctagctttggaaccagcaggtgtaaacagctgagagggattcaggttcctacctgccagatgctcctctcctttttggatggctggcctacttgatacttagttgaagcctgattccatttttttctcgtctttttgaaagcagaagccgtttttttttgtttgtttgcttgtagttgcatatcggtgtttacactgctgtgaactttgatctgaaaagcggctttgcccttcaaaagaatttaacttgtttgcctcttctgccctttggataaattggtgttacaaatgtctatgactacgtttactttggaaaatagccctttttccccaggataaaataatcattaaccacgtctattgtaacacggacactaaccgttgtgccaggcagccccaggataaccaggtgtgccgagtacggcatccttgggacactcagcccctgctgaattacagagcgccttctttcttccca

SEQ ID NO: 53302 - DNA, 1535 bp, Bovine  19866881241489
  misc_feature (1)..(1): n is a, c, g, or t
ntctaaggtgggaatgcgcatggagcactctcatttcctactttacgacttctgggtattaagcaaagcatgctttgcaatctcttttcaagagcaataaaataatttccaagtagtaacattccaatatcaacatatgtggtgtgttttctagcctgatactggctataaaacctacacagtgtctttccctgaactgtgtcttgtagggaaggagaatccacaggctttgagaacagatgcctgacactgtgaaacatgatgtgactatttatttgcatcttttcattggtaatcaagcatgcaaggtcacttcaccgtatacgcttataataagaaattacagatatttttctctgctaggtttacaagattcatcagttaggctatgacagaggaagaccattgtacactaggcaactttagttctacttgccattaattgggggaaaaaaagcagctgtgccatttctgaggaagcattatgattctgcatattttttagacatccttccgatggagaaggtgttaaactgagaccattttgatggtccaaaggaatcaagtctgtcctttctatataacttgtattaagaacaagaaaaattaagaataattgtatacaaaacaagtataaatttatgttcctgaaaacatgatccctaaatgaacacactaatatttggagacatctaaataagagaaaaatgacgtgatattaaaattcaacctgtcacgatggagtactaagcacgtgatctgggcttgcacttattaaaacgttgtagcagaaagaagtgcgcttgagttcttggccaggcaacactacttccgcattatccccagagaaagggctgaagattaatgcaggcagagcaagagaaatcaacgcctgcttattttaaggtgtgattcttctgtgtagaaaagatgcgcacagaagtgctatgcgtttgtttgtctgacaaaggctagaaccgtggtcacaagccttgacctgtgagggactgaattagctttgacagtattgttctgggcctctgaataccttcgagtctgcttttcagtgattagctgaagaaaatgcgtttgcacacataatgaaccctcttctatcctcaagtttctatttaacggtcagggttgagcagccaaaataacttgagaagctaccgagagtgtgaggcaacgacgattattgaggcttaagggaggcatgtgacttaagccatcatggacatagccagaccttttgaagcattccttcaggaaaccctattggaaaatagcttgagggtttttgttttgttttgtggatttggtattgactccatttggaacattttaaaacatttggatgctatttttgaacaaaaattttctcgcatagaaagaatcaagatgaaagaaaggagttctaaaattattttaccaattccaaaccttcaaacaacaatggaatattttatttggaggtccacagggcaacactgcccaatttggttacaagctttccactacagtgggctgccagg

SEQ ID NO: 53303 - DNA, 1521 bp, Bovine  19866881297167
  misc_feature (1)..(1): n is a, c, g, or t
nctcctgattgcattatctttacttgagtatcagaagagagtctgttgtgcttggtgggatgtacagggtacatcaggacgtgctttacgcgatgtacaggttcaagcttgggccaccctacagtgggcatttcacaataatttgtttttagagcgactgctgtgtctgttctgcatcaagcgtttgaatgcatgttcctaaaggctcatcttccaggcagcctttgaaaatagggcttttgggtgttgtgtgtgtgtgttgctcacacagggtacacctgcaagccatctttcagccattaacttccatccgtgtgtcagattgtattcagtctcttaagaaaaaacatgtcttgggaggtttctctccactttgtttcaacaacagaggattttcatttggagagataagtgtctgaccctggaaaaccaatctgccagccttgtccagctctggcaacatcatttctttgtattccaactaacttggtttaaaatgtcttacattatgagaattattctcttttctgagaaaaactcccttaatcttctaaatttccttgggaaatttttaacatgcattatttttttcttaaaaaagcaaaagctccaggctttatccatttgttacagttagattgtctttccaccatttagataattatcccacccagagtatttttccctagaaacaattaaataaataaaacactctagtactctatcaagagaggagatgtaagagcagctatcggggcaaaactttcccaagtgctttggggaatctcatgttttaagagattatcgtggtctagaaaatgaagagatttgttttaaacaaatggaaatttctggtttctcaaatgtgtatgagaaaatgtaatggttttgtaccagctgtctagggagttgggtccactgaagtcccattgactctcaatttgtgtggctcaaaagttactgaaggtattttatgtccttttttaatacaagtgtgtatgggtgaacattcacacacggcaggaagccagcgttgctgtgaatcacgtttactcctctgtctcattggcggtggcaggggtgggtttgctcttgttcatttgctgattccttttgttttgtctaggactaaaatgacatggatggcagctctttaaaacagtccagaccttttggaggactctggggattttctttgatttttgttttcattttcgtatctttgcccccttcattttaggaagaagaattagaagcccaaatttccttccttcaaggacagttgaatgacctggatgccatgtgcaagtactgtgcgaaggtgatggacactcatcttggtgagtgcagggctctggccctgggagtggtggcagcaccggccgcaggcgctggtgctgagtgcttcccacgagtgaccccgtgtcaccctcgcagatgaggcgaccagagcgcagagattagtcagctttccccaagttataacaccagtcagtgcagtagagattcagaatcgagcag

SEQ ID NO: 53304 - DNA, 710 bp, Bovine  19866881889176
  misc_feature (1)..(1): n is a, c, g, or t
nataactgctgtagtgagatactaaatttgggggatgaaaaagttacaaatggcaattcacagagttactcatatctactgcccaacaaaatgaagcaagcagaagtgcctgctaagaaaaactttcagaaactaaattcaagacgctactcatcacgtgtttcttgcataaaaagcactgggaaataaagtggagcaattactttcctactcaggaaagagaaaccttaaaagttaatcacaactaaatgaacgttcaagtacggtctctggccatgctgcaaacaagacacagatctttccgatgtacccacggttgaaccaaataaccaaactcgtagaaaacttcattcctttttaaaaattccatatgatgccccactaatacagaaactactcatttttcacagacagtgaaaatgaagtgtgttagtcactcagtcatgtccgactgtctgtgaccccagggaccgcagcccaccaggctcctctgtccaaggaattctccaggcaagaacagtggagtaggctgacatttccctctccaggtgaaaatgaagatggagtcacaattttagctatgagattatagttggctttctttttccaaaccttcaatctaaaacttcaaagtatattattaaaaaaaaaaaacggatacaaaatttgcttaaattaaaatggaaagtaaactggtgggagggagcacg

SEQ ID NO: 53305 - DNA, 1153 bp, Bovine  19866880429685
  misc_feature (1)..(1): n is a, c, g, or t
ntttccaaatatcctgtgctgttcctccccacatctctgtggtggaatgcccactcatgaccccctttagcttcatcttggccatctcctcaccatcatgtgagcctcgcacaaagacctaagaaaggaacatggaataaagatatcctgagactgtgaaaattgaaaaccagcagactctggcccggtcatcatgtcatttgtaagggaaagcaacaggattatgatcaccagctagtgtaattcagtggtataagtagccaatcttgaatttctctgaatataacattaacgatcttacatagccattggaggaatgaaaaggatcaagggaatactcacatttaggctgcataatgactggctgcccaacaacaagatatatgaaaggtactgagtaggtaggtactagaagtccagattcccctggcatcatataatatctactaaccatcttaattaactgtagacttcgcagtgaatctggttagtatttaccctccttttagacttgggaacaatctaatcaatttgatgtgcaggcagcagaatgacaatgaggttttgtctttcataacagttacctttttcattgccagggtcctacctagaatctcacagcaagtctgagttcatttagacagtgcagagaaaaataccttggaatttgacactacagatttaagtcaggagattgcaggctttcatctatgcatgaaaaagtaaactttgggtttgcaatgccaaagacacacagtggagcaaattctcagtatccaactgggctcaaccaaagaggtgaatcagaattatctgtggtatgagagagagacgttatgcagaagtgaaacattacagactgtagaagtcactagtcactcaaatttatgagagatgctattgagaaaattctgagtcagacttagcttctgctcagagctttcaccttatctttgtagcataagccacgaatcagagaatgctggggaggagggtggagacaggcagggcttaggatttggaaaatgaattttgagcattctaaacttatgacaaagcaatgcttggtgctcatcaaagatgtttaaaaagggggaagtattctgaaaagcaagtagaagaaaagcttccaaaaggcttttctctatgaaat

SEQ ID NO: 53306 - DNA, 1659 bp, Bovine  19866880584004
  misc_feature (1)..(1): n is a, c, g, or t
ncaatgttgaattgttgaattgggagcaaataatagaggtgaaatgtggttggttcctgagagcaaatgaaatgctgctttctgatgagaataactttttctataactcctaaggaataatatattgcaaaaggtgttggagatgaatacaaattagagcaaaaaaactgaaaccttcagagaattcaagattacatttatactactaataatattgaatggttaactgttaatagacctctcaaggacagtaacggatgaaagaacaaacaaaagtaatttgttgctttctcactattaggctatagacattcttccatctagactgatatgatctccagtggggattgatttatttcttccacattcatgacactctctttcacaaccaggtgtaatggcttcttttacctctacggggaatggctgatttatgcatagacatttgttcaataacctttcttcaaagattgatgttgtgaaaaatgaaaaaaaaaatgtgaaactttttgacattttattttaatgtaatttagaaaaccatgtaaactgcaaatgaacctcatgtggaatgaaaatcacatgctgataatctaaactattttgaatactattaatctttcattaatacctggaaatttttcttagcagaattatgaaaggcactagagagactctcgtgaagttcatttaaaaaaataatttgtaaataaaagactggagagttttttatttgatccctccaatccacaatttcaaaattttccaacaagaagaggggactgctacccatcatgtaaaggaatatctgtatttatttatttattttgcctagagactctgctttcaaagacccctaaccatcaagaaatctttgaatagaggaagagaaagtgatgtgaaattttctgactttctgtgatcaaactttttctgaccttctctattcttgtttggagaagaaagcctgaaatatatagatgttgtccaggctctgctggagtttaaagaaagcgagtgaatagtctcatacttctggctatcttcaccactactccctcaaagaatgaattaaaaataactttattaattttattaacatatctataagccattgatgtgacttccaaatgttggtcagaccatttgagaaaaataaactacatgttaccgaagtgtatttcagggaatttcaatgtctggtgtctgactgaaagagaagggtcgcaagccaattgatttccccaaggaggtcattataaaaggcaagaggtctcttttccattttcagtgtagagtgtttattctcaagaatgggagtattaaggtttgtttgtacctgaagactttgaagagcttttcaaacatgagtcaatattttgactaatttaagaactaaatttaagaactaaaatctactaaatttaagaactaaatttaagaactaaatttaagaactaaaatctactaaagattattaattttttcttggttagaaaagatgaagctttttaaaaatcagagtttcaacactcatggtagccaatatttctggcatggtttcattaattcattcatttcttattaagggagtttctcaacccatatgaggattgagctcttaagcactctagagtgaaagacacattacaaaaattt

SEQ ID NO: 53307 - DNA, 727 bp, Bovine  19866880655241
  misc_feature (1)..(1): n is a, c, g, or t
ncaatggatttgtcttgacaatcaatctttttatatatccagacttcatttattattaggcatgtctgtttttaaaattgatacttctttacctttctgtatttagggaaatgacacaagagaatagcattaatttcctctgtcatatgggctgaattacatttgaaactttcaagagagattgtgtaatcaatttaaagagacatttgaaaagattgctgttaatatatctctaaaatgaattagtggcataaactgtagctaggtgatttaggtacagttgtaatcgttagtaatcccaggagaagatacaatgcatgctgtagtctctcaaccagtgtaactgctgaaaattctgggagactggtcctctgcaaggcttcccgatattattgctcctaggggaattttattccaatactgtatttacaacagcagcagccattaactatttctgtattactccagtcatagctattactgaattattcacctactattttgtggtttaaagaataagtggacttcatattctagggacagtgttagtcactcagttgtgtccaactctttgtgattccaaggactgtagcccaccaggctcttctgtccatggaattctccaggcaagaatactgaagtgagttgccatttccttctcctttctagagaaagcactgaagaaagaaagaaagtttgccgtagatctgtatatcccatgcatgca

SEQ ID NO: 53308 - DNA, 935 bp, Bovine  19866880681760
  misc_feature (1)..(1): n is a, c, g, or t
ncatgctgtgtacaaagaggttttacagacaccttcagaggtttctaaagcctagatagacagtgttgagcaggcagtgctagcaaaggacaccttcctggtttctgcgggtaagtgatgccttggggcagcagggagggggagctccaggggactgcattgcatttcttacctttcttttcttagcttccttcactggtaagatctgtagacaaagcagagggtggattttataaaatgcaaaaggagaatgctttggagggtctaagagagcattttgacattcagttcttttgcccttatgaaagtaaattattttaggaatcagcacttctctttcctccttttccccattctcagaagatgactaggatctaaaaacagtagccttttccccacattcccatatgtgacatgaggaatatgtttatttgaattggctcagagtcttatctgaaaaagcacaaggcagggagagtatgaaaccaagaatagagtattctgagaatggggggaagtgtagcgtgtagtactttcagattatgcatcctttcatctcatccaaattgtgtcttttattgaggtttccattttcatgtgggggtaaggtggtgagggatttctgaagagagacagataaaagaggttatccaagtaactctgaaaatgaatcatgtctgtcaaccagaaaatgtaaagtaagatttgttttaattgagacttcttgctgaattctcttttgtcttatgaaattgctttatctatagaattttttaaaaaataattccctcaggaaatgttggtgcccttttgatgggtgggggatgggcctgaaatgcatctatctgtcctttctgagagttcttttaaattccagtatttggtcttcaaaagcctagaagtttgccagtgtcttcctacttaatctgaaagag

SEQ ID NO: 53309 - DNA, 978 bp, Bovine  19866881097292
  misc_feature (1)..(1): n is a, c, g, or t
ntaaatatttaaatatattcatctacatgactctcttactaaggaagcccagatgcgtcaccaagttaggagttattcagtaataatatttgaatgaaacccattctgttagactaaattcacactatcaaagtcacattataaaagctttctcatttatgaacccattatttctttttggaaaatatataaaataaaatattcatgttgatttataatgataaaaaacattttgaaaacatttcttacattttgaaatttttgctataatgccaataatcagaatgatttgtgtagactaaaataattttcaaaataagagatgtgatttgctttttataatctgaataggaaatcttaaaatgttgtcctgagctaaataattcatatgaagtaatagaaatttactttccgaaggtccatgctatgtaatggtttccagtggggttgacaacatttacactgttggatggttggactggcttaaatatgtaaaacttttaacactagtctcatgttctgaaaatctattaggcagagggaaatcccttaagtcctacataagtctagctgatcacccacatctactttttgatttgcaaaggcccatagatacacatcttgagaatatcgagggtctgctgaattattttcaaaacaattcagtctaagatttacaatgttcagaggtgaccgattttaaagttcagcactggaattcacacaaattccttccaattctaaaattttataattggatcagtaaagaataatatatggaaatgtaatcaaacagcttttttttttttacataaaactgccatcaacataagaattcaaagttcagacgtaactcgagttgtcaacaaagacctcagtgacatgagattctgatcataaaagataggaaggattagaataagtgaagaagatacttaagcctgaggaacaactggatagattcattttctaaagaat

SEQ ID NO: 53310 - DNA, 1750 bp, Bovine  19866881098387
  misc_feature (1)..(1): n is a, c, g, or t
ncttttcctccccagacagcacacatgagatcgattctccgaagccccaaagagagttcaaatagttttaagaagtctgagattagagaggagagaagatagtcatcgtactaagaaagaaggcaacttgcattttgcagagcatacctgatgtaatcaaagccatctgtgtggatgactgctacatacttagaccctacactttgatcaagtgtactggcaaaagctgggcttccctggtggctcaggggtaaagaactcccctgccaatgcaggagacgtgggttcaatacctgtgttgggaagatcccttggagaaggaaatacaacccactccagtattcttgcccaggaaatcccatggacagagaaagttggagggctacaatccatggggtcataaagagttggacacaactcagcaactaaacaacaacattggcaaaagctaaggattcagtggtgactaggaacaagggtctcaagatgagtcaagaggcaaacatctgaacacacactgaactaggataagagcaaacatggcatataccaaggatgatctagttggatcataatcagttgcagctttgtaatttcaacattgcagttttataattcacactagaatcttagtgggaggtaagggtgaaaggttttggaaacacacacaaaaaattgacacataaaatctgttttataatcagctgtatgtgactcattttcaacaaattcttccatggttttcaaatattattatagataaatgagaagactagatgttcctgcctgtttcaatcaagttttaaggcagatgtgaacaaaactacataaattttccacgttacagaatcctgtcttaaggaaatgtatttctacccaagtatactaaatgttgtagtagcatttaccgtgttctgtgtatctgtccatgggtttatttctcttgaggacagtgtctcacacattttttactgcccatacgtgtaacataacaattaatgaattaagacattagttatattaatgctatacattatatatattatattctatagcagttatatattaaccagtgtggcatgaaaactgttattctaaccattgggtagagaaggatttcttaaaatgacaaaggaaataataatacccaaattgaacattttatcatattaaaatcaaaatatctgttatattttgattatataaaacactctttgaaaaagcaaagagttaagatagagactacgtaattgtttgtaacatgtataactgcataagaataaaaatataatacttctacaagtcaaaaaaaaaattcaaaagacaaaaaaagacataaataggtattttacaaaagaggaattgtatatgaccaattaatacatgaaaaaacatttgatttcactagagatgagagaaatcaagatcacagtgagataatattctagaacaattcaattgcaaacatcaatgattataaggaccaggttctgtctctcaaaattggcattatttttctgtgtgcaatacaagtgggaagacctacttacacatgtaattcattattaactctgtactctttgattaacactggagaattaccccagttctcaatgacaaatgacatagtgttttcatctgacagaagtttcctcatgtgagatagataactttaagagtgtcataaaatttgatttgtgctattccttgtcaaacattaaattgcagtgtttaaacaaaaaagcaagga

SEQ ID NO: 53311 - DNA, 700 bp, Bovine  19866881242157
  misc_feature (1)..(1): n is a, c, g, or t
ntgagttgagttctttcttgccatgttggactttccttaaactacttctgaatctccagggaagaaattttaatctgagtatctatgtggtttggcagggaattctcaatgtgtagttagtaatatgaatgagttaaagaaaaagtgcacgctagattctagaaaaagtacaaggataactgtctcttgccttcctcttatgtttcccgcagtgctgctgctgctgctaagtcacttcagtcgtgtccaactctatggctagacaaataactggtcctcaacaaatactgctttatccattttatattcattcctttcttgatgatacaacacagatgtttaaattcagggcagtgtaaatggcaaagatgaaaattagcagacccatgcatcaccgtcctatttatgcttggggagacctctcatttattcagcaaagtcttgatgacttcacaatagacataatctctaaggaactattggttgagcctgagtctctgctctaaatgcagaatgcaaaaattcaaatgtactataatttatatgcatgctgatgtagaaagctgattgtatcagtcaaaatatcttcatttgttgacaacaaaagggttgatcttaattccttaagtgtatgctctgaggcacagttttaggtagcaaacaaatcaaatacaacaagaagagtaaagtaaaagagaaa

SEQ ID NO: 53312 - DNA, 682 bp, Bovine  19866881413591
  misc_feature (1)..(1): n is a, c, g, or t
nggtgacatgttaagcaaagttgaaatataatatgctgagtggatttgcaatgcagagcaaacacccaaaccaaaatgaattcaataaaacagtatctatcatgagtgtcacttactcagttttacctattccaggcaccagattctttcattcatgtcacaggcactaatcttgtggggtctatttagccctgatggttatttataaaatatctcaagtacttctttaactcataacttggaataatttaagagaggcaacaacaggtttaattaagaagacctaagcttatgccatgaaataagaagcacaatactgtgctgtataaattttatttgtccgttgcccatctctaccgcattctccactctgggaggctaatgtgtgtcatcagtggtctcccatgtcctctggcttccagttgatttagccactgggaagtgggagttggaaatagaataaagagggcagagaggtcaggatatttattctgctagttccctacccatgaagttgcttcaggctatgtcccttgacaaaaggttactgctcttctcaaggtgctttcttatgactctcagcttctggccacttctccctcccctgatatcttgggcctagatgtagtaacatctccactgctgcaagacccagtttcttatattatctctggggattttc

SEQ ID NO: 53313 - DNA, 1307 bp, Bovine  19866880590440
  misc_feature (1)..(1): n is a, c, g, or t
nacctgttctgcacattttggtgcaagtattttacatccagaaagcaagcggtgcaggctgtgtcatttgctgtttatagcaccagctgattctaaacctggaaaccctgagagccgaactggaccagatgaggctacgaggggctcccttcctccatgggtaggccgctcccccaagcagctcccctcagcactgtcgagtgtgacaagggcctgtctggtgtgcggacagtatgactgggtgttgctcatggtcacacctcaaggagcctttagcttcgtggccagtgagagagaagagacaaacattgttccttagggtcaaacttggtagcacggagtggtagtcacaggattgacaacactcaaaaacacaggcagaggtttggaactgggtgggaggggggcgaccagttgatatttgggtgtatttatttgaggggcctgacagactgtgacactgctatttctttttttttgaaggagaatctttattacttttatgtacagaaaactccctagtgcgctcagcccagcttggtggccagctctttggccttcgtcttttcctgcttggcgatgcgcgccaccgacttcggccccaggacgttgcctccccagtgacgacggatctcatcgtatctgtcattgtaattggtcctgatggcttccaccagcttagccagggcactcttgtcctccgagttgacttgtgtgaaggctacggtggtgcacgtcttcctgtgcaccaggcgccccagccgggccttgcccttgatgatgcagtagggaacccccatcttgcggcacagggcaggcaggaagaccacgagctggaagacagcgttagcgctacagttatctgaagcaaaagcgacactgctatttcttaagagtcgcagaaggttaataacctgtagtcttttttacgtgaatggagactgagacatgacttgtcattgactatggtgggaggaatcacctggcttgtgaatgaggcaagcagatcaaagtgtaacacaactgggtgcagatttctcaagcctagttcttctaaagcagagttacaccacatgtatgaaacgctcaaaccaggaccagaacttgctgctggtacaactcctgtgcgccagttcaaaatccatttcaggtccctccctggtcattaagtaaccaatgtgggcaaagtcctaacattaaaagtgaaaggtcttaaaaacgctttttccagaattctgtatgtattaaactctgccacctaatctcctgttgccgaagagtagtgtgaatagcttatacaaacctgt

SEQ ID NO: 53314 - DNA, 733 bp, Bovine  19866880619132
  misc_feature (1)..(1): n is a, c, g, or t
nttagcatctccaaatcaacagaagctcgcagagcaattaagaatcaaattctacagctgatgactctagacagcaacagtatctgttcaagttggctagaagttgatgtaacaattccagattaaggaagcccagtgcatttctcatctagtctaattagattttaacgtcttcacaccttgtcaattggttggagaaaattacactgggaaagcatctccgcacttctgtctctaataattatcctaatttgttttgctcactttgtgtcgtaacgtagcaagaggtagaaacaggagcccagcaggtcagcacgtatgacttcactactcagtacatatttgtagctcataaacatggttcattagttccccaaagacaagaaagttttctgcagcagacacttctggaagcagtaaaaattatgtaatcattcttgaagaacacataacgttcgtcattggaataaattttccatgcacataagcacgtgtaacaaatagcctagagttcgaatgttaaaaggagctctttaaccacgcaaagccacatatcaatgctttctttaattgtgatgaattccctggtcttacctgggaaggtgacatttcatggcaaataaagctgggaaatcacctgggacatgaaaagatttcctgttgtgtaacctgtttcctgtaacggcctgcaagttgtgaacaaaagctaactgggcagtacagttgttctgag

SEQ ID NO: 53315 - DNA, 1404 bp, Bovine  19866880633372
  misc_feature (1)..(1): n is a, c, g, or t
ntactttctgactctatgaatttgactattctggatacttcctataagcagaataaatatttgtctgcttccgtgtgctcagttactttaattctgtctgactcccttgcaacgctatggacttagccagccaggctcctctgtccatgggatccaggcaagaacactggagtgagttgccatgccctcctcgaggggaacttccaaaacccaggaactgaaccccacgcttcctacgtctgctgcactgtaggagaattctttacccactgagccacctgggaagccccatatttgtctgtgcctaatatatattggaatgacattttaaagttaacttaatatgtagtacatttttttgagttgagacttgaaggtataaatgaaacattgcctaagtcttttaaaatcagagggagagaaagagcaaaagagagaagcatgtgtgtgtatgtgtaggtcaagacagaaaataaagaaaaatatgttctgggtggtctaaaagaagcaataaattaggtaataaaaataaaaaacaaattaaaaaaaatgtcaaagctgaatttaaagaagtagaattcccaatgagagatacattggatggcgaaccagaaccacaagggaagtggcaggaatcattacttgactcatgttagaaaaacacacacaacccaaacccactcttttgtcttttccagtttctaaatatgttgacctttcagggacccatctccatttcttctttttgttatgagaaagttgaaaagggctataatttcatgttggatttctcctaggtgactgaagctttcaggtgaaacatctccgcgttgaagagggaccacttattactcagcagttctcacagagcatgatttgttctttgtaaaattctagcctggagcctttgcagctggctgagcccctaccctgtggatacatcacagaaaaagagggcctgcattagtgacacgtgggctgtatttaaacactatgttatggcctcctgcctgtgtgtaggttttgagaaggttacaacacatctggttttagtctgtccccacagtttgagcaggaagtaagtaggctctgaagatgctggattccagccaattcaaagggggatgtgaggctgcttttcataatgaaactgagtccaaagagtagctgagcctctcttctttctccctcttgttaatgtgaaacacatccttaaaactcgtcatttcaagccacaagcataaaatcaaaaatcaggttacagtagtagacccattacaaggtccatcatggcaccttaggctactgtatttcaaaataagtagcctctcaactccaggtttcaaagctttctggagccctaggaattctgagtcctaaaataaacactttcaggctccccgt

SEQ ID NO: 53316 - DNA, 749 bp, Bovine  19866880644397
  misc_feature (1)..(1): n is a, c, g, or t
naagcacacagcatatcttgaaattttattttccaaaaacagtgttgtcatagagtattcttaggatctgaataagaattaaatgctcttgggataatgtagaccaaaagaaaatggagactacttgcatttggtggggtggggggtttgaaattttgccttggaatgaccctggtaaccacagatgctttttaatagttgttataaaaacaaagagcctgttttagaatctcacattcagtgtctgctaccatccggtcatgacctaaggaaattctacagttcttgtcatctcgctgaattaatgtgacatagaggttggaagttctcactaagcaaacaagtataatcgcatttttaaaaactgcaaaagatgaacacttttcaaatgaaaatgagtttgaagtgcagtatgtccacataatagtaagaagaccaaatatattcctagctgagcagacttcaatcctgattacatcgtttagaagaaaccacaagagaggtttcggggttttgttttttttttaaacttatagtaaaagtgttatactaagaacataatcccataatgaggaaaaatagtgcactcttcttttttatgggcagaataattattcagatccttcctaaacacacagaagtaatgacaaattaaaatgccttccaattccatacagcttttataattattcagccgttactgttattattgctggaaagcctccttcgtagtttagtcagcatcccat

SEQ ID NO: 53317 - DNA, 2008 bp, Bovine  19866880689259
  misc_feature (1)..(1): n is a, c, g, or t
natcacctttcacagtagggtagattcttttgaaatcaaattaaacactgcccctatgcaagcaatccagtaccacaggcaaggcttgctaaatggtctgtttggatggaaactgtaccactggtattaagtccaaacatagtccagtggggaaaaatgcctaggatacagatgttccagaatagcttggggaagggggaaggaaggagagggaggagaagggcaaagagaaaaggaaagtgggggagggggacagagagtgggaagctgaattctgactttctgactccagtctacttagttactttaacctccacaccaggggtccccaacccctaggtctaagactggtacctcttgtcagatcaatagaggcattagattagaaataaagtgcgtgcacaataaatgtaatgcatttgaatcattccaaaaccatctccccaccctctggcccatgaaaaattgtcttccatgaaattggtcccttgtactaaaaaggttggggactcttgttttatacaacttctcctctctgtatcatcgcctctaagatggacaggctaataatcagagtcaagaatttaaatattcttatatcttaagttattaataaaatatttcaaattaaagtacttccctggtggctcagatgataaagaattcaactgcaatgcaggagacctggatttgatccctgggttgggaagatcccttggagaagggaatggcaacctactccagtgttcttgcctggtgaattccatggacagaggagtctgatggggctacagtccatggggttgcaaagagtaggagaggactgagtgattaacactttcatttttcttttaaattaaatcacatggccaactgaaatattatggcttagtgagctctggggtagatgctgatgaacctgaatcttgtcctgatgctggattatttgtttatggaggaacactgatatgttctggcaaatgggaagaactctttttctgtgctactttcggaaagagctcagagagtacatggggagtgggcttcctttttctgtttcaacttgtcagtgtcctccagcactgacctccacagtgagctgtcaaacctgctcaaagtttgagaatcttcaaccaggaagctttgggatttctttgagggaaatggtttcattctagcttggatagaccaacatgtaaaaagaattcttgggaaaagacatctcccaaatctaattcaaaagagaaatgtggaagcaatgggaatggttatcagtgttgagttaaggatgggaagactgggggtgcagcctcaaacagagacttgtgagcttccaattgctgtctctccaactctcccttctaatggcctgtgtccaattcactttatgcctttgaagacctttgaaacacctcagacttggggaaaaagaattctttactcctttctattctgaggtaaatcacaatgatagtgattctcaaccaagtttatgaattgataagaaatgaagccctcagagcctgcagagaaccactgaaccagtgtctctgagcttagtaccaagtgtctatgtttggaatttttcataggtgattccgatgtgtttttctgatcaattataaatgtattgattaataataataataaaagtcaatctaaccattgaactctacttgtatatatctagattttctgaaaggaaagggacctagagatcactgaaaaggtcattaagatgacttcaaaccttagctacattatagggttggggctattcaagatgcaaccacacttagcttagccaagcaaaggttaaatatattaaatttgccaagaaagaatatgatagcttatacgccttgaatgctataaacttaactctagtattggatggggatggttgacagccataatgagaaagaaagagtaattagccacaagggcatcccttggtccacggtttaattactgtttgctttaaaatttgtacagcatcccatttttt

SEQ ID NO: 53318 - DNA, 782 bp, Bovine  19866880732427
  misc_feature (1)..(1): n is a, c, g, or t
natgtaattatgaaagcagataaaatggtgtttccttctgtcttacagcctgaagaataagtagtaagaacatcaatcaagagatgagaaaaaaagtcaggattttctgccttggagaaatgcttaccaaccaccagaggaagatctgttcacgaacaatgaacatttctcatgaggattcagattaacataggactaatcttagttttggggaatgaatgagcttcctttctttctattttttttaaattttgtggtaagctatgatatgtggatggattttggaaaaattctttcctgataatatatttagcacatgttctacatcataatcctatagcaaacagcaggagcatcattcaaacttaaagacagtggggaaaaaaatctcagtttccaatttattctcagatttcttcaccatgtaattattctgttaactccttgctggtggaaatgcaaaccacgtctatcaagaaataaactttattttttcatcgtgttgaacacaattggtggcaacgtgcacagagcctgaccaccattagtagaagttacataatggacacaaattctcatttcaccttcaaatatacgagccagctttgccatccgatcaagaataaggacagtaaatcaaggagaaatcctcctttttttttttttttttcctgatcattcaaagaatagtttctcaaggttaagccaagtcctcttttgcaagctgccaaaataatagcttaggaaaagaattagtttgcctgcatgatgatcctcttagg

SEQ ID NO: 53319 - DNA, 1154 bp, Bovine  19866880903533
  misc_feature (1)..(1): n is a, c, g, or t
ntcctgacccagagatcaaacccaggtctcctgcattgcaggtagattccttaccatttgagctacagggaagtcctattattatgactttaaacaaacaagattatcttagggtgacttattagaccaaagccatggagcgaatctgtgaggaaattgatcctcaaactcagcttcctgccctttttccctccaccccagacagactgatgcttgtggtcaagaaactcacacttcccaccctccactggaggtctgcacccaagtttgaagcctcacagtttctcttctgcagagggaactcagcaatccattgttccaaggtcactgaagggaaaaatacatgcctttgcctcagagaaataataatgttggttactcacagtgctttttgtcctgttttagaatttaattggagctagtttttagcttctgtgactgccaaatgaccaagaggtcggctgccccgctgtgggcttttcagccaattcatgagggttattttacttgacaagggtcctgttttaatgggaagagttgtcacatcctattcgcatcctgtttttgatctcaccacagcgaatttggttgatctagtcccctgccctgcacactgtcccttcctagctttttcacttagcggccccactttgatatgcagaaagagcttgcctcctggtcaagctgtttcctgcctggttggatttcccccaacacctgagtgtggtcttccgcagcagccgggtggaaagtgccagcttcccccgcagctgtacagccagctgctttgggatcgcaggcgatgcggtgataggtcccagtttcccagccgttcccttgttcaacaagaggattctgtgtggtgctgctccactcatcaatggctttcatttcttctcagcagcagatgccatttgttctgtggcccatcaatgtcttgaaacaaatctccaggcagccttgcctgtgagcgaggaccccatcagctcagtgctcctgcccaccagaaagtacccagagcttgagcttgcttgaaattcctgtgacttcttattgccctcaggaggaaaaaataatcaagaagatgaaaccagagaaaatttgaaaggtgatctattctcatgaaaagtgtctgttctaacaaataaaattga

SEQ ID NO: 53320 - DNA, 1216 bp, Bovine  19866881169386
  misc_feature (1)..(1): n is a, c, g, or t
nattataccaaggatttatgataatgtaccatccaaaaataataatttatattttacactaaaactaaaataataaatcgttttccagtttttgagcagacaaatcattaatattaatctaaccaattattcatagcagaacattaactcccaaaatggtgattctcatttcagttcccaattgtaagtatcaaaaccaaaatcatgtggcatcactacataaactgtgttaaggcgaacactctcagattttttttttttaactcttactattgtttggatttttgtattggattgacggaatctttgttccaaaatcagagtgatgcataatataaagtctcagtaagtatgtcttttgttcttttgtatacacatgatatagttaattccttgtgtcagatttgtaaataactatgaaatatttgcttgttttgttttagtattgtataaataaaacctgcaaagaagttcctttaatgggatataattgtaatgccactataaaatgcagaggaaatggggtaagctacttttgtttttgtaattctaaattttatgttattttttgagtaattcaatgtaaaaaatctatcctgtttgggagaaatgaaaatctaagttgctcttttatccaggcttgcctaggaatagctaactaatataaagaaaatcagctgattaccaatcgatcaaaacactatttagtgaactgtactatatgtgtactgaatttattgtaagcactcaaaacttatgaattggtaacacatttaaattaaaaaaaataattttctcatgcaaataaatgcatattttgcttatattgtgggcatatttcttctttctcatactcttcataattaaaatttaaagctatatagtattttacagaagatattcttaaagacatgatagagaatttctgaagtttttatgaagaggcttctactagaaagtatctttatgcaaaaaacatttttttctcaactgtttatccattttaatctggcaatacagatttgtagttacttttgcatttaatatttacttcttaaaaatgtataatttgggacccttgtttcactgctttccaaaaagataatcagtgtataattcagtcaacattatagaaatgaaattaaatttatcagtattcagttttataatattcagtgttacaatttacttggttgcttttagaagatatagaatg

SEQ ID NO: 53321 - DNA, 747 bp, Bovine  19866881243154
  misc_feature (1)..(1): n is a, c, g, or t
ntgtgtcatgtcagcattctgtactgtctgagccccagtcctccgtcagactccaaatcaacgtctttgattgttaagctttctctcaatagctccggggttgccctgcctagggaagtccagagggcgctgatgtgggttggcaaatgtttggattatacttttataacttctctgggaattaaaacttttcggtggctggcagaacctttcgttttggttgtttgggaagattttcagaagctaaaagatttcaccatgtgtgtttcttcgctttgcgctgttctggtttaagctctttttttttttttccctacagaggagcccaaacctgtaattctattgccacagatgcgttaaaaagaacccccctcctcatttctgccccgtcattgaacacagctttcagtaaccctgagcacaagaacaggaaggacattggcaactcaactgttaaactggtctgtgattatgtttccttgagatcactctgatgtcaccagtgtaatctgagcctggagcttttgttcacactttaaatagcagtcccggaatgattttgctacagactctctggagagcctgggagctgaattcccgaagaatcccccatccatgaaagctaagccaagccacccggccttcagcatgtccacctcgctgcgagtcagcccgtccatccacggctaccacttcgacacagccctcacgtaagaaaagctgtgggcaacatcttcgaaaacatag

SEQ ID NO: 53322 - DNA, 1041 bp, Bovine  19866881271869
  misc_feature (1)..(1): n is a, c, g, or t
ncctgtcacattgtctctggggaatagcaaaattactcacaattaacagagaacattttggaatgatatttggtgactttagttattcgtatgctgtgttggtctcaaccctagttagacagttgaggaaagaaagactattaattgcttagcctccattgtggacacaggatgaggtattttaatcaaaagattcaggaatattccttcttcaaggttaaaagaaaaattaccttcatggatagttaaaaaaaaatctgctttggaataataaagcagttcttgttatgaatatctgactcaggctgactcttttatctgtgtgctactttatagaagctaatcatatgctatcaatgcctagaaccatatgctagagctcgtgttagaagcatgaagagaaaacaaataattagaatttattttcgacagaagttggacagataaatgcatctaatcatcattccttgatcacaactgtcacttattcctaacgtaatttgcattcctggtttcttctgaggaatcgccatgaaatatcctatcaggtgttacaagatttaaatcatcatacataagacatgaggggtcttcaaagaaaacccagaaaatagggcattttgagtgaagaaagcaaaggcttttggagtaaagtcttagaaggcaaagcttctgtgacagtccagacaatgaaacgccaagtgctttcttgatgcttcaccctgttcatatctgacacccctcctgcatcctcagaccacctttgctcttcccttcccagctcaggttcccagctgctacagaaagtaaaagctgcacctagaatgcgcattcctggcgacactttcttggacacgcagcaggggatgctatgcctggtcacccagttgcactgcagttggcacctgctcagaaaatctgtcagcctccatcaccgagaagggccaccttgccctctctcttgcaatttcagtggaccctaaaatgagaggtcactacttgggatcccagagactttagtgtttaggcatttaaaaggtg

SEQ ID NO: 53323 - DNA, 1122 bp, Bovine  19866881293596
  misc_feature (1)..(1): n is a, c, g, or t
nctgctgtatcagagagatgacagctacataacagactgaactcaaaagcttttctattgcacttcaagtttataatgtgctttctattcgttatgacttttacttcctccaaatacagccttatgcatttactcacttttgcccccatttaatagaaatccaaacagtgtgtacgcttgtggctgaccttgtttatgtcccatattctccaaaacaccagaagctttctctggggcctttcacacccaggtgcagcctgagaaatgccaaattgagaagtgggtgaagtttgactttaatgctcacactggtttcttcggatgctactacagccctgacagggcctctcctgcagtgcttctctccctgatccccacgcctctgactctccatcatctcttggtccttacaacagaagtatcctcccatctaataagcacttattcacaccgtagaagggacggaaactgatttcctcctaaacagaggagctttctgaccctcctattaactgtgccacgagagagtccatcccccactgagtataaagacagattgaaggtttgttgtcggtggctgccgggacgtcttcccaacagtgcccaaattccagcatcctcaggatctagtgtaccctgcttcaccccctgacccctggcgatgggtaccttgtgtcccgattgagtctgaaaaacgaggatacctccatcccgcagtcacatgagtggttcagggcttcttcaaagcagacgtttgtccaggacttcatcatgacctgaatcgtcaatatacaccacttctattatagccaagacctggctaataactattttactgtgactttgaagggatttctgcttctaaagtttaattttaataattctctgagtcccattaatttctctctctgtgaggagacagggggtgcagaaccataaggaattccacattgacatctcggtttactttcctttatccagaccttggcggattctgactcaaagggaggaatcacacatttactggggtgtcagcctcttctagcctgagtcagcttccttgtcattaattctgatttggcgctcagcaattcccatgagaacaactggcttttcttgtct

SEQ ID NO: 53324 - DNA, 1038 bp, Bovine  19866881377445
  misc_feature (1)..(1): n is a, c, g, or t
ntcttcaactcacaataatattttcttaatttttattcaactaaagtgtccttttcacttaaattagctctatttttccttagtgtcaggtcctaacatgaaataaaactcatattttgacatgtttgaatgcgtttagtaaataaagggcaaggtcttcagagattattttcatggatatttggggctggaaacagggagacacatagcaagcaggtggatctgagacagtatctgtctcttttctggactggtcatgtgttctatgcagacgaggctatagaaagaagccctctctttcatattcttttccattgtgatttatcatggatattgaatatagttccctgtgctatacaataagaccttgttgtttgtccactctatctcagacagtatagaaacttcctgcaatgcaggagacccgggttcaatccctgggtctggaagatcccctggagaacagaatggttacccactccagtattcttggctggggaatctcatggacagagaagcctggccggctatagtccatgggatcgcaaagaatcgtatatgactgaagcagcttagcacgcacgcacgcacgcacgcacacgttcgcatctgctaattccaaactcccaatccatccctcccccaccacctacccccagtccaggtctttctgatttaaattccttggtgaataagttacaagcatcccatcaatctctgaatcaccaggaggcactctgcacataaacttttcttgtatctgagcttcaaagatttgtatcatcaaagaagttcaaggggcaaaaatctgtcaagcgtttctctaaaatgcatatttcccaaagtaaagccagtggctattaagactggactggagatgttgccaagagattgggacggacccagaaaagacaacgtgaggaatccctaaatgcctttcacatatgtacagtgtccatgttaacaagggagcagctttgatctaacaacctgattacccagaaagtaatctggaattcttctaaatatctataccaa

SEQ ID NO: 53325 - DNA, 764 bp, Bovine  19866881407618
  misc_feature (1)..(1): n is a, c, g, or t
ntcttgggtcaggcatccaacatggctaaaaattgtcttttaattatggggaatacatttagtccatagctttagattttatttgtttgccaagagcttttgaagatgttaaagctttttgcttcttgattccattttcaaggcttcacatttatactatttaagtaaagaattgttttagaaaatgtgtgttctttgtttaattgactgttagatatcctgcagtctgtgcctgcaagcagtgggctgaattcagaaggttaagtgtttaaacattctgtacgtcatagtgattctagcatggagtaatatgtatcttctttatttgggtctgcagccagccctgatcctaggaagtttccttaactgacgttcacaaggaagagatattccacagtgcaagtctaagttcggatacggcagcagtcctcctgttatccttgtgatgagtagcatgatgaaatgcagtgattttcaaactcttttccaccaagctcaaggtaccttattggagtaccctaagcgctatgcttggagtttgatggtctggctggtatttgaaacctctagcccccatttcaactcgagtagctgtgctttgtcaatcttatatattaatatgtttcacattaacagtttttgtttttgaaaacagggttctcctgctttctttcactcctatatttcttttaaaagccctagtgtcgtcattaagggcaatagctttgaattcagaagtaagcagtttcatgtctctttatcca

SEQ ID NO: 53326 - DNA, 1042 bp, Bovine  19866881578580
  misc_feature (1)..(1): n is a, c, g, or t
naacagaggaaggtattgagatttgggtttatagaagggaacgaaaggtcatgaataatcactgtcaaatagaacagttagcttattctatcagtttgctccaacaaaattaagcctattttctcttggaagtggttaatacataatggaggcggatgctgtcaaaaacgtgttgcatgacattattcagacacccgacttgactccttaactcagtgttccacttttcacctgcttggctgtaatgccacagacaaatggcattttaaagttcaattttgctttctctacctcctgggaatcaaaagtcaaccaaaataagtcataaaaatgcaattttttttcccaaggaaggacaagtttccccaggaaataaaagtgaaattcataatcatcattcattcaaattgtaatttttgaagacctaagtaccccagttaaaaatcatgttaatgaatcttgtggttcaattataatcatttgggtaattttaatagacatcaacctaacaactgaaaaagcatttcaattcacacaattcagtttccatgttaagctttaagatgcaacctgagaggctgtagggtgacctccatctaagtttgcccaggaatgaagcatttcttgggaggcaggacttacaatgttgaaacaagagcaaagtttgatggttggtactctaacagaaaactcaagtatcttaggatggctcagaatttagaatggaaatcttctgcaaagtgaagaaaacctaagtcattcattaagtgctcatattttattgtttttcagtaactaagtcacgtccgacacttttgtgacctcatgtactgtaagctgccaggctcctccgttcagtggaattttccaggcaagaatactggagtgggttgccatttcctactggaagggatcttcctaacacagagatccagcccatatctcctgcttgacatttggattctttatccctgagccatctgtgttcatatagttacactttatttagcactttctatacagcaactacagagaaggcaaa

SEQ ID NO: 53327 - DNA, 1127 bp, Bovine  19866881625751
  misc_feature (1)..(1): n is a, c, g, or t
ngcctgcagcctaccggctcctctgcccatgggattttccaggcaagagtactgcagtgaggtgccattgccttctccaaatctaaggatccaaataaagttacaggggactgctggaaattcagcagtgttttaaagtttggaagtaaaacccaacattcagttgagctctgatacgaattggctggatacaatcacagatggcaggcacacagtctcctggttaatcgggaggagtgcagactttctgacttatagttggacttaccaactggtgaaaacagctctgctcttcctctctgataaggaaaaaaacaagaaaaaagaaaaatgactgatttaccactctccttgctgtgacggacgcccaagaactcatcaaaggcatgcagtattgtgctctgagcagcgcttcctccagagtaactcaggggctctttggagacaccttcgtataccaagcccgcaggcagtgctgggttatccttccatctaggtaagaacaaaagtcagatggaagtgcatactaggatttaagagtgtcgtttctgatcaggatacagatcaagcaagaaagggaacaccctttcctatcttcttttctctcctcttctttcaccctgattccacgtcttcatcttttttgtctgagtctccctttttctgagtcccccaaccattttactcatttcatttactcatttactcattttactcatttctgatattttagggggtcttgaacattcttggcgtgtatgtgagtaactccacaatgagacagaatcagcaaccccaagaatatgctgtgtgtgtgtgtgtgtgtgtgtgtgttagtcactcagtcatgtccaactctgtgaccccatggcctgtagcctgccgggctcctttttccacggaattctccaggcgagaatatagtttacatatcaaattcccctacattttctcacttattcttcctggagtagatccaggcattttaaaacccatttaatacagaagcagtctcaaggcgctgtctccaggaccaccattcttagtgcagcaactagaacttgacccctaaatttgtaattctctagttttacttcccaagaccccacccacccacgtgttaattt

SEQ ID NO: 53328 - DNA, 727 bp, Bovine  19866881739825
  misc_feature (1)..(1): n is a, c, g, or t
natgaattttgaacttgtgtttaagtttaccccttctttggcaccacaagtgtgttagtcactcagtcgtgtctgactccttgtgaccacatggattgtagcatgccaggctcctctgtttatggaatttcctaggctagaatactggagtgggtggccatttccttctccaggggatcttctggacccagggatcgaacctgggtctccacattgcaggcagattctttaatatctgagccacgagggaaggccccaggtaataaatatgagcatcccttatccaaaagagctgacaaagtttggacttttcctgtagcaagagaaatcacaaacctctcccttatccggttttcatttgttcagatcccaagcaccctctcctgtcttaccctcctgggttcctagtagcccagttggccagcaccaagtccgagtgaacgaggataggagggagccccaggttcctggagacctcaacaaagggcaaggcaaggtttcttggcagaatcttgcggatataaatgcagacagttagcacattatagaaagaatgcaatggaggacacaatctgtctcttttctttttattggcatataattgttttacaatgctgtgttagtttctgtataattagctcctgtgtagttagtacaggaaagtgaatcagctacatgtgtacatacatccccttttttcggattttttttaggtcaccacagagca

SEQ ID NO: 53329 - DNA, 774 bp, Bovine  19866881888647
  misc_feature (1)..(1): n is a, c, g, or t
ntcacatcttctttgtgacatcttcccccgtggtaaatctaattaaactgccattaaaggctgtgttccctctattatgccaaggtgaccgcagcagctactaaatgtgaacagtatctttctttgttcacagtcaggcatttgaggaggaaactggcaacagttggtatagaaatagattttcacaattattcttatgttgcatttttttttacaatcagtatttgctgaatttgatatcattgtcaattaaaacaatgaacaaccatgagaaaaaaaattgtataactactgcatttccttgtactatataatagagtttgatggccagttaaaatcaacatttgcatatttatatggcttttgatcaggagccccagtctgtgtctctgtgcagacagctccctttccagtctatttgcttgactctaatagggctgttgctgacttctgaatacggccagtaagtttcagccctcaagtttggctcatgataatttccatctttaatgtatcttttttcatctcgatgccatccatctttgagactcaatttgaaatgaagcttctcttagaccttggcggcccaaagtgatttcaccgagtcagctgactgcccacgtgacccacagcacagatatttgtgttgtgacttcgcatctgttcattcaaagcatctctgggtcaccaacctgaggaagaagaggatagttcataattctgggcacgtactctctccatggcaagggttcacattttgctctccaggtcctg

SEQ ID NO: 53330 - DNA, 760 bp, Bovine  19866882029816
  misc_feature (1)..(1): n is a, c, g, or t
nacgttactgtatttactctttgttggtgtacaacagtaggaaagagcgttagactggaagacaggactcctgggttccagcatcagctttgcttctcagcagctgtgtgacctctgggaagacccctgccttcttcggagctgattcctcattggtaaaatgaggaggctgaaccagataatctacgttctttgtcactatcactgcctgcactttgataaccatattgtaaatttaatttactgtttaaactgttaaaatggctatggcaaaaaacaaaaagcatattgtattcagtgtaggagtaatggtgtgctttctaattatctgcccaagcaatgtaaccatagttaaatttatgatgagaatagcacatccaattggggtgatcaggttgtagtaaattaaaacttacagctgccctttgtattaagttaaaggcacccttctgccaccagcaacagaagtcttatcagcatatgaatgaagtgcattaacacaacaaaagttgtgtcacataatgtcaaagtcctgtgttacacggctaaccttgtaaacactgtgcttatatctaaggagaaattcatgtttattgtctctggcgctggcccagcttctcctctatctgttgctgaattcaaaggcatggagtacaagatcagagatatataatattttctttttcattagggctgcaggcaccccttgttggcatagatgtgttacaccccagtcaaggccaactgaacatgtaaattt

SEQ ID NO: 53331 - DNA, 951 bp, Bovine  19866880347770
  misc_feature (1)..(1): n is a, c, g, or t
ntctcctctgccgcaggtccctcgtgcctgctgagcgtgcgagccggcaaggacggctggtttcagctctacagccccggaggggtggcctgcgatgacgacggggagctgttcgccagcatggtacgtggggtgcggggagcaccagagctctgtgagggcgctgggttcaccccttctgagcagtgagagagctaccccgtgcccactggggcctgccccgaaatttccaggctgaaaggatgctggtgatgaagacagtgatggtgacgccagccctgagtgtcaccttcccatgtctcacccgagtgggcactgagccagagggccccccagaaacgtgaggagggacacgtcctgtcgccccattttacagtcgaggagttaactgctcaagctagtgggttcactctgcactccagcgccgtgtaggttgaggggactgagcacttgctggtacaggggccccagaagtcgttgcaggtccacccgctcgtcttatccttgcactgagaagtcaaggtcaggatgagcggcccaccttggagatgacggctctagaggtcaccaaaccagtaagcacaccctttggtggcttcccctttccctgcacgctgcggccatcacctcagctgaccacgcaccgtctttcttcgtcttcagggcaacccattcccttaactacttctatgttgacaagcgcagagaggtgcaggggcgtgcccgaggtcacacaggcctctggcctccacgaccctccctgcgctggcccatactatctggagccaccctccttccagtggcagagggagcacagacgccccttccccagggcagacgccccttccccagggcagacgcccctccaggcagccggtgctctcaccgagcctgcttcctgacacagctagctctgttccacaatcacacatgtcccagagcgtgggaagg

SEQ ID NO: 53332 - DNA, 1335 bp, Bovine  19866880362180
  misc_feature (1)..(1): n is a, c, g, or t
ncacataacccagatggagcagaatttacccgttcctggatttctggggcaggtgccttcggggcctcagagagcactggggacggggagacagggctccacaacgtcccctgccctgcgtgtgcggccgggccctgtgcaccctgagcacgcacctccaggagttcctgccaggcttgaccgtacctagaacccagggggccagatgtcagcacagccacaaggacggcgggagaagggctcctgtgcgtgtatgtgtgtgtgtgtacgtgtacagggcatgggtaaaatgtacacaccgtgaatcctactacctccaccgcgtttttaggttttcctgaagtacagctggttcacagggctgtgttcatttccgcccgcctgagccctttctgtgtgtctggtctgtagcatcaagtgcactgatgccagtctgcagtcatcacagacctcatattcccgaacggaaactggccccactctgtaatcgctcactccccactggcccccagccctggcccccaccccgcccccttctgtgtctgtggtctgactctgcatccctcccaggagtgggccctgcagggtgtgtccttctgggactggctgacctcaggcagtgcggtgaccgcaaggttcatccccgtgggagccagtgtcagagaggggtcctctgaacccccggggagggtctggtgatggtttcagatctggtatccagacagggtgtggggtgcgtctggtcagtatcttccggcctcacagtctttgggccacaggcaggcactgcggggcacagcccgtggcggtcacggcccctcacctggcccgtgtctcctcacaggtccacatcctcatgggctcctgttacaagaccaaaaaattcctgctctccctggcggagaacaagctgggaccgtgcatgctcctggcactgagagggaaccagaccatggtggaggtgaggagccggccccaagccctggccaggcggccgactctcccgggccctcatccttgccgatggagcaccttccaggagcttccaggcgcacagagctactgcaggagctgggccacggcagcagacgaggcagccctcccgagtttggcggagcaggagaccttgatcaaactgtctgctcattccaccttcatttaactcgtgatcgtcttttggtctcagggattgagcaggtttctgttctgtcctgccttttgctgcagaacagactacctccaagcgggggctccaaacagtgatgctcatctgtttttctcctgggtcttcagatggttgggctccgccaactgcttctcactgtggtctcttaa

SEQ ID NO: 53333 - DNA, 2791 bp, Bovine  19866880374457
  misc_feature (1)..(1): n is a, c, g, or t
ntatgtacatgagtgagggctgggatgaagacggggaagtactcccaggtgtgcgttcactgagtgggggatggcggtggtgacgggcgtgattagcaaggaagaggctccagaacaccgtggcgtgtgagaaaaaaacaaaaacgggagaaagaaaattaggatgctgtgatgtctggatcgcagtggctcgtaggtttcatccctttcaagtttctcaggagaccagctgagtgtctgagttccctctttgttccgtggttgtgatccttggactgtgcttctgagcacaactccgtccagaaaggggaccacgcgggtccaggatttataaggcttatacagtggacgaggccacaggctgttttcacgtgtcatttacagaagtggaaactgaggctcaggaggtggaatgcgggtctgtctgattccacagtctgcctgggggtttccaccgcaacgcctcactcagcaccgtgcgctactcagtccagtgtggactttgtcccccagatgttctgttctaggccctggggtccaagacccttcatccttgttaactcagaaacgcagtggtcagggagacgctggaggcctgcgagcttgcctcgggggccagcgtgagactctcgccgcctcctccccttgtccagactttggctcggaggctgtgacgtgtcacccagctggctgctggttccgtgactttaaaattaggttttccccagggagtggggcacttaatgaaggagtttatccagttagaaagagaggctcccaggcaagccgggcgtccgcgaggcaggcagctgctgggaccgcggccttcagagagggcttctgtttccatgatgtcagagggcggaaccagcctggcccctgccccagccgctccccagctctgggtcctgaggcgataaggcactgtcttactccccacttgcagtctgaggaccattctgggctcagtccctgcctggctggagctgaattccaggcgccaagcctgtctgtctggtttcccagctgctcacactctccaggtggcctcgtaggaccagggtgagcagaaacattgcctccaacacaaagaaagtaccttcctgctgtgattgcattggaatacctggggaacgagtttggcataagatgcgatctgaaggataactatcttcatccttttcaaaaggtcactggaagcatagtagaaatgactctcctagttgtcaggaggcctggctgtctgcagccgcagccttcgacttggggcaagactctgttcttccgggatgggattctgatggggagggagggaggcgtccaccctgaagcagcggagtcaccgattgtgttgtgtatttcgcccacccccggcctgtccatcacacgcgtgggtctctttctctctcccaaccagaaaaagatttacaaatacaagaaagtcctgagtaacccgagccgttgggaggtcgtcctgaaggagatccggacgctggtggacatggctctgacgtcccctctgcaggacgactccatcaaccaggccccactggaaatcgtctcgaaactgctctcagaggtaaggccaccccttggcctgatcccgctctgtgccacctgcccccaccccagcccctccaacacttggaagttttattcctttacggggtccactgagcaccaccctgtgtcaagcggcagattgaattcgagtttgtgtgtctccccatcacgggaggaggtgagccatcccccagtgacatgagggagctgagaaggaggtcaggtcgaggggagagtggttgtcaccccaccgtgccccaggacctgctttgggacaggacctggcaggggctggccttggacccgagctgggctggcggccgctgtcagaatcctctcgttcatcctgggtgggagtgcatcgtgcagcccccagaccgcccttcctccaccccctgcgccggccgcctccccacacccagcgttggggttccgggcagacgtggcttcctggtcttctcagcacccacagcccacagccacactgtttagctcacacagggtttgaaaaatcaagaggctttaccacaaagtaggactttgcaggtcgtgtttagaaacgatcagaatgcctagcagcagttggcagctggctgcgcagcgccacccagccgagcctccggcttcaccaggcagcctcaggctgtgagcatgtgctgtgtgccaggcgtggccccgggctcctggataaaggtggtcgcctccctcccggggcaggaaagatggcgggacatgaggcctgatcttagctggtctgcccaatggagagcaaggggcactcgggagcgtctcactgtcccctctgtccccgtgctattctgagtgcttcacagaggtcaatgctgcgctctttcatttgctccctggcccctgagggctgctggggttgatgactcccggtctcagctatgcatggccaccagagtggtctctctgtccctcttccttgggagtggccctggttccctgggtggctcctctgcagccccccagaccccgcacaaggtccctgctacctagaacctccgctctctcccaggcacaggctggtcactgcccatcggttcaggaaaccggcccaagccttccacgcctgctgaagagagagggtcccccaccctggggggaggtggggggcgggcagtgaaaggtgcatggcagagatggctgtgggcagagggtgtgaccgtcctcagtcaggtgggagaccagcctcatcccatgggag

SEQ ID NO: 53334 - DNA, 749 bp, Bovine  19866881024006
  misc_feature (1)..(1): n is a, c, g, or t
ncttcagctcttgttccggaagaaaacgtaaactgctggaaaaaaaactaccgagcggggggaatccgtttctcccgtaggtgtgtccctagaccaaccggggctagtcagtgtccgaagaaaagggaagtgggaatcctatcgtgtaaaatatggaagttaaagccctaaggtgcattttccccgaggggatctcctgtctgactgaccggtgtgttcaagtacctggctttggttgggggaaaaaaaaaatccgtatatgcaaatcaacatatccaaacataccggaattgcttttccactgcacttggaaggagatattatgcctaactctgcccaaccattaagggtttgtgcctaaaaatgttagtttggactcaatgccagttagtctccatttaactactagttctccatcctaagaatcttttttgaactaaattatgatgaatcaaaaaactaagataaaatttctcttgtatgacattctatcttagtaatctaaagggtcagtaaattaaggagtcaggtagcagccctcctgtgactttaaaggaagttctaacttctgtgtgatttcagatgaagatgcggcaagctgtcatgtctggggttgagaaggatctcctgcagtgccattcttccttttcaactaagcagaaccattttataaatctgaggacattagtaagtaggagattttataaaagaaggacccgagtcggacaaataataaaggtctgctatga

SEQ ID NO: 53335 - DNA, 1346 bp, Bovine  19866881029280
  misc_feature (1)..(1): n is a, c, g, or t
ncgtgaaagcccttggatttgaactagggtctttctcacgccaaaaaatcccatgcattcccactaaagtgacatctgtatttggcccgtggcccgctttgacttccagatccttttctcctccacatccacgcaagaccaggcttatcccacctggcaacactgcggtgttcaagtgcaggggcccagggatcagtccatctgggctttaatcctgggcctgctactcttctggcaccaggcactccagcctcagttgaagtgaagtcactcagtcgtgtccgactctttgcgaccaggctccttagtccacggaattttccaggcaagagtactggagtgggttgccatttcctcccaggggatcttcccaacccaggggtcaaaccggggtctcccacactgcaggcagacgctttaccgtctgagccaccagggaagcctcagtttcctcatctgtgaaacagggataatgaccatagtatctacctccaaaggtcacatgaagagtaaatcagttaacattttcatatgtaaaactctattaagagtctgatgcaaaataaaaaagctcaacagacatgggcttttaatcactgatgtagttgctcttggccttggctgcgaatcaacctgggagctttagaaaaatgccaaagtgtgggtcccaccccagagattctgatttaattggtctcaggtggaggccaagtgcaggtgtttgtcagagctccccaggtgatgccaatgctcaggcaaaggtgaggtgcatcggaacagagtctccacagcacagccggggcagtcccaggcacccggggcagtgggtggcaaccagcaggtgtcaggaagtgctggagggctgctcagatgccttgtgggtctatgtcactaggagtttggatcttatctcccatcagttaggagggaggtcacccactcagacgagaggtcatcagctctgaaataaagacaggctttgtcccatcctgaaagtcccttaaccctaacatgaagtcatcctggccctggccctgcctctgcccagggcagtgtgagctccgcccggaccaagctgagtccccggaatttctgagaagggacccgccccgtttctttctaagtcacatgttgctggcctctggctttcctgggttgtgccaggagaaattcaggtccagtaaggattaagggttaggcagacaggcagaggctgccgaactccagccccgggctctggtcccagccgcacctcgactccccttccgcccaaatacctctcctgcagaggaggttgatacatgttggcctcctttataccattttacaaatgactgcaactctca

SEQ ID NO: 53336 - DNA, 1425 bp, Bovine  19866881395642
  misc_feature (1)..(1): n is a, c, g, or t
nttttgtccccagatgggttgcctatatcccggtcttgtggagagctcaggctgagaagtcggctggtgaatagctcatgctcttgggtcacacttgagggttcaaatttggctccagaacctcctaaccatgtgactctgggctgcagacttcacctctctaaggaaagggcaggacacacacccgcctgccagcgcgtagtgaagagtgaatgacgggacacagcccggagcccggcacagacaagcgccctgttatagcagcggccgctgggatgttgctcatggtgtgctgttattatcaccagtgtggtgattggtccacgtggctgtggggggcggcgcaagggcagtgggctcagcctcgcggtcagcttagagcccaccacccccttcccacaccatgggggagagcttcccgtggtgatgggcatgccctctgtctgccctgtacctggtggtggccactggcttcatggcactggtgagcacttgaaatgtagttagcataactcaggaactgaacctttattgccttgaaaaattactttcttggggcttccccggcagtccagtggtggttagaactctgtgcttctgctgcaggttcgattcctggttggggaactaagatcctgcaagccacatggcatggctaaaaaaaaagttttctcccatgtcacttaaaatgttaagattcacacatggccagtggctactatattgaacaacacaaccccaggcaagtaagaccctgggccccttctccgcctgtgggtcagcctgccggttgctgctgtgaacagagcctcagtttccatggcttcatctcccactgaggtgctcatgtaactggccttatctgcccagacagcgaccagaaggtcgggttttccaccgtgaatcagccctcgtgggttgacacacccccgtacgattccttccgagagattccgactgatgtgtgttcctcttctttcaggcaatcgctcctttgctggaaaacaaccatccgccaccggatctctgtgaattcttctgcaaggtacggcatcgccgaagcggggctgtgtttgcaggaagcagactgtctccatttgtgcgttgtgggggttggttttgcgaaatttcctggaaacccagactcctccctgaacagatcagggccccagacagagttagagacgagccaggcctcctctccaccagccaggtgataagtgaggcccagggtccagaccaacaggtcaagggggagcactgagctttcctgggagtatcttcctggccgtcttgagagaagtttgcagcacgttttctggctcctgacatcagagctgggcttttattagccaggtctcccgtgagcaccggctggcccacagtgggagcctggccatggggctttccctgagctgggcaagt

SEQ ID NO: 53337 - DNA, 553 bp, Bovine  19866881595017
  misc_feature (1)..(1): n is a, c, g, or t
ncgagtacctggagacccacttccgggacgtcagcagcaccgaggagttcctcgagctgagtccgcagaagctgaaggaggtgatctctctcgagaagttaaacgtcggcaacgaaaaatatgtgtttgaagcggtcatccgatggatagcgcacgatacggaaataagaaaggtaccttatagcatgctctgacttggacattccacttattcgtatgtgtctgttcttcaccccagttctacatgttttatctttctcctccaacttgaaaaacttagagttgtgatctaaaccatgacctgttatacatcttcccataggctctctaaagcagttggtttttttcagatccgtctaccagagtgagtgtagttcatcatatagcaatgaaaatattaacacttaaaagtgacttgacatccttcgaatgttgtttttaatgggaaatgtgttagaggatatcaggtttgaggtcattagggagggtgctttagcctttacatcacagggctttgaatctcatgtgtatatcctagaggctagctccaaaa

SEQ ID NO: 53338 - DNA, 763 bp, Bovine  19866881728240
  misc_feature (1)..(1): n is a, c, g, or t
ntctgagaactgtcctgagttcttgtgcacctggaaatctctcttcccttacttagaccacagctcacggccatgcttacactctctcctctccacccacggtcacgatgcactccgagtagccgcggggcttgaagctggccagcatggcctccccttgctgtggctggctgagggggatgttgctgcactccttgacgatctcgcggaccaacggctcattgagcatctgctcccgtaagtagctcgagtccaaccctgaaacccacagcgctgacatgacatccttcatgtggacctgcagagtagggtggaaagcacggggaggagaaagggagagtgtgcatttagaagggacattttccgactcatagaaaactacaagtgttgatgagtcagatgatcaacaggcaaggagtaagggccagtgctgcctgaatgtgtgaggcggcccctttcctttctacttcctctggcctcgataaacagaagtttaacttaaaatagcatcacttcagcatcactttgctggatcactgcaaagtttcaagaagcttccattacaccctacagggttcccacggcaacaggaaaacctacaagaaccccgctatgatttgctttatctcactaacttggatgtgctatgagttataccccatttatacaaatattggttacagaaagagcttgacacaatatgtcaactagataatgaaaatgtaccaacatcaaaattataagaaaaatctgaaaaagctca

SEQ ID NO: 53339 - DNA, 1169 bp, Bovine  19866880072044
  misc_feature (1)..(1): n is a, c, g, or t
ntgattgcagcctgaaattaaaagacgcttactccttggaaggaaagttatgaacagcctagatagcatattcaaaagcagtaacatcactttgccaacaaaggttcgtctagtcaagggtatggttttccctgtggttatgtatggatgtgagagttggactgtgaagaaggctgagcgccgaagaattgaggcttttgaactgtggtgttggagaagactcttgagagtcccttggactgcaaggagatccaaccagtccattctgaagatcagccctgggatttctttggagggaatgatgctaaagctgaaactccagtactttggccacctcatgcgaagagttgactcattggaaaagactctgatgctgggagggattgggggcaggaagagaaggggacgccagaggatgagatggctggatggcatcactgactcgatggacgtgagtctgggtcaactcaggaagtttgtgatggacagggaggcctggcgtgctgggattcatggggtcgcaaagagtcggacacgactgagtgactgatctaatctgatcttcattctgaacatttgttttcttttgcctctctattaattcatgacctcactttaaggagcttgtgtttatagcatcttggtcagcagtgcatttactaatgcagaattcaacatcaacacaaatatgccagatgcttaaaaatattttttaacacagagattatcagagaaatgaggtcattctgaaagggaagataaaattcaatcattgttcaaccaaatatttgaaagcaattatgggtagagggcatcacagaaataggatgttgtagcaggtcctgaaatgttacaggaccagaaaggaaagactcagattaaaatatggaactgaggatgggcttgaaagaatatgtgatttgggataaagtattcatagtatttctttcatctctttcctattacatagatattgtgttgagaaagtatgtattattttgctaattagactattaagatactttactccaaaaatatttcagcaacctgaaatgttataagaagacagaaaatgtaaaagtagttaagtagtcagtactctagtgggagttaaattgtgtgtttaatcagaatttttcaaagtacctacagttataacaagtaactgt

SEQ ID NO: 53340 - DNA, 1215 bp, Bovine  19866880586812
  misc_feature (1)..(1): n is a, c, g, or t
nttttttctgtgacaggcccctgtgtttgccactggcacccacaggtattgaaagttgactgctacccttcatagaaactgtgagagtaggtctctttatccttcaatgttgacttttccaaaatgcttcataagtccttgaaaaaagcatttcctgggttgtaaaactggcaagaggctggaaaaagatttacatacaattcaaagtagacgagaaaggatttacaatggcaagttttcgaaaataaatgctctaagaaaagtcagacgcctagagggaggaagatgaccgaagtttagtcaggctaaggggatggttaagaccacctcgatcaagctgtccagaagcaaagcaccctgttagctacctctgcacatggctgcctgagctaggcatcttcctaacataacgactatcagagagaaggatactttaaacagtttggtattttaataactattccaaaaaattttaggaattttagggaaaaagctgtgtttctaggaatgaatagtcaatgtcacctgaatgtttctctaggtccctactgtgcatctctgacacagtgatgtatctgtagtgagtagcatttactcaaatgcccaggaaggccaggtagctgatacagcattctggaagaggaaaattagagacattagatgaattgcttcaagttttagagatctgtacaacaaagatgacatgtagaccaaaatgtgtctgactacaaatgccttgctattgttcagtcactaagtcatgtccaactctgacctcatggactgcagcatgccaggcttccctgtctttcacaaatttcacagagttcactcaaacttacatccatcaagtcagtgacaccatccaaccatctcatcctctgtcgtccccttctcttcccaccttcagtctttcccagcatcagggtcttttcaaatgagtcagttcttcgcatcaggtggccaaagtactggagcttcagcttcagcatcagtccttccaatgaatattcagggtttatttcctttaggattgattgttttgatctccttgaagtcctaaaatgcctagctccaagaacttctctaacaagctaccctttcatgaaatctggccttgggttactttaagggatactcaaactctatcttatatattctttaacttcctggttatttctcattttccccccagtctggcatctgtgcttccca

SEQ ID NO: 53341 - DNA, 771 bp, Bovine  19866880607240
  misc_feature (1)..(1): n is a, c, g, or t
natctcctagagttttctaaactcatgtgcattgattcggtgatgccatccaaccatatttcatggaaaattaataaatcaataaatattttaaaaaatcagtgttagtaaaatcaatagacaaccaaagcctgtctaaacattgcaaaaccgccttttaaaaagttttcttttataaaattgcatgttctgaggtgcataatcaggcatatttttaaattagtcacttcagcgatgctgtcctcttaagatactaccatgaactccacaaaggtatatgtgtgttgcaggctcctgtctgttatctcttggttcactgattagtgtttttatcggtcatgtcggggaggtcttgagggctttggcagtccaagtcccctagcgattttctacactgtcatcataaaatcaaactgtgctgcctcacacagaatctctctccctagtgcagtgaactggcaagaaaaggaggacagtcagctcaacccaatgtatcttgcagaatacgttctgaaaaatttcttgtctggttttcttaattcttctaatgaactcacaccgaccatttggatacaatacagatttcaagaaattacacttttctagcacctccctacactgatacttcacttaaatgcacacatttggggcaagataattgaaatgataacaaattaaatgcctctgtttcaagccaacataggaaaaatcttaagtgttctatgcatcaaaatgtcctttctcatggcatgtatattactgcacctaaaa

SEQ ID NO: 53342 - DNA, 1992 bp, Bovine  19866880646864
  misc_feature (1)..(1): n is a, c, g, or t
ngttttttttttttttttcttccaattttattttatttttaaactttacataattgtattagttttgccaaatatcaaaatgaatcctccacaggtatacatgcgcttgttgctgatgttggttgacaattgtcaatttccagaagcatgttctgaataataatagcttatccaattattgattttaactgttttttagaaacatgttttgagcagtaatcctactttcactaaactatctttctgacatatcaaaacccttaatgagaagttacatagaaagctgaaataatgtctcttaggtaactaaaatttttaagaggacttacccacttaattgctaccagaaataatgttagctcttctttttgggataaattatctcacaaaataacagtgaagtccttatgttttctgctttttttttttttttcctcctcgctttttcacatcccctagtagtgaagagaagactctgacagcacactcggcttgcatgtttcagaggaactttggtctcaagctgatcaaagatattttttcaaaacaaaaaatcactcaatgcatatgtacttaatttggcaagagaccatttctagcatattttcccttaagtgtcaaagggatattagaattctgtgaaattatatgttgctctgttcctgcctaactctagccttgattctcatgaagacttttctctagaaagaaaataacttcattttatataatgatgctgaaaatgtcttattgttcatggtaaaaaacaaaattaagatgcttttgctgagatcaacaagctgttgaaaatcttgacataatctattcattgttttgtgtgttgaaaaataataaatagatggtactgcttttttgtgatggaaaatattaatgattgacatgtggtacattttaattgacttggaatcaggacttacatttttaattgacttaggatcaggacttatatatttgtcacctttcagcaaatctggtggctttccagcatttgtatacccttagttgagaatgtggaaattaagagtgataaaataagtcaaagcatttagggtgactgcagttgttaggcagataaagaaaaaactccaagaaaaaacaacttccgatgattttttcatttaaaagtggttaaagaagtaattttagttagatattttcgttatcattcagaaaagtgaatgacaatttaattttacatataaacatgtagaaacaaagagtatcataaatttattttctcctcctaatttgagactatctcatcttacttgcctcactgactcaatggacatgagtttgagtaaactctgggagttggtgatggacagggaagcctggcgtgctggagtccatggggttgaaagagtcggacatgcctaagagactgaactgaactgaacatcttacttgtcaatacatattattccccaaaggatgtggtttatcttttatcaagttaagctacagagtttgtaaataatagcttccatttcttccctgtagagagtattatacactcattatcattaagaagttttttgctggcattggcctaaatgtttgcttttattctgctactcagggttctgatacgttaaataatgtcattttagacttgatgtttacactttcaacactggttttccattcacttaattctgtctgtaacttgctttccagcatctatgtaaatgttgtctctcccatgctgggaataaatactaatgaagatgcaccttgctgttaaagggcaagagaacagctgagtcaaggtctgttttattccctctgctaatttactgagcaagaactaggctaaaatgaaagtcagggcagatgtgtaactcatggttgatgtatggtagaaccattacaatattgtaaagtaattagcctccaattaaaataaataaattaaaaaaaaaagaatgaagtgaaacttaagttttaagcaattgatacagaaggtta

SEQ ID NO: 53343 - DNA, 1989 bp, Bovine  19866880708052
  misc_feature (1)..(1): n is a, c, g, or t
naatgatataaatttctaaatccccagtttcagagttttgaaatggagataatcatgacaccattgttccaagaagtattaacaatacttcttaaacatctttcatttagtaatcaataaattctagctattagcaaagttatatactgaaaagtcatttcatttacaatttgaagaagtttaaatagctttatttatgtctcagtttagttggtaaaggtgaaacaagctataaaaagaaaataataagtgacaaaggcttgtaaggaacatagttctcttaattagtgtgtctttaacatggaaatacagtcatttttacagctttaatgaagctacatattttggaaacagttttgattaagtattttccccaactgccaaatcacattaataaaatttcagaaagtttctcaacttgatttgaaaaatatcagagaactatttaaaaatataatattggattcatcacattagtagtttgtaagcttcatcctaaactagatttaagaagattaaactttccaaacagaaaagaattttgttataaaaatcctcactggaaaagatatattctttatatactaatataatatttgcatacttttacttttgaagaaatcaggattttttagaaatttaacagagcactaaactatctctatcaaatttcagagaggcagaggtagtctcactattcagacttgaataggacactttgcaaccagttcaattatttctcttttctctttttaaattaatcttttctctttgccttgcttaatgctcaacaatacataaattaaatattcattgaatagatgttatgttccaggaaccatgaaaactatgtacagatagagcagtagagtaagggaataaagacatgtgatgttaccatcagaataatttctaaaacaacaatgatttctacaatttaaatagaatgaattagttgaactcagtctcaaaagcctgaaagttttgaataagacacaaattgaaagcagagagagaagcaaaggcataaacaccatagcaggaagcacatggcatgtttctgaaatgacaataacttggggatggttagaaaagagggagagatgtaatttccttgaactaaaaactttgtaattcaaggaactctgtgggcataggctccttccaggaacctgggagatactacagcatactctcgtgggcctatattttttaaaaattacaaaattgatacagtatgaatagaactaggcatggtcactgtctcttttgactatgacttctctgctgtgacatgaagttaaaagacgcttactccttggaaggaaagttacgatcaacctagatagcatattcaaaccagagacattacttggcgaacaaaggtttgtctagtcaaggctatggtttttcctgtggccatgtatggatgtgagagttgggctgtgaaagaagtctgagtgccaaagaattgatgcttttgaactgtggtgttgggagaagactcttgagagtcccttggactgcaagaagatccaaccagtccattctgaaggagatcagccctgggatttctttggaaggaatgatgctaaagctgaaactccaatactttggccacctcatgcgaagagttgactcattggaaaagactgatgctgggagggtttgggggcaagatgagaaggggacgacagatgatgagatggctggatggcatcactgactcgatggaagtgggtctgagtgaactccggaagttggtgatgcacagggaggcctggcgtggggtcgcaaagagttggacatgactgagcgactgatttgatctgatctgatctctgctgtgacagtttttctaatgccagctggcaactgaagggggctgtagccattgttatctgactaatgggaactaagtgagagtttatgccgtttgtaagtgtatgagacttaaaatcacttctgcacatcgttaagtaactgtca

SEQ ID NO: 53344 - DNA, 1935 bp, Bovine  19866880708888
  misc_feature (1)..(1): n is a, c, g, or t
nacatttaaaatagtacatttgaaccacaacaataatttttcactaataaaaatttggcaagggaatttccaactctttaaaacctaccttttaatagctatatcatagtaaatgggctaagtgacttactgattgctcaatgactgttgcttaggaattacatatctgtttttaaaatattaggagaagagatgattgttatatttaattcatgttcaataacacccactaatgatgatacctcatagtctaattgatgtcatttcatgacttacgtattgacagacacattctagagggttgaagtgaagcccactggagaagcaatgattataatcacttgaaccatggtttaaagatgtaaatgctgaactttccaatctcaataaataattaaagatgtatccattgaatccattacttatgacattttggtttgacttgccctctattttacaccttgctagctaatgcagcattcacctgaatctatcaagtttttcctcatgaaacatgaaaagaagctactgattttgcagacatataacctttgtgaaataaaaatatatttatctctttgtggcagagataaacaagaagcagactactgctgtgaaataattatgaatcttgctttcaggaaaatgacatcattaaaaaataatagtgtaaaacattgaatttttttaatttaaatttatttttttttaattggaggctaattactttacaatattgtattggttctgccacacatcaacatgaatctgccatgggtgtacaggatggggaacacatgtaaaacattgaatttttatttactatatgtataaaaatatattactaggaaaaagatagtcagctattcattaattactctccccatctctctaacaagggtggagactcaaagaagttttgctaattgaattgactatcaatcaaaagggtggttttaactttgagtgcaacaataactagtaatgtgagaatatattttttctaagatcattaaatttctgaggtttttgttgactgcttattttcatttaaaaaatttcatttatatgagagattatgaccaatgtaaaagagaggaaactttctaccttttaccaaataagttaatcagattttactcttctccatagaacattttttgatagcaattagcatctgatggaaaataaatataaattcataagacattttatcaaaatttgtatataaaaagtttataaaaatccttgtgggaaatcaataaggtatcattatattaactttcatttagagtaaagcattaaactatgattattgagaacacataaatattttatttccaaagaaagaaatgaaaaggggcactcacaaaaacagttaagaaaaaagaaagaaagaaacaaacaattttagaagtaaatattcagttttagcagaagataaaaattacaaatcctaaacaagtgtagattctgaataaaagttgtgaattacagatagagatttctgtattgtataccactactaaatttaacttctaagttatatgatacttcatataactaaagtcagtttcaatggtaaatgcatttgtttctgtcattaatgttcaaataaactgcctttcagcaatctaatttcacttataagtgtgtaattatctaattttaatacattttggaaatattatccataattaaactggtgtaggaaagggaaagaaatacagcattacagctttgtgatttttactccaatagtcctttgatgttctaggcagaatcaacctcgctgatatttgcacaatgcttgagatactgggaacaaacaacctattggctggcagaaagacctctgatcccttttaaaaccaggaaacaagaaagtattataagaattataaagcaagtccctatgtccttatcctaatccca

SEQ ID NO: 53345 - DNA, 1539 bp, Bovine  19866880730655
  misc_feature (1)..(1): n is a, c, g, or t
naatgatgccatttttgtagagattctgtcagctgttagatttactatttcccctgacttgctcatttctaagcttgggtgaagcccatgaaagcagcaatgaactacggttctgagtgagtaatcttgccagtagcaaataatctcctttatctaggaaaataacattctctatgttgctgtatatgtcactctgcaattttgtcagtactatgtaaacatgactcctgagtacattatgggaatatgagagaggcagggttaggtaacagactgggtcaaggtgttattttagactagagagagagaaagatcgcacaccagctgtattctccctgaggggaatagagaaagactgtatttctttaccaagttttctagtgtcaatcaacctgagcccatacttcccccagtaattgtagatttgctttgattctgaaaataaaaggcatctattaggacatctgaggcaaattcttaatgatcatcattgtgagccttggtgacatggccttaaaacagctggtggcgaaactcctacctcatcttgttctgagtcactggtgctaattatacagaacttgaaatcaagttctggaaagcttagtatgggaatcaggaacagaaagtggataactaataaaaataacagattagagaatatgtatttccttcttctatgagcttaatttaatccattttacctcaaaactgttgtcaaggaacagtttgacattttgaaatgaaggctatggtgtttcaaatgggtgaatggataaatgtaatggattgcactgatcacagtggtctttcaataatatcagataaagagatgttaattgcttaatattaactttttccttattttaaaataatgcagtttcattgtaaaaacttaacaaatacagttaaacaaaagtaatgtaatcattatccataatttcattccagatatagccagttttttgttaagatataattgattctgaaaatatagaaatatgtaagtttaagatatacaatgtgttaatttgatatatttatatgttatgatatgattaccatgttgcattagtgaacacctctattatgtcacataaattatcatttctcttttgtagtgagaacaagtaagatctagtctcttagcaaatttgaagtttataatacgatatgttgactgtgatgctgtgctgtgtattacatatccagaacttatttattagttgcaagtttgtaccctgaaaagcatcttcactcttctcccatccctgagtaagcatcattctactttctgtttctataagttcggctgttttggaagccacatgtaaatgacatcatatggtatttgtctttctccaacttatctcacttagtgcaatgccctcaagatccattcatgttgttgccaatgacaggatccttctctgatggagacttatgttgtttccatatcttgactatgtgcttatacataggagtgcaaatatctttttgatatcctcttttcatttctttggtggctcagaggataaa

SEQ ID NO: 53346 - DNA, 1501 bp, Bovine  19866880760791
  misc_feature (1)..(1): n is a, c, g, or t
ncatatcaaaccaatcaatcttaaagaaaatcaaccctgaagattcattggaaagactggggatgaagctgaagctccaaaactttggtcacctgattcaaacagctgacacattggaaaagatcctgatgctaggaaagattgaaggcaaaagcttgaagggggcaagagaggataagatagttagatagcatcatcgactcaatggacatgggtctgtgcaaactccaggagacagtgaaggacagggaaacctggtgtgctgcagtccatgaggttgcaaagagtaggacacgacttagcgactgaacaacaactgctggctaatcttttgattattttttgtttttgaatctgtccttgactaacattgaaaatgttctaatctaatctaaacctatagaaaatcattagcagattcaggtggcagaagataatccagttaacttaggaaactgaggtagcattcattacctaggaattaatactacatttcaatctgtttttcatcatttatgtaccaccaaccagtcttggtcttgctaagcatggattctcatcagagtaagaatgtctgaaattccaaataccaagttggtttgttagcatgatactcttcatactgtgcctgccatatatccattccttctatattttcctgtttctcaatttccctaactctactgtttgtgatatagtttatgttgactttgcacctgtgtttctttaaatcctactaaaacttgagataacatgaatacacttttgtgatgaatctgtgccaaataccttgcttggtactttgtaaggcatcattttcaaatcttgacaaatgtagagactttttgttctctctatttttatagttatctctgtcctccagatttttatgtacttttctgtttgggaatgttttgatgtccttattgcttccaactcttatttcatctgcatgatagttctgttattttccgtcttgcctctgtcatcttgccttagtcaggagtctcagtcaaagtagtctttcattgtaacctgtgaataattgcttagggaaagtcttagagtctaattaaatttgacattaattgctttctaactttgtgagcagcaataaataaaagtgagcatctcatggactatttgagggttcttatgatgaaaaatgattcaaaacaccaagaatcacattgtgatcttttctctgacagagtatgacatcacatagtgtaatataaatacaatgaaacacaaaaatggaacaaaatataaaatattggccaatattggtcataaaatgaaaaaccctaagtaaatgcaaagaaaaactctcttcaattaatcattcaataaacatatatcaaacaaacaaacaaaactagtataagccaagcactttccttagtgttgtaatttttaagatattggtataaactttgacttttggagaatctactgtgtgacaaaacttgatctatatcaaacaacaatacattctatt

SEQ ID NO: 53347 - DNA, 1150 bp, Bovine  19866880773344
  misc_feature (1)..(1): n is a, c, g, or t
nctcacttttctggacactatagggcttccctggtggctcaggtggtaaagaatctgcctgcaatgcgggagacctgggtttgatccctggattgggatgatcccctggagaaaggcatggcaaccctcttcagtattcttgcctgtagaattcccatggacagaggagctgggttgactactgtccatggggctgcaaagagtcaaacatgactgagcaactgagcacagcacatagagactgtaacctatgagaccttagtgttttttggtgtgtgatggctgataaacatgacttgcactgcatctaatgttaccttcaacaagggaaaaatatgaccaaagtttaataaggaaggccaacatggaccattatgccccacatgtttttttcctactttatgttgtgtattatcaatgcagccaagctctttaattcttatgaacctaaccccacatgtccaagttgtagctgtgtaatgtagcttttctttttagtgactgaatgtgagccttaaagcagagtcataaaatgcatgaggaaatagaatctgagttacgtagctgcaagtaaatagataatacaattcatacaaaattcacaaaaggactaataaagctaaaagatacaaatcagatcttaggcaacctatattggataagtgttttcattgaagatacacttttcaaaaggcattagaaaaaggtttggtcacttagctggcagatcaagaaagtgcattgagaacatatcagaaggaatcagggaaaaggaaagacagaattgacttatgaggttgtttaccatgatataggcaaaggataaatggaaacaagatatgtgaagtatataagataagaaacacaaggcaaggatttgaacacattttatttttatttttttattttttattttattttattttatttttaaactttacataattgtattagttttgccaaatatcaaaatgaatccatcacaggtatacatgtgctcccatccttgaaccctcctccctcctccctccccataccatccctctgggtcgtcccagtgcactagccccaagcatccagtatcgtgcattgaacctggactagcatctcgtttcatacatgatattttacatgtttcaatgccattctc

SEQ ID NO: 53348 - DNA, 1202 bp, Bovine  19866880795499
  misc_feature (1)..(1): n is a, c, g, or t
nttctatatttccccactctgatgacttcagtctgaattttaaatctgttggatcactcagctttgcagcttttgtaaattgctttctgcttgcctggggaaactctttattgaaggcaaaaattgttgtcactttctaaaatatttaatacaagggaatatcaattaatcctgatctgagtttcagagccaaacactccttaggtagttaaagtgaaaataatagtacaattaaggatggagatggggccttcttcaccatacaggtgagagatttgaaaccatcactttgaataaatcaaggtcataattgagaaaatatcatatctgtatatcatcatatctgttaatcatttatctgtaattattttaacaacataaaagaaaagtgaaaacttttaagtaattaaatgacaatgcacatagctataaaaggataaaaattgcccaataggctaaactttgtcctgttaaagtattgaattagtccagagcactaaatataaccagaatgattaacagcataaaatatgagtgaaggtagaaaagggaaagatttgattgagggatgaatttatttacagggcaggaatggagaaagagacatagagaacagacttatggacatgggggcagaagaggagggagagggttagatgtatggaaagagtaacatggaaacttacaatgccatatgtaaaagagatagccaatgggaatttgctgtatgactcaaggaacttaaacaggggctctgtgacaatctagaaaggtgggatggggagggagacgggagggagtttggggagggagggaacatgggtgtacttacgactgattcttgttgatgtttgcagaaaacaagaaaatcctgtaaagcaattatcttttcaattaaaaaaaatttttaaagacaaaagaaagaaaatttggtcttttctagcaaagagaaaaatataagaaataaagaaatgatccatattcactttaaaaaatagctaaatagaaagctatacacccagcttattttaagaaataagtttcctaaagatggtatctcattgcctttgttttcttcccttcctggttccccttcctcataagaacaatttcacaggctttaccctggacatgtgcaaaaatctaaagggcgggggaaaataattaatgtaaatcctccattctgaagcctacaactaata

SEQ ID NO: 53349 - DNA, 995 bp, Bovine  19866880950545
  misc_feature (1)..(1): n is a, c, g, or t
ncctaaagttattggtatgttaattgaatgtggtttggggaaaagtgtcatctgccttacagcattcatttgcatattaataacaaaactttgttcagcagagacattttctgattaaagcactaatgtaagagcttgcttagagattatatgatctcaaattgtgaattgaaatagtcataatttcataaaggaacatacatttcataatgttcataaaggaacaaagaaacagattgaaacttctgatagcacatctatatgcaccaaagggcaaagagagcaatgctctaaggtgtattactgaaagtttcttgttcttttgaaaaaagaaaaacaattctcctatagtataatgctttatggtggccaggaggagtttccagtgtgcttgaaaggaaagctctcttgagagtttttccccaagcagttggcattaagttgggaatcttggaacacacatcaagtctggccagcagtgactctgagacattgaattaacgatatcaaatactaagaaatatttaaactgcttaatatgtctggtaatcctaccagttcatatatctggagcctactgacaagactctcctctagattctatttcagtgaggtccatttctaatttccttagtcaatcctgcttaacttagattttttaaataagtgcataaagctatgtagactactactaacttctacaaaacttctcagacagctatgttttctaaaaatatttcttttttaagaatgcccaatgtttaatccagttgattcagataccactttgcaattatgctgtttctttggctgagcacaaactcatcttatctcaggaagatcataattttgcataattacactatagttttgtaacttgtattatgtaatattccttgtgatttgataaccatttatttttttatattcattatttgatttttcttccaggaaagggaaaggttttggactcaatttataaaaatttataatgg

SEQ ID NO: 53350 - DNA, 1399 bp, Bovine  19866880975731
  misc_feature (1)..(1): n is a, c, g, or t
nactgcatttcagactcttttgttgactataatggctactccgtttcgtctaaagattcttgcccacagtaatagatataatagccatctgagttaaattcacctatttcagtctgtcttagttcgctgattcctagaatgtcagtgtttactcatgtcatctcctgtttgaccacttccaattagccttgattcatggacctaacattcgaggttcctatgcaatattgctctttacagaattgaacctttcttgtatcactagtcccatccacaactgggtgctgtttttgctttgtctccatacctttatttttttctagggttttttctcctctgatctccaatagcatattgggtacctattgacctggggaggtcatctttcagtgtcccatctttttgccttttcatactgttcatagggttctcaaggcaagaatactgaagtggtttgtcattcccttctccagtggactacgttctgtcaaatgggattaggatatgacattttttctagtaaagtttattaacatatctgaagttaagtctggaaccctaagtcttaagttagaaatttggtacatgcttttgcttttacttttttcccccagaaaagtggaaatgccattttcagaaagagtgaaaataagagtttatttagtgccaagcttacctgagttctatccataggtatatgattcaatcaatgtcttgccataatcattacagatgctcctgaaaatagtacccatttttgcagagttctaactttgaagataagattgtgggtagaaaagtatgcaaaattttcaaaattatatgaattattgtcgtaggctagaattgagagtgacaaaagattttcctgttttcagcctgaaagctgaaatttacaaaaattttaaacactgcagaattcttttgaaggcacttctgatgagtttaaactcaacatggagatgtcttattattttcttcctaaaattgtcactaacagtattacatactttgtaaggatgacagttggattgagggcaaagcaaatgatttcactctgtctcagtttaaagtctcagaggctgctggtatttcttgacccaagatgaatcgatttctagcaatacgagctaggagaaatctaattttgtttaccaaaatttatatttgagaattagtgttttatactaatttatatatatataaaaaaaaaaacagaaagctgaaatgactgaattttaaattattatttaaaatttttagtcaaaaaccctaacataattcagctgcaaattccacccgaattatgggaactaaattcattttaaactaaatataatagtgttttgtgttctagcaaaacttattgattttctcatggatcatctaatagggtatt

SEQ ID NO: 53351 - DNA, 1467 bp, Bovine  19866880976000
  misc_feature (1)..(1): n is a, c, g, or t
ntgggaaagactgaaggcaggaggagaaggggacgacagaggatgagatggttggatggcatcaccaactcaatggatatgagtttgaggaaactcagggagttagtgatggacagggatgcctggcgtgctgtagtccatggggttgcaaagagtcagacatgactgagaaactgaactgataaagtaaagaagattctaaaattattcttagtgaatggtaaactctggcttttgccaacatactaacatttcaatttgcattttgtaaatgattaaaaattgttttccttgggctacaatctatggcatagtcttctaataagaaggttaatgacaagtttcatggtaataagaatagtcaaactattgtcagcaaagacacacctcagattattatttaaaaagtcttgctttatgatctttttattgtaattaagatgttcctgagttatgaccaaagctggtatttagaattgtctaatgaatgtgaaagatgatgctgttgactatgatgacatgctggatcaattggtgccaagtcaaagcaatcaatagtgttaagaaaacatgatgggctgatcatgggatgaaaaacctttagcttttatgaatgtttaatcaggttctggatgtccataggcttctgaattaagtcactcttaaccacacccatattttctctctttacaatgtttaagaacaaacatagtgctgtctgataaatattatataagtgctttcataaccagtataaaagtgtacagagaaataaattttgcaggtgttacatagagaagaatttcaaaaaatatggaacgtggtgatagaatttgaaactaacaatatttgtcaacttcactaaagcacaggagcaattttcaaagcaggaacatgttacattctgtggtaaacagcaggacagcaagacttgagaagttattgcgctaaccctactgaattttgctgccttaaaaacccaggtaccttccttagaaggtccttctaattctatatagcacagtatctatattgctttgttcagaggtaattacttagggcctttagtttattattaactttcttctgcattcttttggttacacttcccaacagagcagtgggtcaaacgtagacattaccaagtgatggcacatgtaatctgagctgtgatctcagcagtagaaagggtagaaataccagaagccaagaaagcaataggagctatagtcatttatgctctgtgtggtgttatacccaactcaaattactccaaattgcataaggccattttttgtgtctttgtcattgccagggcttctgatttcaccatgtcttaaaattttgtaggcaatgtggggtcatgtctaccccagagcatgaagcaaaaaagcagagagatgactcctgcaggtgttgtgggaaaaaggcctccagcactttctgatatcatggtagagaatttgt

SEQ ID NO: 53352 - DNA, 1507 bp, Bovine  19866880989476
  misc_feature (1)..(1): n is a, c, g, or t
naccattatgttttgaagttagaaaatataaactttgcttatttatcatcttcattctgattcattattctaaaaagagttatacaaaatgcatattttaaagctgatttttctaatcattattattttaataaaacttgaaaagataactttaagaaatagctaggaatatgatcattgttatgtaaataaaacttttaatgagtttttgcacaagttaaattatgggagaaatttccacgaaatcgcatttattttcacagtatggtttcctctttttcagttacacgtttttctttcatctctatgtaatttacaagaccacaagtcaactctccttctcacctttgtcttttgggaattctctatactgaatatctatggcacaaatatactgagaaatagaactctgaattttttgcccctctatggcaacccattccagtgttcttgcctggagaatcccagggacgggggagcctggtgggctgccgtctatggggtcgcacagagtcggacacgactgaagcgacttagcagcagcagcagcagcaagttaaggttaaaaaaaaaaaaaaatcaagatctaaagctttcagctttctagattttatttctttaaaactgactcacatgttactaaactggctttattttctgaagctattttcaccttaaatatcccatgaagtgtttatctttgagtttccttttcagtgggcacatacacaacctttccaaatcccttactcaaaagttcaagtgaacattatgtttattcttattcaattgatcaattttctccaaatcatatttttaagttcatgtctaccacaagaacagatttgaaagtgatattcctggaaatgatggcttcatatcaaagtcaatttctttgcacaaattttgactcatgagagtcaagtcctgtgtgactggtcacacacaacacagaagctcaataatgacacctgaatagaatgcatttcagggaaaaaccttcttagcaaataatccattgtactttcagtctttttcagtgtcacatcttttatctgaagggttctattatatcggaccagtttccaatgagaacaaaaaatagtcttttaagtattctgatttttattatattctctgataatctaagagacttatgtaataataatctggaaaattttgaaactatttttttccttttttttctcccacagggcttgaaaaataagtagacatttcctcttaggttaaaaaaaaacaaacagataaacaatatattcatatatttccatataagttgaaatttcaagttctaagagtttgaaatgaaagttattacaaaaaaatctcctttaccagtttagatgggtgaaaatgcaatattttatttaatgactggtttgacttattccctaagtgcctagatttagtttcttattttccaaccaaggaaaaaggaggaatttaaaaatctgccatatatacatgacaacattaaaaaaaaagt

SEQ ID NO: 53353 - DNA, 1583 bp, Bovine  19866881243499
  misc_feature (1)..(1): n is a, c, g, or t
ntcttatgttattcctcaggattttatttttcttgcagccatcagaatttacctccagatcatcatgacaataaattgtcttccttcaagtgtctaaccaagaaaatcaaggaagcctacaaaacacataatttactgacatgtgggcataaaactaacctaaaaagcttatgtgtttttttataaaaataaaatcagacaaatataatacctcatggggttatataatattagagcagtaattttctttcagagaaatttggtcagattattggttagttggcttaaccaagtgcaccagctattcaatggcagcactatgtttaaaactcatgtctctaagcctgcagccctctacagttttactaacatgatggcacttttgcaacaatttacttcattgtatccaaatctcttgacatatttggacaatatttatctcctatactttactgcaaaatgggtaattttgagataggttggcaattccttgccactgctaagtcacttcagtcgtttctgactctgtatgaccccgtagatggcagcccaccaggctcccccgtccctgggattctccaggcaagaacactggagtgggttgccatttccttctccaatgcatgaaagtgaaaagtgaaagggaagtcgctcagtcgtgtccgactcttcacgaccccatggactgcagcccatcaagctcctccatccatgggattttccaggcaagagtactggagtggggtgccatcgccttctccgagcaattccttagaagcagttaaaaatactagattgagcatgttttcctaaaggcttatttacaatgtgtgccatcttctctaagctagaatcaagcacaatgagaatttatatgagatagtcacttcatcctctaagaatataattttaaaagtatgtgatagtccaaattttgtaatcaggcagcaagaccattcacaattttcaggatagttttatgtataaatcctgacatttcaaaaacaaagcaatcaatatatttatctacattaatttattttctttctttttacccaggtgtgtattctctgtagtcccactaatgcttacatcaataaaaatatggaggtttcatgattttttagattttaaaagttagttcacatgtttggaactaatacttttagaaacttctgattagtttcttgcaacttatggagattgatatcttaagacaaagtaacacggtgtcttaaacatttctccattgagaagcgatactttaaaaacctgttatcctctccactgacctgagaaacctgtttacagcactgctctcaagagtgagggtggattaatagattcaatctttttttttgtttgtttctttttggaattcagtttaactcctattttctagacactgttatctgtttaagattactggtgactttacattttcacttgacaatatagttgtttgaaaatgaaccttcatttgttgtaaatatctaatttaaggtacactcaaaacccagtgtggggaaaagtagacccattaataattgcattaatcattctgctatagaattagagacagt

SEQ ID NO: 53354 - DNA, 1657 bp, Bovine  19866881296372
  misc_feature (1)..(1): n is a, c, g, or t
naatattataaagtaactagactccaattaaaattaaaaaaaagtgaaatgaatcctataacctctcacattcagaaaagcagaggaattttagaaagttctcaaaaatgcttggtaaacatctcgcatgtaccttacatgatgtttaacaccgagggcacaagcatacatgtgaagcgtcttctcttttggtctagttgagcagtctgatggagaaaacagacatacaagcaaattgaaacacaacatgaaagcactaaaaattaggcataaacttctgttttatcaaacaattgtttgttgaaaaccctttctattccagaaatatttaagtacccttcatggactattatctttgcatgagttaaagatacaggggaaaacagactggaaaagataatccaagtagcccttcaaaatgtattcaactaaaaagccattaagccacgtaataaaaatgaaaaaaatatttttttgctcaattcccacatgcaattgcttttacattattttgtttttctacttcatgctcttttctgtctctacctttacttccacttgtaacatatacttcaccacttcatcaagttcttttgtattttgaaaaggcagcacagagtgtgatttgtggatcagctgagggttttataaactttaagcatactctaatcatgaatgacaatttttttttccattgagtaaaatgggtatttttaaactgaagtgtctgttaggtgtgaaaagcaaaataacagtgaagtaatttattagacctcagttcatagaaaagttcatttgcattgtgctttagaaaatgtaagagtaaacaaaattgtgtgtatgttaaatgaaagaatacttaattaaacttaccaagtcttgatgaattaacgcattatagtattcaactatttagaaacaattgctgagttttcaatatgtttagtaggctcatctgtttaactttccgcattaatattattagccatggaatgactagaattagaatcctgatggtcactgaagagtgactatgttgatcttcattagcatcgttatctttacaacacttgaagcaaagcatgagttataatcaacttaattacattctcctctgtgtgaagggaacagcttcatgtgagcttctcagactcagtgccaggtatagacactatgtttgatatcttaatctacaggacactgaagtaacaaaaaactgacttcaaatcaacagaaatgaatgtctgtggcagtgaaattgtggctccttctcacatctttatttctcacatatttagtttctttattgaatttgcttcctctgtcagagatatggtatctcctggaagactgacatggcagctctcccattcatgattaattgggtaaagccagtcacattatcaaatggaatttgtctccaataagcaggggtcagtaggaaggagcagtaaatatttcagcaatagtccattctatctcaggggcaaagagtagaaaatatctggttggccgttgtgcctctttgtgtcacaggccagtcttctcctggaagaattataatttttaacctattcaattactctattaatttactgcggatgtgtggatcacaataaactgtggaaaattcgaaagagatgggaataccagacca

SEQ ID NO: 53355 - DNA, 1436 bp, Bovine  19866881349322
  misc_feature (1)..(1): n is a, c, g, or t
ngcaagaatactgaagtgggttgccatttccttctccagagtgtcttcccgacccagagatcaaacttaggtctcctgcaatgcaggcagattctttaccgctttagctgtgagggaagcccaaattgttattgggggtggtttagatgagtatgttatgatagtttatatacatatgtaagcttataggatatattatgaactcttactcaattctctagtgaatagcactgccaattagtagacaaaatgcaaagtaaaagctagaaattctgaatttactgtgatctttgctgtcaatttcttttagctttgcttcctctatctccagttcttaaatgtgagtgcgaggggataataatcagtttggtaccttgcactgttgtgaagtgtgagtagctgttttattgataattttctaagaattcatatgtatatgaactttactgaactttaattaattttgtttaaaatgtattaaggaaatcaacttgaatcacagaacaagattacacagattactttaaattcagatactctattacatgcactctgcatagtcccctggtaataaaatcttcattctgttttcccataaagctgattacaatactttctgggtacaatacaatataagccctctttggaataatccatttggatattactactagtattagaagcaggacaagtaaagggaaggagttcctaccacagaaatttttaaaccctcctttggtagcaaaaactaaagtcaagcccttttaatagcagttacttggtgacccaacactcaaatctagcctttattgtgactctatggagacctctggattaactcacttttcaattttcctattggtatagttaatttagtaattattgtatcataaatataagattgtgaataaatttgtctctactatttcatttccacaataaaattatgttgattttataaacttgtggttagttcttcagttttggctctcaccacagattaaggcttcagatcagatggtagcacactgacgtcagggacataccacctctacttctaaggtaacagtaaaagtcaccacactgagttcttaatatagctgcctgaattgcatttaatctattttgaacgttattctcactgacccatatgtttggcaaccaaaactaattacaagccttaatgaagcttgatacaatagaactgttatcttattagcaccttattttgtgcccatgctacttcagatttgcatttcttcactatggaacatatgatgccctatcatggggaaaaatgaaacagaaagaaaattcactgaatctacttgagaaaaacaagagtgcaatttgccacacagcatgccctctgatatgcacacacatgaacttgtcataaccatctgtagctctgcttacacgaagatacacacagg

SEQ ID NO: 53356 - DNA, 683 bp, Bovine  19866881702556
  misc_feature (1)..(1): n is a, c, g, or t
ntaagtataaaaggctcaattttgaataaatcaaaagtgatatccttatttacatctaaatgagacgttgatcagaccatttgtagaattccatatttcgggaatacatatcaaagccattgaaacaaatttgggagccaccagcatatagatagtatttaaagtcatgagaatgggtagaaatgagatctgaggttggagccttggattaatctatttttggcacgctggtgtactctgtcacagagatcaaagagcaactattggggcagaatgaaaagaagaatgtgtggtcccctggaagcctaggaacaaacatgtttcaaaaaacaagaggaagagatcagttctgtgcatttgtttcttcatgctttcattcattttatcccagtcttaatcaatataagtaggaagaagtaagcacattttatctattgaagagctagaaaacgaagttgaaataaaaacagaaaattcatgaaaaatatagtgttacagattctattttctgatcacaatgcctgggatatacaagagcacaccccattttcttatttatatgatagaacctgagggtagaccctcagatgagcaacacatgtgtgaatatatatctaccttcattgctatgttcaatggcaagactatcattttctttttttcccccatttccagactaccag

SEQ ID NO: 53357 - DNA, 797 bp, Bovine  19866881775797
  misc_feature (1)..(1): n is a, c, g, or t
nagacattactttgccaacaaaggtccatctagtcaagggctatggtttttccagtagtcatgtatggctgtgagagttggactgtgaagaaagctgagtgctgaagaattgatgcttttgaactgtggtgttggagaagactcttgaggatctcttgggctgcaaggagatccaaccagtccattctaaaggagatcagtcctgggtgttctttggaaggaatgatgataaagctgaaactccattactttggccacctcatgtgaagagttgactcgttggaaaagactctgatactgggagggattgggggcaggaggagaaggggacgacagaggatgagatggctggatggcatcactgactcgatggaagtgagtgtgagtgaactccgggagttggtgatggacagggaggcctggcgtgctgaaattcatggggtcgcaaagagtcagagatgattgagtgactgaactgaactgaacttttagaatgtatcattcataacattgtaatcaaaagtaccaattcatatcataggtgtaggagaagaaccactataatgatccatgaattttttactcctatttgtgcagttaatttatttcatggaaatgatggatttttcagttcattgtccatttacactcagggtaaaagcataaaggtcagtaaagaatgtttaatgaccagaaaagttgctaactaaggaatatagaagatgtgaaattgtacattttcatcctgtctgggaacatctatattgttaagtctaatttaaaaaacataacacagt

SEQ ID NO: 53358 - DNA, 1086 bp, Bovine  19866880478399
  misc_feature (1)..(1): n is a, c, g, or t
ntccatgtccagttctaactgttgcttcctgacctgcatacaggttttctcaagaggcaggtcagggtggtctggtattcccatctctttcagaattttccacagtttattgtgatccacacagtcaaaagctttggcatagtcaataaagcaaaaatagatgtttttctataacattaggttactcctattgaagctattttacctttataaaaaaacattttaaaatatatcaaaatatggaagaaagatgcatacaaaccatatcattttattcctaatctattttaatgaaagtcaatgagagaagtttaagggcttattttgatactttgagggattttatctgtaagaaggggatgaagttttaattagtaacctaataaatatttgaaaaatacaaagaaaattccacttcatagggttaatgtgtaatgaccaaatccaataagggtaaaaacagatatcataatcaagttctggaaaggaaagaaaatgaagtcactcagtcgttactgactctttgtgaccccatggactgtaacctaccagcctcctccatccatgggattttccaggcaagtgtactagagtgggctgccattccttctccaggggatcttcccaacccagagatcgaacctgagtctcccgcattgcaggcagatgctttaaagttctggaaggactatgttatttgagatttgcggaagtgaaaaagcaatgccaattattctgtttttactgaaactactttggtaattaatccatttccccagatatttgtccatttattgtgctatagtacagtgttaatatttctctttacaactgcaattactatagctgtgctctgggaaaacctattaaaatatgttcttaattaatttgcaggtctataattctatttttaagggttcattaaaaatgatttgttcatttgtattttcaactcattaatgttatataaatgattttgcttttattatttatcagttaatagaaaaatattttagattgtaaaagtaccccaaaattataaaggcaaatttaggaattaggtaagagcattaatttaccataatt

SEQ ID NO: 53359 - DNA, 1647 bp, Bovine  19866880592718
  misc_feature (1)..(1): n is a, c, g, or t
nggaagtcatagttgatgagtaaggaaacttgctgtacatcggatgcctctggcctatgtcaagaaagaaaggagcttcagtgtgtgagtgagaaagcacaagtctatccagaattaagcatacatgtacacggtcaaaggaaggaaaaggaaataaaccatccccctccctcagaaaccggaggtttgccagattttattccaagttgctactttccaaaagaggggcactagtggcccccttcgaaagagggaataaacttggatcagactttttttaaaattaatttttattggcgtataattgctttaccactatacatgtgttagtttctgctatatagcaaactgaatgaactatacatatacatatgtccccccacccccacctttaaaaatttctttcccatttaggtcaccacagagcagagttccctgtgctatacagtaggctatcattagttatctaatattttatacatagtagtatatatacgtcaatcccattctcacacttcattccacccctcttcccaccttggtttccatgtgtccattctctatgtcagtgtctgtatttctgctttgcaaataagttcatctatatcattttctagattctacatataagcaatattatatgatatttgtttttctctgacttacttcactctgtatgacagtctctaggtccatccaagtctctgcacactgcacaattttgttactttttatggcccagtaacattccattgtatacaaaccacatcttcatatacattcctctgttgatgaacatttgggttgcttccatgtcctggctactgcaaatagtagcacagacttttaaaacttcttttaagagagtatggaagaatggaaatcctggaagtagagaagaaatctggaattctcaaaacagttgcaaatcactggtttttgcaaatatattaatagatttatggaaaaatgaatgtagtgttttcaaagactgtggttttgcctattatacagagtgaagtaagccagaaagaaaagcaccaatacagaatactaacgcatttatatggaatttagaaagatggtaacgataaccctgtatgcaagacagcaaaagagacacagatgtatagaacagtcttttagactctgtgggagagggagagagtgggaccatctgggagaatggcattgttttatctgttttgataagcagggttttatttgtgagtaatcagaaaatgaagaaatgggactttttttggcttcaaattgaggttgatatgaattctgcttttttcttttttttgctattctcttttttgttctctgcttttcaaaaataccagaccttaggagaattcacatacatttgagctgtcttataatattatggagtggaattgacccataggcccactggacctgcagcaacgaaagctactgtcactttcaaggtgtatgtgaagggcatgttacttctgccctggttgtttaaactcgatgcgtatactgcaagttattcttgtcctgggtgaaccagtgaaaacttctctgagatttcacatactagattatcttcttcttagatttcaattggaccagtttagaccttgactttttaaataacaggcaggtaaacttcaa

SEQ ID NO: 53360 - DNA, 763 bp, Bovine  19866880670968
  misc_feature (1)..(1): n is a, c, g, or t
nttggatgatttgcaagggaaatcagacattcatgtactgcatttttacacttggcagcttcactttaactttaaggcattctgctatacagaatggtgctctgttaaaatggtgcgatgtttaaggttaagaaacatctgaggtagagttttaaagtactcatacatatgttatcatttagcttataaactttttggattacttttaaaacgcctttcaactacaaaatgtatgaaatgttcaaaagttcaaaattcagaaccttctgtgaatttaaaaattagtcttgaactatatatatgaatatgtatgtatacatgtaggtacatatatagtgaaagtaactacacgtgtagaaatgaatactgacatgccaagaacaaaagagaatgttctctatatttttgtgaagaaataagataaatgcatttctttatcttcactatcatttatccattaagatagtgaagctgatgcaaaagagaaaattaatttaatccaaaatatcaagaaaataagtgaactggttgtgtcacacttggcctccgaacacacatcttacacagtctcacttacctaccattttctcatcttcttaaagaagagtttaaactagatgacttttaaagtgatctttaattatgaaattctccacataaaaataaatccttatgatttattggtatatgtcaatatataacctgggttaagttctttcctagtaaaatagctcacattcaaatgaggtagaaattcacatat

SEQ ID NO: 53361 - DNA, 994 bp, Bovine  19866880720030
  misc_feature (1)..(1): n is a, c, g, or t
ntgtattggcagtggtgcatgtaacagatgggactgagtgtaggcagtcaagtgttcaagctctgtctctgaattgactaatggttttgatggcagaaattcaaggccaaagtactgggatgctggtctctgtgttgtattgaatgtctgcaattaaagctttgggaccactccctttctgctctaactcaaacttaattaattttgaattaaaatgaatagtttccacgaccacatgaggtccattttgggtttggctgatcaggattactgtaatgatgtccccaccccttgaatattccccacaaaagacccctaagaagccaatttaaaatgccgtccaaagtggcatgttgctgctaaatattttgatatgtatagggcattttcatatccgtgtcctctgtagagactctgtaggtgtcctctcggaaaatgccagtgtagcatagaatcagcatgggcatctggcactcaacagcaattctgagaaggtcatttgtcagggctttcagaactatttcagatcaggtcttgctctaaattaaagatctagtcccagatacagttttcagatggaagttttaaatcataccttgtctggttgtttttatcataattagttctattgtttaaagttcagacctaatacatccacaatgatggatttagtttccacgtgggttatttagctttattctattgtattattgcagattgttcttttaatcctactagaggccttgcaggtgccttctgtcaggaaaaaaatgtgtactgttgactcttgaacaacacagatttgaactgcgtgggtccactcatatgcagatgtttttcaacagtaaacataccttgcaacacaaactgtaatggatgcagaacttcagatatggaggaactgtgtattggaagggctgactgtaaaccacatgggaatttttgatactaatcaagagtcagtgcccctaactgcctacattgttcaaagtca

SEQ ID NO: 53362 - DNA, 2556 bp, Bovine  19866880739412
  misc_feature (1)..(1): n is a, c, g, or t
naatttattaggaaattgaggaatctctcgtgctatctttactgcctttataatcaatgaaaatcacactggatgagatgaatatgggaaatagtcatcagtcatgtaaagagaaggtcattatctgacagtggctgggtgactgcaagcaattgctctcagttgcactgaaaacagaactggagagaagtacaaacggaaacaagaagaaatttaggttaggcatcaggaagttcattaactgtacatgttttgagtcatggatacgcaccactaagacagttgcaacatatctgatgatgtaagagatccaatgatttgcttaaaacacacacgtgggaaaaacaggatttcaaattagccttggtcctgggtttatggctaggtttttttagacagactaaaatgtcaacatactgagaacaattgtggtttggagatagagattatcagtagtcaaattcaaatggcatatttggatgaactattaaaattttgttatccaccataaaaaaattaccttagtagtggcataggacaatttgttaaatggagaagcccaaaataccaacagcatgctgctgctgctaagtcacttcagtcgtgtccgactctgtgcgaccccatagacggcagcccaacaggctcccctatccctgggattctccaggcaagaacactggagtgggttgcccattttcttctccaatgcatgaaaagtgaaaagtgaaagtgaagtcgctcagtcgtgtctgactcttagcgaccccatggactgcagcctaccaggctcctccatccatgggatccaggcaagagtactggagtggggtgccattgccttctctggccaacagcctatatacaactatttccatttgttgtgtcctatacacagtctgtgtctctcttcttaactgagtgaaatattttggattgttatagtaaaatttatttttattttcattataaaagtgatatgagttcattgtagggattttaaaagcacagacaaaattatctgtaatctcattgatacattttcttttagtcttttttctctgcacaactttaaaatgaattgcagtaatactgtggataaaatttggaaccttgcttttcatttaacctttaccaaaacattttccatataatattacctagtctacatagatgttattttagattgctaacattcttccaagtgaatagatataattttattaatcattgttgaacatctaggtgctatggtgtgtgtgtttgtgtatttatttattttaaaggtaatttccctaagctctgtttttaagtgtagacttgtcagattagggaaaattagagttgaagacaaagattgtgattttttaagaagatggcttttactggttttcttttaaggttttgtataattctttatctaccaaatgaaatatttattgagtgtctgtgagatgcaaaacatagttattaggcacagagatagcaatatatttagtatttggaaggatcttctctagttacaaaatttctccttatggactttcacaggtatcaacaaagctacatgttgaaaattcttcatctctgcccgaaaccaatagacagtattattgactacttacattattttggactttaaaacaacagaatttataaataacttttgtagaggattatctatatgttgttcatatttatatgaattttatgatctgtgacaaagaaatagaattaggaagaacaaatattttataatagaagtctgtggaaattagaattatttggaggaaatctaggcagcaaagtgtaaagaaaaagtatagaaggtgcatgttaaaacagagtttcagttttcagattttctgcttatggaaacatgagaatggagtatggcatgagtagggtgggaattagggaagatatgaaattttaattctgttattggtgttgaatttgggaattatggttatataaatagaatatattgaagtaaaaagccaagaaattgctaataaataaaacgatttgattttcagaggtagtggctggtacagagaagtcaaaatggagagagtagaggtatcagtatttggtgggaggtaaggtatagggttgtgaatatttaaagaatatattttgcctgcatcaccttgttttaattgtagaattttattttttcagtggtatttagagaaaaatcatagctacggagggatgggagttccattctttgttcactctgaacttctgctagcatgtttctattttttctttgatataggagggattaagacttaagtagagaagttggcagcccaatcttgcctgaagagaaactatgtgcttcgtaatgaagacttaaaaatagtgtttatttatggatcattggctcatgggaatgttactctagagactcaaaaagaatgattttctaaatcttgtttcgatactggattttaagtgacatgatattgtggaactttgggtggaagtccagagttttgccaaattgcaaacctaaggaaagtgacagataattgagactatagaatt

SEQ ID NO: 53363 - DNA, 1337 bp, Bovine  19866880795447
  misc_feature (1)..(1): n is a, c, g, or t
ntctgccctcagttatcttaagtgcggtcttggtctagtatgtttccctgaggcactaataatctagttctttcaagatctctctaacttttctgtgagcaacacacaaatcaatccaggatgtcatttccaatagcacagggaagtaattgttttgaagagggaaatcactaattgcttttgaatgtgctcctgtcaacaactcacattattaaaaacaaaaccttcctactaaaggctcaccacaaatcatctggaatgagagagttgaaaatgaaagcatgagtcaaggaggtttattttaagattttccatattttgatcaaatgctggtgattacattatatttttttctgtactttgctaacaaagagtaagtcacacattatgttcttccagaatgattcttttcttaaaagagccttaaagaaacagttatgaatcacagattatcttaatgacagatataagcttcaaaggtacattacctcataaaataataaattaaaaatactgttcagagagcttcatctgtttcctacttaataattccatctttgaatcttcaaataggcatcatctaaattgtatttctggcatgttctatgactggtaacatgtcctcctaagataatattaggcaatgtaatttttttttaaattagtcaaaggtgtcttcagcctttgattaatacagttattaggagtatagagtccagagatagctccattggttcaaatctcaaccagaagagccatatgaccttggataaacaaccactctgagcctccatttcctcttctataaaaccaaaataatactagagcctactccagaaagttgttgagaatattatagcagtttatagatagaaaatgattatagcagaattgtcacacagtaggcactcataaagtattagctgttatttcctctctgtgtatatacattataatttttaacttaaaatatttgccaacagtagaatggaattctctgatattcaataattcaagcttcacagagtcaaagcttttatttaaaataaaatttttctaatattcaacttggaaaatacggatttttcttagtatacctcagtactggattgtatggatcaggcatgaccatacattctttgttagacagacaaatgtgaatcattttgtaaataatgtattttcagtttatcctaaatttgccttatgtctatttgaactaatattaaaatcaaggttgctgcaccaggggctctttttgcacagctccttggtaactaaagaagggaaaaaataacatagaaacagctaaaaaatgtgacaaaatttagtgaaag

SEQ ID NO: 53364 - DNA, 3107 bp, Bovine  19866880898908
  misc_feature (1)..(1): n is a, c, g, or t
ntccagacaaaacatgtaatgtactcaccccttccaagatatcagagaccaatgtccctgggctccaaggactaacagttcaaaaatgtaagatgagaaggtttattaccatcatacttatcagactcaatctcttgtgtacaacttctgttatcttcaaattttcatagcttcaattcactgaatccctacctatgggttcagctggactcactttcagaactaacccaagttctatgatgtgcaatgggtcagaggacgaaatctaggagcaagccccaggaagttcaaagactatgaagtagaaagtacttaacaggtttgagaccaaaaaggacattgtgacgggagggttggtggtcaaggaaatatgagatatattgtaggcagatctgatggcctgttagtctgtcctctggaacatgtgaacccataacaaaagggattttgtggatgtcattaagggtacagattttagacagaaaattatcatggattatataagtgaattcaatttgctcactcaagtccttaaaagtagagcacctattagaccgcagttaaagagaaatgagactacagaaggaagctcagtgagatagcagcctgccaagagtaagatgtcctcttatggttctgagatgtaaggggacaagagagagaccttgagaggctaagggtggtcccccgttgggagccatcaaggaaatagaaaccagtcttcaactgtgtgaaattgaattgtgccaaaaccttgaagaacaagaaaaacagatcatttccttgaaatgtatgttgatctaatgttaatcttagtctattaacattattgtgatgctcacataagagtttgtaatatataaggctcaaatgagatatgtgagaaagaggggaagagaagttgaacaggagagagggagacagtagtgagaggatttttacaaccacagaatgctatacaaatatatttgtatcatttaacttatattcagagtacatgaactgaaatgcaagtctggattaatcacaagctggaattaagattgccaggcgaaatatcaataacctcagatatgcagatgataccactctattggcaaaaagtgaaaagaattaaagagcctcttgatgagggtgaagaagagtgaaaaaactggcttaaaataacctgaagaaaactaagatcatggtatctggtctcatcacttcaaggtaaatagaaggggaaaacatggaagcaatgacagattttctttctcctgcgatccaaaatcaccgtggatggtaactgcagccatgaaattcaaagacttgctctttggaaggaaggttataacaaacctaaacagcatgttaaaaagtagagacatcaacttgccaaaaaaaggcctatatagttagaactatggtttttgcaatagtcatttcaggtgtgtgaacttggaccataaagaagggtgagtgccaaagaactgatgcttttgaatcgtggtgctggagaagactcttagagtcccttggacagcaaggagatcaaaccagtcaatctcaaaggaaatcaacactgaatattcattggaaggactgatactaagctgaagctccaatactttggccacctgatgtgaagagccatctcactggaaaagaccttgatgctgggagtgattgaaggcaaaaggaggaggggcaacagaggatgagatagatggatggcatcactgactcaatggacatgagtttgagcaaactctcggagatagtgaaggacagggaagcctagagtgctgaagtccatgcggtcgcaaagagttggacacaaattagtaaacaacaacagaaacaaggtcactactaaattatacaaagaagtttccatttcagtacagcccctggactcgatattctgagttcatattttccgagattctacaaattgccatatcacagtatagaaagttcagacaagtgaaaaagcactagactggatatccagaggcctgtggtttagtctcagttcagctgttgccaaacatgtaactttgcgcatgtccctacacctctctggtttatattgatttatggctttgtacattgtataaaaatatcaagagcaacatgttaaaaatatcaaaattataagacatttatttttataacagaaataattgcagttcctttccatctttcatttaaaagatgagaacccttatttaaggaaaggagaagaaaagccttaagtacaatggcaactcaaatggcaactcaacaaggtgaaattgcttccgaagcgctgatcttttaattagagagaatgtcaaaacgcaatctgttctcttagcttcattattttgaatctgtttcttgtttcccaataaactgaagaaataaacagcgatttttaaaattaattatgtagtgcaattttcctccaggaaaaccaatatagcttaattttcattaactatattgtaaattgcattactcttttggaaaacattcaagagtgcttttatttataaaccaatatatgagaagaataatacatttagactgtgtctggccacttccaaggggggtttcctgtttgaaaaacactaaatagaaatcaacaatggtattgttccttctaaactttttaaaatgaaaaactactcaatatatcgttaaatccagaaatagtggcagccagggtaaaactgcagaattcaggatgctaattagctaaccatgactgtatatataatgaagatattaagctttctctaagaacattgcaacttgaaattcaaataactaacgttacaggataattgggaaatatgattaactgatttaaacactactgaaaatgcagcacaattccctttcaaaaggaagagcaaacatattctacagacaaatgccaaaatcagaattagcgtgtagtcaagaaaggagttgactaagagtacatgggtaaccatcttgaataaatcactttaaagggagtcacagtgtgaatgaggataattatatggctctcaacttggctcatgtttttttctctttcaattgcaaatcccctcaactgtcaagtttagttgtctctttgagatgttactata

SEQ ID NO: 53365 - DNA, 1348 bp, Bovine  19866881147793
  misc_feature (1)..(1): n is a, c, g, or t
nataaatgtaaattagtatgcttaataaatattattttctcatttactcagtaaagtatgaagactgtaatgaagaaacaaaagtctatcaaaattgatcaggcagaactatctaaaatgacaaacatattgtgaaaaattcaatagttaggcaaaacaagagattagatagcaaattaatgatctgaaagatgtatttgaagttatttgcaatacaccacagagacacaaaatgagatgtttaaaaaaaagttgagatggaggatagtgtgacaagatctaaaataatctgatataagatacagaagaagagaagtataaaataaatcctaagaatttcctagaactaatggaagacaacaaaatccatagttaaaaattccaataatttccaggcaagatatatagaaagaaatccatatttataaatattgtaatgaaactgaagaacaccaaatgcaaaaagaacattttaaaaagaaaatagggttagctttattctcagcaaaattgcccctggagaaggaaatagcaacccattccagcattcttgcagtggcaacccactccacccaatcccgtggacagaggagcctggcgggctacagtccatggggttgcaaagagtaggacatgactgaatgactaaaccatcaccaccaacagcaagattgcagaataggaggctcctgacttttccctctacccataaacacactgagtaaataactacacatctatcagtcgcctctgagggaaatccagaaaatagttgagagatacctgcatgttggttaactaagaaaatgcccacctcaaaagagtcaggaaaaactgagacacactctcatcataaactccattcttaacacaacctcatacagttgagaggaatctcccagcttctccttgaggagaaaagattttgccacatatctagcactccaacttttctggctgttatcaaagggactgtcttttagcttgtctatatttggcacctgatggagcccagtgtttgctagacctttggggccataaagaacaaaaaggtagttttcaattaattcgtgtagctctccccactggctcagtttagaatgagcaggcaataaagtccagcttccagttctccttggaagggattagaatgcacgtaacttttcttgcctggaggatcccagggatggggaagcctggtgggctgctgtctatggggtcgcacagagtcagacgcaactgaagcaacttagcagcagcagcagcagcagcagcatcttttccacttgctgaccagattctggcttctaactcagctgtctttgggaactgatgagataggcaatca

SEQ ID NO: 53366 - DNA, 1369 bp, Bovine  19866881243543
  misc_feature (1)..(1): n is a, c, g, or t
ntaataggacacaaatttcattattactggattgtttacctgaatgaaggatcacctaataaagatgacagttctttccctaaaaaattttttatccctacagtcaattaaattatataagatgggatgctctagcaattttcttaggattaattacataggaactaaacactgctttgaaaagtttaaaaatgttagggatttaatttatttcccacgaggtaaaggatataggacacaacataaaatattcaatctcagctttaattaagattattaagataaaataaaggaggaaatggagcaatacagggaggaaaacagcaaaacttccataacataaacattcaaaatatctaacagtatttttatgaaactcagaacaaatttacacatttaagactgaagagtttaaatagctaataataaaatgtcaaaatacaaattctattagtatcttcttttaaatttttttaaaaagcatccttgctaacatttactacatatgaggcattatgcttacatatgagtcatacactttaccagtttacagctataaacatgtttgtaattttagaattctgatagcaaataatcattttataatcataaaataatatcaaacaacagctatctaaatagttttttgaatcttcatggatgcttacacagctgggctttttaagaccactgtgtgcatgataattgcatagcaataattctaagcatgttgttttaaaaacaagcagactcttggggagttaaagatggagtttgtgcttttttaactaaaaaaataatctagaggataaagtgtataaaggctcccagagtgcaatgctgaaaatacaaatttcagtttaaactagagaaggcaaaagctaatgttctcattgccacgtaaattttctcacattatacctgggtagtgttcttgctctaattatgttcctacatgaatgccttattacatataatgtcagaatattacagggagataaagtgtgtctcttggcttctgtttgttttgtatataatcttaatgttttattcagtgaggttttgtatttaataagaatgctccagtacactgatacacgaaacacaagtacaaaattttttaaacagtgggtggactagtgtttcataccttttttttcataattatgtcttttaattgttcattcagtcccttatttttatgcacaatttttgccttcttttgtattttttttgttctgattactgttttgagtaaggagaattgaacttgttctttaaaagcaataatgaacaaataatattacagagaatataaaatagaatgtcgaattgaggttttatgtagatttccatatatatatatata

SEQ ID NO: 53367 - DNA, 1312 bp, Bovine  19866881345347
  misc_feature (1)..(1): n is a, c, g, or t
nattgtgatccactcagaaatctagtaaaatgcctctccattccatactttcagtatccattcctccctgcgtgcattgttagcatcacaaagtatttgagagagatatccttttacatgtggtattgggcatgcaggccttgtcaagtttgaggctgccaggtaattgccaagtataaacaaataaatgatcatttttgtacagtataagcatttgaaatatacacagtggtactccagtcatgtttaattctgcagttgctgccaaacaaacaaacgaaaaattaacctaacaggtcctaattattacattggatttagtaatttttatattggatttagtaatttttaaagggaatgcttaccatggaattttcaggaatgatgttttctaaacaaattaatttttttatttggaaagatatatttaaataagagattacataaatatgactattctgtcatagtctggaataaatttgttcattttttttgcaagacaatatgcttttttccagtgtgtcataattaaatagctttaacagaaaggaaaaaaaatctacaattttaatttatctgaactggaattatttgtttgatctaaagattaataatacaggcattaagagatccacatttgacatgtcctcctccccatttcgcagagaacatttccactggaatatgtattggactattttgtcatatgatttatagattatcactgaatttctggaaattgttttacttaatttaaatagtgggatcctagcaatgaagggagtaaataacaggttgttatttaatattttcattattgtcagttggggtcattgcttatgtggattaccagtcaagggtagaataccccaccattgtggtattcttcctgtagatataaatattagaaagaaaacgatctattctgtagcttatggttaagctccataaatcaatgactcttggataaataatgcattaatcaaatcttcccaagcagaactctgagagccttgaaaataagaatggaccagtagttgcaaaatatcatataacaaattttataacagctctcttgaaaactaaattccatgttttctcacaagtaatttatcttttatcctgttcttgatctagattttttcctagacattatctcattctgtccattttacctgatggaaaatatctttagtcaatgcattcagcaaagctttataaaaaacctttgttgtgtaatgccttatacatcctgtgcctcagaaatgagcttctcagtcattccgttgacagccaaccagtgtggtgtaat

SEQ ID NO: 53368 - DNA, 1275 bp, Bovine  19866881448453
  misc_feature (1)..(1): n is a, c, g, or t
ntttgtctaggtagccatcagccttttactgttttaaagatcttccttgaaaatcctaaaaggtaaccactagaccacatgttcttaggagatggattcctaaggtattcttaggagatggattccacatggcttcaaggtacagtagtttaactgcattttgatagatggaggtgaaaatgtgaaaaatttttattaacactcagttttaaaagctttattcctgtggtacactgagacaaggggattccagaagttacttttcagggtttggtccttagaaattggtatatttttattaagttttgttaagctttggtacatttttgttaaattcatttatgttaagcgcattatatatataagtgaacatgggatattctatataaatactatcatcaatcatcaaaaaaaaagccatatggtggaaataatgcaataatccatttctaggttatatttctcacatagagaataattaattttcagtcatttgtcatgggtacacaatgtataattagaactgcttcatggtgaactctctcaaaagaaaaatttgtagtatccagaaaaataagccattcagtgttctaggctttatggtaaaggcttccaaaataatagaatgtattgtgtacatttttactggtataaaaagctaccagaaattcaccattcccaaatcaagacaacttatgcctaacacattcaaaacttactgggactaattatgaatcatgttaaatataaagtgttattttcttcacataatttcacaaagtcagataaacttatttgccaaagggcttacaaaatactgttactccacacctaccaacatgcaaatcaaagaaccaccaataatgttggcattagtggttaaaggggcagtgaaatttttatatcaacaaggtctgaacaggcctctcagacaggaggcttgggcaaaatcatttatcaagttaagtcaggtgaatctgtaatcaatgagcagagttctgctggaactgcagggccccagggaagcaagttgagttatgtgctacagaagaaaacattgattattgcttttacttgtttatttctccatgtagaatagaagtgagtattactaattttgcaactatttaattcagttttcactaagtactatataaaacataaataaatgataagaactagaattgaatgtcctatgttattaataaagctttggaacttagcatttttccaacaacaatgaatgaaactaaactatgatttcagggacctgcg

SEQ ID NO: 53369 - DNA, 1111 bp, Bovine  19866881526652
  misc_feature (1)..(1): n is a, c, g, or t
naaatctctatgccaagaaaggattgtattttagccctcttgtgcattcagtacaaattttaaaatcccaaggaagagagaaaaatgaaagcaactcctgctgaataaaggataatagaaaaaaaggaaaaaataatttggagacattgtttgtaatacacctaacactgtagttgatgctaaaaagggcagataccttgtgcttccctaagaaaatgaattgatcaccccagtgactgataatccaatctctgtttgcccaattggataataggactttcttcacttgattatcatttataacataccctcttccaaaaatgtatagaaatgtctgtagcaggacttcccaaaggtttaaaactaagagaaggttcccttttttatgtttcttactgtccccatcccttcagagctgctaaatctttttgccatgaaagaaagaggagaaagaagagaaacagaaatgggtttagaaataggattggagaggataagagaatataaattagctttttcttttttttttaaatagttttggagaatgttctggaacagttttttcaacttcctgcagctggggtccttgacttccaggtataagctcaataatttcactatgaataaacctttgtgtggcctcagaaaggacggactgaagaagctcaggtccaaagatctgtgactgaatgtcaaataaatctaatggctatttggtttcatagccaggtatcttcaccccatttccaaacccagtctccaccttgataactcatgatacatgaattctgtgttttagaatctcagaagcaaggttctgcctcagtttgcctacatccccactcccagtgactatagatttctatttctcagcattgcctattcacagattctccaccaacacattgaaccctactctcagaaccagcccattcatttttcttctgctaacatcttcacttaatcaataaccttaacaggtgcaaactttcagtagctagatttttccagaaaggctatgattgtcttaacacctcatcccttcccaggggctctaatgataaagatcccaccttccaatgcaggagatgtaagagacacaggttccatc

SEQ ID NO: 53370 - DNA, 1017 bp, Bovine  19866881628778
  misc_feature (1)..(1): n is a, c, g, or t
natcctttggctactttcagatgaacttgtactttgctaagttcccattacctgatcccaagctcacttttaacatttgaaattcaagatagagttgcaactaaaatgaagtctgctaatttaggttgattactgacatctaaagcaatttggactaagtataacatatatgttcacaaaatcttagctctattagctacaaatgaccacttgaagtggaataaataatttagtaggaaggatccaaaagagtaaagaccaaaaagcccctgagcaaagggaaaaaatgaaaaatgaatagacatgaagtgcctgccaacactctctttgactcttctccaagcctactataagccaatcaactggcatatgtcatatcctgcagatggaaaagcagcctgtgtaaatgtatacaagtgcagatgcatggatctgtcatgcagtttccagaggttatatttgttaagcagcctgcaatggccatgagttttgaagaagtgaagttgctttgagggaggccaattattcttgtttattgataggcatgttagtgtgttgttagttgctcagtcgtgcccgactctttgcgaccatggactgaagcccaccagactcctctgtccatgagattttccaggcaaggatactggagtgggttgccatttccttctccaggggatcttcccaactcaaggatcaaacccaggtctcctacactgcaggcagattctttaccaactgagttgcttcttcaatgcctagaatgagtctgaccatatttttcttcttacattacttagtcatgtgactattggactggtatatggtctcagcattatgaagatagagggaggtcagaggtagagttggaattctggtgatagatacagcagtgtggtaaacagatttagccatcaggtgactggtccagagattgaagaagcatcagttgaaagcaactcacatcttgatgaaaaacagatgaggcacttcacactgtgacacatcatacagaag

SEQ ID NO: 53371 - DNA, 1652 bp, Bovine  19866881681473
  misc_feature (1)..(1): n is a, c, g, or t
nttccttcctccctgccctcctccctccctctcttccttccttcctttctcttttcttcctttcttcctttcttcatggactgcatttagagttgatcgttattggatcagttcactgttttagatgctttatattttttatccttaaatttgtcaattatgccatcatagtgactagtttttgagtatgttggaaaccatgtggtttagtttatagatctgaattttactacctcagctaatgaagaagtaagaggaggaagataagcaaatagtttccttacaggtttgtacaatagtagatattctaaaatcagagagatgaaccaaactcatattataacatgaaatcaaaattcaagaacatagaaaggaattgttaaaatcaaggaaactggagacagattttgaagttgtgatgtataagccaagaattcaacaattagggagttgagagaaataataaatggtggagttctgattaaaagggctaaatttgattttgtatttcttgctttcttttctgtgccttttttaagaacaaggaagtgggaggtatctagtctatgaattgttttacaaataagatggtattgtttcaactgctttgggttttagtcttactcttcccaaaggttcctgagttactggagggctgattttttaaataattactcaatctttcttaacaagctaattttggaattatccaaatctggctaataaagatcatttttatatttaagaggaattcatgcagtgctcactggggaaaaggaggcttatagattcttctttcgagggaatgaactcttcccatggatcttttatttgtgaactaatgttttagtctttcttaaaagttaatagagagatccctgcagagatgtaggctacatgattattgaattatttaattattgaattaaaaagaaaagctaagataaaaaaggtagatagctataattatttttaaaaaaggggaaggagaagtacctggatagagccagagcacaggaagagaaagaggtaatttgcataaaataaaaataactagaaagtaatagaggatatcataaagtggcaatatagtttctgtgcaaagaagaatatacagatggacgtccctaaagattatataccctagaccagaaagcctgaaggctgagaggcttttgttttcatcttttgccttccagcagagacagtcatgatttctaatatttgtggagcaggttagtcattcactctgtggattgtttcaaatgtccctttctcaagaaatggattcctttacccgccaatgttcaggtactgctcatatagttctcaaaagtctttgctatgtgtttttttaaaccctgggctttattcagatttctgttacataaaaagaaaaatgggttaaatgatagaaaagaaaagagcaaataggacgcaagagtcctggcatgcagtgtcagttcaaacttggacaaaaaataagggtcctgagcccagcatacttcatagccaggagaggatactacaaagaagaaaaaggagtgctatcttaggtcaggtaacctggaggttaagggtggcatgaagatttattgggagtgctctcttgggacttatacatggaaggcagtgaagaaggcaggattggg

SEQ ID NO: 53372 - DNA, 1121 bp, Bovine  19866881776973
  misc_feature (1)..(1): n is a, c, g, or t
ngatcccaaaaataccctttggcactatcttgcttctgcaaacgtaatactatgaaataaattgatgtagtaaatactctttgggagtaagtctcattaaatgtttatagtgtagaaatgtatcagagtgcttactcaacaactaccaagctgaagcttcgttaaatctttcattctggtccatagctggttgtggaaatgaaacctgagatttattgttggagaaaatagaagttgaattagaacacagtctaggctaaatcaattaatttatttgaaaagctaatgtgaattatagagtgttatttctgcatttatgactgaatgagaattgagaagtgtccaattgtagattaacagaattttgaatgtattttaagtcagaaactttgccagtgaaaattgctttgaaacttcaagtctactaaggtgtatttgctcttgtgtgtaaggaaaacacagcttttataatcataatccacagaattatccagattctcttgtgataaagatgataatgacaaaggagttttgtagtattgtgtcattttcaaagagctgtcaactttgtattcttatcttctttctatgtattcatttatgtgtcatcattcatatattcctttattcagtgttgtatccccaacatctgggacaatgctgtatatatagtaaatatcaatgaatgaatgaaggaaataatgagtaaagaaatggtgcctgtcattttgcaatataggagtgaagagtattttttccttatccttgtttttgcacttttctccaacttgtagtgtatgttgttagagtatgtactctattttgcctaacttttaactgggctgcaaatttatagtgaagaaaaccacagggaaaaatagctggatgatatgctgctcagattcctttctgtcataagagagcccaaaaagaaaaaaatcttttcccagtagctttcttgctttagtttatgttccatgtaactgccaagctatgctgccttttactaagagtaataattctgagatatgtagaccctgtattatatttttacctgagagagaaaacaggacctctattaatcaaattagtgtttaggagctaaagaaaaataggcatca

SEQ ID NO: 53373 - DNA, 1114 bp, Bovine  19866881875126
  misc_feature (1)..(1): n is a, c, g, or t
nctgactttgatgattgaattgggggtaagaaaaagaattacttgagagtttaacaaaaaataattgtgaagctgtatttgcaatgttttttagtctttaatactagaccttttgttttagcacaaacagttagtgagctactgattttgaaacagaatcatgcaagaaagagggtattactgagagaaggtgagatcaccagttatttttcagacagaagttgttttttaaattatacttttctgagtcctaaagatttctttctcatttgatgttaagctcttatgtgtcaatcttttttttaaatttaatttattttattttttaactttacaatattgtattggttttgccatatatcaacatgcatccgccacaggtatacatgtgttccccatcctgaaccctccctccctcctccctccccgtaccatccctctgggtgtgcaccagccccaagcatccagtattgtgcatcgaacctggactggtgactcgtttcatgtgtcagtcttgatctgtttgcatgtagagtgagcaaatatatattgtataactgttaactagcaaaccagcagagcatatagaatagagccagtgatgtgacaactttcctggtctggtgaaactgcacagatatctatcacctggtattttaatatgcagtacagccctcagaaacatcattgctatttgcaactaaacattaatttgagactagtgaatcaattaatcaatcaaaatctgtcttttaaaacagtacaatttttttaaagacaaatttgactcaggatttgaagtttgatggagtgaagaagaaaagcttttccctatttataacctgaaaaaaggaagctttccatttcattccgttgctttacattggctagggaaaacgtatctcaagatatggcctgacagaataaaaatggaatgggcagtctaaaatgggataatacctgaaattaaggaaatgggatgcaggtgtggaaatggatgaggtgttaatacgtgtgtgcatgctcagtcacttcagtcatgtccaatgctgtgaccctatggactgtagcccaccaggttcctctgtgccatggggattctccaggcaagaat

SEQ ID NO: 53374 - DNA, 667 bp, Bovine  19866881879278
  misc_feature (1)..(1): n is a, c, g, or t
ntgcgttggagcccgaaggcaggagagccccgtatcgcgcacacgctcagctcacttctgcagactgtcattctgaaagctgctcagactgttgctttggtttcagtgaatgcagtcttatgtaaagctgcccccagtggtgaagaacattatgggcatgtgcagaaatgtctctcttttatcttgcaaatgagcaggctctctgctggaaaatgaatgattcttttgggtggctcaataggaactgaatggtcaccgtaatcaataactagcaacattttctgtaatttccaagtcttgttttacaatttggcaacgtctttattgtctgcatccacttaatcgctaaacatgtgctgcccagagtttttctggagcttgacatgaagttcacagaccgaatgtcaatttttcttaacctcaacgtaggcttagaactgaaatttataaaatgaattattgagcttttcacagagaagcattaactgcctgcccatttgacctcttggagtcacaatgattatattatacaagatgtctcaggatgctagctcacatacattttgaaacagagaggataactaatgacatataaagtaatgtgtccaataacctttctggttttcccacaaaagacataattgatttaattgtttatgacttggtt

SEQ ID NO: 53375 - DNA, 1796 bp, Bovine  19866880472294
  misc_feature (1)..(1): n is a, c, g, or t
natgtcatttttcttaaataaaacacatcctacatttttttctccccttcactactcccaagaacttttgcttggttaaagttctgagttaaacaacaaaagaaattctaggcttcctgcaatgtaggcttgaacaaagtcataaatctctagttactggcatttttttagtagcagacacaagggagaggtttatttgtttaatagagggggagattaggtctggttgtgctgtctggacatagtgatagatctaactcccagggttatctaaatgaggaccattattttgaataaattcttctcccatgtcagagaaaatggagcccaatcccctgtaatacagacaaaggagaggaaggacatgggactgtccactcctttttggacagagatctgtcacaggtgaatggaagattgattaaaacatccattttctgactttctgccaagttatatcacttatagataaagagaactggccagaagagtaatccagctgcagccattaatcacgcattgctgcctcccccttggtgtttaagaactcccctttagtggaagagactgacggctatgtagattcatggtacatctcttaaagcaatcaagtatcagaaacataaaaattctgtactcataacacactgagcatataagacagtcactgaactagtccttgaaggaattaaaaaatactctgcagcctttctggttgaggacagtccctaggtctctcaagagaaaaatgagtgagcattcatggattccactgaaatgcggaggttaatgataatggtcatctgttcttgtgtcttcctaaagcaagagcacacaaggcagaaacgatctatttttacaaaaatgactcaagcctggagctgaatctttgaactaccacttcatatctgtggatgacctgggaaaatatacttaatttcagtgactttcgatctcctcttggctaaaatggagataatactaccagcctcacaggactgttggtacccagaaatgtgacaaagttagggaatgcacacagcacagtgccagactagcaggtattcaaaatgagtttgtttcccattttttctaatctttgtattcattattattgtttataaacttcccatatgcatgcgtgctcagtcgcgcagtagtgtctgactccacaacctatggacgagagcccacctctctccgtgggatttcccaggctagaatacaggagtgggttaccattttttcctccaggggatcttcctaacccagagatccaacccacttcttccgcaatggcaggcggattagttaccactgagccacctgggaagcccaactacctataaatgtaacttatttctctaacttaagctcatttctctaacttaagctattcaaggatagaaaaatcatgtctccttttcttctatactaatatagggcattgcatgtagtaaaccaatatagcatgtctttttttctaattataaaaataaacaaatgggacctaattaaactcaaaagcttctgcacaacaaaggaaactattagcaaggtgaaaaggcagccttcagaatgggagaaaataatagcaaatgaagcaactgacaaacaactaatctcaaaaatatacaagcaactcctacagctcaactccagaaaaataaatgacccaatcaaaaaatgggccaaagaactaaatagacatttctccaaagaagacatacagatggctaacaaacacagaaaagatgctcaacatcactcattatcagagaaatgcaaatcaaaac

SEQ ID NO: 53376 - DNA, 1565 bp, Bovine  19866880705973
  misc_feature (1)..(1): n is a, c, g, or t
ngcctattaatgaaatattttatgtgtttttttagttttaagtcttcaaatcacccttcagatatgtcacatttcaagtactcaaaagccacaaacagctggtggtgaccgtcctgggcagcacaggtcaagaggctgaaagattttggagtttgacacctctggatataaaacctggttgaatcatttactattagtcattgaagaaatttaaacattccaagtgccagttccagcaactataaaaggagagtaatttatagcttgaatatttttgtgaagattagaaataatatatataaaacatcaactacagtgctgggaactcaggaactattacttcctgaagaagctgaagtttcagtgcttgaaatataatttctattaaatgcagctgctattaccatcatcacttcttcacctttgaaattgcagaaaaaaatactcttagtttaactttctccaccaagaagccaattttgcattgatacatggaatagaccatctgactgtggatcatctgcaaggtgacctcattagcacacaatacaagagataatactgttggcacttactgttcaatatgcatttatcatgaaggggctcaccttcttcattatagatcacaagaaaagtgacaggagatatattcattttgtgggttattatctttatcaaaaggcacacaatgccttggtaaaataatacatttcattctgggatatattaaaacttttctacacgctctgaaaattcatttcctcttgtttcaattcacatctcccatacctcagttacttcagtctagttagataagcctgattcttctggccattactctcaaagagaccaattgtgattttctttggggaaaagactgtatttacatttctagaaatggtagaaaagattggcgagaaagaggctgaagattttgcttgaaaatgatggtgaaagaaagcgcactttccaatcatacttgaataccagttgactaggtctacattatggaatgctgacagtcaatgaaagtgaatattttatgctactttttaaagctctcaaagtgttcttttgccaataatttcacttaatcatgaaaagatgtataggaatcaacactagctgaattatggtgaaacttgattgtttgatctgtatgcaatttgttttgcttgctttacccagagtctttgctaccccatggactgtagcctgccaggctcctttgtccatgggacttcccaggcaagaatactggagggggttgccgtttccttctccaggagatcttcctgacccagggatcaaacctgagtctccagtatctcctgcattggcaggtgaattctttaccatctgagccaccagggaagtccttatccagaaagttagctctatacagagggaagtatttgtttttcctatgagaatgccaaagcaggtaacacattttagaaagtcctaccattcccatgtaatgataattcaaaggaaaacagattttaagtggatcttggtcagactcagtctatggaatttaacatcaaaaaccgggttttaaa

SEQ ID NO: 53377 - DNA, 1978 bp, Bovine  19866880736235
  misc_feature (1)..(1): n is a, c, g, or t
ncttataggttactacaaataaagcatatatgcattttaatttttgtcttaaatttacttcatttcttgggtttaagacattgaaatatttctacagtcactcaccatttgcttcggaaaaatgaacttctcataacttggagtgacccctgtatacaaaaagcacaatgggaccccagacaaagggacaacagggacatcaaggttcctacagccagagggaacagtatcttcctttcagagtaaggtgtgaactggttctgtaatgcctttgcaaggcctgcataaatctgtgaatctcagaacaaagtaacaatatagaggaggacatgttccttgtgagacatccagaattcggctggttattttcttaaccagtattcatctaatccatttgctaagcattgtggctttgcagctacccatgagggaggaaatggttgtttaattgcccagaagaatttcctagagatgcttcagtagtaataacttgtctttctctacccatgatccatgaataacaaaacaattgaaaatgaaagtcaggctggaaatatgacaatggcatctctagtcaaaataaagcacagcattgaaataattatttgaataaatcacacctctctcactccaaatacccataatttccatagctcagtttgaagctttctagtacttgagaataaagcttaatttaattatttttttacttcattatttgtgagcatatttagccaaagggataaaatgtcaagaaacattcttcttactctactcaactatcttccacctcagcttatgtatcattttcctcagaggtgttggggaagggaaaatttctccctatgcttttcttttttttttggttgatctaatagttatattgacataagaagggcatcccttatagctcagttggtaaagaatctacctgcaatgcaggagacccctgttcgattcctgggttggaaagatcccctggagaagggaaaggctacccacttcagtattctggcctgaagaattccatggggtcacaaagagttggactcaactgagtaaatttcactttcacttgacataagaaaggttaacaggagaaaataaaatttaattttttatgtaatggaggtctcatagatataggacctaagcagtgaccaaggcaggcagcttttatactttttagatgaagaaacaatagatttgcaaggaattgacaagacaaggaaacttcagcttgggtacttaattagtgaagaatctaagcagagtttgtttgctcaaacttcttggccctgaatttgtgtctctagcaataaggatgtctctatatgtcctgtgatgggagggtatttttcatgtgggaaatttatgtcctgctttctggggacaaagtagagtcagggtgctcttcttgcactgactgtttcttaagtaactttagttcaaaatcaatatatggggcttcccccggtggttcagcagtaaagaatctgccttcagtgcaagagccacaggagacatgggtcaatccctaggtcaggaagatcctggaggagggcatggcaacccactccagtattcttgcctggaaaatccccatggacagaggagcctggcaggctacagtccatacggtcgctaagcgtcggacacaactaaagcaaccgagcatgcacacagtcaatatatgactttggtgcatttgcgatcaacctatcctgagctctaacagaagtcctacattgagtcaaattgctcaggttcactctctatccttagctatcgctttgcttatggcccagtcactccatttctctgaatctcacctataaattgaataagatgggatagttcagactttcaactatagctatgactctatcacagttctatcccctcctaagagaaaactcctaagtgtaagcttcagtgcagcatccaggatgtaattctccattttaaaacccaggtt

SEQ ID NO: 53378 - DNA, 1173 bp, Bovine  19866880800054
  misc_feature (1)..(1): n is a, c, g, or t
ntgataaagaaattacctcattacttggcagagagtggtggagggaagctagtcttaatttcacaacctcagtttaattcagaatacctacacaaagtatctatgtaggctctaaaacatatagctatgttttaaagcacagttcttttcacatggatgattttataccctcttcatttatgatagttaagactctgaagaaatgacatgtttaagaaattatcacaataataattaagataattaaaatgagttatttccattatgcagttgtaggtatcaaacctttctaagaccaatttatcattatttggcatccagttacattatttaaaaaaggaagagattcttacagtcaattaaggaaacaagctcagtgtgtagtgttttatggcatctttttctgagtgtgattataaaattacactacaaagaagttcaaatctaaccagaataaatcaaaaactttccagtggaggtcagaaaagaattctcatatattctggttcagttgttaacaaaaaagatttattcattttagcatattgactacatatgtattttaaccattaccattattatttgtattattgatgacttccaaatgagagattgagtcataattaacacggctgggctggtagtcagttcaaaacggacacagctgcaggttgaaacaacttttcccagtgcagaacccaaatattaagcacttaatatggagtggctttgtgagctgctgcctcttacccgaaacaaagcatctaagagattatagacgtgggtcaagcagtaccataagggcccagggtaagggagagaacaattagagatcgatgcaaatgaattcatgccactctgttcagtcttgtgtattgcagagcatgatagatatccagctacacaatgtgtccaactggttcatgcgaaacccacccagtttctgtgacagttggctctcatgaatgaatctcaatttccacatttgctttggatcctctgcaggggccccatgcatgtttgtttgtcttgagcagatttttgcagctcttttactgagtgggatggcaggatctgcagagtgtttagatgctagatgccaggatttcttggcctgtgattatggcacaacttcagtacatacttggtagggcccatttcatcaagattcac

SEQ ID NO: 53379 - DNA, 1250 bp, Bovine  19866881040378
  misc_feature (1)..(1): n is a, c, g, or t
nacttgtgtgattttggtaccaaagtaataaagacaaggtcctaataatttccagagagaaaaagatatgtcatctacaagggagtgatcaaattggcaccagctttcttatcaataacactgatgctagaagctttcagagatctgaaagaagagacgtacaaggaaaattctgctgctgctgctgctaagttgcttcagttgtgtccaactctgtgcaatgccatagacggcagcccaccaggctcccccgtcccagggattctccaggcaagaacactggagtgggttgcctatatctagacaaactgtcattcaaatgtttggaataagcacattttagacacacaagttttcagaaatatcacttcccacacactctttgctctagcaaaacaacttggtaatccaagaaaggtaaagataagttccaggaaagatctctttcccaaaaagaaatcccaggatgaccacctggaagctatcttacaaagtgacttgtccagatgacaggtgagggacagagtgtcccacgggacggtcagtaaaaaacaaacactccatagaatgtgataagctaaacaatttcaatacaatatttgcataaagagaaatagtgggtgaaaaaggaaattagaaactcctgataaatgaaaaagttgtacgagaataaactgtttggttttcaagtaaactacatttaatagcctattgacttaattaaatataatgatttaactatactagaagtttggaggattgagacagaagagtaaataaataattttcaaaattgaatagttgaaaaatagttgtccaagacagtattcagggtatggggattaaaaaaagaatcagctagaatcaaaaattacaaacttcaagttgtaaaataaataagtcctgcatataatgtataacatggtgactatagttaataatactgtattatatattttaaagctgctaggagaatagatctttaaagctttttatcataaaaaagcaaaaaattgtaactatgtgaggcaacagatgttaactagacttactatggtaatcatttcacaatatgtatgaacatccaatcattacatcatacaactaaaacaaatataatattatataccaattatatctcaataaaaaataaataaaaggattaaacaaaagaattaaacacggttccctgtcgatagccaaagtgggagactgggggaggagcctgcataaagctttactatattatt

SEQ ID NO: 53380 - DNA, 1108 bp, Bovine  19866881109854
  misc_feature (1)..(1): n is a, c, g, or t
nctggttcatgaaccagcttatcagtgagtcatcattctttccttcctttggcttcctttttagccattaggatctttgcaaaataatttacatgctttcttcttaaccaaagttttgactgtatttatctaagatctgtagtattatatgttttgtaaaccaaaacctctagctaaagctgagattgacatcttattacaatttaattttaccaaaccatttgtaaatagtaaatgctatacaatcaataaatcagctaaatgtatgctactcgggtgactaggtctagtgcaggcaatcagcaggtatattaaagcaactgttgccacagacataacttagacagtatagtgagtgcaaagaagggggaggataatagtgggttgaaattagacagtgttgtgttagtggaatgattaatatcttgaaatatctcaaatgagcaacatgaatgaagtcagggagttgctatacatgcagtggttttcaagctactctgaaaagatctgctattcccattgcatcctagaaaattatagcagaatttcagcaatgtaggcactggtattattattttttcactgtccagatgattccaaggtacagcaaaaggttccagtcactactgttattcaaactgacctaaaaatggcaaaaccctggatttggagaacagcatatggtgggggcgagcagacacattagaaacatatagaatggcttttgataatctttcctcaaaaggtaggaatctctcacgtgtgggagagctacatttcaaactttattaatggtaaactgtttctgttagagattttatatggtctatggtgaaaaaagaaaatgatctgattcaggaagcagcgggaaagcatagaagttgagttagatatctcaaagggcaagcgagtcccctccccctttatggaaggacagcaacctgttttccaggtagaagggaaaacacagcagatgtaatttgtgttgaataaagatcacacaatgtccttaatcaccacctttcctttttatggagtaagtgtaaattattgtcagtttcatgatttgtattggagccgaaacagatgctaaaggtttcgtttaaga

SEQ ID NO: 53381 - DNA, 1079 bp, Bovine  19866881122617
  misc_feature (1)..(1): n is a, c, g, or t
ntatacatatatacagatgtatacgtacatatgaatacatatacacacataaacaccctccccgcaacatgagactgttttggacccagcacagagcaggacacttaagaaaagcaataggaattcacattaccataatcagggtgtcagggtgaagtcagagttgctgaaccatgcagtgcattaatggagtggaaaataaggatgtctgccagggtttagatttaacacaaattaaagatacggaaatctaagctaaatatctttcttccatccccccaaaacaaggtctgctcttttgggagtttaagactcttgctcactgatgggatgagagtgtatgctggcaaagcctgaggtaagacagtgcacctcacgaccacctttcctagatggctcagcagtagtggtgtctagcctttggagggcctgtgtgtaacggcttatgatttctccaaatttcatttttctctacaaaaatgaggtggtgcatgggcaaattaaacccctagaggagtgatttccacaggagttccatggataccgtgtaggcaggtgcctctgacctcccacaacttcagtctttgtcacaggctgaaatggcagcagaccctggaagcagaggacagagctaaccttgaggaaaagggagaaatggaatcaattttcctgaataacagaatgagagaaaagctcttttctttttggtaattgtctccttctatatgatgtgttttctttataatcacattctaggtaatgcacctctgtttgcattaatcacaactcttctttttatcatctttttccttttccattttctttggttgactctagtattcattttctaaattctaaaatacgtctcagcacaattgattcaaaatgtttcttcttttctaataaatagttaaggccatacatccctctcaaaggaccaccttgaccacaatcataggttctgctgtataagcttcaatttaccagcccttggaaaatttggaaaggaatatgtttgaaagtgactatgtaaaagtatttctttttttaaatctgaagctcaggcacaggcttctcat

SEQ ID NO: 53382 - DNA, 1904 bp, Bovine  19866881190116
  misc_feature (1)..(1): n is a, c, g, or t
naaaaaaaaaaatccgataacattgtcttaattctccgggcaagagttggcatcctgcagagccttcaaatttagaaaagtgttggtttccttcttttcttcactgtttgttccgcattcaaagcctttagatttattgaaaaagaggcttctcatttttttaattaaaatttttctttacagaaagtctttattggttgtatattttaaatattgcttgttgtttcgtttcttagttgctaggtcatgtccagcttttgcgagcccatggactgtagccctccaggctcctctgtctatgggattcttcaggcaagaatactagagtgagttgccatttctttctccgggagatctttcaaacccagggattgaacccacatttcctgcattggcagacggattctttactgctgagccaccagggaagccctattttgaatatagcacctctccttttatattgattatactcagcgttgttacagaaattaggcatcaagagacttagattctggtgtgttacctttggaatgaaacataaaattcatttcagccaacaccctcgttttacagcatgtgaaaggaagacatgagagaagagtgacttatccaagagcagccaactgggtaatctcagaggaagctctcctagcttccctccagtgctcccaactctacagggagcttctcttctctcaacttcttggtgactccacctgtcacagagccaaagactcatcttcctcatctgtgaagtagaaatggcagatatttcacagcactgtcataaatagaaaatagctttgaatgtccactgagcagtatactgcctcacatattccatatattcatttctcatcctgtagaagggatcagccatgttcactgcctctaaaacagagagcctgggtcagagaaggcctttcagaatttcttacattttcatgtcatgaacagtttttgctaatggatctgattgatcagactagaattgagtttattctgcactatgtggtaatgaattgtcatatttgtcatgtctttcccctgatgtttttaaaaaaatgtttttgagtatgttttgagtgtggctgaaaaatctaagtgccttaatccagttttggcagcttctctgatgtaatcattttgatctttggcagcataaggggcatggcagattggggcactagtctgtaggcacaagccctagatgtttgttctggccactatagtgtgaccttggctacattctttacctgttttaatactccatttcttttcttgtaaagtgcagacagggatggatggtttctaaattcctttctaattctcagatatagacaaatctcagctatagtaatcataaagagaacaaatgtttgtggagtagtatggtattttctgcaaaaacagattgcctaatctgttttttgaattaaagttactaaaaatcgaagcaaaagagcagaaagtcttaaattagtggcagagggccttctctgacaataaaatgtacttgctggaaatttacagtggctgtggaatgaaaacaactattaaatcaaaattgacttagtacattcagagacacaagaataaaacctattaatagctcaacagaatttaattgaatactatgagtaatgcaagagaggtccaggggtgaatgcaaacacttatggatgattctgagttgtaatatttgactttctgtgagaataaagagctgagttccagctgtgtaggtgctgggttgattaaagaagctaaatttacattggcatggtggtgtagatgtatcattgtgattttctctcccagaatgttccagacagcctaatgctgtcggagaaggacaaaataagctctcatccagcactggctcccaggggtctctccct

SEQ ID NO: 53383 - DNA, 1344 bp, Bovine  19866881243681
  misc_feature (1)..(1): n is a, c, g, or t
ntgagaatttgatagcaaatttcatgttaatcatgactttgttactttgctaataaaaaagtagtgaccaaattatcctgcttttgtagcttaaagatgagagcacaaaatcatttattagcaagggcagtaaactaaactacaaaaaagagtaaccttgaccaaaagcatctaaggccccagcttcacctgactcatgggagctgtgatgcaatgcagcttagatgtatttgattactgacaatctgagatggacaaaaaaatcagatgagtaaccaagggttgtacattaaataaataattaatataaatagtataagcaattacattcagtagcagtgagacaagtgaaatctaacaaatagaatagcctgaaaatgggtcgggagaaaagataagaatttgagaatgttgcagtatttgttgtaataggtgacaattaactaatataactggtgcaaatagcgtcgaagtagaaatagcggtaaaagaagtggtcacactggtttaaaggcaacattccccaggcaaccagttgctaagccaaaaccacgccaaataaacaatttgctttggcattttactgttgaaatttgataggcagaaaaaaactagaattctaattttgcttgagaccagggggtattgaaatagaatgctttcaaggaaattctggtcatatgtaatactgtacttaattttcaacccgaggttattctcagattcgttgattgtataactcctaagtaatcgcctcactagagtaaaaggaaatgacaacgtactcaagggaagagggacggaagaaagttatttcctctctactctgtaccaagaactggagccagcatctaatttaattaacaaccatcctggtagtcgaataatattgttattgctttgcagaaacaaggaaagaatcccaaagcagctaggcagcttgccagggctccaatgactgaggccacaattggttccatgtctctccaggtggtgtctattcagtaatggtgatggcattctggaaaagcttagaggcaaaagcccactgatgtcaaacacttgtttctcaaaggacgacccatgaaccaacagaattggatctcctgggagctaatgagccagaatttgcattttaagaagatcctgatatgtacattaaagtatgaaggcaagttttacaagatataaaactgcctgaccctttgacttgatagggagaaaaagggattcttagaggggcatcttgaaaactttgattcgtggaacactatgaacctgatgagcactaaggacctgctcttgaaaataatatatgcatatggatacacacttagatgtggg

SEQ ID NO: 53384 - DNA, 1622 bp, Bovine  19866880393830
  misc_feature (1)..(1): n is a, c, g, or t
nggctttcatcgagaacactaggctggaccctgaaggcctttcaaagtcttatcaaggaatttagatttttatctcaagaaagatagtggtgagaataaggagtctggaatggtctctagattttggttgggcagttggttgggaaggtagtttgaatcactgaagctgggattatggggaggagagggcagaggtgacagatggtaggaaagatgaactctccttgcacatatcacagatggatggaggaggcatctgtgggaagcactgcttagctcaggagagaggttggaggagaaatgatgactggggagccctcaaaacatcagtcaggtcaagtcataggcatgaataggtcatccctggtgaatgtgaatcttcaaggtcaacttttaatctcaggaaattttcctgcttcctattcagtgtgttcacaggaaacaccaattaaaattaatttcaacctaagcaaaatataattagggagataaacttactgccaaaaatataatgaactccagaatgaaatgtgaaattgatattagctcacttatctgatacgtttataagatgctctgcaaaacctggtaagttagggtgggaaatattttagacattttaaggagattgataacagaaaaagaaacaaaggtatgtcttcctcttccttcttaggactctctcccatttaggctgggtgatttggactctgaaagtctctggtcccttcgttcagttaaagttttttctgacatactgcatttgcctagaaggaatatacaaaattcatttctgctccctcttgctgcagaaattacacttagccactattgttagtctgaagtatgcctgcccacaatacattttaaaaatacatttaatgtatttaatgtataatttttctatgatctagtgatttaaatcttagtttcagtggagaaagtcaagccgctggaaatattggccaattaacctatgaagagaggagtcgttggaaagataatctttggaagttatttttagtagcaataacagtgtgttcctcactacttcgagaatcccattactgcagttcacactaactttgattttcaggttgcttgccactaagataatttaggttatgttgctggtttttaaaatagatgggagtcattactgtttctgaagacaatatttatcctgcctttgagccctccctggggagggtgtgggcacagagattgattaggagcttttattttcctgggatgacctgtcatttagatgactgtcaaagcaaaatgtccatttgtatctgacagtacaaaatatctgtactcccatgttctttccaggtgaaataactgagaacactctgtggacagagtcttatttaagaatttagtgctgaaaacaatattcataacaaaaaacaatgcaatcagaaaatgggcagaagacctaaataggcatttctccaaagaagacaacaggcacataaaagatgcttgacatcacaaactattagaaaatgcaaatcaaaactacaatgaggtaccactttgatgatcagaatggccatcattaaaaagtccgcaaataacaaatgttagagagggtgtggtaaaagggaagcctc

SEQ ID NO: 53385 - DNA, 990 bp, Bovine  19866880394969
  misc_feature (1)..(1): n is a, c, g, or t
ngtgtgttgtgaggaacatgagtagtccttgaaatatgattaaaacaaagatcactgtggctaagtacatttgggtaatgttgcatattcttattagaccttatagatatttataagtacactaacatatgctaaatgctctaagaagcccttcagtaaagaaactttaatccagagttttaccaaaataataatttggtcctttcattatataatacctgtttacatttaagggaaatttaaagatgacactttgggaaacaatcataaggaaattatagactacatgttttcaggcaactctatgtgaatattgtttttcatttcttaaaaaaattctattttatcaaagtatagttgatttacaatgttgtatcaatttctgctgttccagcaaagtgactcggttacacacatataattcttcaccttcttttccattatggtttatcacaggctattgaatatagttccctgtgctataccgtaggaccttgttgtttatccatcctatatgtaatagtttgcatatgttaacccctaactccatctctccccctgcctcctccccacttgcaaccacaagcctgttctctgtgcttatgagtgtttctgttttgtggataagttcatttatgtcatattttagattccacatgtgttatcacatggtatttgcctttctctttttgacttacttcattttataatttctagatctacccatgttgctgcaaatggcattatttcattattttttatggctgagtagtactccactcagagaaggcaatggcaacccactccagtactcttgcctcgaaaatcccatggacggaggagcctggtgggctgcagtccatggggtcgcaaagagttggacacaactgagcgacttcactttcacttttcgctttcatgcattggagaaggaaatggcaacccactccagtgttcttgcctggagaatcccagggacgggggagcctg

SEQ ID NO: 53386 - DNA, 1480 bp, Bovine  19866880550594
  misc_feature (1)..(1): n is a, c, g, or t
ntccagtttcctcccgtttaaacaaacaacacgttgctatgtttcaccaccgcaagtctggccccagcctctgccactgctcacctccttgacctctcctccaaagcctggccctcctcagcctctgcagcccacagccagccccaaggtccggttccccaggcttatcctcatgtctgcagaagcccttctgagccccaacaaccgggtcataccctacacagatgaggtctcagcacttcccagaaatccgcctgttgggctgcaccctgaacgtctatcaggcctgtccttccccagctccaagaccaaagaacaagcttggcaccagtaacagagatatcagtggtttaaaacttaaggggagcttatacgtcggaagcagtcctgaagcgacaccccaccaccactgtgtgctgctggcggccaggctgtgggcagaacatggtggccgtcctcgctcttcgcagcatggggaggttaccagttggggaaattgatatcagattggcgcatcagttaccgtggaaaccagaaagctgcaccccccctcaccaaccctttgataagcattggagagttctgagctaaagctaggataatcaccagctgaggcaggggcaaataggtaagggtcagtcaggtgagcaggatgtaggtgaagcaggttctgggcaaaggagggatgcacagagagcaagataacagccatcttggatggcctgaacttccaccagagctttgcctctcccatcactgcattttagaagtcagggctacagtgggtggtgtttcttcctagtattcagagtttctgtggacagcaatccatgtcactcattcacacagtaaagcagcgtgttacagcccaacaccataataaagcacagaacacatgatgatagctcttagcctggccatgcccgtgctctaagaggcagccctcttatcaagaggctgaaaaggccctccaaactcaggagcctaggagggagggacaggacaaagcctggcctatgctggttctgtgttagttaagacacctggcacagaagggccatacagagttattgtctatggaagccatggaaatccactgcccccggcctccaacgcccaccactcctcaataatccagttccctgacattaaatgtgcaatgactcacagctgtagagaaatagaaacttaactaccgtatgtatattttgcatgggtttgtgtgacaggcagaataatgcccccccctcaaagatgtcccctgaccctgtggatgggttaccttacacggcaaaaaaaacgctgcagatatgactgagttacggatttatgatgaggagatgatcttggctcatccatgtgggcccagtgtaataatgtagatccttaaaccagagactctttcccactcatggtcagaaggaaatgtgactaccgaagaacagtgaaagaaaatgtggctctgaagagacacaaccca

SEQ ID NO: 53387 - DNA, 3342 bp, Bovine  19866880570009
  misc_feature (1)..(1): n is a, c, g, or t
ntgaatattcattggaaggactggtgctgaatctgaacctccaatatgttggccacctaatgcaaagagctgactcattggaaaagactctgatgctgggaaacattgagggcaggagaagaagggggcgacagaaaagagaggatgagatggtttggatggcatcaaccatccaaccatggacatgagtctgagcaaactcctggactccatggacatgagtctgagcaaactcctggagatagtgaaggacaggggagccaggcatgctgcagtctataaggttgcaaagaattggacacaaatgagtgactgaagaacaacacaaacgtgactaaaaataaataaatgatgtagaaagtgaaaaattactggacttgtcattctaattattcatacatataaatctaaaaattaaatttttttctaataattgccatccttcttcaaaaaattatgtcaaagttgttttaatgtattacactttggtagtgcacatgcaagaagaatcagagtaacaataagccagcatctaattgaaatgtatttgaaatctggagtcactatttacaagatggctattttccagattcatgcatggcaggtaatgaccagttagttaccttcaactgacactgtccattttaagggtctataacttcaaagtcaaaaaaaaaaaaagaaataaaaattgtgttcactatgcttgaattttcaaagttctaattagaccatgcctttatacttctgtaaaattattcataaagtgacttaaatatatattgttaaattttaagattaatcaatgcaaatggtattttttcctggtatactgaaagttaagatatatttttcaaatatgaagagctttgtaaaattcatatgcctaatggtaactttataatagtacaaaagtaaaaaaagtaatcagatatttagataagaatataaaatcactttacaagcttgttttttaaatggttccaagaaatttaaagacatgaggtcactttcccacatactttctctaggaaactgtagtcaagaggaatgaataaaatcatgagaaaatccttggactgcaaaatattgacatgcttctgttttttaaaatagtaaacatttaagttgctggcaaactgctttctctatggaaaaagttgggatactttaaaaaaacaacccatccttattggacaaaatgcctcaaatgttctttacttattttttataactttcacttcctggtaagcacagaactggctgagaaatttgatttattctaagtactattttcgtgtctttaagtggcctttctgggatgaccttaatctacactgctaccaaccactagaaaaaattttctaagttataattaaaagttgtaatattgatataagtttagacgatcaaacagaaggggttaagataataatagatctttgtcattccaaaattatgaactatttcaaacatacagaaaaatacagacaataatatatgaatcatttcccactgctcagaatcaataggagttaacatttgccatactaacttaaagtttttacttttagacgaaaaggccaagtagagatctaatgaaaatcaaatcaatctctctctcacagagggtgaccacagtcctaacattggtatgcatcattttcataatatttcaaaaatactgatttgtttttagcacgttatgttaatcgtatcctacttaaaacttgctgcattttactgaacacagttttgagttttaaccatattgactaatgtatatctactttacctattttaactgttaattaatatttcaaatatatgaataaactggagtttatatgttcatttcccaactgagggctatctaaattgcttccactcttttcatgtcttggcggataccctgaattacgtgtggcagcctctggcatgggtaggtttccaaaacacatagcttccagccttggaaaacaagctcccctagagatacgctggaatgtaattttaaaagagggatgtaggttaaccagttatttaatataggtagaacaagatatttcaagtggtatacaggaaagtttaaccaagcataaaacatatgctcaatttttaactgtgaaaattctgtttcttcttgtaccactctagtcaatttaaacatttagagcttaacagcatgggaaatatccttttaaattcactgttgctaaagaacttcagccttcatatggcagcctattaaacagcttctattcaccacctcttttttatcccttgttattggaattgtgatctcattttatctgtttcaatagtaagacaagtatagatgacctctcgtgccaattaacaaatctggtgggagaaaaaaaacatgactgatgcttgaaaagtcatggcctctacttttatttgcctttataaacaaaatcagaaaaaaaggaatagaaaagacattctgttaaccttattctcttgcctgagatgatcagcctaatataacattatgatataaaaggaactgttcaaaattcatttattcactcaacttgtattaaaaaacaagcactataaagggcctgggtatatagtgatgcacaaaacaggtagaacttgtgccctcagaaggcttaagcagtatatgtccttatacactgcattgacaacagccccagttacttcttttcaagaaaactcgggggatctggaatgccaagaagcataactaacatgatcaagagaatgaaaataaccagaaaagctaatcgttacggtctgtgtatctattatgctgcttttgtatacaaattacagaaaacttctactcaactggcttatacaatgggacatttgttattgtacaaaaagagaagtctgagtggttaatccattagtttcattgaagagacaggtacttcccatctttctgctctgtcacccataagccttcatggggcaagaaggctgccacacatacaggcatcacatccaggaaaaaccatgtaggtaggacagcagaagatgttttctgatactcctcaggtgtctcttttttctgagacttcctctttttacatttcattgaccagaactgcaacacatacaccttcctaaacccatcactaccaggaggaattacatttgcacaactggcttagactaatttagttcaatttaaaatactgagcacccacacgccaaatgttctctactcttagctaaaaaaaaaataaatgaacaaaccaaatagatgacaagtattgtgtaaagctcagggacatacaggcagtgatgtaaatgggaaattaaaatctcttgttaaacaaatgatca

SEQ ID NO: 53388 - DNA, 1287 bp, Bovine  19866880626397
  misc_feature (1)..(1): n is a, c, g, or t
ncccacgttttttaactggagattacaatatgatgaggaacatttcaaataagcaagaaagtgatgacctaatcaattaaaaatattacataattaattgaaattttttaaaaatgaaattaatgttctgcctcacatcataccctaataagttacaaatggattaaagattagttattaaagtgttggaaccttacattatttgaaatttgtattttcctcctgcatttgttggttgattggtttagcatggggcatggggtggatgctgcctcctgtaggacccaggtactgtttcctcactttctggggtgttgactgccaatggctcacagctgcattccttgggtaaaatgccctcagttcagtggctctggactgcgagtacttatgcccctaggagacatgggcaatgtctggaggcattttgatgactggtggtgaggaggagaatgctactggcatttagtaggtagaggccaggaaggttgctaaccatcctgtaatacacaggacagctcttcccctcaacaaggaattgtctggtccaaaatgcagtaatgtcaccgtggagaaatcctgacctggccaaaggaagctgtcttgcccagtgtcccacctccttcccagggccagtccacacccagcgcagtgctacaaagccctggcccctttgcctcgatttggaataactcagaagggcctggccagcaccagcacatcttacaggactgactaaagtctctgtggcacctgcattgcagtttaatttcccttctgccccatcctgcttccctcactttcttataggtgttgttttgataaattccccaataaacatcctgcaagcaaatctctacctcaggggtttatttctcaggaacccaagacaccaggaatggtcctaggaaactgcaataggattttgaggttggtttatgcactgtccaactggtaattaggatcccatgactggtgccaagtgaaggatggacaggcctggcatgatactaatgtgattgttagaacttttacaggtagtgagctggagcatgtgccagtggaaggggatgcactgacaggtacaaaatcttaggcattgtcaaggaacaggaaaagtgctccttacaaagactgtagaattggctgactattgctggctattatcaatactttagagaaagacaatgaaaggcagagagataaattatcaccaattaaaggcaaactgtgaaattcagagggcctccttgactgttcttgtagctggagggcagaaaatgctga

SEQ ID NO: 53389 - DNA, 1064 bp, Bovine  19866880728676
  misc_feature (1)..(1): n is a, c, g, or t
ncagaataactattatgtacacaggtgttgactaccagcagatatacaaaatgaaataaaagaatatggttgttttgactttcctggtggctcagctggtagagtctgcccgcaacgcgagagaccaagtttcgatctctgggttgggaagataccctggagaaggaaatggcaaccctctacagtattcttgcctggagaatccaatggatggagaaacctgttaggttaccatccatggggtcacaaagagtgggacacaactgaatgactttacttttgctttcgctctacagctctaaattcaagaatgtgaattgtgactgttatcacatcacataagcttaaaatttccttttgtccacttgctatctgttctcttggaagaaaaacttctctggcaagaagtgttagtcaatatggaaaatactcattcgcataaattccaacttttaacttagaaagcaagaaaaaatatatctatgtctccaacttggttgggaccagttgaaagttcctcataaacccataaatggacataggctttggtttccttgagggtttctgaaatgaatccattacattaaaatggctcttagtagcaaaagcaagtaatgatttgcattataagctaataaaatgggggattaggcatatctgtacaataagatcttttttattcacttttatagagattctctccctatccctgcttaaatgaacttggaagattattcaccattcagtattgtttaaattataaggcaccaagctgtcatctggtttttaaatatttttcccctttggtaatgtagatgagtaatgtctatctccattctttaagaatacactaatataatgacagtctaattttgaaaaaaaattagtttttcttaatatctcacagctaaagatttcctgacatattagaaacagaatattcttccaaactacacttttccagccatcttgaacattcatagttcagtgaattgtacttttcattcctattcaagaagtgctacaagtcctctcacataagtaaatctcctgggagaagactt

SEQ ID NO: 53390 - DNA, 1634 bp, Bovine  19866880916735
  misc_feature (1)..(1): n is a, c, g, or t
ncaagggtgtctcttagctgagttctgtccaggaaatttactctttctactgctttacagagacagatagctttgatgagaaatactttagaatgcttatcttacaagtacaagaaaagactatgttaggatgtgaatttttttctgactatagagcctattcaatgcatagcaatatttgtgtttacattttaaaaatctgatctatttgcttgtcagctttggagcattcgctgcaaatgttcactgctcccatgaaaagcagtttcaataaataacagcctgaaatgggctccgttgcagttaatttgatttataggaattagaataataatgctctaaaacgcatattaaaataactctgcttatctctaacattgttatttcttaaagcaaacaatttagatagaaacgtcatttgataaaaataattggttcacgtaaaatgggactcacattcttttgccagactcagcagctactcttcagtggtacttcattagacgcgattctcattcatcttgaagtcttaagaaaagagccaccttctttatttttaaaaattatttttttaaaagtaaacaaatgcagggaagatggaataaaatttctaacagaatttacttactgttattcaattctttaaacattttcctaggggacaggaatgtcatatgtttagtttcaggacaaaggcacctttttaaatgacaagctttaagaaaatctatgaagaagtttgtttaatagaaagtaggctaactaaacttttggttataaaaattatctacattacaaaattagaaaataactaatatctaatgaactttagaactaatgtaaggttaatctttaataaagagtatccttaaaaaaaaaaaaaaaaggcagttacaagcaacttctagaattcattttgggtaacatgtccagggacacattgttttattgtttttctttggttttctatggtaaagctgattaaagttgggagttaagaaaatctatataacttgagaacgttttcaggtagtggttttatgcagggctagtgttatgcagtttaaaaccaaaaccttagagtcatataacattaattaactcatttattaattgtggattattattactgctattattattttgcctgagaaatgaccaaactatatacaagccaggaattaattcaggttcttggcaatggtttaaagtttctttaatagattagaaattaattaaaagccccttgtatgtgattcattaatattcatatttatattttgagactcaaatgaatttaaaaattgaagatcgttaaatgattttagctacatgttgtgttatggcaaaaatatatattgtaaggtttttcatttaagagagtatttacatttatgttgctttttaatagaaagttgctaaatgtaaaaacatttgttaatatgttttatttgttaatgaaaatgatttcatagacattaataaatcttcactttcttgactactttctaacattttaaatttattttagaatacagatatttatttttaaagggataagtaaatatatttagaattctcattcacttcagtgaaagagagtttaaaatctccaacaggatagtgaacttttt

SEQ ID NO: 53391 - DNA, 1078 bp, Bovine  19866880937501
  misc_feature (1)..(1): n is a, c, g, or t
ncgttgagtctgtggtgcctaggtgtctggatgcatctgtagcttccctctcactcatcagtgtaattgttgccatgttattccattttttgattagtctagtccctcaagctcaatgcttttttctggcccaacggtcttctgctggttgtcatggtgactgaattgttagcgaggagaaaggctctgttgtctgtcattgttctgttgtggtttaggtaacgcaggaggcaacacaagtgaagtggatggaccttttttgctctgcatcatttcatagtattgaaaaatctcacataaaaaaggagcaaataggcccaaccaaagaaataaccaagctctttctaaaggaaagtgcacattattataaagaggcaaaatagcactaatgatgaactgagtaatctatgaaaatgctgctgaatattacatttattactagaacaatcgctgcaacttaaacatcacatacaatacctaccattttgcaatttagagtaaatatagtttttaactatacaattgtagcatcaactctttgattctcgaggctctgctactttaaccttacgttctgtttaaccccaagatagcatggtggaagttaggactgaagccaaatggaagagttgggcaaattttcttttggtggtgagatagtgttggggccaatttctactttgggaatgtggaaataagtttttaaagatgagggattactaaaaaaaaaaaaaaatttttttatttaaatggttttttgaagctaaccaatataaatataatcattcttaatttttaattttctagatttttaaccagaaaatggagagatatagcatataaataagggatacattatagacagggaccaaattaataacagttcctaaaaaaaaaaaacactcttaatctttgttcatcattacattgctagacatatatctgcacaaatcagcaattactttcattagcattggtacaattttcctgtgaactttttcatttgttttatttgaacttgaaatgatctagtttaatttttatttaactgtttaatttagttcttaatgatataaag

SEQ ID NO: 53392 - DNA, 1118 bp, Bovine  19866880978254
  misc_feature (1)..(1): n is a, c, g, or t
nactaatcaatagccgcagacaatgcaatgtgccaaacaaattgcaaatcaattagaatccttgttttctttgaaatggttcactatatctaaagcaattactccttcattagacctaatttaacagcatgactgccctggctacaactggcagcgtctggctatcaaatggaagaatggcagcttatttctgtctgtctagcaccaatcaaaaaaaaaaaaaatttgaattcctttatatgagagaaacttttaatgaatgggtggatatttgtcttaatcaaaatatcagtacccaaatgacgatacctccctccaaggaaaattaaaagagaaaagaaccacaagaattactgaataagaatctgtgattaaaaaatgtttttcttcttattctactaagcctcatgtaaagacgacatttaagtaggtaaagtctttttagcttttcaacctaacacatctcttgataccagtttgaggacatttgagcagagaagcctcctgaaaccttccagaattcagaatactcttgtaaaatgatcgctcaaaaaagttctagttcactttatttgtaaagctatttaaaaaacagctttattgtgatatgatttacatacaataaaattcacccacttaaaatgtacatttgatgaattctgacacatgtgtacagtcatataaccaccgcctcaatcaagatatacaatatttctatcactccgataagttcccatgtctcctttagcagaaggttcctgcccttcatccctggcaccaggcaacgtaggtctgctttctgtcagcccatttcatttttaggaataggttcccatcctgtggaggatatgggactagaaaaataacggaaataaggtttttctgctgttacagggggaaatgattttatatgactggaacagcaagtaacaatctctcagaactgaagaataagatgacaaatttgggaaagtagatatgcttaaggagatcaaaccatttcagaagccaaggtaaaaattcctaaatgaactgaaaaactcttaatagtcccaactcccattattaaatcattaaacctcagaggctgatcacagctccaagaattatcttttaat

SEQ ID NO: 53393 - DNA, 1310 bp, Bovine  19866881008557
  misc_feature (1)..(1): n is a, c, g, or t
nttcctgcaggaggcagggctcctgtgggtttgtgtatagaatacaggaatccgttaatttggatgagaaaaaatgaatctttatttttattacccctttcaattatagatacaagcaacaaaaataatgactatcagtacctgtgattgtgttaccaatggaaatcacaggattttaaaaataacacactaaattattatcgatattcaaaacttcagtattcattatgactaaaaaattataggagttgctacttttgtgcatagaccttattattaatatttaaagcagtaagttcattaacattaaatcatcatagaattgcttgtatacaaatttgctttttaagtcttttgataactttatttcagtataatagattttctttgtaatcctgagtgttttattttatgcatgtaaaagcattctgagaagagatccacaggtttcatcagtttgccagaggattctatggcacacacaaaagaaaaagttatgaatttggactaaaggaagatctgagctcatgtagatataatttactttcccaaatcaatggtctccagagcaagataggcagaactctcctcactttgtcttctcaatgcctgcttccaactgaagacggacttgttatgaattccaagttgcttttaatattcctcttaacctgaattttggttggttagaattgtttcaaggaagtgtgatttctggaggagaagtgtgaagtcttgaggaacacccaggagagtataaatggtaaaagaaaaagagttaagaccagagcccaagtttgccttcacttcttggctccattttcaaaccctttgtggttaggatcactgtaaaagccaatagggcacaaaaactatattacataaaagtgttgttgtttagtcatgtcccacggactgtagcccaccagtctcctctgtccatgggattctccaggcaagaatactggagtgggttgccatttccttcttcaacataaaaatactaagtgtataagtatgttgggtcagatagcaaaattgtgtttatttgatatgttagatgcaatccctgggcattagctcctgtgaattctgctcccctctcccaccttgttggtgagcttgggagctcaggaaaagatgggctctggcttaggaaggaggtaaccagtgcagagaaaagggaactttttactgcgcacactcctttgttatttgtgagcttccaagggctctgggaaggttgtgaggaggcaaggggcctaaagatgggggattgcatgctggaaaacaggtgccttgctgggtgg

SEQ ID NO: 53394 - DNA, 1499 bp, Bovine  19866881053262
  misc_feature (1)..(1): n is a, c, g, or t
ncttctttgatcatgctagcttaaaattgctttgaacccttcctttgtcctgcggtcaaataccctggtgcccatcccctgtcctaccttgcatctgggtgtggcaccccatcacttcattgctttgctggttcctcctgttttggtgctcgggctaatgcctgctctcattttcctgctaggagattctgcaaaccatggctaaacatacctagccttggctattctgtttccaacaacccactgtctggagacccttcagtatccaatgaactagacatagccaaagagagggtacaagagggaagagaagtgtgagaagacaggaaaattagttaaggagggatccagaggagtagccgtcagagacgggaagcacagagcagctcagggtcatggacgccttggaagagaaaactcttaaatatacccaatgctacagagaattcaggaaggtgaaaggttgttatgcagccattggatttgatgatgcgactggtaatgacagcctgcaatgagcaattttagcggagtggtgaggatgcaaagagctaaggattgtacagtccaatgtgatttgggtggtgaggcagtggaaacatgtatgggctcgcttcttaacaatttgggagtcgaaggaaagcgagaggtagggtggtgccttaaaggaatagcagggtcaggagaaggttggtgcctttttgaatgaccaaatgcttcacccatacacatctttcatcactaaagactgatgaaatgcagttatgctgcggttgctgggcactgggataatgcatacagtcaacattctgaaacacttcttgaaagagcacttgaatcataacctaaatttttaggaggggcagtgatttcttatccaccatatcttgatcaaacttcagatagccttaacctaatatttgaaaagcgaatagtttaaactcatttgttgagttgttcctttgcagtggggtaatagccaaacagtgacaaccaaacagagaattttgcaagcagagcacctctactggtggcggcagctgctctggatgaaaggcatggacttgacactgagaaactagaggaaaggctcgaagggagaggacaaggaacttcttggtgacttctacacacacacacacacacacacacccctcccacaccacatacacctccacctgctcaccctacacccccctcacacacacacccacactcccacccacccatcctgtactactggtctacctccctgtgtcacacacaccaacccacccacctacccatcatgtacttctggtctacctccctgtgtgtgttgtgcctgctgaggcttaagcctgcccacactctgcgatcattctgcttccagtggaggatacaaacaagagaccctgacctatttctccagattctttgcctgactgcctctcagagtctgctgcccagacaattccagaccctttggtaccctctcctctactcctttattgatgagt

SEQ ID NO: 53395 - DNA, 750 bp, Bovine  19866881088812
  misc_feature (1)..(1): n is a, c, g, or t
natgtgtaacacctgagagcaggaaaagacagttgttccagctcactaaaggagagagaatttgtctttccattctacttgggttcccaatggattggatgatgcctacctgcattggtaagagagatctttacttaaacaccttcacagatacactcagaactagtgttttaccaataatctgggcatttcttagcccaggcaggctgacacatacaatttgctatcaaagagatactgtaacttcttgatgcctgtattcccaaactgggatacatttaccaccggtcttcaaggacatatacataaagatatttattttaatggctataaatttattttgtatcagaaaaattaatgatcaatatattaaacatgaatattgtttcttaggatgagtcttagatatgaagcagtaactaatttggtttaaagtccttttaaagagaaccataaagtaaataatgaacaaacaatgtgtagatatggccagaaatatggtatacaaaagttcaagatttgggaaatgttgctccatacaatatacgtatttctaaaaagtacaacgtgttttcaaattaaattgctttaaaacttttagaaaaagtcaccaatttaaaaaaaacctaaaagaagtcttttcataacttgaatcatcaccatagtataatcattctttactgtaaagatctcaaaatttcatgttttggtttcaagttgctttaagagaaagacatatgtattcaagtt

SEQ ID NO: 53396 - DNA, 886 bp, Bovine  19866880163656
  misc_feature (1)..(1): n is a, c, g, or t
nctgtccccaatccctccaagcatcagagtcttctcaaatgagtcaattcttcgcatgaggtggccaaagtactggagtttcagctttagcatcattccttccaaagaaatcccagggctgatctccttcagaatggactggttggatctccttgaagtccaagggactctcaagagtcttctccaacaccacagttcaaaagcatcaagtcttcggtgctcagccttcttcacagtccaactctcacatccatacatgaccacaggaaaaaccatagccttgactagacggacctttgttggcaaagtaatgtcttggcttttgaatatgctatctaggttggtcataactttccttccaaggagtaagtgtcttttaatttcatggctgtaatcaccatctgcagtgattttggagcccccaaaaataaagtctgacactgtttccactgtttccccatctatttcccatgaagtgatgggaccagatgtttagcaattcttgaattcaaaatagctatccagtatttttttgctttccaagtgacaaaatgttttattgcccctttcaaaaattgtgtctagaaattaaaaataaaataaaaatttgggtggtatattctttgatacagataaaagtcctcccattgactgtctggggggagaatatatatagtttatttcattgtttatagtatttaactgaaagttctacatttggggaactggcttcttaacttgaagaattttccaattgagatgcattcatttcattttggtggaagaggtgattccagtgctataatggctttttggataataaccaatttatatctaactcagcaatattatcctaacacttatctgctaattttcctcttaatag

SEQ ID NO: 53397 - DNA, 1766 bp, Bovine  19866880424295
  misc_feature (1)..(1): n is a, c, g, or t
nttcccaagaaatgctgattctacttaagagatcatattctgaaaaccaatgatgtagttaattgttgtcagggaaaaccctattactaagtttatgtttgacattctctgttgttataataactaaaatttctttgaggttttaattaggttagtaatgtggtcatgtgtgtgccaagtcgcttcagtcgtgtctgactctttgcgactctacggaactcaggctcctctgtccatgggattttccaggcaagaatactggagtggattgccatgccgtcctccaggggatcttccacacccaggaatcaaacctgtgtctctaacgtttcctgcattgacaggcagtttctttatcactagcaccaagaatcatagctaaatctttttcttcaagacacttgaatatcaagctagtgattacacagtgatgatggcagatcagaagccagaatggagtttgttgcctaatgactcagtgacttcatatgtaagagactcttctgttggtatttcaggcccaaagtgtcattctgaagccctcccacttttaagggtagcaacctcttttgtacattcaatacttactctgcttctctgtacctccttaaatgaactaattactattcctcaaagatttagaggagtctgtgtaaagaaatgaaaaatttcttggtttcttctaagtggcttggatcctaggaatgcaaacagatgactacagatcacaaatggtgtgatctgccttgatgaaactgcaaagaatcttgagaagaataagaattctaagataagaaatgcattgaaacacatctgttagttggagagtgagagcatggtatatacatggttcttcttttcaggatagtacccaaaagaaaggtggattctagaagttataagagaaatatttccagttcaagcacatctccaaagaatagaaaaaaagtaagctcctatctgatacttaagaagtgcctgacaactcagttcatctcaaactgtgcttttgtatctaaaaaagcccagctacaaattgcctttattaggctgaggggtatttagcccaaactagagtgcacgttcttttatgtgaatgaacacctttaggaagcaagacaaagtgaaattttaaaaatagagcttcaaagtctaaataacgaatggaaagcccattagatttggtcagttctctatcttcaggatcatgcaattgatctactgcacacagattaactctgatgcactaccacttattgtctagataatcttgtatttgcctgcacagcactccacctggcttcttggataacaatagtcagaaaatgagagaggctgtggcaaagccctggataaagcgagacagggctgtttgtttctcatacctcactgtcttctcaggttttcctctctccgcctttcatttttatgtttgccaaagaagagaattaatagagtggaagttttaaatgtgaggcaagcttcagtggcatcgacggttttttgcgaccaactcttagctgaggggcaggtcgctgagggtctgtctaaacgcaagttggtctcggtggaaggcttttctgagagggtaattattatttgccaactgctggaaagcagacattttgcatgtctttactttagaaatctttttcatctatttattctcctgtttggacagaacagcgattttaaataaccaggaaaataagtcattctctgaacttatacagcaagtgtcattcattatatgctctgatcttcag

SEQ ID NO: 53398 - DNA, 1872 bp, Bovine  19866880480977
  misc_feature (1)..(1): n is a, c, g, or t
naagagaagtgaaaaggaaaggagaaaggaaaaatatacccaaatgaatgtagagttcaagagaatagcaaggagggataaaaatacttttttttttaaaattaacaaagcaaaaaatagaggaaaacaatagaatgcaaaaaactagagatctcatcaagaaaattggagctatcaagggaatatttcatgacaggatggggcaataaaggacagaatctaacagaagcagaaaagtttaaaaagaggtgtcaaggatacacagatgaagcatacaaaaagtcttattgacctagacaaccacgatgttgtggtcactcacctagagacagacgtattagagtgtgatatcatgtggaccttaagcatctttactacaaagctagtggaggtgatggaattctagctgagccactgaaaatcccaaaagatgatgccgtgaaagtgctgcacacaatatgtccatatatttggaaaacacgcagtggccacaggactggaaaaggttagttttcatttcaatcccaaagaaggggaatgccaaagaatgtttaaatttcaataaacttttcaattactttgtattattactgagtaaatttaagctttcatcatgacccacgattccttctataaacagggtcccagtttaattctccaaaagcacatgccactgctttctgatcttgcatattttctttaataacagttaacataaataaaaagtgctttaaacaaggccgactttactaaacttccaggccttcaaatatattgttccctctgcctggattttcaccccttccctggcttctcactctcttccttgaccccttaaggagtttcccatttttcaagggttgatttcagtgtcattttccctcagcaactttccttgtgaacctcaatggagcaatccctctttcatttctttatccccatagacacttacattccacacttcataaagtgtgcttttgtctaaatggcttttccccactcctgtgtctttataaatatgtttcctattagaaaacctgacatctagtaggcactcagtaatttgtacattatgaattgtattgtagttggtcaaaccaaaagaagtgcttgaaatttagaaatgagaaggtaaacagaagaatactccactgggggtactttgctaatggtaaagcagtggcagtgacgataataataacaacatatattagtgatatctaatgctcaccctagtcatagtgtacaatagcacagatgctcatcacttcctgtgtaccaaatattgtgtaatttttggaggggatgtgcatgaaatatcccatttcatcttgacaacagataccacaactgaaacgtaaacagttaaaaaaaaaaaactttcagaatcacacagctaggaagtggtgaagatgggattcaatccatggctgtctgatcccagagttcattttaataactattaattatcccaccccctgaatccccattgcccagtacaacttaaattatattttcattgaacatctattttttgtttaaaataccaaattaatgagttctttgtatttatttagacccagaacatttatctctgtattgacataatcttagcctgcagattttctttaaaaaaaaaagtcctcaatactttgaaaagggactgacctcaacaaagctttcatttgaaacatttaaacagtcacatatcacatatacacaccaaacaaattttcaaataataccagctccttctcccaaagtaatattcatcaatttctccacttgactgtttggtctattcaatacaattatgggagatttgaaatacacaatagatattgattcagcctctcacatagagaccatttt

SEQ ID NO: 53399 - DNA, 1161 bp, Bovine  19866880481912
  misc_feature (1)..(1): n is a, c, g, or t
ncttttcgcatgaggtggccaagtactggagtttcagctttagcatcattccttccaaagaaatcccagggctgatctccttcagaatggactggttggatctccttgcagtccaagggactctcaagagtcttctccaacaccacagttcagaagcatcaattcttcagtgctcagctttctgcacagtccaactgtcacatccacacacgaccacagtaaaaaccatagccttgactagatggacctttgttgggaatgtaatgtctctgctttttaatatgctatctaggttggtcacaactttcctttcaaggagtaagcgtcttttaatttcatggctgcaatcactatctacagtgattttgaagtcatgtctaattctttgtgaccccatggactatacagtccatggaattctccaggccagaatactggagtgcgtagctttcccttctccaggggatctttccaactcaggaatagaacctagttctcccacactgcttgcaattctttataagcaaatcatttatttaattttaacttgtatcatagctgcttaagtagatttgcttgactcagttactgtgattttcttttacctttacttttacaaaatatctctcaaataaaatcctttgaaaatgctaaagcacaaatcaaattgcattattatttctatatcatgcatacatacatatacaccttcaaaaaaaaaagagagaattaatttaatctcatgcttgtttcagttaaatctgagcataaaatgtatcttttacatctcagaatcaagattatggtcttagttgaaaatcatttgggttctgtaaaaaggtcacagatgaagatgctatcatacaataaatgctaatttgttttgtaagctgaaaatgtatgcaccaaaatttggtttccaatgtgagtggagagatcagaaaagaaagcaacagcggctaggtttttgctaaaatgacgatcttagtgctggatatcagagcttacaaagccaaaatcggttatagtcatgaaaatgtcttctttcgttttttagatattaatattattagcatagaatcatattttaacttcatttcaaaaatcaatgaatgcaatcttattgaagaatacaagtttctagcagtattaaaagtagat

SEQ ID NO: 53400 - DNA, 1473 bp, Bovine  19866880624058
  misc_feature (1)..(1): n is a, c, g, or t
ntatgatccttcatgtcaatgatccacaattgctttaggtagattcttaaaaactttatatccatttctttatatttgtagtctctttcactcttctacatccaggtaaacagtgatgatgtgatcagctttatcacctaaatataaatgactctgataaaaaacaaacaaacaaacatgtgtccctagaattaaaagttcagcctttttttgacatatgtgtcaagacaatccaagagttgcccttgcgatagataattagggaaaactgtcaagcttgcagcttaatcctgtgtacgtctgctcaaagtcagctctgaaaactatggaatctaggaagacaatcttttgtaattagccaaggccactataatccataaaaacatgtgatcaaattgatttctagtccatcaagtggtatctgtcaacaacaaccttcccaatcatcttggagctgtgaatacctcatgtaaacttctaggtcatttaaagtttcctttcctttgtaaatataaaatcattttcactttttgacagactttctgttcaagtgggacagttgggtagagggaaagtaggaaaaatatggactgtcagtagcattcacaagcataaacattagagaggcagaaatacacaaaatgtcttcggtaaggttagtgctataactaagtatctaacaatatgtgtaactttgtatatgaaggctgataattataacatgtccatattgagtctgttgcataagagactttgctcttatggtgcgcattgctgaatgatgcacctatgcctgtcttgctacttggaggcagtactttcatcttattccacatctgttattctttccaagctctagtctctagacagtctcaaatataatccctaaatctttcttaaactcaggttttcagaatggattggattatgccactttcctgcctctttcttgtctgccaggtgcattctgattcttttcgagcctggttgtcctacgcacttcacgttctaaactcagtgacttccccctcttactttcttgatggttatatacagtgccgctcatatagaaaattaaattatcttcatttgcctcaaaatgccaaactcagatcagcttcaaatctcccccacctcttctggatcttaatttgatatgctgttaattacctttatactggagaagtaaatggcaacccactccaggactcttgcctgaaaaatcccatggacacagaagcctggtaggctacagtccatgtggatgcaaagagtcagacatgactgagcaacttcactttctctttaattacctttcaatgtgtatagtttagtgaaatagttgaacactttgcttcactttgttttccctcaaccaggctctctgacaactcctaagaatgtgccgcattccttcttgcaactttcctttcttatcctatgtgctaagacatttttctgccatctttttca

SEQ ID NO: 53401 - DNA, 5031 bp, Bovine  19866880680649
  misc_feature (1)..(1): n is a, c, g, or t
ntaaccaactgggcattaatttccaaatttgatcatctgacaaagtcatgatgatctttttgagtactatttcatcttataaaccaacaatcagaaacaaatcatattgcattatattgattaaagtccatcaatctaagtatgtcagctattttttttaatcaatgaatgatttatttatctgttgcaacaaatgacatcatttgatccccttaacaattttctggggccagaacattcacttatcatatgacatgagatgtgtgaattcctctgagcttgaggtgtctttaaattttttttttaatataaatttattttagttggaggctaactactttacaatattgtattggttttgccatacatcaatatagtgaagtaagccagaaagaaaaacaccaatacagtatactaatgcatatatatggaatttagaaagatggtaataataaccttgtatgtgagacagcaaaagagacacagatgtatagaacagtcttttgggctctgtgggagagggcgagggtgggatgatttgggagaatggctttgaaacatgtataatatcatatgtgaaatgaattttcagctatttttaatctttgcttctcattcttgtttgtttgttttggttgattgtttctttttccagaaaaacaagttatgacagatatcaaatatttataatttctaagagaagcaactaaaacttgagaaaatactgtccattctgaaaactatcaaactctgcatattttgaccttggtgggagaatatctgggactaagttatacaatatataatcttaggtatacctgtggcggattcatttcgatatttggcaaaactaatacaatattgtaaagtttaaaaataaaataaaattaaaaaaaaaaaaaaagaagcagagctttgttaaatagtattggattgaccaaataaatgtgtgttgtcactgaggtgtgtctgattctctgtgaccccataggctgtagccccccaggctcctcttcccatggaattttccatgcaagaatattgaaacagcttgccacttcctactccaggggatcttcctgacccagggattgaacccacatctcttgcatctcctgcatttgtaggtggattctttaccactgtgccacctggaaagcaaccaaataaataccattgaccaaatattttgatgtttttagtttggtactcagaaagctggagatactgtctcctattaccctaagataggacctctttattcacaaagaagaaagtcaaagtctcattttcattaatgtttcaccaggggtgtcttctgcaggtaaaatatcacaactctactaccttaaagagtgtaaaatttcaaacagttgtcccaatgctgcacttaaggagaggtggggagtatcgtgtgtggatccctttatagtcttgacactccccaagagagaaggcatcctactatctcatccttctgttctagtagtcttttcagatttgcttcatccagtatctgccccctccctctcttttcaggtgcatcatttgccctacaaaataatcaatgaatacattcatgacttcagtaatagtgtctgtgttttagtcctttcctattcttcctgggttttgtgaattctatacattcaggtatcaagtatttatcttgttttagctttatgctggctccaaagaagagctccattgcttctgtttcctgcagcctcttcctggaataatacatggtagtgagttttagatcctaggaaaattttattcagtaatttttaagacaccttatttttttgttctagaagaataatataagtatagcctaaaaaatgggataggttataactgtttgtgaatgtctcatgaaaagaaagaaatgagatcttattatttaatcattttctgtgcataatcagtgcaaaggcaatcaagacaaactgataattcagccctaactgatcttaatattttcttcactggttcccaacctcatccactgcattatagttctgtggaataataataatactatattctaaaggtactcatagagggaaggggtaataagccaatgtaaattttaggagaaaagtgcatttgagttcatccctaagaaattaagatggcacacaacaggaggaaggccagtctaggagattcacagacacagagattctcagggaagtacaaatagtgtgtgatttcatgacagtgacatcagaccaaggtttcattttaaaattattgaagatttaggatggggccaggtgacagaactggcaaagtcaagtatgttttggcttttatgtcaaaaaggtagataatcactatagacttttaagaaatggaatgacaataaaaagttgtgttaaagaataacttgggacagttctcacagcagatcacagaagagagaattcatttgaggaataaataaatcttcagttctccagcactaacctacgatgttactgcagaataattaagtgtgttgaaacttaaccacttttgtggaaatggcccgttatcttcagtgtgtatttaattacttgaattttcttgagaatgtcacattatttttctttatttccttaaagttttaaattcttatagctttcttagagactttcatgatggtctctgcaaagaaatgagtgagatgaagggactgacttcattaggtgtggttcatttatatctatcctggtaaaacagggacactgagatatcaaattcaatggtgtgtgaattaggatcagcgagggacagagaaccatgtaaaaccatgagatgactcagcatgctcattatgttcagggtgcccttctgtacacaggtcacccgtggttaaagaactgaaggctctaccatctgaccatgcaaagagcaggctggacattgagggacttgggcttttcatgggaggggagttgacaggttactggggactgattgtgtgggacaaatagtaccagggaaatggtgatccttttctcccttaactagcaattgctattgtgtgtaaatgattaatggaaacttattcttggaaattgaagagagcagttttcttgaaaaatgttaatcaaaagaaccagaaagaggatggccatgtatctgtttcgtcattacctgctgcaatttacaatgtgcctctgttttattcagaatgtatcataagtcttgtgcactaataaaatttgtatcattttttccataaaaaaaaagaataacttctatttcttcctttgaggctgaaggtttatattctttgctttgtgttttaattatttagatgcttatttattttgtaattgactttgtaatcgtctcagatacccttgttattccattgtgtgaatgcctataaaactctgcagtgtagatcactggggtttccttgatggagctgttgaagttatcatttacagatgcctcctagcagccttgacaatagttgccaagaaaaagttcagccattccccaatagcagccacagggaaaagccagaaaggtgagctgcactggtatgaagaaggagtggtcttctcagagtctgcattaccagcaaagcaaagttctcttgtgccaattctgaaatgcattaattagttgaagaccaatcttgggtgaactttcctttcttatcattttttttctcacaatagtgtatgtggtgagtccctcagggagcaataaaacacttggataagccagttgtagattaaatatagactccctatggcaactcttatctcctgcctttcctcctgcttgcaaagatgcagagatgggattattgccacagctgtgcttcctagaagactaatcaatgcagctataagaaggtctgaaatgcagcaggattttcaattctaagggtaaaatttttaaaaagtgaggaagggaactgtcctgaaagttataatgccgctaaatcaaaacaccttttaaaaacagaaaataagactataaaaattgcctcattgtcctattttgagtatatatcaaactaggatctataaatcctatgtataatacaacagggaaggataaaggcaaaaggagacgaggaaaacaaaggatgagatggttagatagcatcaccaactcagtggatttcagtttgagcaaactctgggagataatgaagaacaaggaagcctggcatacttcagtccattggggcacaaagagtcagacacaattgagcaactgagtaacaataatacattagaccaaatcgtgaagtcaaggtcccagagaacatagtttctttactagaactttgcttatataagcaaaattggagttaggacatggttattctcaaaaaccatggatatacctctagaactgccaagttgactttgttgcctcttccatgatttcttggttgagcttttatgtcatggaaatatataagacaaattccaagtcatttgaggtacaaaatcataaagaagagtatggaatgtgcaaaaggggttctgaggaatatacaacctaaatttcatatagtagaaataaggattctgcctatacaggggctatttgtcaccaccatctttagggcttagaggttggttcccaatacctaagagcactcctcttttttcggtagggtgaatgaggccatcgtggagtgacggcagtgcaaaccagcaatgaatttggggatattgtgtaagtgaacaagaagttgtcagtgtaacttccatgtcattgatctaagtcaatctgcatatatgaattgggaatcccaatgtgcttgacattatgccgagcaaaccagacatggccctgtcttcttggagcttatcttgtagttgagaatgtaaatattgtaagcataattgtaataattccgatccaggaggaacagagaatgctaagatctaggaatagcagaaccctgggctacaaaggtggtgttaggctccctatctctccactttagaaagaacaagggatgggggaaatgccaacagatttgagacaaaaacaatagaaata

SEQ ID NO: 53402 - DNA, 1498 bp, Bovine  19866881198411
  misc_feature (1)..(1): n is a, c, g, or t
nctctcttccctacagtgagctagactttcaagatgtaatagaacattaaatgcagaaatactttgtaatgttttcagaacagtagatatttcaatccaaaagtgcagctgaatattcatggagcttttttatttaaccaaatgtatccttggaaaacacaaatttgggacaatagtcataatatctaaggcagcacaattatcatatgtataaatgtttgcttctttcatagctgctgtgttatatatacacacagacacacatgtggatatgcacgtgagattaaaagcacatttacagctctaattgtattccatgaatctttcactatatcctggctatgaaagctttcttaataaagaatataaagataaaatatccccatattgaagtcatttaaagattttctattgtgaacttatccctggtcagggcactgttgtggttagaaaaataatagaaggtgcttcttaaggactgagcacttcagcagagaatcaagaaacacatataagatatacgtgtgtacatagtcaatagggcatgatgagtgttttaattagtaacatagaatagccaattctgcacgtgttactgattatgcacatgtataaagtagctccagacaaatcactgaggccattcacaaattgccctccagattcctgacctttggagtttcaggaacaattctgtggctatttattcagtgcacagagaatttcggaataacactggcccagggtttttcagagcagcttgcattcctcctttggactttgccatgggtggaattgtgtagctctaatattcataggtaaaagctccagtgtgcctgttttgggagataggtaattaaatttaaatgaaattgtcatggtgcggccctgctttgattggaatggtgcccttctaaggagagataccagagagctctctctctttctctctctctctctgccaagtgaggacacagagagaagatggcaaagcaggaagagagtgctcctcaggacctgaaccagccagcagcttgacttgggtgtgccagcctccagaattttaagaaaatacatttctgctgtttagcctcctctcagtctgtgatatttggtatggcacccctacctgactaaaataggctttatcactgaaaagaacctaagggcatgatctactctttgactaaacttccctttgatgtctccactctggccatgatgattatatgtgctgggccaagacatgcaacacgccactgggtttgctctgtctccaaaaccagcacagctcatgcctcaccttcttcaagctatttaataaatgacaccttcctagtgaagacttcactgaccattttagatcgcatccctcttcaatattccctgtctgttttccctgtttttctcttttaaatttatattcaatttacatactgtatgttttactagttaatcaggtttattttttttttctttcctaacggaaagaaaatat

SEQ ID NO: 53403 - DNA, 1730 bp, Bovine  19866881422444
  misc_feature (1)..(1): n is a, c, g, or t
naatgaatgaacaacaatgagtggatggcaatccttagcatttttgagataaaaagagaaggggcaagcacttcaatgacttattttgtggataaaataactgacatccataagaaatattacttaggattacatggcttattagtccatgaaatgaagctaggtccagaaaacaccactatatcttctaggagaaaactcttaaatacatggatagtacttaaattccagcattatcaaaagtagatagatgggtaagaatagactttgaattatgatttaaatatcattgatgggatagagttcatgtgaaaaggaagagctaagcacaactttgttcaaggcttttggaaattcacaatttctgtatttctgcccgcccacttgtttatttgcaaaacaaaatttgcattagctctctcatataattctgtgattgctctaagcagtagactagggaatctgagaattgaatcaaagtgttattttcacaatgggatatgaaaatccctagctaaatgtatttgctggtagaaatgagaaagaaattggatatatcaataaaacatgagagcagtgtaaaagagcttatggtgtcaagacctggggatttcaccagtggaaagaccacaacagcagagagagagagagagatggacatatttatcataaattcatattttcctccaccctatgatgttggttgcctttgtgattttgttgattggtatctgagaacctgcatcatagcaagttgtaatctttcagattcacaattccatccccaattattacagcgaggtctaggccttagttttttcttcagttggaaagatgtttaaattaactttacttctttccctgtgctctttaccttaagggttctaagtgtcctctctattctatactttaaaggactagccagctatcatcataaacgtgtttaactttattttgttttctgagttttcttgtttagtaataattcaaattgcctttgctaccagaaaaatgaaaagataaactgaagagagactgagaaccagagcaagtgaagtgactgactctcctttctcttttcctaataggtgaattctatctgtttctagtgagagttctggtgagtgtatgtgagttcacacttgtgaatatatccatgtgtatgttaaagaagaaggcagtggcatatgagttttatagtgagctgtgaagctggactcaaactggcaaaagaaagcaacctagacaaaattgtaaagttaaagagaattccagaaaaacatctacttctgctttattgactatgccaaagccttttactgtgtggatcacaataaactggaaaattctgaaagtgggaataccagaccacgtgacctgactcttgagaaatttgtatgcaggtcaatagttagaactggacatggaacaacagactggttccaaatagaaaaaggagtacatcaaggctgtatattatcatcctgcttatttaacttatatgcttatttaacttatatgcatcatgagaaactggctggaggaagcacaagctggaatgaagaattgctgggagaaatctcaataacctcagatatgcagatggcaccacccttatggcagaaagtgaagaagaactaaagagcctgttgatgaaagtgaaagaggagagtgaaaaagttggcttaaagctcaacattcagaaactaagatcatggcatccagtccca

SEQ ID NO: 53404 - DNA, 1773 bp, Bovine  19866880340258
  misc_feature (1)..(1): n is a, c, g, or t
ntttgacatcctctcgagtggggataggggattcttcttcatcactagaggaagtcttcactaacacttcagtggtttttgacttgttttttaaaccaaaatacagaagtggataaagatcttgaataaagaacctcacagtcaaattctactgagtctatgtgaataaggagtcaaacaatccagaagaatgtgaattccagaaccaatggttaattgtttgatctagttcttagagggttaggtgccacatcaaattaaaaactgcatggttcttgttctccaggaaactaaagatctattttggcctttgttttaaaagagaatccatgagacttcccttggctaagactctgtgttcccaacgcaggcaggtggggttcgatctctagtcagggaactagatcctttatgctgcaactgaagatcccacataccccaacaaatatcaaagatcccaggtgcagcaactaagacacagtgcagtcaaataaataaatattaaaacaacaacaacagaatcctcaagtggaccagcgttcatttagttttctgttttacacggaagcaatactcagcttccctttgcggggtggacattgtgaatgacctgaatgaatgctgggagcaatgactccttctgtttcagttgaatgatgtttagtgactttctagctgtctgactaccagacctaaaacagtgaaagatcctgtttgtgcctactttctgaaaatagcttccccaaaccctcagttttgatctaacacagagagtagtagagtagtcattcctgtctgaagttacattgtaacccgaaaagtagaggtcagttccacctgaaaaactgaagaagtctgaaaagagtaaaagaaaacatgtgcaaatagataatagcaacatatacaatgagaacatggaggaaatatttttaactaataattctgagtaatataaaatgaataaagaaacaatatttctaaatattatatgaaaagagaatttttaaaaagagaaaatgtctactatgagaataaagaaataaaagtaaaataaaagcagtgaaataacacccagcacattgactgaaaaatgccaaccaaagcagggggtgcaaaagcgtggttgacattttacatctagcatgtgagctttcctaaatttttctttcctatattttttctcatcaaacctttatagtcaaggaccaagactacatcatgctgtgaaaatgagagaggagaaaagatttaatgaccagaagctaataataataactacatggaatgaaaaggaatttggacaaagcaaactgttatatgacaaaatcatcttctaaaggtataagttaatctttttcatcattttattggaacaaaggacaaattgaaacataagcattagctactaaccttctgtcataaagatctgatctgtctctgtaattgctttaagaacagcttatttcaaagagagtaagaggaatataatatcacaaaccacaaaaatcaaagtaacttatttgttaagcaggtatgctaacaaaagaagttggaaagactcctctaaacactaaaatcagtggggtggccttctgagcctttatccaaagaaaacaaaaacactcattcgaaaagatatatgaactcctatgttcactgcagcattatttacaagagccacaatatgggagcaattgtgtctatcaacagatgaatggataaagaaaatgtgagaggataaatacatagaggttgagagggaaaaaatttttt

SEQ ID NO: 53405 - DNA, 3417 bp, Bovine  19866880473151
  misc_feature (1)..(1): n is a, c, g, or t
ngatctttgttggcaaagtaatgtctctgcttttcaacatgctataactgattcattttgctggacagcagaaactataaataatacaatattgtaaaacaacaaaaactcattttaaaaaatgaaaataaaagagggatggaggcattcttgtgtcaagtctgtcctaactaaataatccggagaaggcaatggcaccccactccagtactcttgcctgggaaatcccatgaacggaggagcctggtgggctgcagtccatggggtcgctgagtcggatacgacggagcgatttcactttcacttttcattttcctgcattgcagaaggcaatggcaacccactccagtgttcttgcctagagaatcccagggacggtggagcctggtgggctgctgtctatggggtcgcacagagtcggacacgactgaagcgacttagcagcagcagcagaagctgaataatcagaatttctacctaggcggagagcaaagttttgctgggcttctgtggctctcccacactctgctcttctattgggctcacactgcatttagaactttcttcttaggttttgtcatgattcactgtgaggttcactggacacgcaagacctgtacagacccccaggactcccactgcaagatcttctcactgtccaaaagataaacactgacactgatactttgaaaaatagaaacatgaggaatggaattgaaaatgacttaatgccttcagaacttaaaaaagatttttaacaattgtaatcattatattaacaagatctgtaacttttatttgtgaacaccaaagaaaaatcctgtcctatagcatcattatcttgttaacaaactttgttggaactgattcgtgtataaggaattgagacacagcagaccacttgtgattttaacagaaattattttgctgatggaggctttcaccaggatgttacctacacatacatgccacatgcatgtttgtctactagaagaagtatgatagatactgtgttaggttctcccttctcttacggcccaaagaaagagaaaaaaaaaaaattctactgtcttagcagtttgaaagcaaatgaaaccagcttttcactttccaaagcattcctcttatttagaacactgtgcaattcaaattcacttgccagaatataaaatcagatcatttaagaggtgggggtggaagggggaacaattcaagggaaaaagaccgaaggaagccatgtgtcattaattcagttataaattattagccaaaagcagcctctcagcatttgtatttgatgaacaaaaattgattgcttcaagggcatttcagtccttttgatgttcccatcttttagcccaccacaaatctgaatccttaacagaatattatagcattatagtaatcctgagagccaatactaaaggatttgcaagagcaacggagatcaatagtttgaaaaaagaatgtctttttgaatcgacagtgctgtctcgcctgatcgtgaacctgaacaaaataagtgggggctaaatacacaagcaatcacccaggctgcgccaaggggctggaggagccaggactctcctgcttgaataggactgagcgctgaatatttctaaaggattaaaccctaactaatggcaacccaaagatattttgcaaacaatcagcctctccctcaaatagttaagataatacattatgggtcttggtttggtattcaaaagactgggttcagctacaggttcaacatttgcttttgcatagagtttgagattatgggaaattggattagaggtaacgttgtcttaatggctagctccttcggaccactttgaaacagagaatcccccgcagtatttcaggacagactggagagaaccatgttcttaacacacaacacattagaaaacccaatgggccagaattgtttaaagacacaattgcccacatctgatgggatttccaagttgtaacatcatttgatacctcaaaagacagcgaacggcagctgactgttaaagtctccttgaacaattcggggattagcataaaattagacataaaggaggtaagtacagcagtagcacttgcccaccacagtaggggtattgttagcaaacgcaaatggactcagtgaaagtgtgaaggcatcttaacattgtctgaggacctgcatgctttaacattgatgtatatattttccagttctttgtttcctcaacaagaggccagcttagtccactggagtgaggagacttcagatggcacacatctggagaacatcccatggaaaattgtgaatggctaagtaatctctttcagtaccaagacaaggagtggtaatttatggtttaacagactacaaaacctgccattaattctaacataacaaactttaaaccaaatgattcggaagactgagataggcaatagcaattaacagaaggaaagcagctcttccagatgacatgagtgtcacactgtctttcgaacacacaaaaaaacttttctccatcagagcttatattttcggccattgtgtgggatagtcttgttggcattacactgctcgaatggcattgatccccacatttctggcatctaaaagagtggctcaaattaaaagcatgttaaagtcacaatccctgagtgttgtgctggagcagatgaaacattttatttggaggctgtgcatgataacatgtgatccttaaagttaacctttttctcaagctgtttaaagtgttttgtagctgttcttgtccaaatgaatcaaaagaaggataagcaggaactggcataaataatagcggccttaaaagggggcagcaaaattgatagctctacaaatggtagccacctgtaccaggaaaactcaaagaaagagaataagtatttgaagagaaagaataattggagatgtgacagcaaagaatagaaatcactccccaggaggtgtttaaaaagctcttctctctcctacttaatcacagttcccttaagcccataaattaaaatgcagtgtgtatggtacacgcattataagtatgaatactcatgtaatctaaagcatcttaactttgcccagcttgttttcctactgccagagtcaattccattaatgatataagaacaacacaattttacagtgaactgttctctatcacattttcttacactttaattaaattatcatattgatggtgtgttacttaagacctcaacaaaattttggtttccctaactaataaagatttaccattcttccctttagcaaaagtataacagatatttcactaaatttgaaagaaacttgtaaaagagtaaagcacttgctggcaatttatcccccaagagttaaaatggtgcagcttgatgttgccaggttcagttacagctttactacattaa

SEQ ID NO: 53406 - DNA, 1624 bp, Bovine  19866880495721
  misc_feature (1)..(1): n is a, c, g, or t
nctttagtcgcgtccgactctgtgccaccccatagacggcagcccaccaggctcccccatccctgggattctccaggcaagaacactggagtgggttgccatttcctcctccaatgcatgaaagtgaaaagtcaaagtgaaatcactcagtcgtgtccgactcctagcgaccctatggactgcagcctaccaggctcctccgtccatgggattttccaggcaagagtactggagtggggtgccattgccttctccatttcagtagggtttaaaaagaattatatatataactatttaattctataggctctcagccttgcctacatttcagaatcacctatagagctctaaaaatcaccttcaaaatatagatattatgcgtcccacccaagagattatgatttaatagggatcaaagcatttggatcttgaaaaaattctacagtaattttgatgcaaaggctgaatgaaacccactaatataagtttcaatgaaaattttagcctactataaaaacttgtaggaaacttaaaattctaacaataagaaactggtgtaaaagtaatgaggacataagttggaataccacatagtgatttaaaataatgtcgtaaaaatatgtctattgacatagaaagatgtaagtatatatatatatataaacacacaaaaaaagtatttatggatataattctatttttgtaaaatcaaaacacatatgcacccatatgtatagaatggaactaattttggttggctatagttactccttatgctgctccttttgtatgcctatattatttgatatttctgaatgacttcatatgacttacatatatataaaataaagcaacttcactttggtgatgaaaaggctaaccttaaataatatatgtactttaaatgaagaaatatttcattctgagataaagcagttatagcaaagttttaactaatggtaaatcaaaacagaagggaattactattcatgcatcttttccatagggctgcaattattcaaaatttaaaagttgagggaaagttagtttagaatttggtcctatactcaaataatattctattttattataggctgaccatttgatatgtcaatacatgaatcctttaaaacaacttacttgagtcagcttacataaggtaaatcaaatatgagctaaaatagctaaaataaacatataattatagaaatatacacaaaatttttgtaaatatgttcaatgtgtaaagaaatacatgtatatgtattttttaatttaaattcccctatttcattagtaaccaactgcatgtatctctttactgtattaaccgacttttaaaaataatttttccaatacaaatgcattcaaaatcataccaagcatcaaaactatcaactttataaaatgaaaatcttacctcatctaagtcttggatataaactggtttttcctcaaagccaattggcattggttcagtataaggaatctttacttcttcatatatccttgggtgttctctctttggattccttctggtaaaatcatctacaaacatcaaaaatttaaaatccaataataatacaaaatagaataacgtctctggtaaagattctttaattaa

SEQ ID NO: 53407 - DNA, 1169 bp, Bovine  19866880542421
  misc_feature (1)..(1): n is a, c, g, or t
ntgtgtctgtctgtctctctctttctctctgtccctcttccctataagaaagacatgataatgaaaacctattccttcaggaggagctggtttagaaacaaatggattccatggcaactcctgactccacatgacttctaataactggcatttcagttggaaattgtctatgtgatattctgtccaacgctggtgctttatgtggggttttccctactttacatctcagaaatggagtcttaacctccagtttcatgaataagcagcagcagcagcagcaatatgtcaccacctgtaaccataatgtggccattgatttgtcaagtgtttctggttccaattttcagactagctgacagagatgaacactgaatgagaaatgttcagagctggtattacatagtgtagaaatctgggaggtgtgtttcacagcaaattgacagcgagtcaaatgttattcaactgaagagaatgtgtgtctcaaagcctggacagcacgtcatgactgttggactgaccacagaggaaagctgaacaaggacaaaaatagccagccagagttccctcttcctcattaaaggaaaccaaaatggtttgagcttggctagggctcagtgatctgctgatctcccaatgagtattggcaccacggttgcagtgactgttgcgggggggacaaaaaagaaatttgtaacaggatgagtttgtaataccttgtgtctaagtattttgtattttttcctgtgacccaggaaaaaattgtgtcaaaaaagggtcaagtgattgctcttagaaacaatgcaagtcaatgatggaatcagtgcaaaggtcaaaaggagccaagcttgtgttcctgaacttggtggagagcttctgggtccaggtggggggcttgtgctccacctgggcaggtcaagattgaaattcagctatgactcagtcccatgtcctacccagggaagataccttttcctaagttgcacaaaggtgctctgtggagtagcctcttgttgggctaacactgccccacttgttgaatctaggctgtgtgacacattcgaggaatgtttattatgaccctttggaaatcatcatgcagggggtttcagtggttaactccagttgccagtgttagtcagagcaaccagcaaataatgatttactctagg

SEQ ID NO: 53408 - DNA, 754 bp, Bovine  19866880562620
  misc_feature (1)..(1): n is a, c, g, or t
ncatggaatacatatccaaactaagccaacgtaattaatgactggaggaagactataattctgagttaaattcaccctttcttctaattttgatttaccaccagtgaatatcaatatgatggtggtgaaatagtatattcattagagaataactggattttatctgcaattaggaagcatttacagggtataaagcagagttctaaagaaaagacaagatctcacagaatctgtaagctatgtggaccacacagctgtgaagtttgtaggaagagctgtgaccacatgcatttgattctcagtctatgttctcagcaggaccgattcagcctccaaactgttaagatagtaactcataaatgctatctattaacttaggaacaaggacttagaaggatttgataagaggaacatactgtatacaacatcaccctattattaaaagtagtctataagtttcctcatgtctaatttattccaaaaactaaattaaaaaaatagtttaaaaaaatcatagcaaaatagtagtatcaaatggaaactcatctgaatactaaattgattaacaacataaagatcattagtatcagtagaaaagaggtataaagaaagtaaaataattacaggggataaaattaattttccttcagttcagttcagttgttcagtcgtttccgactctgcaaccccatgggctgtagcatgccaggcctccctgtttatcaccaactctcagagcctgctcaaactcatg

SEQ ID NO: 53409 - DNA, 2829 bp, Bovine  19866880569397
  misc_feature (1)..(1): n is a, c, g, or t
ncagtctgcatctgtgatgtttttttctcatggttcagacacaaatcaagaggaaagctgttcatgcctgatagagtgaaagtttttcatagaaaacaggactttaccataagagggtctcatctatatattttacagctaaaaatgatattaaaaaaaacctcagtgagctgccagaataaaaatagataatgataacatctatcgttggaacatctggcatttttcctgagttgccttgttgctgccacatccagatgaatgcagagcacctgtctggaacatgctgttgaggcaggagagactctcatgactgttatcaaaaggggaatatctgtgctgtaactgttgtggaagagtgcttcagtactaagaggacgtcaccgaggctgtgtggagatggtctactggaatgtagaggttggagaaagctccctttgtaagaacatgcttggggacctgggatccattactgctgcatacagggtgggacactgctgtttttgttagctaggtacctaagtctagatgagtccaggattctggaaagagcaaagactctggaattgcatctctcctcttaaatatcatactcatgtgaacttgggcagtttaggttttttgtttttgcttcatttgttgcatcagtaaagggattaatgatacttttaagatgttgtgagcatttaataagatattgtctgtgggatctcagtacagtgaccagagcaaagcaagtatttgataaaggtagtgtgatgggttgctgtgtggtgggtattagcatatgcaaatgatatggtaaactgcctcttagtcattagttcattttcccttcccaagtagctacagtgttaatagagagtaagagctcccttctttgaactccttaactacattgcttttctctttgttcagcccttgccatttttgaacttgtattaaagttatgtcttgtgcattatttatactgcttctaatatgaacaccttgaagatggagctgcatttctcaaatcacttggcatacggccttgccaatattagatgttcagtaaatatcagaatgaatcatagagtaaattgttgtaaatagtttccattgaatgcatataaaaccccagctgatggctcagatttttaactggatgaagtgtcagtctcttttagaaggaatgattctttcacgagccctgagtctcagaggaaagctgggggctgtgactggcatctgacatccattgctggcaggcatccaagctctttgctggtcgatgttagcccacctttggtgggtgacatgtggtttcaagtttattagaaccagggcatcctacatctgactcattttttaaatttaccaacatgaaagcctgttttgaaaattaaattttaaataagaaataggggtaaattaaggtgcagagtattcataataataaattttctaagaaggaaaaacagaggtttctgcaaaattcaccaccgggagttggtgatggacagggaggcctggcatgctgtgattcatggggtcgcagagttggacacgactgagcaactggactgaactgaaactttctttcattgttgataaaatctaattaaaatagggaatcgaatcattccgtttcttatctttaaacagaggagaaagtgtcattaccttttcaaaagaagaagagcagattctataggttctaaactgtgattttttttttttttacctaaaaatgatctagatatcaacaattgctgggagaaccatccacaggcgctggctaatcgatcattaagtgtcctctcccctcctttgaaacagatctgtgggctttctgttaaagttaagtgataagaatcattggtaccaaagggcatttgagccttgaaaatcagagcatttggaagaaaaggccatactgtttaggtgattggccagtcacctgatttctttttgcgtctgggatgttgatttcttttttaaaatttttatactgaagtatatttgatctgatctgatcgttgattcacaatattgtgttggtttcagatgtatagcgactgtgattgttatatatacatgtatttcagattatttccattatagtttattataagatattgaatatagttccctgtgccttacagtaaatccttatttcttatctattttatgtatagtagtttgtatctgttaatttcatactcctaatttatccctgccccctccctttgccctttggtaaccccgtttgttttctatgtcagtgaatctgtttttgttttgtgtatagatttatttgcattattttttagatcccacatataggtaatagcacataatacttgtctctttctgtctgatgtacttcacttggtaggtattttctaggtccacccatgttgctgcaaatgacaatatttcatgattttttatggctaatattgcattgtaaatatacaccacatcttcttaaaccagtcatctgttgatgggcacttgggttgtttccacatcctggctgttgtaaataacactgccatgaacactgaggtgtatttcttcgaattagagtttttattttttccagatgtatacccaggagtggaattgctagatcatatggtagttctatttttcattttttgaggaacctccctatgattttccatagtggctgtacctatttacattctcaccagcagtgtacaagagatgttttctccaaaagagatgttgatttctttattctttaacctatggggttttatctctgacatgcctataggatggaactgaaaatatgacctttagatgatataatctagg

SEQ ID NO: 53410 - DNA, 703 bp, Bovine  19866880589054
  misc_feature (1)..(1): n is a, c, g, or t
ngcggcacccatttagcacaaacaacagctgggtggttttgatccaattacggctactaatttgcaagtggctctaagcagatcttagctatcctatgactttctctgagctgtgtgccttgagttcagaaagtggagacatgacgtgcctctggcctcccaggctactatgagagccttggcttaatgcggaactgatttcgtcctttgagcagtaacagcaaaccaagcacttcaaaaagaccaatccatctcctctacataaaacgttaataccgttctatgtacaaaaacaaacaaacaaacaaacaaactcaacaggctttcaccctttgcatggcaaacaccaactgaaaaaagcaaaaaggaccaagaacatttgaataacttcttttgccatccatccattatcctttatcccatattgtaaaagctggagaaactacatcctttctgtggcttgcctgtaagcttgaggggcgggagggacagcatctccatggagtagcccccagctctctccaggaagctggctatgagggactcttgttgctgggccctggctgtgtgacttcacaccaaaaccacctccctcaattggaattgggaccacagatctgggctagaaaatttgttcttcaagatgcacgtgaacatgaacttctgaagagcctatggcactgtcatcttaggcagcctaatc

SEQ ID NO: 53411 - DNA, 2407 bp, Bovine  19866880608089
  misc_feature (1)..(1): n is a, c, g, or t
ntgtaaaaaaatactatacttaagcattttctgaacatcttatatataataccttgaactgtacgttgcatagatcttatagtgtggacaaaatttatacagtgccattgaggctatgacttctgtctgactcatataagtagaattggtccatttaacattctggacaaagttctgacaggttggagagtaaatggatgtaatataccaaaataacattttcctagcagacagttttgaacctgaatatatagtagaacaaaagaacttcttgtaagaatagagtttgggtttaaatatttagagcatgaaagatgtctggagttataaacaaaattgagttggaagggcaagctaatccaaaagaacttgggtaacgtttctggaatgttaggaatataatgttacttggggtttccctggtggttcagatagaaagaatctgcctgccatgtaggagacctgggttcaatccgtgggttggaaagattccctggagaagggaatggcaactgactccagtattcttgcttggagaagtccatggacagaggagcctcatgggctacagtccatggggttgcaggagtcgaacatgactgagcaagtaagacacacacacacacacgtaatattactttcgctttcacgtataatttctaatagatctggtaaaaggtgctaaatgctccatacttgtggtgggtaggcgtgtgttaggatttcctgaatcttactctccccttgagtttgaattggaagagcaaatacgcacaagtatatgccattgtaatgaccctgagctgggaaagactgggagaagagggcagcagagatgagatagttagacagcatcaccgactcagtggacatgaatttgagcaaactctgggagataatgaaggacagggaagcctggcatgctgtagtccatggggttgcagagtcggacatgacttagcgactgaacaacaacaatgacatgccattctgcacagtgtgttctaatggttcactcatttcaggcgaggcaaccctgtgaccattttttcataaagcagagaatgctatgacttaggaattataatcctagaataccttgtttgggcacagcattcgctggaatctacacagacttacatggccctcagtttgagtaggacactacacattttagtgtgccacgcttgttgttttcctgtgttggggatcaaacgttttatattaacactgctggcatgtatattgttaaatactacagtaatgccattattttgttagctattacacaaaagcagctaaaaggtttgtgcaccttgtaaagtatgcagttatgtaaaacgtatgcagttattaaaaaaataaaaattcggtgagagagcttcctcttctataaaagttagaatgattcttgacgactctagggcaaatacattttatgagtcttaatgatatggcatgtgcttttcagatattggtatgtacccagtaatatatgatagttctggggaaactgtactgtcttggcataatttactttttaaacagtcaatttctctaaaactgaactgccttgggtagagcatagactttataattcaagtacatcttcaagtttcttctcctaaggcatccacagaaacataaggacattctatatactcattagcatctgagatattgtgagtttattcttatcatttacctctagaattaaaaaacaactctgcttaaaagagctgatgaatgaaaatattcaatgttaatctgaattcttacactttcttaaacaataccaagtgcttgtgctttctccagaaagctatagtttgatctggtatgatatcagtgagaaaatacagccctataagatcctgagaggttgttagtttggggcagtttcttacttcttgatttgaaagcaagttttctgttgttacgagtgctttaatcactcttcaaggaaattgttgtcaaaaaggcccatttctcaaactctgccacagaactataaagttgctataaacctaaaatgcaagtgccgagctggctaattttagggcttgtagggaactgtgttttctgtaatttctgtgactgatctaaataccttctcttagatgtattgttttcattttcacattattgtaaaaaaattatctttcctatatcaaaactggaaatacatgaaatcttatttttgcagagctttgtgctgctacagccataaataactttcctaaaggaaactaattgtacttgggttcatcatttatttgagcctttgttaatttgaattcattacatagaaatatttactgtctgttggtttgtggataatcaaagtcaccacaaccttgtaaggcttggtgctttgtatgggaatcagtcatattacagcagggcc

SEQ ID NO: 53412 - DNA, 2548 bp, Bovine  19866880642849
  misc_feature (1)..(1): n is a, c, g, or t
ntgagaaaaaaacatcacagatgcagactgcattgtactaagaacatatgcatgcttttaaatcacttttatcttactttttactaatgtaaccctgaaacataaaatatgtccttttttttttttcattcactgttatgggaagaacagatggtaaaagggttagattaaagtaatacagcatatccattaaaatagcccccactgctgggggtgcttccctcaaacaggagttgtgtttgctatgaagaacgcctttggtttatacacgttggaaattgctgggggttttgtcaaggataaacataagcgtaagagaaaaactagtgtcaaaatcaaatgcattttaagatgacaactatgcaagttattttgctaatctgaagggctgactgaaaacatttgcctgtgaaaatgtaactgaatagcagtcaaataataaagtcaatttctaacatgaaaaactttactacctagaaattgtaaataaatggaactgcaaagaagatatcaagaagacattatttgtttcattcctgcactcctattaatagtagatagaaatttttgcttttacttcatgtgtaatttattgtctaattaatcaacagcaagaataattcaggaacattcaggaacataattcaggaacatacattaaaaaaggctaactataacatgatttctacataagtctcgcacatgtttagcattggaaaagcatcctcatgaaattttaaatgaaattctgttcaattacatacaacttcaaaagagttaagcttaaggaaaccttcaaggaaaattagagaatgcattttaaaagaaaaaaaagtcagtcttgagtcacattccagagtcaaggatgactccactagaggaactacacaaaaaatatttctgcttaaactataattaaaaagcaaatactgattcaaagtttaatcattaagcattttaaatacttaggccatttctcccttcattttagaaaatggtataaatcgtcatcttcaatcagatgaagatgacagttttaaagaatgggttcacaagacttttcacttattatttttatgatctgcttcactcatagtatataatctgtggtttttgtgacatatttagctttaacccacattttagttatttttagttcaaagaatcttttggtgagaaatctttcatacctgtaagttcctgataaatttcatgaagtagaaacatgggaagtttttttatgtacctcaaatgtggtttgaaatgtcataggccttctcttaatcccccccccacagttacaaaaatgtcgctgggatctggttcagtcatttttctcacagaaaagtaagtacagtcgacatctcattagcggtcagggtgacgtgcagctggaaccagcactcggaaccagaggctgggttttctccaggaatcccctagacagttccatatggagagagctgttcccaaccatgaaatccacagtccacatccgtctataaatccaaaggtaaagtcccaaaggctggcaggtatcttcactgcactgaagattttaaacaggtaataaacatttaattaggccctttaatgtcctggcacacacagctgtaaatgatcaaggagatctcaactttgcattgataatacagaagtggctctagcccattggataaatcctgggtttccaggaccagtagcactagttttaacggtaatcttcttctctgatgggctttgagcatgagccagaactacttccatcttttcactgatactgtgactcactctctgatttttcacatataagtggcagattagatgagcttgaattagatgggtgcaggtggtgccacctgctccagccccttattgcagctttgtctggccttccattggtttattctgagtctcgacaaaggacggctgcccaagctgctcttggcactgtcctagacttgggccaacagattattggcaggcatatcactggccttctgcatgctgaaagaggagatctatcagacttgtaactttgtgaaaagaaactaaagctcaaaggctctctaccgaggtaatcaatttcaaactggtgtctgtaaatggaaggatggatctactttctcatcttctaagtcaagtacaataaggaaaataataaggaaaactaaaaaagcacaaactgttaaataatacacatccagaccttgaccttccaggaaaacactgcaattcaatgtgccataatgtgcttaaagaggtttcgtaaaaatctgtgaaggatggatgagttaaggaaatctaaatttcttagcaaagatattcaaatccaacttaactctacaaatttcacattatgactgggtcagatcccaccaaaaactgtcaagttaggcattgctctcttgattttgactatttggttttaataagattttatttgataggttttcttaaaataaattttcctgggcgtattttgatggtggattcagccatccccctgcttcgcctctgttcagctgtggggcagaatcacaaattc

SEQ ID NO: 53413 - DNA, 1234 bp, Bovine  19866880697017
  misc_feature (1)..(1): n is a, c, g, or t
nagtcagaaatgactcagtgactgaactgaactgaaccttgtcttataactgactgtacacctggacgagtcttttggggggcctgcacttataccctcgtatatcattaattaatgaatcatgtacattcttgactctgttgtttatgaacaaatgatcattttctcatgatctgtgatcaattagctgcctaaattgtttcacctatagtatttctcgcttttagtgtgtgatgttgtatgtatctttatgctcacaaaaattttccatgtagtcagattaagattatggttcaacacaccttattgtgatcatcaattggtgtacttataaattaagcctcttttattgctctgaataatagacacttgtataaaaataaacattgatgacacaggaaatagtcttcatgtctccttacaggcagtgattaccaaagttgatcctatacttttgaagatggtggtggtatggttagtcactgaaatgaataggaggcaagggtcaaacttaatctagaattaaaaatagcatcactgaaccctgaaatctatattgctgtgttaaaatggagctaaatcaatacggagccccaatttgtcagatcctagtgtcaaggtaacaatcagaggcccttccttttggaagattgatttgggttcaggggatatttgaatggggtccagaaattcacgtataaggtgtactcttctcgttgtcattctttttctcagaaagggcattatctaacaaaatagcttaacataaacaaataactttccacacttttagaccaggctacatcaatatcttgccatttcttttaaaattagcagctgtatttacagctttgtcagctaagtaatcaagtatgtagaagtttaagtatggaactttatctggcatgagaagattaatatgtgctttgctaataactacatttagcaggatggatttcttcaggagttctatttgtctattgtgcaaattcacaattacattccccaattaccctagacactgctgtcattatttttcttctctagagggcttcaagttttaattcttggaattaattatattgtaaattactttataaaagaaatttggacaaattttcttattttggaatagcaacataaattgggattttagcaaatatctcttttttagccccaaccagctcttttatcttaagctttagaaaagaaacatattttttccatctcttgt

SEQ ID NO: 53414 - DNA, 1713 bp, Bovine  19866880698037
  misc_feature (1)..(1): n is a, c, g, or t
ncccgtggttttgctgattactgaacaacttccacctcttaattctcctattttctcctacacttcagaattttttccctagttactttcctggtttattatccttctgttggtatgaatgtatactttgatgcctgtctgttcagttttggagaagattcttgagagtcccttggactacaacgagccaaccagtccatcctaaaggagatcagtcctgggtgttcattggaaggactgatgttgaagctgaaactccaaaactttggccacctgatgtgaagagctgactcatttgaaaagactctgatgctgggaaagattgaggcaggaggagaaggggacgacagaggatgagatagttggatggcatcaccgactcgatggacatgagtttgggtagactccgggagttggtgatggaaagggaggcctggcgtgctgcggttcatggggttgcaaagagttggacacgactgaacgactgaactgaactgaactgttcagttttaacctatctttttctgacatgtgccaaacacccttgttctaattaaaaaatgctcaccattcccaactaccaatccacttggtggccaactgtgagattcagtgagggacaggctaattctcatgcctatccaaaagtatgttcaccatactaccagctccatctctaatgctgctactttccaacctgggtagacatactacaatgtgaaggtttcaggaagtacacaaacatagatatatttaagggaatccatgtccagatctttgccttttgaatatatctaaaattgatctgataatatgcctgtgatcagcctttcatctttcctaatcatcctcctctgaatttaaaacagaaagttcacagaaataaacccatgtatatatggttgtggtttagttgctaagtcatgtctgactcttgaaaccccatggactgtagcccaccaggctcctcagtccatgggattctccaggcaaaagtactggagtgggatcccattctcttctccaagggctctttccaacccagggattgaacccacatctcttaagtctcctgcattggaggtgggttctttaccactatcaccacctggcaagcccaggctcatgggtactaaaggccaatttgactattccatcatacccagtaaccagcgatgtggatccatttccctgtaatacgtataaagttgaccattgcatcataccccatacccagcgatgtggatccatttccttgtaatatgtataaaaagaccacagattggtttagccagacgttttttaaactattttacattttgtaaattagaaaacccagaataggaaattcaaaacttggaaggaaaatgtgtctgactcaataagtactaagtaatatggcagattaattttactaacataataaagctttaagaaccatttctaaaaatatacttgtaggttttgtacattttataaatattttacaatcagtgagatggtgaaatatcattttaggcatttatgaggtacatctgatttctcttaccttcatttcccaaaacaagagagtgcactcctaaaactgtataaactagctgcctcagatcatggtattaacttatgtgtctttaagtcagcattcactagaatctaatttaattgaaatagctttgcctgtgtaaacttctcctttgtttaaataagatttca

SEQ ID NO: 53415 - DNA, 5773 bp, Bovine  19866880706842
  misc_feature (1)..(1): n is a, c, g, or t
ncgtttgctttagcataatgatggtgctaggtcaatcactgactgagttcctagcacatggactactgatatgtagagatcagaaatggaacacagtctttgctttcagggagccatgcgtgtagacagaaaagggaacagcctttgcagtgaattgtcctaggacgattgtcctcaggtaaacagcgggtcctctggggcgacacaggggaaaagcatgacatcagggcaaactcatccatttctgctgaaaggaagcagctcagtactgccatctggaatcctgcattctcagaaattttaaagaaaagaaaataatgtagcttctcaaaagtcttatttggtccaaatcactcttatattattgaagaatacttatttttcaactttcttgcattattgctattatgtgttgcttcagtcagtgctagctgagtgcctacactagagcgatgctatgctggccattgtggtgaatggggatagcagttgagtaggtgctagactataaaaaagtggtataagaaacgcccttaagtgtttcagtacagttggaatgataagttatgaactagaatgaggggcatatagaggatgatgtatacaaaaggcttcaagagagatgtcagtctatatgcctggggagggttgttgacctagctctgggggtagaattcaggtatatgcacataagggaaaggagaggacacttcagaaagaccaggattctgaagagatgcaggaacaccctgagtgtgactggtgaagtgggggagagtgggtccctgtggttaaggacaaggggttatatgtttggaaacattcattgattggtgccaaatatctgtgaggtcaaggcatttggattttgttgtatggaaaaccaggaaaggttttgaactggaaatgaagcattaaggtggctgaagcaaggcagactactcgggaggctcattttcatagtcctgggtgagtctagcgggggtctgagctaaagttctcaactgcagtgaaaaacactgtagaggaaggaaggttaaattatttttatccttgactgcttgtacctcttctcattatagatgtattttgatcattatagatttatttttgaaattatatatatttggttgcactgggtctttgttgtggagcataggctctctagttgtagtgtgaggacttggttaccccatggcatgggggatcttagttcctggactagggattgaacccttgtcccctgcactggaaggcagatttttaactactggaccaccagggaagtctctgaaattgtattttaaagcttacattttgtatttagtgacaataatagatgcataataaatatatttttatttacaaaatgatgaagattttcatagtatttaattttaaattcttcttcctcctctcaaaaatacaatcttttactttttgttatttccatgtttacatatttttagtacacaaattctcttcagatttttcaagaggctgtttccagagcaaaaaaaaaaaaaaaattgagctcataaggtaacatcttgtgcattttattaggtatgaaaatgatgtaatgatgctatcaatattatttattaagctctttgctctattatgtattaggcatatccggaaatttctaacagacatttgatgaatagcaaacagcaccactgctttttggaattatttaggcaccctaacttgaagatgtgagacatgcacaaattgtaattcactgtcactactcaatctgcagtcgtagatgaactttcaggtccccacttggtatgagatgcccttgggaatgattttaggcttgattacattatagtcacttaatgaatgactcggtcacctttgtacctctaatgtattactcgggacaagagaggtcaaaactgttttgaatggttttgaaagatttgttgtaagaaatattagagataactccccaaagattctgcaggtagctactgtgctgctgtagagctatcttaacaatatgaaagttgtattttattgttactgggtttatattcatgaatatagcaacttatgtttttcacagttctgttgaattaaaaatattgagtttatggaatttatttttcagaccttacctctagcaattgctagagtctcttccatctattttgaaggaactagtcatggctactccaatacagttgtgagttatcttgacatagtgtagccacatcaatcatgaataaattgcctcctgattctagtttcctttgaaacttttcctcttggcatgtttatagttgttacatttattagagacagtgcgtgccctcctgttttattgcctcattctgcccttctcttgctttctccctagtcagtaataagcaatacactatataattctataataacagtgcataaaactatgtatacttctgaaatctgaaagcatttaatatcttgttacagatacattgtaacacctggaggtttaactccacatctgttaccttaaataatcccacagaaccctcttaattttcactgccagcaatctggcttcctttcagtgaaggtagaagctttcttcctacaaaggttctttctggcctcaaaaaatacaccggtgactcctatgctgacttttaagctacagagaaaagaaggaccaagaatttcccttggtgatactattgacacatagtatcaatacttttatcaatactaggatagatagcccttcatttcatgttttatatgttacatgaaaacatgtaatccttgaccattaacaacaaaaactgtaatgcatcttgcaaaaaaaaaaaaaagttatcttctctgaaattcttatactgtacaggctttttatgttttatggttatgtcggaacttcagatatcacctgttctatagaaatatcaggagattattattagaagatgaaaggaggaaaattcggaggcagtaaatggagactttaagatccttgaggacaggagattttgcccttgataaccagattgctttgggtacccaaaagcccttagaacatattgagtgagtaggtaaatgaattgatagatgagtgaagttgataagataggtggataaagaaacaggagaactgagatgacctgggtatatggccctttccccagaaggcttacagattcagtgggggagataaaaatgtaaacgaaaaatttaaacacagtgtagcatgtatgtgataaaggcatcattggcagtggtgaagctctggtggtgtcttgggggctcctctgtccttccagcagtgaactggaggtggaagttggaagctgacaatagcctctaggcctagagaccctcataccttggggtgtttccagcaggttcaaatttatttctgttttgggacttcgtggtggtctgggggctaagactcagtcctcccaatgaaaagggcacaggtttgatcccaggtcagggaactatatcctgtatgccccaactaagccaaataaataaataaatactaaaaaaaaattattcctgtttgcaaggtttgcagtggggctgcaggctgacagtgaataaggccctgaacctcttgggtgccccgtcaaagaccagactcactctccacctccagttgcgctttcgccccttacccgtttatccttcttctcccactgcctgtgtcccaggagctctgtcacgctggagatcggagctcatcttaattttctgtccactttggaaatttttcattttcagcctttcctgcttctcaggttgaccttaaaggaccactgatcatgttagtgtttggagaattgccacagtcctagctgtcactcaaggttacctataattgagtcctaaattacatgaaccctgtgatccagccagacttctctgctccctctttgctgaatgccttgtcctttcctgcccccatgcttgtgcttatgcatttattctgcctgcgttgcctctatttttcaaaattctgcctatcatctaaggactgaatgctacctctttcatgaaatataactttctcctttgtgcctctatttagaataatctatcttctactgccttctggatatgtcagagcttctcttttggactataatatctttgaaattagtaactgtgtctatttcatacctgccccctaccttgacccagcatctgtgtgtcctccacttattcactcactgaatattaatgaaatgaatgaatggataagtaaagactttaagaagaaggtggatactttgttggttgcctatagagacattaaaaaccccaaggagggaaaatattctgctgctgctgctgctaagtcacttcagtcgtgtccgactctgtgcgatggcagcaggttccccctgtccctgggattctccaggcaagaacactggagtgggttgccattgccttctccaatgcatgaaagtgaaaagtgaaagtgaagtcgctcagtcgtgtccgactcttcgcgaccccatggactgcagcctaccaggctcctccatccatggggttttccaggcaaaagtactggaatgggatgtcagctactatggaatttataacctatgtaaagaagcaaaagatacacatgcaaaaaaacctaaggatgctttcacaaatacaaaatcttgcagtacaaatcaaatacctacctgctaaggaggagttaaatgtggtagaatctagaagctctttcaagggcaaaactttgaacaagtgttctctggctcacattctaaggcagagaaccatctgcatcttgtcctggagtgggctttctagtctccatgtctccactgtcatctccagtgcaaccacagagagaagtgacaactgatatttactctgtgtgtgtatgtgtgtgttttgattacaaaatgattgccctgaggtatctatgcagtaagtccgctacatacaaaccttcaagttgtgaactgtctaatagtgagaacgtgtgttcacatgtccgatcatgtgagttagttcatgcacattgtcacacacatgcatcctctagagatggttgtgcttttgtgtactttactgtacagtactgtatagagtacagtagaacagtatctttatttcaagcccaggatgtccagaagcaagcacaaaagcagcagtgacgtagctggtacttttcaaggtactgtaccgaaagagtaaaaatgttttctttcttatttgtttgttttttattatttgtgtgaaaagtattatgaacatattacagtacagtactatatggctgattgtgttagttgggtacctgggctaactttgttggacttacaaacgaattggacttataactgtactcttggaacagagcttgtttgtatgtacggaacttactgtagaagcaatgctgtttggccttccatctcagaaacatgtctttgtttatgggctcagccctagttccagggtccaattcccatgatcagtagatactttctagataactctcttattcttttaataatctaagtgcatttatggtactgtatagttgtcttccataagaaagggaaaagtctcttaaaattttggtttctttctttgtttggtttggtttttgaccaaacctctagacacaaaaggccttgtgcaggtcatgttccttcttgatctttcctgacccttagctcctcctctatcccatgcccactatctttgtccagttctgggctcttcagaacacgtcacatttacactacttcatcagcctcctatt

SEQ ID NO: 53416 - DNA, 2338 bp, Bovine  19866880805813
  misc_feature (1)..(1): n is a, c, g, or t
ntaagacatactttcgggggttgggtggtaggagaaaggctgtgggttttaatttggagccagaaacaatgagagagtccaccttaatgttcacagatggtaaatgtatagtttaaaatcagtgattagaataaaactcactaaaaggagaggaagaaaaaaggtaaacatattatttttaaattctatgttgaaaatgcacacccttactgcttgcctgccttcagggcaaaccactctcacccactctgcacatggtcaccccctggagataggatctggcaaacatgatttggtaaagctccctgctcaccaccaccaccaccaggcttcaccccaccttatgtagatcctactgagaaccaaagtgtgacatgacttcagaaagtaaaatatccgaacaaggaacctacagaaatcataggatcatctcctagttactgtgcctggactgaattggcatatgaaattggggcaaagagtaaggactagaatgtaagaaggtgatttctatgggaattatattttcaaaaattggtatttcttcaagaaagaaagtataaggagacaaaggcagaaacctagttctcagatgtgggttaacacccttaggtagggaaagagaaaataagagaggagccagtaagtagtttgaggtttacatttttaaaaaagaaagacaagtaaaaccagaaaacaatgatattgatgaaaaccaagggaaatgggcatttagaaagaggagtgtccatactggtggactctacagaaaaccttaggagaatggggagtaaaagaagcctttattttgtccaggagctctttggtgatttttaagaaactagttttaaaagaataatacaggcagaaacttgcttctacatggaattagggaatgcattaaatggtgccaaggtggaaggcagagggcttggatcactcactacagagtttgatccaaaattaaaggagtcaatgatatagtgattaaacatacgacagtacacaggttaagattttgtttactggcttagacttttttaagataagacacatgtatactataaagaggccttcccaagtggctcagtggtaaagaatccgcctgcgatgcaggagacacaggtttgatccctgggtcaggaagatccctgggagaaggaaacggcaacccattccaatatttcttgcctgggaaatcccatggacagagaagcctggtgggctacagcccatagggtcacaaaagagtcggacatgacttagtgactaagcaacaacaatactataaagaaaggggaaggagctatgaataaagtatgctagtgataaactgggttaatactacactgtgccagtcattcagtggatgagcaagtcaagggagcagggggcaaaagcattgaagttgttgactgggacttgtagacaaagtaggttccaagggagacagtggtgaaaggttgcattaggttggagaaatcaaataacaggaggcttggtgcagacagagagaaggtttaagagctatgaaagttgggaacatgcaggttgtggtcatggaaacattcatttcaagattatggagtcggagacaacatcagctgatgatatggccagatggtaatccaaactctaagaaacatctgcatttgaaggctgtgattagggaagtgaataaacaagtgttctagagagatcctggtgaagcagaataccagacatagcctaaggtcacatctgataccattcctatagagagtgtgcggtgaagtacttttcagacacgtgctaggaaatatatgggattttgaatctgggtatctttgaaccttaaataagggatctgtagggttcaagatagttttcattgagattcaggtggcaaagtcctgaacacttttttttcttattatctctagaattaactacgtctttggctggagatgagatgtacagattttcaggataaaataatactcagaggctgaccagaatttatgaaacctatcagcaaggcacttaccataattaactttaccgggaaatttttccttaactttttctaattataaaaataaggtactataaagaaaggggaaagacaaatggataaattttggagaaaatacagaaatgtattaagaagaaaacaaaactcttccttaactccattgcctaaagtccactcaacaatgctcatattttgctgtatatgtatgtgtatgtttaaatattttagagacatgacggttttgggaaattgtggcattttacttgatagacatgagaacctcttctaaatacaaagatataaaaaagtggaaagggaaacaag

SEQ ID NO: 53417 - DNA, 1036 bp, Bovine  19866880818672
  misc_feature (1)..(1): n is a, c, g, or t
nttttataagcttccaatatgttgattacatctgctgacacttgtttgttttgagatatcatttcctttttctctgcttctggtcttgtccatctttactaacctatttccaatagggcaccccaggcttttgatgtgtgtcccaacactcagtgtttttacttagaaaaacccctaacgctatgtcagtgtgatcctgttctttgtcgaactcaaaagtaaggtgcaaaatcacacttcctgattgcttataatggataccaggtgaaaactcattcttgtattagattcagagccatttccttaatttatgcctaaatcaaatgatttggatggttgaaaccacaaagaaaaactagtttatgagatgtatctccctctttcttagttatttgggaatagaaatttctttccaatgttctatgtgctagggttaaggaaagttacccgcttggggtgtacttatgaaatacagtcagtatgtgaagtatatacagcagattgtggatagtggtctatatgcatgaagttcactggatcattataatgcattgtcatccatctgtcctttcatgtggtaaacaagctcacttaatctacacgggtatttttcaattaaaatttattctgtttcccatataaatagaggggcaaatctgtgtattcactttagctccattatctatgtataaccctgaatgcagtgctctgtctttgatttcacaagaacatatgtcaaatacccagtaacttaaattatccattctaacaatctgcggcattgtaaatgctggtagtggggcattaaatgataaatatgtttcagagatccttaaagaacaaaatattttagaaaaaacatcagcttccattggttattataacagatgttcccttatgtccttgtgctggatctggctgcatccttagatgggaagttacatcaaagtgtgagccattacagcccagggaatagttcctaatggtttcactgtcatataagtgctccagggcatatccagttaatgtgtaagca

SEQ ID NO: 53418 - DNA, 1812 bp, Bovine  19866880825205
  misc_feature (1)..(1): n is a, c, g, or t
ncccagccccctcccctccaccagtttaagcaccaacatttaagacatgttcacacagctgcaagctgtaagcatcacctatagatcattattttatttagaacatctaatattttaccaggattcaaatgcaagctactttctttactagaagaacatctttcctttgattgattgctaaatagatagagcttgtgaaaagatctctctctctctctttttttttcctgggatttcttgttcaaacagaatttgttgtatacacatcagaaagccctgctaatatgggctgctggccagatcgtggaaacagcctcattatattgaactggatgtcataatggtacccattaaggtggaattccctctgtgtttgtacttttaaacccaagtcccttgccacttaaacatctctctgagaatagcaacattctctggaaacatagtctgagaatgtgctggctctctcctcctcctgctgaaaaccacgataaaaatagaatcccgggttcagagcatttttaggggttttcagtttgctgctgctcctcggccattcattccactctctgcgcttgtgatgactgtaatgtgttctgatggctgaaggtaaggacctacaagatttacttctttcaacactcccgttaattgctattggagtccaaatatacagcaggaaaagagcagcattttttttttcctccagaattaaccaaatgcaacacaagagtttccattttaatttttaaaagccgttaagagactaatagcatcacagcatttctattagctgttgaaatctcactatcgtcctggcaaagtgaagttatttgctgtgccggatttgggtaatggacccctgcagggttacagctcaggaatgctggaaggatgaagcccacaaaggggagggcagagtgggtgtcaatctcattcctccaattagagcagttaaagaaatagcaaagtgcagggtggcatttattgtgagggctaattgaaaaccagaggaaaatattgagacgctacatggcatttcacattataatctcttttctatttgtgtctcatctccattgactcaataggactttcattataaacaaatttctatcattagattcaggttaatttctgtggctgtaattaagaggatggtaagaaacagttgagagcatagtcctctctactgaaaactgggcatggttcttgaaatttacctggcaagtcccaatgcctcctacatgtcaagctctgtggtgagaccctgtcatgaccaagacagacaaggttcttaccctcatggaacatgatttagtgggaagaaatagacagtacttataaacaaagaaatatgttgtgtgatgtcaaaaaatgaaaggaaaaaaattaagcaggacaaagagatggaagtggtcagggaaggcttctctgaggactcttaaatgaaggggaggcagccaaatggaggcctgcagggagaacatttccacagagagaagcaaatgcaaaggcccagaggtagaaaccatcttggtaagttgatgaacagaggaggtgtggctggagcagagaaaaagaggggaagaacagaaaaagataatgctagaataggcagagtcagatcatgttgagttttgaaggccttgggtagccattgaagagttttgagccaaaggcatggcatgaagtaatagaagctttgaaaggatcatctggctgatgtggagagtaagcttcagggtgggtaatgggaagaggcagggagactagataggaagtgattataatcacctagattaaggaaaa

SEQ ID NO: 53419 - DNA, 1397 bp, Bovine  19866880884896
  misc_feature (1)..(1): n is a, c, g, or t
ntgtttgttagcctttacaacaatctagtgatactattcctaatttaaacatgggaagatgagtgctgtacaggtgaagcaaatggactgagagcctatctagagcagaagagccgttctggaaagtaaccagagtcagaactgggaagatgtcaggctaccgaggccataaatccaaagacaaagtgcttgtattataccctgcggagatggacagaggatgatagacagaggggcctggggtctagagtccatgcagtcacaaagagtcagacacgactgagcacgtatacgcacatgcactgctgtgtagatgcgaggaactctgtacaaagaatgtatgtacacttacagaaagattaacacattttaaagtatggaccacacggcactggcacagacgaggtacccagtcacgtctgctgaataaattttcataagcctcaaacatgcttcagtgtttctaacagagcagaatgaaatggtatatatagggccggaacttctgaccttttggcattagttagtattaggcggtcagcccgattagggatcaattagcaaagatgcctcataaaatgtctgcattaaaatgactgcttgatggaatactttctccagttcttctaaactagtgttcaaggatagcagtctgggcaacattcctaatctaacatgaccttggtgttgatcattgttgctatacagtctggcaaagattttgggaatctaaagactgaaaaactcattaccttgagagcacagcacacattcattgtataaactaatttcacacttggcttccacagattaccaaatttaatttcacattcaaactataatttaagggaatttgtttccttaagaagaaaatttactttaattgggaactagtctagtagacaaaataagatgaagaaaatttagcaatggctatacttcactatattagcaaaaaatttcaaggtatatgttttgttatttgaatgttatttatagtattaaatggaattacggttccagacagttgacatttctgaaaatgacaaacactaataagtagtttatgaatatgaagtgaatctgtgggctacaattcatttttaatttctcaggaattgaccaaatagtttcactgatgatggaattttatagtccataagaaaaagaattcctgaggacaagagttactcatctgtgtcttttgcataaaagcatcactatttggtgtctaccacttacaaaaagctatcaaggaaaataattctaagtttacaaagatgtaggctttcttaatatgcttttctagaaacattatataaaacactataactatataaacattatataaaatgcttatatataaaacattatacataaaattatatcttgctttt

SEQ ID NO: 53420 - DNA, 1002 bp, Bovine  19866880894508
  misc_feature (1)..(1): n is a, c, g, or t
ntacctgtggggtcctgaatatgacccatgtggcacttctcaagaaagcttgaccagggctgacttcttcctttattaaaatcagctaagtcaagctccatactcatttcaggggctaagatctgtgcacccacgtattttattttgtcctactgcccagggaagcactgaccgactttcctgggtgtacacctacctttaaggatatgtgtgtgatactagaatgcatctctctaggggatgagggggaagggggagccagactcttctttgtgtctgagtttggaggaaggaaatggaactcgtaatgtgattcccatcagtatctagacctttaatctatacaaatgaaatactcagtttaatagaattgtaacagtaaaacaaatgctttgttctcagtgaatccaccattcagagcggctcttggcagcacatcaaccgtatttgaaaagtctttaagtgggtatttttttattgtgcttttcatcctgacacatcttttgagctgttagagtcccgaacagagaagcactcatctcagaatgccgcgtctgtgttgtgctatggtcttcatttggtgacttagcaataaaaaacttaattaacttaataaatattttggccacactataatagagtttagagggtaaaaaggaacagagcaaatcaaaatgagtttgggatagaaaggaaagaaatatgtcatagggaggtgtttggaatgaaacgtattacaattgctatcaaggtgaaccttagctctggggaaagcgggtgccaaaaagtgccctagggggtggaaaccagactatttattaagcatgtattatcttctagcactgtgcaatgagcttttcacagggtttcatctgaacctcagcacatccctatgaggtgtaaagaggaaattgaagtctagacaggttatcacacagtaagaggctcacactgtgatctacttgacttcatgatcttgtgctcagtttgattaattctttt

SEQ ID NO: 53421 - DNA, 1437 bp, Bovine  19866880978378
  misc_feature (1)..(1): n is a, c, g, or t
ntcctcctcgcaaggaatgttatgtttttaaattttattgttttgctcagaaattaagcattttgtatcaccataatctgaaacctatcctgccaacctattagtaccacgatgaaattgatgtggcaaagttttaattcatgcagtaattttagcatttacccctttagctttaaaagcacaaagaccagaggacatgcaaaaggccacatgaaatttttaatgtaacacgttcactgtcattttgctgcagtgtttattctcatgtgatagaagctagtcaaattgggtctattaaaaatgaattaaatgccattattaaaaatacagacaaaatagtaaaattaacagtgctacatgttatggaaactgtaactgttagcaaaaggcattataggaagtgtaatagcattaaaaaaaagaaacctacttgaagcaaccaagcattaatcttgtcccaacaggggcactcagtataatctagacctagtgagactggattcacaaattatttatgccccacttgacagtagaatccatgaaatttacgtgatactaagaaaagtagattcatcctatccaggatccctcagtactccttcagctcatacctaacaagcctaaattcatttctgtagtttgtaagtatgctgtacagagaaaatccaaagagtcaacctcaaatagacctcctttgaaaaaggatcaaagtatagtacaaattagagaagaaaaatccaggattaccatctacagaaagtgagtatgacagtcaagccaaaaattcttacctgtggatattacagaaaataaaaggttttcattgggaagaaagtcaaagagtgtaaaaatactttattctttctgcacacactaattagttattgtttcttggcattatgttaactcttattttatttttcacatgccagtcacggtgctaagcattttgtatacgttatccaatttgatctctcaaatagccccatgaggtaagcatcactagctccattttatagttaaggaaactgaggctttaagaagctaaactgggatgtccctggtggtctggtggttaagagtttgccttcctgtgcatggggtgcaagttcaatctctggtcagggaactaaaatcctaccggcttctgaaacataaaacagaagcaatattataactaatccaataacaatttaaaaaatggtccacattaaaaaaaaaaaagaagcagaaactcctttgaaaataagcaacttagtatctggaccctgtctaggattcagtgtctataccttttaaccccatgtgcacaactgccctgaagtatactccttcctttaatgctcataaactactcaaagccatgccaagtctcactctatgctacttgagggcaggggataacattccacattttagacaccatgcctcacctag

SEQ ID NO: 53422 - DNA, 1449 bp, Bovine  19866881077315
  misc_feature (1)..(1): n is a, c, g, or t
ncgggaccgtgggctggggctccccacaggacgaggcgggagtcgctctggctgcgggaaacgtttgcccagaggccaaccagccggctgctcccttcggccggcaagtcgcggggctcacggcgtgcttagggccggtgggttatattttcttgttcgcatctctgaattcatcgccagagagaataaatatacccatctttaaattaatcccaaagaggagcttctttttcgagatgggtcgaatatgggggctgacttgttcaccgtagaaagctcagtctcggggttttcctatgaggagcagttaggggacactagaggaaaagaggttacacttcaggccaaaatagagtcgttgacatagagatatctcacagcgatctattaccctaatcctgggcgaagatttttgttgttgggttttgtttcaggaaaccaaagtccaacaccagtattccttaacggaaggatacagtctgcatgaatgaatttacagcatttacaatcctttacaggaaccgtttaaacaaacgcttgtaagtactattgctgacaagttatttttaagagaacctctaatttgaatcgccttctctgtcatctgtggatttaaaaaacaaaacaaaacagcaacgggggaagttccttcgctctggaagatagttattgctacttgcaaatcactctctacagaagcaattccttgcttccttttggtgctgctagtggctggggtcgcacacagtcggacacgactgaagcgacttagcagcagcagcagcagcagtggccacttaaaggctcccggaggtcggcttggaggcagttgtttcatcagcgataaaagagaacactagtcatgttgcactcctcctttgtggcgataattgcctcggagaaaacatagactctgaagaggggtgtgtgtggcatcctgctgatatttggaacaaatttaagagtgtttgttcaaaaatatatacatccaccgcctccttgcagcccaatggcagtaagcttgaagaaccacagtgggagagtcctggggatatttacacatctgggaaacacctggcaggaggaagtggtgaacgttctggacaggaggggtgaggaacttttttgtaaaagaactaaatgtagagacgttataggtgttcccaaactggaatccagcaaatggactctaatctagaaggaggagtcatttccccagaggctgtagccacttagaaacctggctctgggcggttcaaccaccaagtaatgctctcttatgaataggaatacacagagagatgtactggagctcacttatacacaagattctggaaagatcagataagatcaagctgactcgtgccaaaaaaataaaaaaagaaggtgtttggaaagggtgaaagaacctttcttgagagccttctttctccccacttccccagcccc

SEQ ID NO: 53423 - DNA, 1129 bp, Bovine  19866881105186
  misc_feature (1)..(1): n is a, c, g, or t
ngcaaaacaactgtctttaggagtcaccatctgaaaggctctttgcaggcaggtccctgtgtcgcttgacccggagttttctaagacgcctgagtctcctcctctgagcactctcctctgatatggcccagggggacacacaccctgttttagcctgatgccaatttcagatgggcttgtgacagctgacctctgcagaacaggcacccctggtagcccgggtgactccactgtgttcccaaacaccaggattccatctcaccctctgtggccgagcctcggcgttcactggaaaagggaagatgctcgtgtgctttattttcggctgggtaaaagaggcagacttggaccacaaggaagcacacagatgcctcaagtgggcgcagggagagcatcatttagaaataactttatcctttttcttcctgtaggtaccaccctggatcttgcgccagaatatgggagaagttgccacaggaaccgagcaaaaggcactcataaacattgtgggtgtagaaaaattttgtctttgtgatgagatggcagggattagcacttgataaccttgatagtcatgcacttttgaagtaaataaacgtctcctaatgagcttctaaattagagaggagaggaggcccagctaacctccataggttattggcatcagaaacatggtaaagctataacgtaactctaatcttaacagcttataaatgccagaaaatgctgtaaactaaagaataaatctattgggcaaatctacagtggctcatccaccagctaattagttctgtgggctctaattttctaccccagaaagttctcaaaaaaataatcactgatcccaggtgaaaggagacatagtatcatcaagttgtaagtggttaattaaaactttgtgaaaagcgactaggaaaaaactcaatactgagatttaggctcaagaaaactagagaatgacttttcatacagctgagtgaacatccagcttggcagggcaagctcctactccaacaggctgctgttgtggaaaacacttttttagacttctctttgggaactagtttcaaaatcagtgtctctggaatcatagtctcattttgttttgatcaaagctgtttttaccaag

SEQ ID NO: 53424 - DNA, 1564 bp, Bovine  19866881120119
  misc_feature (1)..(1): n is a, c, g, or t
ncgttttgactcagtggtaattgtttatctataagctgtctccattagactgtgagcctcttgaatatgagccatagagtcatgtcttgtggagttttctgttgcttaacgcacatagtacactctatacatttgtatccaatgaatggatgactataactaccagattgtctatcaaatttgttcatagttttagcaactaaagcaatgagatactatttattatttatcaacttgacaaatattcaagcattttaatactcatttttatattactatatgttggatttttaaaatgtaaaatgcttctggaggataatttaataacatgtattaaaagtctttaaggaataatggctaagatgagatgaaaatgatcagaggtaaaacactgccaagtttatgacatagataaaacatatatgtactttgatgcaacaattctacttctagtggtatgagggatgcattttttgagacattaaaccactgtgctgtgtggcaatcccccttttagagttgtttggcagctgccccacccaacagatcagcggaattcattgccacagggaagtgggtgggagactgccaaaaaaaggggactccttgcccaactttaaatttcaaaacataagttattgaatccacagtgaattaatagcctaaaagcaaatacttttgatttttcaaaagccagactttaataagaaacgggaaaagtctgtatatttcaatgtcagaacttaaagacctgaccatggaatagatgataaagcagggaaaaatctagaatattatgtaagcctttcctggggctaaagaggagaaaccagagagaaagggagagaaggcaaggagtcaaaggcaaatgttctttttccacccttcctgttggaacatcacagaaagcgagtgttttgaacgggaagccaaagcgtgtgctctgtttttcatttcctgccctttcaggagacttgcagagtgccctttgccagtgggagagtaaaagtggcaacacaactagcttaaagtagagagggatcaggtctccatgggctgtatacagccggcatcagacaaagattgtcaaaggcccagggaagaattctgtccatagctgggaagtaaagtggtgcctctttcaaggacggtagctggtgaggaggaaacttgaaggtgggcatcactgtgctgagggtgaggagtggacaagcttccagacctgtcccgggaatggcccaggccagagaatagagcaagggttttattagctgcagactttgcaccggaggctatacaacttcacactggtgcccagtgaccagtagaatgagaccttcccccacagaatggctccatttacaagctacccctgcactgagatggcatcttgggaaggaggagggaaagtttgaaaccttcaagagaagaggtgtaagttgtcccttggtatctgtggtgggattggttccaggactcttgtggatacaaaatcctccaatgctcaagtcccttatacagaaagacacagtacaaggaagacagttgccctccatatctgtag

SEQ ID NO: 53425 - DNA, 818 bp, Bovine  19866881127779
  misc_feature (1)..(1): n is a, c, g, or t
naaattttcccgcaggtccttaaaaccaagatgctggaggatatagattcataaagtattataaaatgccacatataaatatactgccaaagtatactttaatatgaagcttttgaaaatcttaagacttcttttccttttacagaatatgtcatttattgaggcatagacagaacttttattatcaaatgtcgatgtgccaaatggaacaatgactataggattgtttttactttaaaattaaaaaaaaaaaaagtgactaccagaacaactgtctgaatatcagaatttatattctattcattttttccccttaaatgtcagtcatttttgaaaaataaggcaaaagttctctcgtgtcggatatactcatacctggcaagtactcagatctctgagtcctttttccccaagcacagtaagcaggtttcatgatggattttaagggtaattatttaaaaaggcaaaatgatataaaactactaacatgcatttactattatttgtcagagaaatttttctcttgaagtttggttcttatttggaggaaacaaagtgtcacctagaattaaaagactaccaaatggtgattcatagtccaaatgtattggttcacatactctaaaaacagaatgttaagctaagtctttaaactgcccttatggactttgtaggctaaatgaagtttaggattgaactacaaaaggcatcagggataaatttcaccaaatgtgttgcttccaaacttagtgttatcaacttccaacccttaacttacaggattttgtataacattagggaaccaacatttgagctca

SEQ ID NO: 53426 - DNA, 848 bp, Bovine  19866881174423
  misc_feature (1)..(1): n is a, c, g, or t
nttaggtactttataagaactcttgccaagtatttttttctaacaccatgaattaataagcttcataattaaggcagctgcttcacacttctattgttaaccaatgacattaccatctgtcttgctccattgatgccctcctcctacttattgaagcatttagcagttttggcaacagggattacatggcatggagtaagtactctaattagatataagtgaaaatcctgagggaaaaggacctttaaaaagtaatttgaagaatctcttaatgatgttggcactgacagccaagtagagtagaaaatgcctgtcatcatggcaaataatggattgtgatttgatatgtgcagtggagttttagaaggagcctgttttaacagagtaatagaatgaagagatttcaaagtcaggggaaatttgagtgaatttttcataatatgcttgctatagtattaatagttttgaaagaaagcaaaatatgccccaaatgtattctgatctaaatgaaacaaatgaatttatttacaaaacagaaacagacttaacagatatcaaacacaagcataaggttaccaaagaggaaacatggcggggagggataaaccaagagcttgagatgaacctacacacactaaatataaaagatagataaccagcaaagagctactgtacagcacagggacatctactcagtattctgtgataacctatgtgagaaaagaatctttttaaaaagagtgaattatgtgtataactgaatcatcttgctgtacacctgaaagtaacacactttaaattttcaatagattgtttttaaaaagatatactcagtgttaaggttctag

SEQ ID NO: 53427 - DNA, 898 bp, Bovine  19866881240623
  misc_feature (1)..(1): n is a, c, g, or t
ncagtctcctggtttactttttgccaacttgcccattagtacaatggaacatgatgaatttaatctataaaaacatgtgcccttgttatacagagtacagaactttatactctcctccaacagtaaagaggagatgtctgttactgctgaaggggattggtagttctgtatcttgggacaaggaatccctgagattgcctgttgcttctagacatttgaactttttcaaaaaggaccaggttcatggacaaaagctgcctccagggaagaagaggtggttactctgagagaagccaagaagctaatctaagcagagaaagcaaaccttaaagaaggaaagaggaacataaaatgcttgtatatgtgttataatagtcagtctaagcacagtcatttcatagtgtgtatcactaggagtatctttattatggcattcccttttcttcttgtggttgtatcagcaacctgatctttccctcactgcttccaattattgtaatttttggtggagaacctgaggaatcaaatggctaatttattgggcaaccaagaaaaatataaaaactttgggaaggatcataagctgttgaaacaaaaaacatattgactggcaaacagtatatcaattggacatttcagataatataataaagcaattacaaacatcagtcttattaagaagtccctcttagaaactggttaaagtaattataggcagactgttgaaagggaactagagtaattaaagggaggagatttgagtatactccgaaaagaatggattaattaaaaaatattattcatgttctagtgggaattcttggtctaaaaagaaaagtagaaattcctgtgaagttctcatatctaaaataaatccagactagaccaagagtacaat

SEQ ID NO: 53428 - DNA, 2258 bp, Bovine  19866881246791
  misc_feature (1)..(1): n is a, c, g, or t
nctatggtttttctagtagtcatgtatggatgtgagaattttaccataaagaaagctgagtgctgaaaaattgatgcttttgaacttgcgtgttggagaagactcttgagtcccttggactgcaaggagatcaaaccagtcaatcctaaaggagatcaaccctgaatattcattggaaggactgattctgaagctgaagctccaatactttggccacctgatgtgaagagctgacttattagaaaagaccctgatgctgggaaagattgaaggcaggaggagaaggggacctcagaggatgagatggttggatggcatcactgacttgatggacataagtttgagcaagctctgggaattagtgatggacagggaagcctggtgtgctgcagtcgcgctgcagtacatggggtcacaaatagctggacttgactgagtgactgaactgactgactgaacttattttctgatactaatgtgatttgaaaagaaatatgatcataagcatatttctgatggaatgataaaatgtatttcagtaagtttcatggatacttagaaaattttttgatttccttattttcaaccacccctgccaaaaaaaaaaaaaaccaaaaaataaatctgcttttcataggctttctagctttctgaggagtcatctttacctcagaggatgccaaagatatgttgacattatgttcattatgatattttcataattcctgacataaattgtttaatactaatttagatagaatattctgttaaccataatgctgtgctgaagcttcaccaatttataatctgtcaaattccaccatcttttcttcttaaaggtaagggcatttcaactatgaatttctttttaaagggtaagtaaggcagacttttttcttttacataaaaatatatttgaccacacacaaaatctcatttaccccaacattaaattttaagaaaatctcaattagaatgaagttatattttattattttatttatttaaattacttatattttattaatttgcttaaacatttctgggcatgcagtcactaccaagccctgagaaaactgctgtgaaaaagacacaaagtccctatcctcatagagatgggaatcttatgtgatggattcagttcagttcagtcgctcagtcgtgtctgactctttgcaaccccatgaatcgcagcacgccaggcctccctgtccatcaccaactcccggagttcactcaaactcaaactggatttaataagcacaaaatatttttttttacttaatatatatttattggccatgtgtgtgtaaaatactgttgagagacatatgaaaatggataaggcatggtcccttctatacaatttaaggagggagataaaactggaaataatttagggaactgatccaaaagacagatgaagtgtggataacagcaatggtaaacatggagctagttggtttcctttattcatccttgccaggatgtatacacatacctactgagtgccaaacagtggccaaagcaccagggaaactatgaaaagtctgtccaagcaccaaattggagctgcactgttatggcaagacagaatcactaggaactgacccttcctgggtgtagaagctgggtgcagtctgcatggaaaaagctatggtagtctatagagtatttagcctttgtggtttcagtgtgttagcttgaagaagtagattctctttcaaagtttcttacactgaggcccaggggccacttcctcagaattactgctggggcttgttaaaatagatttctcagtccttccctaaaaccgactgagtaaaaatatcaagtggtaggggctaaaaacttaattattaacaactattgagatcaccactgtattactgtgtgaaaacagttaatgattaccaccaacttagttttctttttctaaattaaaaggagttcaaaaggaaacataagtaaaatcaccactacaaagattccctaataacctatctttatttacctatacatatgaaatatcagatattattaagatattttatataattagtattgccccagggtcgttttccagatgggcaagagttttagaatacaacaagatttctattctccataactcaaatagcatattatgtaaatcctgttaaaataacagatatggaaaacataagggaaaataaaatatgaccctaaatcttcattaattatttcagtctgacttgtcaacttatcattttgcaaat

SEQ ID NO: 53429 - DNA, 1353 bp, Bovine  19866881289162
  misc_feature (1)..(1): n is a, c, g, or t
naacattcattccctggaacaaggacaaatagaatagaaaaactgttcacctccagattcaggcaattagttttgaatatgtctagatgagtgctgagatgagaaataaatgcactgaatagtaactatgaaaaaagataaattgcaaaagaagccaaggtacaagtaaatagcctaacagaaggcacttgaaaataaatcctccctaactaatatcagaggtttcaaaatataaagatctattaagttttatttctgaacttctataactgtccccatggtaacgttccaggacaattcagatggaaaatttaaattgagaaccgcaggttggacagaaagcacaaatgtccataaatccctaacttaattgagaaaatgaattctagcgttcatctttttaaaataataaagcaataggccttctgtcatgatcaggagatggggtaatctgaagacaatctgataattcttcttttaaaaatgtgaccataaaaatacaaagtggcaaatattctcaagataatatttatcttttctcagaatggcagctattcctttccaagtaaaaactcttattttgctcctattataagagtaatagatgcacacagaaacaaaagtttttaaaatatagagggttttaaaatgaaaagcaagtctttcttcctgcctcccatttccaattgcattccccatagatgacaatttttttatacactttctgcttttagttcttttatagattacctttgttatctcctaattaacaaggattacctacattctaggttatcttctaggggctatctatataagcatataacaatattgctgataccgctatacctcttatcgaggttgtctctagcagaaaaaaatgagacattagtcaggctttccacaccttcccccttcccattcagtctttattacatttttgttttagtaagtttacttgagaattttaagtaaactgcttaaatatgtcattctttaatttatatttcatctcactgaaatatgaaaaatattagttattctgtagttcattctacttctcctaaattcagatataccattattttactgttatagaatttgcatcttattttctaacaaacataaattccttcactttgtctatatgttcaattctgaaactgaaaaccaacagaaagcatttccatgatcattcattacagaatcacattctatttttgaatttagaaggaaaataaatatagtctacaaaattgaactttgtaaataaaatattccaagagcacagatcaattggattctcagtgtttacttggctgcttctcaaatcttttgcctaggaggaaatat

SEQ ID NO: 53430 - DNA, 487 bp, Bovine  19866881313197
  misc_feature (1)..(1): n is a, c, g, or t
naacatgactgtagtatctgtgctttaagaagatagttttgtgccagtgtaaaagatggactgtagcatccagataaataacaaaacagtaagtaacagtttaagagaacaatagatttgtcacaaagcagtgcatgattaattactgagaagattgtacagacaataattactattggaatttttaaaacataaacttggataatgatgatttgtgaaacagttctaataaggccaaggacatgaatttgattttttttgtgtgggtcagaatgttctatggctgagttaagcacttaatgacgaccaatcatcttccagctgggggttgggaaaggcataaagagaaatcaagtgagaaagccaggtagagtaggaccaacatttcatttctactgagaaaaatcccagtcttcctgtccttctgatgataggcttgtactttatatgttaaagacagtatattattcatataattaaaaattcc

SEQ ID NO: 53431 - DNA, 1660 bp, Bovine  19866881350274
  misc_feature (1)..(1): n is a, c, g, or t
nctctccttgtatctatgggccttttgccaacccctgttctcctcagcctgcctcccttcatgcgtaaagcttattctattcagaatctgaaacattacctaatccgtgtttgttcaacagaatgttaaggcacatggcaagatatgcagggataatttttcagaattatgtggaaagcatagaagaccaaatactatttacatactgataccaacagtatttaaagatctatacatatataatgatgaggctcatttagaatctgaaaaattgtacagtgtattgctgacatactttttttattgaaatactgttgatacacataacaaaaggcaatgaaatgaattaaatattgagaaataatttgagaataaatgtcattaactaattctcattatttgtagctaagattgtatctgtaaaataatcaagggtatgacaacctaaactccattttaactaataatttcattgagtaactacataaaatttaaagatttttcagaagtttaaattttgcttgagtttagatcaattaaaaaacaaataaaatggtaaaagtttatctgtagtaaaatgaaaattcatagtgctttttgtaacattaagcaaaatattttaattgcatgtaagagttacattaaaacatttttgcttccttcttacctatttcatctttcctcatatctttcagcttatccacagtaagatttttttcttctaatcttgttagaatgtgtggtggtaagactgaaaattgtctcaaagggctagtccaaccccaaagcctcttgtcaatgactttactaagattcaggagcctgtaggtcatggcaggccagcgtttcctcaaagcaatttcaaaaagagcacggacaattctagctgcattctgaagaatgaaaagggggattggtggttaggtccaacgtcatttttaatttatcaatgaaattattattcagactcagtttaaaaagtatgtcaaactgcatcctttaattgtgggcaacatctatcctcatatacctctaattatctttattatttttacacaagaataatcgatccttttatgtggatgctattctggttaattctccaagaatagctttatttccaagttcttaggaagttccacatcacatctccctaaacaggaatgaagcagatgagacaaaaggcatgtgaaatatttaggaggttatggaaaccatttagaatctaagagacagcagtggatgtccttgggtatacagtgtaatgatcaaatttgtaaagctgtttggagaaatgcagaagacttgggatccagtcagaaaaaaattagtgagaaaagaataacaaaaaatgttgatgagtgcaactacccatattaatggcttccttacaaaccagacaatgcgctcattgctttatatatatcatctcatttaatttttacgacaaatgtatttggtcttgatattatgattttatagatgaagatactacagtttagtgattttaataatttggaaagttgctgtcagagtatcttcttaaagctagatctaaacattaacaaagttaacaccaagattctaaattcagtgacctgaggaaaacttgattcacagacatatagaaagacacaataattgaggctctttttcacat

SEQ ID NO: 53432 - DNA, 1015 bp, Bovine  19866881410280
  misc_feature (1)..(1): n is a, c, g, or t
ncctaaaactcatgtgatatggaagggggtggggtatattggaagaaattacttatcattttgaaggcagaacatgactttgagcactcagggattggtactatatcttcatcttttaacacagttatttgaaagtccagaggcaggtgacaatctgaatgatggtaatctgagatgaatactgtttgtatatgagaaaggaggctacatgaaattaaatagttcttaaacagcaatatttgtgctgtaaatgaaaaaggtgcaagtgaatgagacagtcagtgtatactttaaaaaatgttcaaagaataagaaaaactaaaaattgaactatacaagctctcaacacttaaactgaatttttgatcaatttgcaacatgaagtaaggttttaggaatgctaaagtttttgttgaattctgtagatggacaaatggttcaaaggtacacatagctcaaggatatggtgcattttggaaaataaatctatacaggtgggtgttactgatggatacatgtcctaccaaaagtgctctaaggacagatgttatcaatataaaaggaatggaatctcaagaatcaggaaaaatgaactgaaatgaaagaaaacattgtcaaagaaatttcagtgggatttttatatgaaagaaagttaattgatgaaagaaaatatgaactctacaaatagggggtactcagaaagagtaatgcactttaaaatggttataactaatattgttaagtgaagacagaattaactgaatcacatcttgactaaatttttgctagattgatccagttttacataacccatttgtataatttacaggtctaaaattttatggtagcagctttataacgtaatacctatatgtgtatatgtatgttcccatttaaaactaaacttaaattggaattagttttaaaatttgattttcataactttgttaaatgctgagaattggtgaaagagagagagaagtacgatttttctatcactttggggattcataaa

SEQ ID NO: 53433 - DNA, 668 bp, Bovine  19866881480039
  misc_feature (1)..(1): n is a, c, g, or t
ngcccatagatcaaggagaggctgggatagttatttcccctgtgtaataagaatacttctaagatggaatgaaaaaagggaggtatcaataaatgaactagaaagttgggattactcgcattttctaatgtaaatattttattaaataagaggaatcaccttagtttcaaactttagtgtacataaaacattttggtttacttataaatgtgctttaaaaaaattatattatgaaccaccaggacacataagaaatactgatcctataaaaaataaaacctatttccacttagtcgcttgaattagagtaggaaaatgtttctagttagtcacatctgtttgtgagccccccaacgccaccctgatgctttcctgcatatctatatttcaggatctcaacatttatgaaaatatgtatatataagtggttaattttgtgctagattggccatattttatattttatctgtgtttcctataatgtgtcttaaactgactaggagaaaagtagaactgtttatagtagtttaaaaactatcaagtttcagtaattttaagaaccctattaatagctgaaaaaagaaaaaatcctgatactggttttcagagctatgaattgctaattcaagttaactattaaaaaatattcaaacatgccaggtcaagaa

SEQ ID NO: 53434 - DNA, 1417 bp, Bovine  19866881537861
  misc_feature (1)..(1): n is a, c, g, or t
ngagaaggaaatggcaacccactcccagtattcttgcctggagaatgccagggacagggaagcctggtgggcagccatctatggggttgcacagagttggacacgactgaagtgacttagcagcagcagcagttaagagctactagagtgtcagttttcttctagcttcagttggaagggagcgagggagacaaggaaagttctccctgtttttcctagtcatggttgtagcctctggacaggctgtggatgagctggggtgtgctcattcatagatgacctcacattgctctcaaacagcacctatgctgtcaatcagtacgataattttcaaagagatgagtctgctcttaacttgacagccctatctcctgtccatggaaccccaaaggcaacaaaactttcaaaggctggggtggagaaacaaaagttataagattaggagaaattaaagctggaaacaaattccaggagagttccacaggactgaactgaagtgtcatcatcaggtaggagcagaaacctgaatatgattttcacaggaaagaaaatcatatcttatccttgagcttgactggaatgtgagaatgaagaatgcatggtgggaagccctaaaatatccttttcctctctggtcctcagcaaatgagccacaacttcagtcccagagaccagagcttgaaaagctccacttcaagatgagaaggaatgagaattacagaaactcagagttcattgattataaaccattcgtagccttattagaaatgaaatgccctgtttcataaaattaacccagttaccatgtataataagtatggattattagtttccaaagatgtgtatgcaaaacattacattcattgcattatatggaataaacttatttgtcccttagtggtgtaggaggccatggaagatctcattctgcttcaagcacattatttaacaccatttatcactcagctaaacatgtgtgaaattgctagttaacacaattcctttctatggtctgccagattacaaagcagctctcactgtttgcaatatgtgtcctctctataaattaatataactggagtcagaccacagctaatactgacattgctatatgattagacgaaggtccgttacgtgttctaaaattccagatttcagcctttcagagataacattcacagggactaggtccacattccctcccttgcttgctctgtcttccccttccttttctccagaaaccctttgaggactttctcattttgcccttttttcactcggtctgctttccgttttctgcctttcctatgtccctctggattgcaggacatcttctccaaatttgaatgtaaaaatcagttcagagagcgtcttgatagaatttgatagcagtactactggaaagactcagaggggg

SEQ ID NO: 53435 - DNA, 1720 bp, Bovine  19866881793267
  misc_feature (1)..(1): n is a, c, g, or t
ncttcacaattccacattctcaccaacagtgcacaagggttccttttcctccacaccttccctttcactgggtacttcttgcctttttgataatagccattctaacaggtgtgggatgatacattattgtggtgttagtgtccctggtggctagtgatgataagcatcttttcatgtacctgttggccctctgtatgtcttctttggatacatgttattcaaatcttctgtccattttttactggatttttttttttttgctaatacgttttatactcttatacactttggatattaactccttttgggatataagacttgcaaatattttctaccattcagtaggtggccttttcattttgtttatggttctggctgtgcaaaatattcttttgaaatgtagatcagaccctggcctgggaggagagacagtcacacattagttactagttacttatggaacctcagactagtttctgaattttgaagggcttcagttttacaaatctgtaaaataagaggttgaattagaagatttctaacattctatttcacttaaaaatgccacattgagttatgtttttatttggtgtcagtaatgtgcatattaaaaacatcattgtctcctaaaatgtctacctaaaaatcaatcagcaacacagtgtgggagggatttgattagattcaggaggtcccctggtcctggtaaagaagattgtgacttaaacatgtgaagaaagttagcaaatgctgctagcctaggacttatagcatttaaatacacaactggccctgagagaagtaaaaatattgtttcaagtcaactttctgggacaatctgaatgtctaagttactttctcataataaagcttccacaaattaaaaaatattctgttttttgttgacaccaaagcattctctgacagtattacctgttgcatgttgtctcctctatcggaagtgtaaactcctggaaagacaagctagaaccaaacacagatttgtattctctacagtgctgcattctctactgccttccatatattacatgctcaacaaatatgattgaatgaatgatgctagggtaagtgaactggtattggaatatagcttgaaggaagacctgtggggtaatgaggtaaaacataaatcaatatccatcatctcagtctgtctactgctaagatcagcattttaaatcagattttggaaatttggaaaagatgaagagaagaagaggactgatttcagctttgagggaataggctttgtgagaaaaatctcaaggtgatggcgttacctaaaaaagaacagattatttgaagaaataaggatagactacactcaattaggtatgaaggcatgctctcatcaccttttataaaggtgggcaaagttaaaatttggttaatggtaaatatttttggaaatgattttaatttcatgtcatatattaattcattaggctgaaaatatgtcactaaaatcatgtgctttcagtttacaccatgctttcataattattatttcatttgttttcttttgattctcaaaaaatatccagaaagacaggtagaatagatactcatttcatttcaggaaaaataaatctgcagctcagagaggttttgtactttttccaaggactcatgataagcaaggggcagatggaaccagaacacacatttccgacttcaccgtaatatccttgcattaggt

SEQ ID NO: 53436 - DNA, 815 bp, Bovine  19866881350841
  misc_feature (1)..(1): n is a, c, g, or t
natgcacgcagtctccaggcaagaatactggagtgggttgccatgccctcctccaggagatcctccagggatcgaacccatgtctcttatgtctcttgcattggcaggtgagttctttaccactagcaccacctggaagcccctcatttctgaccactttgatacaaacagatttccctagaggttcaatctgatgtaaataataggcaatttaagctagctcaggaaatcagaaaatggtggtaataataaaaggtatagtcaaaggaatggtttttccagtagtcatgtatagatgtgagagttggaccataaagatgactgagcaccaaagaactgatgtttttgaactatggtgctggagaagactcttgacagagttccttggactgcaaggagatcaaaccagtcaatcctaaaagaaatcaaccctgaatattcattggaaggactcatgctgaagctgaagatccaatactttggccacctgatgcgaagagtcaactcattggaaaagacctgatgctgggaaagagtgaaggcaaaaggaggagggcgcagcagaggatgagatggttagatagcatcactgactcaattgaatctgaacaagctccgggagacagtgaagaatagggaagccttgcatgctgcagtccatggggttgtaaagagtcagacaacacctgttagaagccttacaaagcattttccccgaatatgaaacagttccctgcctctttttataatcttctgggcaaggaaaaaaaaaaaagagtcagacaagacttaggactaaacaacaacaaccaagt

SEQ ID NO: 53437 - DNA, 981 bp, Bovine  19866880561945
  misc_feature (1)..(1): n is a, c, g, or t
naatgaaggcaggaggagaaggggacgacagaggatgagacggttggatggcatcatcgacttgatggacgtgagtttgagcaaaccctgggagatgatgatggacagggaagcctggcgtgctgcagtccatgaagtcatgaagagtcagacatgactgaacgactgaacaactggatttctttgagctgccattctttacaattagaacggatatagtgccctgccaactacaaggttgcctcgaaggccagctaaagccatgctggggaagatgcagtggaaagggcaaagccctccacgctggcgaggtagggctcctgcatttctgcagcctgtctaactcagcaagccagcattccaggcccctttctgcttctctctccctcctcaccagatttcagaacacacctgatctgactctagcaacagtgccatctaggctttgaaagcttgtactgtaggcttccccagtggctcagcagtaaagaatctgcctgcaatgcaggagactcagattcgatccctgtatcagaagatcccctagaggaggaaatgacaacccactccagtattcttgcctggagaatcccacagaggagcctggcgggctacagtccatagggtcgcaaagagtcagacatgactgagcaacgaaaccaccatcaccactgtaagtgaagggccttcttggcctgaaaatcttcctaaaagcctctgtgagccaactgtgtgcagactttgtggccatgcacagtggggagacagaggacagtggatatagtcactgtccccagggggctccctgtttaatgggatgggagtgatatgggaggaatcccgtgccagttcaggaatgtgggttatcctgggagtgagcctgggtgggatttgaggaaaggaatggtatatctttctcaagacatgtctggagctaagcatagggctgaggtgactacaacggggggaaataagcattaa

SEQ ID NO: 53438 - DNA, 1268 bp, Bovine  19866880612075
  misc_feature (1)..(1): n is a, c, g, or t
natgtggattgttgcctggacctaaaatagaagaatgtgctccaattcagttagcagttaggaaaagaaagatgcagtttccccttccaagctcttgggtgaattctagccaaacataccttgggagtcagagaatcttggatgaacccttcatttagagacagtccacctgaattccaagaaaagatgtagtgtttgggatcccaccctgctccctcggttcagacctgaacaacccagttactccgtgcttgactcaagaaggcaagctgttacctgctgggttgttctgcccattgtgccagagaaccagactgggctttgaatatgcatgatctgggttcgtgcttgtcacttctcccagatcatcacagaaggcctggcggcacagatggggcctgctctgtgccctcaactctgcaagcctggttcccacccctgctcccacccccatctccagccccagcctgattccacacccgccccacctacccttgcatccttgaatctatgtgtccaaccaaggaccgccatgggacttccccaatagctcagctggtaaagaatctacctgcaatgcaagagactcaggagatgtgggttcaatccctaggtcaggaagatccccgggaggagggcatggcaacccactccagtattctttgcctgaaaaattccatggacagggccttccctggtggctcagtgataaagaatccatcttccaatgcagaagacacaggtttgatctctggtccaggaagatcccatatgctgtggagcacctaagcctgtgtgccacaactattgagcctggagctcttgagcaagagccctggagccgcaactactgaagtctgcgcaccctagagcctgtgctccacgacaggagaagccgcagcaatgagaaatctgtgcaccgcaactagagaaaagcccccacagcagcaaagacccaacacagccaaaaataaataaaatcactaaaaacattccatggacagaggagcctggtaggctacagtctatggagtcacaaagaatcagacatgactgagagactaagcacgcacgaggaccactgcactcttggaaggatgagaaggaagacaagggaaccagccctatacacctaacatatgtgggatgttatgatacggacttagcacactcttgtcaccacaaccctttgtcatgggttatcaccccatcttgcggatgggaacacagaggccctaagaggttaagctgcatcacttgaaccccag

SEQ ID NO: 53439 - DNA, 2364 bp, Bovine  19866880814810
  misc_feature (1)..(1): n is a, c, g, or t
nattccttggggaagaactttttaagcagtcaaatctgcctgccagcaggattgactgcatcacactgttcagtacaaggctatttcccccttcccctaaggactttgtagataccagaaacttccaatggcaggattgttatagaaagaacatgattttatgcctgcgcattaaaaaaccctgctattataaagaggagacggagctgctgtcatggtacgtggtgggtgtgccttgccaagcagggagtgactggttggggatgtcacagaagccacatggctgggggcgggtgccgactgccatggctgcgatggcaatcttgctaatgtaggagtcatgagggatctcagacatctatgtattccggcaagtagatagtgctttgaaacacttaattgcagttctgcaaatgtattatatgtcatgaatccctcatttatttttttcctttcaaccttttgtctcttttggctgtaagactgaaaaactgcaaaaatagcatgcatccttgtcgggtgagatcctgggctttctgaataaataatctcccatggtagtgagctccccacttctggaagtaatcaaacagaaggagaatggctatttccagaaacattaaatgagggctgtctgctctaaggggttagaggaaattgataatatgcttttaaagttgtgaaatattttgagcacacagaaaagtctaaagaataaatgaatgaatacccatatcattatggcacagttttgccataaaggacattttgtcatatttgccttagatctttttgtttttaaatgtcatgacagatacaagtgaagcgtttgtatggtccttctttctacactcctactgcttctctctctgaaagtaaaagtcacgctcagtcatgtctgactctttgcgaccccatggactagacagtccatgggattctccaggccagaatactggagtgggtagccgttcccttctccaggggaatcttcccaactcagggattgaacccaggtctcctgcattgtaggtggattctttaccatctgaaccactagggaaaccctagtaaaagtatatatacatgcacatcaagactatatagtattatttgcatgtttttaaactctatctgaatggtatcacactgtgcatgttatttggttgatgttattttgctcagtgttgtttttagatagattcactttgttgttttttttttttaatttaattttatttttaaactttacaatattgtattagtttagtcaaatatcgaaatgaatatatgtagctctagtgcattcgtttttacctgagttactgtatttcttagatcagcacaccatcatcacttacccattttcctgtttgacacattgaggttgattctttgttttctgctaccaactatgcaattatgaatcttcttacacttgcatttgggagcattcatgtgagaattatctaggaatggaattacttactctgaaaggacacacattttcacaggataaaatcaaattgttctctaaaatgacaactaatttatactcccactaatttatacatccctaccagatcttgctgaaagcagattttaatttttgccagttgatagttacaacatggtatttctttatagttttaaatttaaatttagttttgtattttttgtgtaaaaaatactttatattttgtttaagaaatccttctctactccatgaactcacagagatattctaattttttctcctaaaaattttaagatactgctttccacatgaatctttggactaagtagaatttattttttgtgtgtagcaggcagtagggaccagttttcatggttttctacatgatgtttttattttacactttctgagttactggtgagaatgggcatcttttcctttgttcgttggtcatgggaactatttgttcttttagtttgcccattttcctgttgaatatttgtctgttgacttataggaattctttatatgtcatggatactagccttgttagtcatatgctttgcaaatatcttctcccagtctgtggcttgttttaccataatgttttggcttccctggtggctcagatggtaaagaatctgtctacaatgcaagagatggggagactggggttcgatcgctgggtcaggaagatcccctggaaaagctaatggctacccataccggtagtcttgcctggagaattccatggacagaggagcctggtgggctaatacagtccatggcgttgcaaaaagctggacgcgacttagcgactgaacagcaacagcatgttttcttctgtacttgaaaggggtcttcactactcgtgccagaagtggagt

SEQ ID NO: 53440 - DNA, 736 bp, Bovine  19866881841076
  misc_feature (1)..(1): n is a, c, g, or t
ntgctggcctggagaattcctggatggtatagtcatggggttgcaaagagtcggacatgactgagcgacttttgcacacacgatgctgtcaggccatgcatgggaggcagaccctgtcactgctccactttctcctggggaccctgagggactgtgatgctcgttcgatggctgagatcagccgaggagccagaggaacccagagccccctaccctcagttctgggtctgtgtcatcacccccgctcacccaccccgggtgggaaccctccagccggggcctctcttctcatccttcccctcaccctcccagaacctggtgatgttcctgagtgtcctcgtggactggatgatccctgacatcccccacggacatcagcgagcagatcaagagggagaagagcctgtttgtggacttcttcctgaaagaggagcacgagaaactcaagctggcggaggagccggcccggaggagccagagcagtggccactgcagcaagaggggcccagcagccagcccggcgccctcgggccggagccagctgggcagcagtgcatcctcggggtcccagcacaccagcgtgtgagccagggcgtgggggcagcagagaccagcacgggcctgtgcgcccacacggcggggtatccgtccttccacagggtcgtgaagacagagattcgagaaaggaggcggaggatgtgtgcaggaggaaagggaatattctgcttctcagaag

SEQ ID NO: 53441 - DNA, 3167 bp, Bovine  19866880356533
  misc_feature (1)..(1): n is a, c, g, or t
ntgaagccagtgttcctggtgaactaaaatagatttctattttattaggtcataatcagtcatgtaaaaagtgttttcttgttttgtgtgtatataatcccttttaatggttgtttttcacatccctcacagattctcattcagttcactaaccagttttttagtttattctttacattaaaaattctcctatcagttgaagccaactcagggatctttctctccctattttccttaacgttgttccatttcctgacaaggcttcagccttcatccaaccatatggaaaaggcctctctaagtatttccataacaccaagagaatattatttgcaaagctcagatgaggacatcttttccctttgactaggccacttcatttctaaatttacaaaaataaatatcacaatcctggctttatgccagctgagaagtattttgaaccttgtaaatatattttaaaaaattcaccacaagggacaccttattatcattctcctgcctttctttttaaaccagtgtgatcatttattggttgggtatcagcagccagtaacctgtcaggctccagctctgtctgcgtggccagcgggtgattctcacatctgtttggcgggtccctgggactgtgtcctctccctgggctggagatggcactgccatcaatagccccggggggtcaaggtcccagctggacactgaggctactctcatcactactgatagaaaaacaaggcccttcagaggtcccgctggtcctgggtcagtagcctcaccttggggatgaagggcagtgaggcactgaactgtatgtagctcagtgtccaaagctgaagacactccctccagaggtttcagagcttgattgttaagtaaaacacagtttgtttcccaaattgttgcttaacctctcagggcttgttccaaagttttttccccctgagtgtatgtcctggcaacttcattaagtggcacaataattttgtatattcagtacctgaagaaaaagtaagtagagcctttttagaatatttatattgcataaaaagaataagaattataggagattttgcaggttttttgcagttaataatgctggtcttaatcattatatgtgtaggattttaatgctaatctaaataatacataagagtttacttgagacaaattgtttcaagtgcctagcagtcaacttcttgattatttgaatcaacaggatgggtttgaatctttttctttcagtatatttatgcagtctgccttttaggcagacataaaagaggacagaattttattctgtgtggtaactttataaaactttttttcaaatagacttttcttaagttctggatattctaagattctgttcgaggtagaattccttcttcaaatttggatacaaaaatggagatttcatctatttcatatctggaataattgttccagtatattaccacttacttttttttttataaaacaggctcattgcttaatatatagatttatgattatacttctctctcacagttgagatggtgtagtagcttcaaatatactgttataataatgtgaccttgtgtgtttttcaggcattatttgactgggtagatatcgcaggtggcaaattggcttccatgtctccaattggaacggatcttgaaaccgtcaagcagcagattgaggagctaaaggtatggtaagggctgagaaatccaccaggcacgttgcgttcttaggttcttgattcatgggacgctttgtgcagatttttctatgttacataattgaagtgctttattttgattatgtaactggtttactatagtgcctgcacctaataagctgtgtgtaagtgctcattcaataaaggatacaaaatactagtagtatttcttaccaaagcaatactggtttattatagaaaaattcgaaaatgcagataagcagactaaaatgttatataccaagtggcaggcactcttaaattttgatttatagccttacagatgtcctcatgttgagagtaggataaggtatgcgtgtgtgtgtgtgtgttttacatattacctatgtatactatactgttgggctttcctggtggctcatactgtaaagaatctgcctgcagtgctggagacctcggtttgatccctgggtcaggaccatccactggagaaaggaatggctacccactccggtattcttgcctgcaaattcccatggacagaagagcctggcatggcaggcaacagtcagaaagagtcgcacacgactgagcaactaacactttcacacactatactgtaaagattttagaactgaattatttcgtaccatgctgtagtcactgatacatacactggcttccccgatggcttagcgggtaaagaatccgcctgcaatgcaggagacacagtttcgatccgtgggtcaggaagatcccctggaggaggaaatggcaactcactccagcattgtgtggagaatcccttggatagaggatcctggcagactatagtccaaagggtcacaaaagagtcggatatgactgagtgactaaccacacacctgcctttctgacgtcatctgcctcagttggccttggacgcccatcctgccttcagaatcctgccgggctcaaaacgtgaatcttttcaggaactcagcaggttctgtttcatttcagtttctttcttatctgtcgagttccagtactggaatcctctttactaaagctgctgtatggtaaactcactcttaagctacttcttacctataaatctacccctcttcctacataaaaccactggatagcggccacataacttagtgatgggtgtttgatgggactcagagtttcattttcctcttcgggtttttctgggttgttgacaaaaacaaattaataaatatgtgccattgctccaaaaggctttagaaaagcccctgatgctgggaaagattgaaggcaaaaggcaataaagtcatccccagataagcgaacatttcagtaagcacatgtctcagcccaaccgaggtggacactgaagacgctgaaggtgaagagcccaaggtctgtgccggcctcacgctgtctgccgttgatgacatctcttgtttgcttgtggcaggatttcattccaatccactgtcctacttcccttcat

SEQ ID NO: 53442 - DNA, 787 bp, Bovine  19866880387240
  misc_feature (1)..(1): n is a, c, g, or t
ntccctttgaggaaaggggtgaaatttacacacatacacaataataccaacttaggatgaggcaaccaattttccccactgcactgtttagagcaatctacatggcaaaacattcttttcagtacacaattatcttctgcatggctatgaaggaaatgacaagacaaggcagttgtgataaactgaggtaccaatgttcaacctctggaaatccttcatgtattattttagatagttaaagatccggttttaatcttgtgtgttttcctttaacagctaatcctggaatcataatggaatgattcttggagagtaaagatactactgctctttgatcaacaagaagggcaagcggttttaaatttagtatgagtccacattggacagcctttcttctcttgtgatgaataaacacgcaatcagataagaatttcaaagtgaccttgagacgtacaatgacacaatgtgcttcctttagctgcccacccaccttatgctgtgccagttgtgttttgattttgtctgggtcgttggcaatttccagttcagaatccagagacttttctgactcttccagccactccataagcttactccaagcgtcatggaactgtaaaagaaattcacatctttgtccagtcgggcacactcactagatttgaaatcgaatacatttttaaacagaaactaatagtaacagaaaatgtaagaaattatttattcaaagttttccttgaagaagaaggagaaagaatattttcatcagcagattgcaaaacatcttgtt

SEQ ID NO: 53443 - DNA, 1030 bp, Bovine  19866880435748
  misc_feature (1)..(1): n is a, c, g, or t
ncacttccgctgcagtggtcatagattcaattcctcgtcagggaactaagatcctccaaaggacccacacgaggaggcaaaaacaaaaaaaccccacacaaatcttttttgtaaaattttattataggtggaaggttcttatcagctttcattgggagtagagtgtactgagaatattcttaattatcagttgtatgtggaatctaaacaaaaagtcggactcatagaaacagggcaggaaagtgtttggccgggaggtgggggagaggctggtatgagggtacaaattttccagatataaaattaataaggcctaaaaatgtaatgtatgactgtggtttatatatgtatataaatatgtttggttatatatgtataacatacatatgtatatgtatgtatacatgtatatatatatatgacatgtatatatgtgtatatacacacacacacatatatatacatatgtatgtatatatgtatacattatatatacatatatatatatgacatggtgactatgattgataacatgtataggttggaatttgctggaagagtgaaacttactcttaccaaaaaaaaaaagtgcaaaagataaatatgttaggtgatggatgtgttaactagatgagaggaatccctccacagtgtacatatatcacattattatggttgcaccttaaatatcttgcagtttcatttgtcagtgattccctcaataatgctacttactattgttttgaaactgttaagagttccctaccagccgcctggagatgagtgcagttgcagacatcttcgacagagatggtgacgggtacatcgactactatgaatttgtagctgcccttcacccaaataaggatgcatacaaacccatcactgatgctgacaaaatcgaagatgaggtactgcttacctttatactgtgtgcagaggtcacctcatgttctgcccagataccctgcacgattgatgctgcagctttatttccacgtttcgttgttacataacggttttaaggatg

SEQ ID NO: 53444 - DNA, 883 bp, Bovine  19866880566117
  misc_feature (1)..(1): n is a, c, g, or t
ncccatggactgtagccccccaggctcctttttccatgggatttcccaggcaaaaatactgtactgggttgccatccccttctccagaggatcttctctgacccagggattgaacctgtgtctgcagtttctcttgcattgcaggcagattctttactgctgagccaccagggaagcccataaaagccttaggaacaacctaagtctgcattcctgtttccttttagtgggagggttaaaaatggaatgatgaggactgcagaaagaaaagagtaagcaagctgtgtttgggagatttgcaagctttattgcaaagagtgccgggtgagaaggatccctagggaggaggtccaggaagggaggtagtgtgaccctgaggagggggtgaagggcttggaggagcacttggatcttcttagaaatagaacaaggagctgcaggagggtgctggctgaggacatttgtagctaaacatgatgtgacatgagctctttcgcctccatcatcgtggcggcagctgcggtggccgcgcagtttagtcgcgcatgtgcagtgtgtggtctacgcctgggagcggcacacccttgaggtgactggcaggagatggttagtccctgggctgaagatcaggtagcgtggcatcgctccagaagctcaaaccgttctcctggttggccctagaggctgagacagcctggggtggagtggagcctctgacaccctggaagcagcagactgcgtgcttggaggtcaaggtcgtggttccctgacctgggctgagagagaagacgtcagcacacagggtggctaaacaggagaaaagaagacctgactggccaaagaggtgagtgtgatacagtgggcactgtgtcaacgtggtacc

SEQ ID NO: 53445 - DNA, 2690 bp, Bovine  19866880614165
  misc_feature (1)..(1): n is a, c, g, or t
ntgaaaagggcagaggcatttggctgcgtgactactgtgctcaaattacatatacaacatgagtgtgattcctaacgatcctctagacaacaaaaattttatcttatatgatatgaacgttatttttaatggtcctctagaaaaaaaaattgtatcttatataatatgaattaccattatttttaatgaccctctagattcaagggtccccagtctctgggatccactgcttgatgagctaaggtggagcctgtgcaataataacagaaatcaagtgcacaaggaacgtaacgtgcttgaatcatttctgaaaaccacccccccccaaccccacccccggtctgtggaaactctcttccacgaaattgatccctggtgccaaaaaggctggggactgctgctctagatgacaagaatcctatcttacacaatatgattaacgctatttttgatggtcatctagactacacacacatcgttctttccaagagagacatcgtcttgcaaagggggcctcgatgcttaccctgtaaagtttatttcattactgccactgttctgttctgtacttagcagaagaaacaaaactcaaaatgtcaaaaggaaattttttggtacagcaaactcattctctgtgcccctggggagcaggcccagctcagcacgacccatttaacccctcgagctctccgccaccaggcgctctcaactcccaccttttaaacattcaccaactccagaatctgaaactctaagagcctcagatcagagtatgtataattaaaagatctgcattataaatgattacagttgctaggtgatgctgccagcaaatgtgtcaaaccagacctttacctgaggcggcagcttttgattatgttacaatgtatctgtttttgactttgatcccttaaatccaaagcccatctatcaggggttttttcgccataaaaacattcatacttgcagcattaatttcagaaatattaataaaatatgcactctgacatcaagagtttatctattaccagaaatgttgaaaaaacccaagacgttggcactgcgtcctggtgaatgggggcaaatgccagtatgccccacacgagcccctcacctcctccagcctgtccaaggcgtcgttcagcttccgcctcctctctaaggcgagaagccagacttgctgccacttgctcaccagtaagttgaccctgggatttttggtttcaatttgcgtctgtgatccagaaggatagaagcttggggctgggaggcgtttacctgttaaaacacaacttgattaggatggcaaagtctccagggttctggaaggtgttaaggtctgacctctcctgctcctcattcagagtgaatcaagttccctactgactgtgatgagtagaaactctgattgaggtgaagtgcggtatcagggtccaagtgcgttttacttaacagggatcacatactgttcagagacagaggcattttaacgtgtcttgacaggagccctgaagtactaggatgctctctcaatacactgatgcttcaaacacttttcaacctaaattctgtgccacttgagttccaaagaagcaccctgccaccttcctctttgctacctaatcagggcactgctgtctgtgactcggttccagaagcctggctgtgactgagaggctaaggccccgaggatggcagttgcgggcaggcgatgccgggggcgccacagtcagtgagacgcccgacagccccaacctgaccacccggtgtgaggcagcacggccttcctccaggcccgcttcctgctgaagctgagccccgcacactggctcatgccccaacttaccaccctcctcgagcttccgccctctttctatcacttacaggcttctataacctcacagagctccctgatccaactaaacggctcgatgtgagctggaaaaacacatcactggcctcagcttacataggaaggtagtgtccaagctgagatttgcctagatttcctaacccccatgcggctgtacagagatatcaatagctaatatttaatgagcatttttaatttaatttaaaattaaatttaaaattttaaatattaaattaaaaagctaatttaatattagctcataatttaatgagctaatatttaacaatggtccaggaagtacgctaaacacttcacacacagcagttaaattaaatcctcaccacagcccaagaaggttataatcctccccttttacaggcgagaaaactgaggttcagaaagggtttagataacatgtccaaggttgcatgatccagctggtggtgggaaggggtatggcacaggacagccaagagtctgtgcagagtccctaaccactttcttaccacggcagacccaaaaccattttttctttctttttttttttttaactaatagagcattcagaaaatcaacaaattggtataaattatgtgtcttctaaaccttatccaagctattattgaatttgatgtcattttgttgggtcaagacaggctgggaagtcagtaaatagagcctgaagtcatatgaccatgagcaaaatcaatcagattactggttactagtgaacagttaggtcacggtcattcctattccgttccacttggaaggttatttacatactagaagcagaacaagtcatttcaaaggaggt

SEQ ID NO: 53446 - DNA, 3104 bp, Bovine  19866880764315
  misc_feature (1)..(1): n is a, c, g, or t
ntttgggcttccctggtagctagctggtagagtccgcctgcaatgcaggagactctggtttgattcctggatcaggacgatccactggagaagggacaggctacccactccagttttcttgggcttccctggctcagctggtatagaatctgcctacaatgcgggagacctaggttcaatccttgtgtggggcagatcccttggagaagggaaaggctacccacttcagtatcctagcctggagaattccatggagagaagagcctgccaggctatagaacatggggtcgcaaggagtcagacatgactgactttcactttcgtttaacaactgtttaagtgtttatagatgttctaaagtgaaatagatgttcagtcaaagtaatatagggccacgaccacaatatagacatacactttgttatatagctgtattatttttcatattctttgccattgtggtttatcacaggatactgaatacagttccctctgctataccagtaggacctttggtgtttatcccccctgtgtttgatagtttgcatccgctaaccccagagtcctagtccttccttctcccacctctcctccccctgggcatccacaggtttgttctctggagacataaactctggacacttagcattcactcatcatcatccaagttcaggagttggtgtttggttaagggaagggctctggagaagaagtcttgcggctccttctgtgcccacgtaggaggggtacacacaggactctggtactcaaacctgacacctgggggctttgctggcgtttcgtacacttttaactgccagttttcatcttttgctagtttttcaatgatgccaaagaagccacagattacttgaggaatctaaaagatgccatccagcggaagtacagctgtgacaggtccagcagcatccacaaactggaggacctcgttcaggagtccatggtatgagcaggaagaccccctgcttcgtcagcgacgcgtagtggggctggatgcgtgcctggttgcgtttctgtgcatggagcttcgcattttattggtactcttggtgtttccgcctcactcaaccacttaaacgttgagttttagcatttttttctttttggcacacagcaagagtgttgtttgatgtgattgccttagtattttaaaatgctctcactgtgctttgtgtgtgagtatgtgtgtttagtcatttattccataaagacttgtcagtatttctagaccctagacactatttttagtgctgggactgaacacagcagacaagaaccctgccagggggggatgcaataaacatgataaattagtacagcacaatacatgtagtctgttaggtactggtaaatgtgaaggaggaaagaaagcaaccagacaacacagggggagagtgggcggcgaggggctgacggttcagacggaagactctgctggggaagctgcatttgtgcacagccctaaaagaacagagagtacacactgtttgcttctaaaagccttctgatttattcctcaggaagagaaagaagagcttctgcagtataaaagtacagtggcgagcctgatggggagagcaaaaacaatcgttcagttgaagcccagaaatgctgactgtccactcaaaacttctcttccgatcaaagccatctgtgactacagacaaattgaggtactttaactcctagaaacagacctgtttctggcattattcatatatctaaaaaacaaggtcatattgctcactagtggtaaagtttcccactttaaaaagacaaaaaaaatacccaagattgggtgtggaaagagacaaataccgcagtgaccacatctggttgttctgttcttcttttaaaaccagataaccattttcaaagacgatgaatgcgttttggcaaacaactctcatcgcgctaagtggaaggtcatcagccccactgggaatgaggccatggtcccttctgtgtgcttcaccgtccctcctccaaacaaagaggcggttgaccttgcaaacaggtttgtgtgctttagttccagatgtagggctggctttgggggtttctgaaggtaaaagaaacaatcaatgctttggcaaggctaatagaatatgagtttgagcaaactcccagagatagtgaaggacaggaaagcctggcatgctgcagtccatgaggttgcaaagagtcagataagacttagcaactgaacagtaacagcactggatcagaaggacctcgagctagtaaacttgagatatgtctcaaacacagaaagaaaccgtcacacatgttggtggggaatggaagggctgaatctgagtttcttccttgtgtttcagaattgagcagcaatatcagaatgtcctgaccctttggcacgagtctcacataaacatgaagagtgtggtctcctggcaccatctcatcaatgaaattgacagaatccgagcgagcaatgtggcttcagtaagtgcagatctgcacgtcccacccaacctgtcccaagatgcaggctcttgtcatgaagagtggcctttgtgttatcccttgagtcagatgaggtccagcagatccatgataaaattcatttactcactgaatatctgttacatgcctgttttatatgaggtactttctaagaattgggggatctgaaaatcccatacttcattcagtgtttctgttttcattgggaggcatagtatatagtgtttgggcatacagacatgggtatagtttcattcatctatgaaattctgtagtcttgttttcccttgtcttttaaaacctaaagttgtgaatgaagaaaaaattaatttccagtgattttctattatgattatttaatataaactcatgtcccataagaaccacttgagatcagtcctattgaaatttcacccttaatactataatggatcattggtcttctttagataaagaccatgttgcctggtgaacatcagcaagttctgagtaatctgcagtcccgttttgaagattttcttgaagatagccaggaatcccaaatattttcaggtctcagatataacacaacggaaaaggaggttaatgtgtgcaag

SEQ ID NO: 53447 - DNA, 1740 bp, Bovine  19866880776279
  misc_feature (1)..(1): n is a, c, g, or t
ntttaggaaaaaagtatctcacaggtggggcttgtttggggtggaagggctgtgcacaccagtctctggttactgtcttcctgtgtctgtgaaatcagtccagtaaatacagcgcgcatcatgatgcgaaaccatgtggtctccaggccctttaaatcaggtgattcaagcataatgctaattaaagaccaaacctagggatagtgtgtcctcgttactgactgcattaactaatgtaacgggtacccaatcccacagccacagaaatggccaccagggtcctaagctgacaccttcaaggtctggcctggggttgaaaggaagagcttgtgcacaggtcaatggaaattcatggtaagggaatgctagaagggaactcaaaatacgtgtcctacttcgttacattccagggattgcatggacatctctattcttgatttggagagcataaagaatagactaaacctcttttggaagtaaggccagcctcggtgaactcaggtctcccctgagctccggtgcctctgagcattgtcctgtgtcaggaggacttggttcataaggaacaggacaccctcatgaactgcatttgtctggaaaggccactgggcccagggatacccactagatgggctcaacccacatttggcccaggtttagacccttggcagacagaattgtgattcctgtgtgagctagaaagttgtgcttttttgataaggaagtgtgtcttctcgatactcttctgctcgtagctgttcaggataagctcggaccagatggtgttcatctggggagaacatccacgtgctggtggaggagcgggaggccaagctgctggacgtgatggagctggcggagaagttctggtgtgatcacctgtccctggtggtcaccacgaaagacacgcaggacttcatccgcgacctggaggacccgggcatcgacccctccgtggtgaagcagcagcaggaagcagcagaggtgagccgagtctcccttaaagttaagagaacaaggcgtagcggcgtgaatgctgggttcctttagtgtaaatatttggaattatgctgttaagactgatacttgactctgaaagtggaatgcacaggatgtagtacgggaaagagtccccccctcaggtttcccttggagaatgtgtatttagaaagtttctctccatccccactgcttctgcctcactgctgggccttgtcatgtcctttttgtctacaaaaggaatctgagaggcagccccacctgcagtctctctccctccagcctctaagcttactgcccattgtcctctagacccgctcttgctatcctgcggcttcagaagcccttggaggattgcatccattacccagtatccaggtcacctggaacatgggatcagccctttccaccccagcctagcccaggcctatgtttccaaagccacctttttctcctttcctttccccagctccttctccaaagcagctttgttctttctagcatctgcattttgcacattttgtttcctcgccctgggatgcctctcctgacacgcctctggtgaatctcactcagactccgaggctcgggtggattgtcaccctccaccctctcgtatactcagctgagtcagtctgttcccatagcactcccctcactcccaagactgcagagggtgacttcctgttggcggtacctctgtctttcctgaggactggagccccttctccctgtgtctcc

SEQ ID NO: 53448 - DNA, 1245 bp, Bovine  19866880832517
  misc_feature (1)..(1): n is a, c, g, or t
ntatgctcctcctctccacacttctaaatatgaaagttaaaaaactgtgtcctggacttctgtggtggctcactagtaaagaatctgcctgccaatgcaggggacacaggttccgtccctggtccaggaagatttcacaagactcagagcaacgaagcccgtgcgccacagctactgaagcgcgtgcacctggagtccgtgatctgcaacgtgagaaggcaccgcggtgagaacctcgtgtaccacagctagagaggagccccactcaccacaaccaaagaaggcctgtgcagccaaaattaaaaaaaaaattgtgtcctgaaaatttcaattattttgtatctgattgatgattgaaaattttaatcctataggaatatcttttggcactttgaggataacccttagcatctccaatttctttggtcaaaaaccattttctggcaagaatgcaacttgagataattatggctttaggcactgagtttgttttctgaaggttattttgatttatgatgactcagctgctcagtctccgtggttaactttggtgggggactggtcttcatggattaccatgctctgtcttcaaaaggcatgaaattcaaggcactatagtttctttccttacctcaatccattttactctctctgggtatttagtattaaggttctcaaccttagtattaaggtttctctgtcttagtattaagacaggaaagttcctgtcttactaaaagggtaattgtcaaggcaatggattattgtctacggcttgtttttttagtgctctagccaaggattagaaatatagtgtttttaatttcttttcttcagactagattccttgatcttttctctgctgcagggcacttttttttcctgaaggaacactataagtgaaaactcttatttgcccttcctctcttagtgatagaggcatgggtgtgtgtattggttactcagtcatgtctgacttttttcgaccccatggactatagctctccaggctcctcagtccatggaattctccaggcaagaatactggagtgggttgccattctcttctccagggaatcttcctgacccagggattgaacccaggactcccgcactgcaggcagattctttacatctgtgccaccagggaagcaccgaggcatgggtagaatctttgccattgacctaaccagtctaaacttttatttatttattttggctgtgttggtcttcaaaagtctgcag

SEQ ID NO: 53449 - DNA, 1506 bp, Bovine  19866880983848
  misc_feature (1)..(1): n is a, c, g, or t
nctgaataaggaccttttccgttcctctcggattgctgtcgtcacaaccttgtccagctctttctttgactgctcccgcctttatagtcagctgttcacactttatcttagcttcgttcagtttctgttcaatcacagccttatcttcttgtgacagcttttcaccactctcttttaagaaattctctgtgtttttcactatttctgccaatgcctgtgcacttccttgcatatctttctgtaattccttttaacacagaagaaaaaaaattattaaattagtaaacctatttaattctttcaaaaccatcattctgaaagtgggggtaggtgtgggcagaggagaatgcatacaatgcatacaggttgaaaaagcatattcaatacaatgttcatctgaatggttttatttaaatcataatatttaatgtaatttgaaacctcaaagaatattaaagaaagatataagatttgcatggttaataaatggatgtggtttgtaaaacactgaaaagaaatatttagtataatctttacaaatttgcacacatcagatttttttacattatgtgagtacataataaaagtttttaaatacacgttaatattatcaattctgtttctaaacattaacatctatctactgctcaaaataaaaacaaataattccctaaattatgagctaagttgttcctaaaataatttccaaagacaatttttttctactaaatgccagagttctataaaatgtaatgtttgcttctttgccctggctgctaggaagctcagagttaagatctctcctcaagtaatatagctttcctctcgttagatttctctatgtaattcttcctctttttttcacccattataatttcattctctatattgcactatgtttaactcttcatgcctatgttcccccataacttaaggctccccaaatttttctgggaagtatctgaattgaaagagacagtgtccagttgtcccagcaccaccgagtgaagagactttttctccttgtatattctttttttttttccttgtatattcttgcctcctttgtcataactaattgactgtagtgtgtgggtctattttgggactctattctgccccattgatttctgtgtctgttttgtgccgacaccatctcgttttatggcaatagctttgcaggacagtttgaaatccagaagcaagataactctagctttgttctttttcaagattgctttggctattcaaggtctttgtagttccatataaactttaggattatttgctgtagttctgtgaaaaatgtcatgggtactctgatagggatcacactgaatctacagatttctttgggcggtatggacaatttttacaatgttaattcttccaatctatgaatactatgtatagaatacataagatatacgaatatattgtacagcacagggaatatagccaacatattagttttaaatggagtgtaatctgttaaatgttgagtca

SEQ ID NO: 53450 - DNA, 841 bp, Bovine  19866880986810
  misc_feature (1)..(1): n is a, c, g, or t
naaattaaaataacattgtaaatcacccatacttcaattctaaaaatacatttaaaaaaagaatgtagggcttccttagtggcccagtggtaaagaattcatctgccaatgcaggagacacaggttcactccctggtctggaagatcccacatgctgtagaacaactaagcccaggccccacaactatcaagcctgggttcccgagcccgggggctacagtcactgaagcctgcgtgagctcacgctctgcaacaagagaaaccactgcagtgagaagcccacacaccgcaactgcagagtaccccctgctctctgcaactagagaaaaaattaaaaaataaaattatttttaaaaataatttgaagtaagaaaaaaatatatgacactcttcaaagaacaatatacgtgtaactcacaataaccatacatttactataaagaaaccacaagccctatattaaaaggaagaaaatcccagtgttatatctcataaatttattattcatttttgataattaatgaagtaaaacatgagattatagataaaaacttctaaaattctcatttttttaggcagcttcactcaattactaacaaacataaaaatcctgctcttgatttaaaaaggaaaattgtcagaaaaatttaagaattgttaagaaaaatgtaaaaagattaagaagacacatgaaagcagatgatttgaatttttaaatttcattaaaataagtaaaagatgataatttccaaacagttggctaattacacaaagtgcactcaggcatgagaaacttttataaaaagggaagaatatttctattgagcttgaactataacag

SEQ ID NO: 53451 - DNA, 1892 bp, Bovine  19866881008655
  misc_feature (1)..(1): n is a, c, g, or t
nactctcaggaatattttaaaccacttacctttctcccaaagtgtatttttctgttacaaaaaggcaaaatccctaggtctttaacaggggcagcattcaaatgagctgagataaaattatgttcttaaatttgtctctgaacacgtaagcatattcaaagcaccaaaggagtaacaacttcaactgccttctcagatgacgtttttacaatcaaaatgcatgaattataacacatgatctcttaggttagaactatgcttcccatcaaaggcacacatttgaggcccatgctttgagaaagaagtttttgtcattgaaagaagtactgaatttctgtccgtggagattccaggtcctctgtgataaaggtcacgtgaggaaaacatgattatcaccttgaacctgatcaccaccactcccacttgtgaaataaattgacaatgtcacgagggaagtcataactggtcatggttccaaaggaaccatttgctatccttctaatcatatttgatgccattttaaataaaactctaccatttgattcttaaatgtacgcaggctaaaaggatataactatattaccttgtcatacattccctgctttcagttcatgttttttagtgatttaacttttccccttttgaagagaagagggctggggaccctgtaggctcagtgtcaccaacagtggctggcacatggttggcacttttgaattaaaagtagaatgactgttattttatcatttgttcattatatattatatccttgtgtttctgtcccccaaacttagcctatcacactgttactaaagagagatcatgcatataacatttatttaaaacaaataaatggaaaaaattcactttaaagaatcagttattccatatgttcatgtgaatatgttttattaaatgcatactataataatatctttctatagtatgtgagtatacataataaattaaaaggtatatatttattaaatatagatataataccagaacatgattatttcagatgagaaaatcaaaataaacccatttttaagtctcttttggtcactccaaatggatatttgctcataaaaaaatacacagatttgttttttttttccctggggaaaaaaattaattccatagcaatgtagttaagggacatattttatttcatagcttttccgcaagcaaacttgctttgatacaaaatgagttcaatggtacaggcgctactgtccactcaagcaaaagaaaacctcacatttagatgaatgcactttatgatgatactcttacaggatactaggtctcaggtccaggtggcctctggcctcaggtgaagccatgggcgcagaaatgcacaagagtctgggagtctcagagcatgggaaggcgcggaaaggaacctcctgtgagttctgtcagcaggaggataagaaccgtggtgggtgtgtctgtctttctgccccccatctcgcagttcacactgacatcatctcggaacagatccctgggggtgtctgttggcttttcggggtctccagagaagcaggggcgtgtcatgaggtatccttcacattagcgcccagtggagggctggctgccaggaggctgtggacttaccttcaggtaccgtgtgctcagtgtaggaacctctgtgcctgtcaaacactctctcctgcctcacagaggatgtgagtccaaccccagactatctgacccaaaatcatacagaggaaagaaaaagacaaatacacagataaggccatctgcagaatttttaaactcacctcttgcaatatttcacaataatctctacatcatatgttacatctctcagacttaaatagtaaaggcttcaggaagggccgcggcggaaccaactgcactat

SEQ ID NO: 53452 - DNA, 1078 bp, Bovine  19866881073626
  misc_feature (1)..(1): n is a, c, g, or t
nccatctccagcatcagcgccacggtcatcgtcgtcctgctcgttagggccagacacagattcctcataactgtctttgctttgcacagaatctaaatgatcaggagcagattcaaatccttgtccagccacacagtctttttctctcccttcccagcagccagcgtcctcagattctaccgccatcgtgaagctctcttttcctccctcagtttcatagtcagtcaatgaatcagactcatcaccttcaaggtcatctgtgctgtccctttctgatacagtttccatcaacggtccactcacttcataggactcaaatgaatttaactggatttcttcaccagaacctaactctgctttctcagcacctatgagaaaatcctgcagagactgtgctcctcccctcacacataagctctcagccagccctgcctgggtccccacagaatgttcctcctctttagaaacatcatagaaaacctctccaggaggagcggcccattcgtcctcctctggcagcgagtcatagtcctcgggctgcagacaatcacagtcgtcaccttcaaggagcagggaatcatggtcgtcgtcttcagacaagggcgtgtcatagaagtcagcatcgctgtctgtgtctgtttcactgcaccggtcatccagcagggacgtttcatagtcgccagcactggcgccgacagttccttcaaaagatggggtatgggtgggagccaggccaacatcatgaccaccagcccttggggtcggggcacctgaggacccttccactgtggactcacggttctcatcttcaggttcctgctgagaagcagcaagcgcattttcatcttcaccacaagtatctgaactaaattcatcactctgacactctacctgaggattactacaaccaacattgaaagatttctcttcagcctgttctccctttaaactgatgttaatagctgcaattcccagaaactggtcttgaaatttttctcttattctttgacctgatgactcagtttggtcattgaatggcaatgtagaggtttcacatttctttccattactctctgcg

SEQ ID NO: 53453 - DNA, 1222 bp, Bovine  19866881198843
  misc_feature (1)..(1): n is a, c, g, or t
nccccaacctcatctgtaagaggggagggtggggccgggctgcctggatgcaccagttctgaagttctttctcagatggactctgcctcaagtatcaaagaggcttgtcaggtgaaatttactcagggttcccataaaatcgacgttgcactcacatattaactgcttctgagaatgagcccctgtcactgcagggagagctgagacatgatttaaatggaagcaatttatttaaaattaactgctaattaatgaagcaattaatttacaccaatgtaacctctaaattatcagtcattatgttttacatacatcccaccagtcagtgccaaaaatttgtcaccctgattcagcctaccccctatcaaaacagaaatatgaattataatgggaattatttttcaaagtctgcacaatgggaatgagtcaatgctccaattcataattaaaggcattaaagttttattttaaagcagcataattccctgataagaaaggtcaagcttacattagtagttacattagtagtcaaagattttttaatgtacaatttctttgatttgggttctgtttttctccattattacagaaaaatgccaaatctgtcactcctccaagtttaccttacagctgacttgattggagccataacaatttccatatgaacgcttcttcaaaagttgtaaatgaatcactagaaaattgttcattatatcattttctcttcacaatttagcaatgaatctaattcaaaaataaattttttatggtataatcttaacaagaaagaagtgcacctacttttaaaaaacacagaagtgataaatctatcatctgtgttaatgctgagtcaatttcatttgatagtgtgatagtgaacacaggatataatattatatataacattaaggactaaaacccaaccagtcactataaaacactttttttgaacaattgatgcatcctttggtttttttattgctatgtcattaagatatcaaaaaaatgaaagagattttgccctctataagctgttttaaaatatctttcatcttctcaagtacttttctccagttcacttgcaatcattcaattcctttttcttagcttagtcatcttcaaggcacacaattccattcaaccattaaattgaattaccatcctaccaagtagggtatattctctcaatcttattcctaacaagatataatatgtacatttt

SEQ ID NO: 53454 - DNA, 2408 bp, Bovine  19866881247964
  misc_feature (1)..(1): n is a, c, g, or t
naaataaataggaacactagggcttgcggagtaagcttggcaggggctggggggataattagtaataggacccaggaggcaagctttttatgcttttttcttttcagactctgaactgaatatggtaccaattgtgtactcagtcatttaagagctgtgaggacctggaggctgggtgctgtggagatgggggggtctggaaaatgggagatgttagtgtacaagtcaaaggaatggctgtgatgtagtttgggaaagagaatgacgggaggtggacttgttatgaagtgttggggacgttctagatggaacagtttctacctgagctctcccttcccctcagtctgtgttccccgccaagcatgctcatggtcgcactgtcttccgctaccactaaacacacgcacgcacacgcatcctcaggagtctcactgataagctcaaatatggaccgtttgcctcaaatgaagtatccagcgcctgggcagtttatcttcctttttctaataaaatggtacataaaactcacctcttctataaagctttcctagacaatgcttagtggattagctacttcatttttttttttcaatacaccccttatgtaaatctcacatatgaatctttccatgtttatctcatgcatctcttaagtagattacaatatattttatatattataggtagtgtgtacaataataataattgtgtataatcattatagatgtgaaagctatttgtatatttaattaaattaaggaattgatgacaccaagcacttgtgattttttttaaatttaaatttatttattttaattagaggctaactactttacaatattgtattggtttgtttttagcacttgtgattttaaaggccaattcatgcctgtgttgtatcttcttctaattataatctgtctgattataatgtctgattataatcagagctgtctgattataatctgtctgattataatcagagctgtttccactattatttttagagccctagttagtggtgactagttggacacaatgtttatgtgtttgtttgtttatttggtttttcattcttccactcacatactaggtatttcattgagtgttccagggtaagggaatatagcaatgaacaaaacagaaaaaataccctgctgttttggacctcacacaccggtggggagagacagataataaattcacaattacgaaataataaaaagtaagcaatattatatggtgggaagtactatgaaaaaaagttagcagcagagcaagaaatggagtgaggaactattggtcataaagcataacttatagagattataatagttactttgagattataacagttactaaaatggtaccagttacctttaaaagttgtgcattctcctttcgaaataagcttagtataactttaagtgtaacctcattcagggagtgaagtaatttacgtaactaagtttaattgaatctgtgaatctgagaacagaacagagctgtatctgcagagattatttgtcaaaggaaggcagtggttagctcaaggcgaattataatgggaaagtggatggtgttgttttatgattatcaatcattcctttatctgaggcagggagaactagatttagattaagtttcacttgcagatgttgctgcccactccccacctttagatgttttaatgatttttcaactttttaaaaagttgaaagtgctatgcaaaagtaggtacaaaagtactatgcattcaatagaaattatactttgaattttgatcttttcctagactagtgagatgcagtacaatggttttgcccaactgtaggctaatagaagtcttctgagcatggttaagtcttccaggctacccatgatgttgagtaggttaggtgtattcagtgcattttcagtttatattttcaatttaagatggttttttctggacataatcccattgtaagtcaaagaagatctgtatagtaaatgtaacttgctttcatttgaattagaaattctgttttttattcctcaaaagcatataacttcttttctttataagtcaattttatagagatatagattatttacaataaaatacaaatacactcatttcaagtcttgacaaatgtatacacctgtctaatcagcactctaatcatgattctaggtttccatccctctaaactcttctctcttgcctgtgtgcaatcatttctccctttctgccctgtattaaatagttccattgattctacgcccttcaatgttagccaccaacctactaaaaatacttctggaagtaggtggattataaaaaaacaatcttcataaatgaaataaccttttcaagctctaggctttcttcctgtgactgtcattcaatttacttttcttttagt

SEQ ID NO: 53455 - DNA, 841 bp, Bovine  19866881387700
  misc_feature (1)..(1): n is a, c, g, or t
nattgcgttagaagcgataatagtatattacaaactagcaaacatagtgttattggaatgttttcaggtgctcccagaatgatgtgttagctcatcaatccactgtggaagccgtgaataaagcaggaaatgacctaattgaatcaagtgcaggagaagaagctagcagccttcagaacaagctggaggttttgaatcaacgctggcaaaatgttttggaaaaaacagaacaaaggaagcagcagctggatgctgccttgcgccaggtgaataaggggataaatcctgaaaccttccgtagtcttcaagatcaagatggcatgaccttctctgactggatttcagacccctgtttcgtttttataccttggggagaggagtaaaaataagtgggataaaggcgcagagctgaagagaaggcagctttgtagctcttagcctggtggtctgatctcctgacgaagaagggcaggtggtccaggggcccctgccgttgttcagagtgcatggcgaggcttagcaggctgcttaagctttgtttgtggcttcaaagtgaccatatttgggacctgtcttgaacctctctctcactccaggccaaagggttccacggtgaaattgaggatctgcagcagtggttgaccgacaccgagcggcatctgttagcatccaagcctctgggaggtttaccagaaacagccagggagcagctcaatgcccacttggtaactctgttgtttcctccagctctggcctcaggttaagaaattgaccattttgtataggccctggtggtaaataaaccgtaggtaaggtttaaaggctgtccagtttgagcaga

SEQ ID NO: 53456 - DNA, 663 bp, Bovine  19866881432522
  misc_feature (1)..(1): n is a, c, g, or t
naggaaggctttcttatctctccttgctattctttggaagtctgcattcaaatgggaataccttccgttttccctctgttagataacagcaattgttgttttagaagtttgcatatgctagagagatgctgatatattattagtctatactctttcctttggttctttataaaggccatccttaatttacatacatagccactctagacctgagccatctgtgtatgagattatgttattttttactgtattatagtattgatatattattgattttttacattatattttatgagccaatactaatttagaaaagtatttttctttataaaatcattgcacctagtatgtcataattatcacttgcggacttatattcttcatttcctactttctggttattttagaatgacagatgaagaaagaaatgaattggaaaaacaagtgaaaactctccaagaaagttataatttattctttagtgaatctctgaagcaactgcaacagttgcaaaccttaggagacataaaggtagaggagaaggtaatgttatttatttagaacgcgaggctgtttcaagactctcagtctaactgcatggttgtagaaatatatgtcaatgacaaagagatgatcttgagttgtgtacgtggaagaaacatg

SEQ ID NO: 53457 - DNA, 1396 bp, Bovine  19866881537938
  misc_feature (1)..(1): n is a, c, g, or t
nctttaaaaaaaaaaaatctgtatttttggtaaatacagacgttcaccatggagattttgcgacacaaggacattattgatgagcttgttaaatctggacataaaatcatgagcacgtgcagcgaagaggaaaagcagcctatgaaggtacaatcttgtccatgtgactagtgtgagacccgtaagcagacagtgtgtgtggggctttcactcggagaaaagctcttttcctttatccacagctgctgtttaaacagctaaatcattagttttaaataaaacatttttcaagcttacagaataacagtgaaaagaatactccttaagggaatcactttggggataatcttttttaatagacagaaaagctattaatgtttgaatccttgagtaactgggacccattaagcatccaattaatgtttgctgtattatcattgctattatcagagtaaattgttattctatacgtcaactgttgtttataggtttcaggaacattgggtcctctggagtcgagacaaaacctgaaatacatagttctctctagcttaaacccattctgtataaagttacagtaatccatatagaaaaaaaggagtggagtcattaaggaagtattcagtttatgtagttttaatgatctttacattggtgggaaagcagcctcaaataaaaatgtttagttcaattcatattcagacctctgagcagcataaagaaattaatgcttctcataggaaaatagcccatggcagaaaaacatatttgttatacaaatgtctatgcctaggatcccattgagaagatggtgcattgcttttaaggcataccataggcaagtaatagaatgcacagtgtgtgttggtattttttctcttttatttaaatactccacagtggcacttggttttaatataatctttattatttttgcaaaaaatcttatgtggaaaatatagatgatcatgaaagaatctctgcgttattctgtggtttattaggttatggttgtgctctgtcttttgctattggattatagtgaatttataccataaacaagatcactgtgaccacccgatcaaatcagtgtacagcataatgttctactttgcttctcaatctatgtaattaattttcctgactaggagttccttttagaatttcattcttgaaagacagtccctgtattttcacagaaaagcagtgttcgtgttggacttgccaggtagctcagtgttaaagaatccacctgccaatgcaggagacttgggctggacccttgggtcagatagatcccctggaggaggaaacggcaacccactccagtattcttgtctggaacatcccatggacagcgaagccctggcaggctacagccccatggggtcacaag

SEQ ID NO: 53458 - DNA, 668 bp, Bovine  19866881975628
  misc_feature (1)..(1): n is a, c, g, or t
ngagaagctggatgcgctcatcgcaaacaacgccaatgccaataagacctgcaagatgatgctggccacggaggaagcctctcccgacctcgtcggcattaagcgggacctggaggctttaagcaaacagtgcaacaagctctgggaccgtgcacaagccaggaaagagcaggtcgaagggaccattgtgcgccttgaggaattctatagcaaactccaggagttttctactctgctccagaaggctgaggagcttgaggagtctcaaggccccgttggcatggaaacagaaacaattaatcaacagctcgatgtgttcaaggtagggagtgcttcctttttattccgcgttttggttattcagagatgtgaatagagatttcctggtggcccagtggttaagactctatgcttccgctgcagggggcacaggttcgatccctggtcgaactgaaatcccacatatcttgcagcgtgaccaaaaataataatgataataaaataaaaaataaaacttccattaaagaagactggttgacagagaaggaggtggcctgttttgcagcatcttcaagtgggaccaccaggcagtgttggagctcaaatgagcatctgtgtagcgggtatctgggcagggcaggtgggtccttctgcttctgctttggcct

SEQ ID NO: 53459 - DNA, 749 bp, Bovine  19866882203652
  misc_feature (1)..(1): n is a, c, g, or t
ncatgtctctttcccttctggtttcctcagtgtgtatgcccagcagtgggattgctggatttttaatgcacatgttcattttaaacaatgggatcagtagatatataaaaaataaacaatgaaaaagacttactgagttggcagacttacttgtggaatatgttttattttattgatgtgcaaaatctattaggctgaactttacatataatattgttattttttttttaggtcaaagtacagccaaatatgacaattttataaggttcaacctaatgtaatattttgtatatgaaatatattctttccattgtctgattttatgtcagtcatttgtaaatgagttgtaaaattaggcaagtgaagtgtttacctggtgagcaccttacacatttttataactttgtaaattgttccattttagcaatggagatctgaagtggatgaaaagagagaggtcttccatgagctggaggatgagctgcagagagcaaagaccatcagtgatgagatgtttaaaacctacaaagagcgtgaccttgactttgactggcacaaagaaaaagcagatcagttggttgagagatggcagaatgttcatgttcagattgacaacaggttagtagccttttcattcagttttagctcagatttaacctctctattctgggtaaagtctaaatatcttcggctttctacccccatatgtaattcattccatagaacagttacttgtgttaattgcaaga

SEQ ID NO: 53460 - DNA, 959 bp, Bovine  19866880343255
  misc_feature (1)..(1): n is a, c, g, or t
ntatacccttatagagagtttattgcatgccaataacttgacatattttattattagttcttacagttcacttcagttcagttgctcagtcatgtccgactctttgcaaccccatgaatcgcagcacgccgggcctccctgtccatcaccaactcccggagttgactcagactcacgtccatcgagtcactgatgccatctagccatctcatcctctatcatccccttctcctcctgcccccaatccctcccagcatacaaatagatattcttagctccattttagagatgaggaaactgaagcttgagaagcccaagcaacttgtataagatcttatggctagtagatggtgagctggaatctgaactgacatctcaatctctccaaaaccaatgctttttcccccaagctatgtagcctgttagtaagacgttctctctccccttctcttttgctcaggtccatgccttgagtgcccttctcctgaaatattctcctccagggaggcctctggattcctttgcatcatcacacgctgacctgcaattttttccttaccttcacccagtctaatctgccctctaatctccaaacccagtgtgtacttgaacttgtctgctgttagtagaagctccaagcaagtatgtgcaatgagaagtaagtgaggagcaggaacaaggcggctacagacaggagccaaacttgaatccttggcagggctcttggagacagtatgacctgaggtcagccacgccttggccctgaagtgggaaaggcctctgaccttttccctcaacttgatgcccagggaacaacccagaacatgacgactctggcagaggtagctgttctattcctcaggtacttgtaaacctgaacaatcaccgtcttcctccccgactcctcatcaaaagcttttattaaatagcctaattattaaacaagggcaggtggaaaa

SEQ ID NO: 53461 - DNA, 3194 bp, Bovine  19866880384500
  misc_feature (1)..(1): n is a, c, g, or t
ntctgtgacaccgtggactgtagcccgccggctcctctgtcctgaaattctccaggcaaggatactggagtgggttgccattcccttctctgggggaatcttcccaacccagggatggaacctaggtctcctgccttgcgggctgaattcttgactatttgagccaccagggaagctcctggaagttgcagtgctgaagttaaatatcacatctccccgaatttctccaccacattcaggaacaaggggcatatcacaccatattatttgttctggagaaaatggaatctctcctagctcccacttgtcaatggttagaagtcaagatgggtcagccccacccctccctcagggtcttttggaaaccctagaatattcaggcagagcaaggtcttcggggcagggcctctggtcaccacagctttagggtcactcctgaggataagacggggtggctcgctgcttctgggtcaggtacgctcttggctgcgactcccaagctgccaggcctgatggccatcttcagagcatccacgtaatggcggtcttcagagaaagggatcttaccattgctaggggctgtgtgcaagaggaggctccagttcctacctcctgtgttatcgtcatcctttcctacccttcggctttgaagaaatcacccatttctctttctggaaaggccgttccccctacttcatctccatcattgaccaggtcttccctaccaagtgcttccacattaggggtgtttcatagatgggggaggggaggaaacgtgtgcctgcctgcctgtgtgtggctgtctccgtggtggttacaacttctggctacagttcagagtggcaaatgccagggaaactccctggagactagggagcccagctgtttaacacaaaggcctcgggatgggagaagagaaagtgtccgccatttctgactcttactgaagccaaaccaacgaagtaggttattccacacatgcccatttgcatttgatgcttgatagaactgtctctattttcatcttcctggctgtataagggcaaagatgcttgagaaagaagagatcagggtcctgagagagaacttgttctcaacccttcactatcatcgtgataactactaacacacacacacacacacacacacacacccacccacccagaagcgcaatgacagaaagccaggtctgacagttttcttcaaccagacaatgaccacagggtcccttagagcagcaatccccaacctttttggcaccagggactgattctgtggaagacaattttttcccagacccggggtcggggggatagttttgggatgattcaagagcataacccaggtggcgatagtggtaaagaagccacctgccaatgcaggaggcataagagacctgggtttgatccctgggttggcaatatcccctggaggagggcatggcaacccactccagtattcttgcctggagaatcccatggacagaggagcctggctggctacagtccatggggttgcaaagagtcagacatgactgaagcgacttagcgtgtaagagcattacatttatcgggcactttatttctaatggaatgccaccactgatctgacgggaggtaccggtccaactctgggagttggtgatggacagggaggcctgatgtgctgcgattcatggggtcgcaaagagtcgggcacaactgagtgactgaactgaactaaacccgtccgcagccagctccagcaagggagggggtggtgcctctcctggctgggcctccggagctgaggcatgttctatggtacgtttagcaggtagccccaaatctgtgttagctagcatgtgatggagggaaaccccctctacatctgttaggttggagtgggcttttcagcgaccagggtgtgtcccaagcaacgtggctgcagatgcatgagcaggaagagctgtgccctcctgggagctcaccctgagcctccagggtgagcagcaccctatgcagtgggtgggccgtgtctgggtgaatgctgagtctgaacactgcttctgtctcctccacccgagctgggcaggggggtgcctgagacactgaactcctttggaggagctggtgaggaagagctagggtgtggagcctccaggggcccctctgggttcttggctccgcagcaggctacagtaaagtgaggggccctcagaacccaggcagagatggctcctgctaggaaactggggggaggtcggggctacttcaggagcttcagactgctgcttattcacaagacttaccaccaaataccacgtagatcaggcgcagcttcattctcagcggcactgagttacccacaggtcctcaccaccctggagaaggcaccacagtggcaggtcccaaagataacgatgactgtgtctctggagaatttcctcctaatgtataggctgccatctgaagcatgtgggcccatttagtaatgagcttagcaggtgatccaaatgatgtgttaattgagcccatggagaaaaattaaatagatccaataaaaatcatggaggaaaggtttctgaaactgctgagtattgaggactcactgatggcttccttctatcaagtcattaagctggttgcaataatttcttttaaaagataaacgtttttcctactttgtatcgtctgtgtttacccttgctgttgtcaccaccattttcacagctgtcagtcacttcagaaagcccagatggaaggaaccattgagggcatttctgatctctctctgggggacagtttctccttccagcatgttcttctaggctttgctagggctagttttaaaaggatcctgaagtgaggtcctaccacctcccctggggaaagacgattccatggctagatctgatcacacagacaactctccccttgttattcttccccaactttctgttctaaatgtcatcctggcaatcattcatcacaatgaataggaagttataattaatagaggcccaaatcattcaagtggaagattactcttttgaattcttgtatttttcttggaagatgtccttgagttaattatttagtgtttttttttttttttttttttcttcttcacagtcttgtttccaaaaagaacaaattgatcacagtaatgcaggggatgaagggattatgtacaatgtatgtaagagacaaacg

SEQ ID NO: 53462 - DNA, 3492 bp, Bovine  19866880409830
  misc_feature (1)..(1): n is a, c, g, or t
nttttgcctgtaacaaaataggtccatctaaatgtggcttgaatgataaggaaatttaattttcttgtacaatacaaagtccagcagtagaaagcttcaggaactcatcaaggcatggctttgtgtcagcttccatccatgatcacatccagatccaggcgtcatggcttcaatgcacaaaatccagaacaagacaaaaaggagtttctcccacttgtgtcttttatgttaaggaggaacatatttctcagaaaccctcagaaggtcccgctgatcagaactgggtcatacccctgtgctctagtttcaaggctgagagagagaatatttgccctttttgcatcttttccgggaggtcagctctgccaacaagggaggaggctgtgggggatgactgaggaatggcaacgacgagcacatgccaaggatgggtgttgagcaggtgaaccacgtgataagatgggcacctggaagatggctctggtggcagcttggcagaaggacgaggtggggagataggaaagtggaagaggggcactttcagaggctgaggtgctagatgaactggtgacttctgtacagcccctgtaattccatctcctcctgccaatgagaggcctggggaaatcagggctacacaagacccactggaattcatttaaaactataatgacaattaatactgagtagctttatgttggaaggctcaaaaaggcttcctcggggcaaactgatgcaaatatttaaaagggtttatagaactggatccccagaaagcctttcagctcagcctttcaccagatgtcatacgtacaagttaactggaaaaggttttcaaaagactaagactgtaaatgtctgggctttgagacgcttgttcctggtttgaggaacaaggtctacacgtgtgtatggtacgagataatgttctgattaaggatgctgttgttggaggggactaaagccaataaaaataaaggacagagggtaggagactgaaacttcatgctggccaaaggtgggaaataagtaaaacagagcccacgacactagaaatcaacaagagccaaagcccttcttcccgtctcccagtggatcatgggtgcttatagccatgagtctgtattgataccattcccccgcttctttaaaaaccaaaccaaacaaaaacaaaaactagggtaaaaactagttgcttaccattactaaaaatagatgcttactatttctgcacaaattccaatatggccacctggatccaagtccatcacctactgccaagaaccacactttcagtatctggaaccaggccatgtcacgggcagatgaccagtctgcgaatggggctgcccagggtcaggtgtctatctcggggtttcccgtcagctgtacctggggtttccataaaggtgggagagagggggcaagactggatatgtctagcagagtcggcccggattcagtgtatgccaacagggacgcccagaaggcccaaggcactggaaccaggggtggagggtatgtggagccagtgagggaccctgaggtggaaatagtactctctttttcacatcctccatgtttggttgatgtccttccaagatgacagagtcagaccccgtaacataaagagcatgtaactctccccaggtcacagagaaggggcagtggggtcagtgggaaccacatttctaaggtcacattttctgaaaattcaagtcacttcaccctctgaacctcattccctcagcttgaaaagcagagaatgatttctaaggttccttccagccatgtcattccatgactctgggctctttccttagagaggggtcagaaaaataaagaagtgagcagaacattttccatcatagaaggagggcatcatcactcatctgaggcggtacaatgttcggtcagcatcaccccctctccttttagagaagaaggtgatgcaggagaaactaagctcttaactctgaagtgtaattaaacaaaacgaaaactaatgacccagaaggaaacttctgttccctactgcggtctgttctgatggtaatggaagaggatatgctggaaaatcatctacacgtgacaatctgaaatgataaccctccatgtcactaggcagaaaaggctgagggcagttccagggtctggagcctgagagaactgaggggctgggttgctcccgagtgcctctgcaggttgaggaaagcatgaggactgggcggatggggttgccatgagctgataatcaggaggttcatggagggggcagctactaccatgggccttggaactttcatttggactcagcctctcatcctgaggcagccaggccccctggtcacttgctttggtggagatattgcaaccacttgacgtccgtcaaagccctcagccactcatgacaagcacactgggactgtctcacgtgggagcaaattagcttgacccctatctgcaatgtgggagacccgggttggatccctgagttggaaagatcttctcgagaaggaaatggcaacccactccagaacccttgcctagaaaatcccatggatggaggagcctggtatgttacagtccatggggtcacaaagagtcgggcacgactgagcgactttcctttccttttcctttaagagaagagggaaatatatcaccctccttacacaggcaaatagtcagatggctcctgttattaaaaataacctcactgtagagtttttaagcaagtagagagaggcccttaaaaagagctgggaatgaagcatcgagatcagagcaagggtccatggcatgaagtttaattcccacctgctttccacagtgttttgactggtaccattttcttggaatctgatttctctcctttccttctaacctttcttggacatgtgattagcttagaaagagagccagggtcttttgtgtcactaaactggatttggcagggaggtcagtaccacccttataggggatgggatgcaaagggacagatttctttctaagcatgtgtctaggacagcgtccttggtggtccttcgtgggaaggatgataagaaggggggatgtcagatccagggatacactcaccccctgcaacctactcatgaatgagcatcaagagacacatggaaaacaattcctcagactagagaggagactgtcccaggtggccccgaggtggtgccgtttccgtcagcttactcctgggcttgaggctctgctggttccttgatgtagctgtgtcaggtctcggggcaaaaagaggggctaaggccccttggtgagaaattcttctggcctgatgaatcaagaaaggtcgcccactgtcaggatgggggttagagccatgagaacaagaagagaacatccttcccaggctcacctcttccatgaaagctcctctgaccacttcacctctgaattcctaatggaattatcgtctgaacacttatgggctcacagagctgggaggatgttttt

SEQ ID NO: 53463 - DNA, 1978 bp, Bovine  19866880412583
  misc_feature (1)..(1): n is a, c, g, or t
ntgtgagtctcagtgaactccgggagttggtgatggacagggaggcctggcgtgctgccattcatggggtcgcaaagagtcagacacaacctgatcgactgatctgatctgatcagtgaaaaatacacactagatttcaaagaacatctgaaaaaatagatctctcctgaaattatttttatattttttcatgttgatataatagtattttaaacatactgaattaaacatattattataattaatttcacttttttttacttttaggcaatggtaccccactccagtactcttgcctggaaaatccccatagatggaggagcctggtaggctgcagtccatggggtcgctaagagtccaacacaactgagtgacttcactttcactttcactttcactagaaaattttaaattacatgggtggctcatttattttccctgaacagcactgctctaagatcaatcctgtctttcccaaatcagtttgtaggcttttatgccaggttggaagatgaatagaaatgggattggagagtgggaggaaagtgggaggaaaagtgggaggaaagggaagtgaaggatgaagagaggaataagcacgtggcctgggtccaagggacaatctgaggggttcggtgagcctgcctaatgcagattaaggagagaaaaaggaatttaataaatgtctctgggctacgaatcagattccctttaacgttcttttagaggatgaaatagttagataacaccgacgactcaatggacatgagtttgggcaaactctgggagatagtgaaggacagggaagcctggtgtgctgcagtccatggggtcacaaagacttagcacaacttagcaactgaacaacaacgacaaacaatcaaggaccttgctggtagactgtctagtcatctgaaagagaaagccaatgtgctttaactggaaatgataccctccaagatgactatggcctcaaaggatagaataccctggaaaaattctttccaaagagattagaatagagtgagggagaaaagattaacgtgaaattgagcactctgaacctcaaaaggtacacactgtacctgggaacacagccaaagcacgagggataggtgtggacggcaaaccctcaggtgcaagcctgggatcaaagaaaaggcatatgtggcccaggaaggatgtgacattgaagaaaatgaaatcaatgggatcattaatgatacagatgtacctagatttcgagacggacttggacctattaggagggtcactccagatgccttttgggcaagattacagactgaaatgtgggcggtcctgtaacactctgctgggaaaggcataaacctaggtgagcctatctggaccaagcagacaaaggcatgtcagtggagcttctctcccttcaaatgagtacctgcaagtgcttagtggggtgggggcaggatgctgtcagctggggtccactcccttgaggcaagagaatgctaaggaggatgagagtgccttgcactagtatgagctcttcacttttcaaaatggtgtctcattttgcttccatttctaactcatcaggttgagagggtagttgctgttttcctctccatgtataaacacagagactgagcacagtatgtttgtggctggcctagaatcaacttgtttaaaatggtgctttctcctggaacctgcatcagaaccacctgaggagtgtattttacatgacccaactcagatattcttaatcagaggacctctggggccagagtccagaaatctgtgtttttattttgaattccaggtaattcttttgcatatgaacaattaagcctggcataccatactcaaatctgaaacattttattatcccttgagctcttagctgaattctgaacccatcttattcccatattctttttctcaaatactccctttttgaattggaaacatagagagttccttagaagacagggtg

SEQ ID NO: 53464 - DNA, 4083 bp, Bovine  19866880535614
  misc_feature (1)..(1): n is a, c, g, or t
ntgtatgctataatttgggacagcataaaaagaaaatgggcattttgtgtaatgttaaaatcaccagagacaaaggtctattttaattcttatacttaaacatcttggaaattaacagtaagacagcatatgctacatacatacaaatcctctctattcgtacattcattaaaggttatttctctaatttttggttgtcctttgtccattatttgtaatacggcattctaatttggctgcctggagttaaattaccaccctgtgaagttgtatcccaagttcattataagttctgcgtaagacagcaaaagaaactgggtattttgggtctctttccttttgttttcagcaaaatattattacttaacatttactaaaaggcggtgtcaagaaacaaaatgtatttaagattgaactcaactcacaaaaaaattaacactgatttacatcaacttttcagggcccaaaattttttatttccacatattttttcaattcctacatacattcacagaacctaagcacaaaataatttttaaataattattttaatttggaaaaggcaaaaaaataaaatggcatcactgactcgatggacatgagtttgagcaagctctgggagttggtgatggacaggaaagcctggcgtgctacagtccatggggttacaaagcgtcggacatgactgagttactgaactgaactgaaaaaatgaaattttcaagtaattaaatcattcaaactttaaatattatatcagaagagccaaaatttatcctttaaaataccatatagtctgctcaactcaaatcctcttcagatctgcattttcctaaaaaactgcagttagcaaagcacacaagcacaaagctccaaataacagaaccatggtgcccagaatcagcttagggtggagaagctttaaggacagaatcagtccatatttggtttaaaggtctaagtatggcctgactgcaagttaggcaaaaatttcaaagggactgctgaatctgtggcctagtaaatcaatgctcttgaaatttatgctatcttaaactgctgtagattcactaatactaaaatgattccaataaactgacagattttatttgtaatttcacttaaaacagcaaagcaatattttaaaataactacaatattgctgatatgttaatatatatgaatctctaggttgtggggtaattcttttcctcttcacagtggtaggctgtgttaatacaacaatttttcttttattgttcactaatgagacagtaattgccatcagaatcccactgggaatatagacttgcaaatataataggcctacggacaggttttacatatctataaagattctcagatacattttgttctgcatgaacacaccagaccaaaatgtgtcctttgccacggaagataaactccacattttcagaaatatgcaaacaggagaaacaaacttaactaggcagattttaggttcttctttctagcaactaaatggaagagcaattaacagaatgctcctttttatcaaaaacttattaacctttcactagaaatcttaaaaagttgctgaagttttcagtgtttcaattcaaaacataactgccagccttagtatgtgttccaatgaatgtactataatgtaaactgcacactccgctccaaatgtcagttgtataacaaggagatttaaaggaagatattttaatgtactgctagctgactgagcactacctttggagtttattcagggcataaagatttctagaaattcatttaaaataatattttctggtgatgaactacattcagtgattatcgtccactgagccctcaggcactctactgcttctaaacattcagttcagttcagtcgctcagtcatgtccaactttttgcgatcccatgaaccgcagcatgccaggcctccctgtccatcaccagctcccagagtttacccatattcatgtccattgagtcagtgatgccatccccaacatctcatcctctgtcgtccccttctcctcctgccctcaatctttcccagcatggaagatatcatttgccattcagcagggaaattaacaagggtttccatttcccattcttagattataatctttactaaatcccaaatgaaatgtaaatgaagtacctttcatgatgtcccaaatctgacagaaattcatctgcatgtctttggagttcatttccttctaaattctttaatttcttcaactcactttgtaaaaaaaaccaaagctctttagctccattttcaatcctcctccttaggatttcatgatccttccccaaacctgttgtcaagcaatggagagtattagcatttccaacattctgatgaaaggaaactttcaattatatgtactaatatcagtatattgaagaggagaaacaatgtatgattacctaccatttctagtttgtttcttgtaattttcaatctgttctttggccttcacaagctgctcttctaaagcacgaatccttcctgaagctggcccctgatcaatggggccttctggtattctgtagttcaaggaaggaaacgtaaacatttagcttatacattatgcaagaaaatacatgcttactttgctaaaacgtatttattggtaactctagaagtcactggaccgtaacacatattagaagtaccaaatgaaattttctcttcaaaggtaagggtaagacataaacactggaatgatactgaacacagaaaaaaataatctagctcagagatgtatgatctttgaagaattaaggaacctttagaactgtctcctaaaaactcatcatactactctgaattacaccgttagtgccaaagtgatcaattctttcactagtgttgagaacaacaaaattcaaggacagggtgacaaaaaggcttaaaaggagtacaaaagcttgtaactgaaaacatgtctatgttcaaatatcaaatgcaaattatttctaaattaatcacaatatcaggccatgtaaacctgtgctccagttcatgaacttataaccttagattactaagcattggttgtataaggaagggaaagccaagaatagaagatgaagaataccagaaaaaacacctgacagttaatgtcctgtttatgtcaggaatgaaaactaccagtcaacaacataaaatgttggaacatagcagaggaactcctgcttatattatcaacctgtacaacttttttctaaactgtacttatttctaacatattttgtttttatgtgacttttgacagtattctatactccaattttgccataaaagctattcacatcctaatcctggaatctgtaatactatcttaggtgacagaaaactgtgtgattaaggatcctgagaaggggaaataggcatggattacccaagtgagccataaattgtaaccacaagtgttcttgtaagagaggagtagaaggaaattttattacaaaagaggagaaggtcatacctattactttgaagatagaggaatgggtcatgagcaacaaattcaagaaaggcatctttaggagctggtagaggcaagaacacagattctcccttggagtttctctagtgaatgtggccccacaggcacctaggttttgctccatgtaactcatttctgacttcccaaactgtaagataataaatttctactattttaagccaagaagtttatggttatgtgttacagcagcaataggaaactaatacatacacatgtatttacacacatatatataaatatgtatatatacttttggaaaaatattgagattaaaaaatggctgattttttcttctataatctatttaaatgatgaaatgtctctaaatagctagcacagtgtctgtcaataagccttatcaggactactctatctgggctcagtcattttagagatgagctgtaaccttaaaatgcctgggatactaatttgtaccatcgcaatcattccaatttttagactatacttgacagaacttaaatttagatatcaacctgatgaaaaaagtaatataaaacttcaataccttttctagcat

SEQ ID NO: 53465 - DNA, 2230 bp, Bovine  19866880561050
  misc_feature (1)..(1): n is a, c, g, or t
ngtggtgctggagaagactcttgagagttccctggacagcaagaagatcaaaccagtcaatcctaaaggaaatcaaccctttattcattggaagagactgatgctaaggctgaagctccaatactttggctacctgatgcatacagctgactcattgaaaaagactctgatgctgggaaagattgaaggcgggaggagaaggggacgacggaggatgagtggttggatggcatcaccgactcaatgaacatgagtttgagcaaactccgggagatggctgacggacagggaagcctggcatgctacagtctatggggtcacaaagagtcgtacacaactaagcgactcaacacaagtacactctttacaaatgagataagcacttagggagaaggttgcctacagcaaatcctctaaacaaccaacaggaacaaaggcatctgcaatttctaataccagtttcacaaactgaagtaagatatgacctatgaaaaaccacatcagtttccttcctacccatggcagtttttcattcttttgttgtatcagacaaatttttccactggaagattcatgatttggctctaatccaactgaggagtatgtagctcagaaatacagatactctaagttaattataccttcatggtctgtaaaatttagcttatagctaatatctaaattccagaagaaatattttctttcctagaccaaaaaaaaggctacagattcacacagaattttttaaaattatgctcccccaaaataaatggaagtagaataaggaattaagaggaaagctttcaattaagcactccttaaattttacaagttctgtccagttctgacatctgtcaatgaggttcactgctcacagggtttcataacaagtttcagtaattttccaggtgttttctgctaatttctactctgagaggcagaatggcgggttcaaatcctaagaataagaagcaaagattctgtgaactgatagcaacttcacattagtaaaagttgagacaaaacaaatatgaaatttgaaaaggcattcctgtagggtggcatgctaaaaagcaatgacttataagcttttaaagaaagatattgcgtgtatattcaagatgctggcaatcaacaagtaagaaaaggatgattggggaaagccagataaaagcatgaaggaaacatgggaaaataagcagatgtaccttggtaccaaagccatgcaatttaatcattaattaaggtcagcaacacctcatgtctagattaatactgtatttcccagttaatttcactctagtcaagtacaaggcaaaatctacctgaaaatctaaatcttcctcaaccattttcacagtgtcactcctctgctgaaaaaccaattatgatttcttgttatctatcaaccaagcctacactaaactctggctgtttaagaccactataatgtgacctaatctattcaacattacatctagagatgagaactgtgggtcaaaatggctacaaattctttgcagttcctacttccattccctacatgtggaaagtccctttgacttgcaaagattaacagaatgtggcagaagtgactgtgtaacttttcatgcttggcctcaagaggatttgcaatttctacttttgcctgcttagaacactgcaaggtaagaaaccagggctatccttctagagaagccagatagggggaaccagctgacggtcccttaatcacgaaacatttgtgaggtcatcagactgcccaatcacaatgaagccaccagatggctacaaccacgtcaatgatcccagatatcattagaaaaacagtccagctgaggccaactgaaatagaataatcagaagcaaataaatgtttactggtttatgctactatatttttattttatatctacacatatatacataaaatacattttgttatatatgaaaccccagtttttaaaaagaattcaataagaaaacaaataactcaatttataaataagcaagaaatctgagtagatacttcaccaaagcacatacatgaataggaaataagcacataaaaaaatgctcaccatcattaatcattacagaaatgcaaactgaaactatatgagatgacactacagatctattaaaacagctaaagtaaaaacacctgacaacagcatgtgccagcaagggtgagagctgtaaccctcaagcactgctggtggaaataaaa

SEQ ID NO: 53466 - DNA, 2349 bp, Bovine  19866880896783
  misc_feature (1)..(1): n is a, c, g, or t
nttggctcaaatggtttgaactgagtttggtggtctttctggtccatctaagctttatttctcagcctcagggtacgtggggtacttgaccgtttctatcttctctcgaactttgtaggagggatacaggcccgtccttcccagttttctgttgacacctttagaatagccatcccagtgatttccagccacgccaatgatatctccaggttccatggggatttcatccgcagttcgaggttcgtgaggataaatagcaatctggttgtgggcattttggcctccaaaatagtagatgtcatccaaagaatggaagtttgcagaggcatcgggatgcagcgtctgcatgatctcataagcaactcgacagaccttgggaaagcatgaaaaaaaatctgttagtacatgtgagatcgccttcgtagcactctgagagcccttgccaaagagacagggactaaactaggaccagggctgagagaatgagtagattctagtcaaagtccatttgctctcagatgatggtacaaagtcattcttcatttctttgcctgtatcttttttctaaacataaaagacaattacaattaggatccggcagagaaaaaaaaggatatgtacatgtagtgcaaagtattttgagaataaacacttattaagagccacagagtgctgggcaaaaataacacagtctgtgcccttggtgaactttaagattcaggattataaatactttacacaaatgctgctgctccctttctttcattcagtgttaataaatcacatactcttttccgctaatttagatctggtctcagaaactcatgtaattactgacaatcaactattgccaaatgagctaaaacatatctgccacttctgttctgaagagttttgtgtgtgatgtgtagatagcagcagtctagattgaaacaagatgaactagctttggggaaggtgcatctacctgatgcatttaaggctacttaaaagattcctctgtccaaagaacacctaccattctcactggatggcagctgaaattacacagtccttgaactttagacttgctaacaaaggtaaacgatcttaatggaggtataacattttaaacaactaacaaatatattcattatctagtaaatgggtttcagaaacttaagaataagtgaaaacaaaagagaatactattttacttagaaaattcttccactatatactatgaacagaggactcaactgaagtcaaatttttctgcatctccacttgtagttatctcagttaatgaaggtttattgcccctgctactgctgctgctgctaagtcgcttcagagtctgtgcgaccccatagacggcagcccaccaggctcccccgtccctgggattctccaggcaagaacactggagtgggttgccatttccttctccaatgcatgaaagggaaaagtgaaagggaagtcgctcagttgtgcctgactctcagcgaccccgtggactgcagcccaccaggctcctctgtccatgggattttccaggcaagagtactggagtgggatgccattgccttctctggttttattgtccctatatcaatacttttggacatttttaaaatgatgctaataataactcttaatcttctcagtggagcaatttaaggtacccagtagtccttaaaaactttggcattcacagtatcaaaactgaattcttaagtgttatgagtaaatagaatctaattaggttaatgatcaacttaagtctttaaaaaaatccgaatttcaggaactggaggggcacttcttaaatgccaaatgtaatttgcaaataaaactgaagtttagatagtatttttaattttgcagatagggactaattctagtgctaggatttcaactagacatagaaccaagagagtaagtttgctttcaaatctgctactttgtcaacaaactaattttatatcgggaatgtcacagtatgactgacatcactggtagaatactcaaactataacaaaatgaagcaaaaaagattttgaacttgaacttcatatttagtcagaggcccatatagggtacgcaaaatccagtgaagactttggaaagaatctaaataattaaagcagctccaatagtagcaaagtacagtaacaatgacagaggttaatatttactgagttttacttagtttttctgtcgggcattgcttccaaggtctaatttaattgtcaggagtcccataatattctatcatgtttgttttatggacgtcaaagatcagttaaggaaaatggccagagttatactattattaagtggcagattcaggttttaacctaggcagaa

SEQ ID NO: 53467 - DNA, 1621 bp, Bovine  19866881004679
  misc_feature (1)..(1): n is a, c, g, or t
nagcgtgggctcagtagttctgaccacaggcttagttgccccgaggcacgtgagctcttcctgaataacggctcaaacctgtgtcccctgcattagcaggtggattcttaaccgctggatcatcaaggaagtccctccccttgttttgttactatcaacctatgtaagtcagactttgtgatgtttttccatgggtcattgaaactttgttcatttttgttcattctttttccttggtgtgcttcagtttcaatagtttctattgctgtgtttttaatttcactaatatttttcctttgcggtgtctaatttttcatttcagatgttgtattttttacttctaaaagttccatttgatttctttttatagtttctatttctctcttggttatgttttccttcaaatcctttagcatacgtataatgctttaaaagggtctcacctgctaattgcctcatatctctcattttttgacttctctctctctcttttttgtatgtcaagtaactgctttaagaaatgcgggacattgtaaatgttacaccattgagggaccgatttttttttttcttccttcaaagagttttgaattttgttctggtggtcaaagtcttttacagatcattatgagtttgcaagctttgttgggggctgatcttgagtgacttttactgcagggctatttgggtctcattcccaaggtcttgcttttctaaggtctttacagaatattccagatgttcagagtggtctctttattctagctgattagagctcagcaactccaaccatgtacaagcttctggaggcgttcagtctgcagctccccggtacttgttctttcccccgtagtttcttttttcccaaaatcatgaaaactctgcatgtgtcctaggattcagccaaatccttttaagaactccggcaaagctttctgcagttcttcctctgagtggtgctcttcttcctggttctctgtctggcaaattccaactgactcagcctcccctggtctttgtctcctccactcagtaagattcgattcctacgtcctgcttgtttccatccctgcactgtggtctggaatgtgcttctaggcaagatgcagaagcaatctagggatcacctcattttgcttccattctctcggcaaatgtctgaaatttgtgaaaacagtagtttcatacactttgtctagttttctaaatgtttaccgttggagagctggtccaatatttgcctgcttggtttttgatcaagtgaattgacaggtacactttctccacttctaagcagttccacctgctcctctttctccgtatgtacataaatgaaaataaatgcttaaaaccaaaggtcctggattttagtcctttggaaccagtccggctggtatgtgagccctgttctatctaagccccataaaagaaattctctgaggattaccatagagctaatcataaactctggtgctaaaggatatatccttcagacacttccaaaagattagatggcaccactgtatttttttagcatccataaataaagttttattggcacataaccttgctcatccatttacatatttgtctctggatgatttcatgctacaacagcgga

SEQ ID NO: 53468 - DNA, 852 bp, Bovine  19866881029536
  misc_feature (1)..(1): n is a, c, g, or t
nataaaaattatttagaaaaaagaccctcttctcctctctgtgtacactgacctgtcacatgccaacacgagctgggaatacggtagaaggctcctatttgtaaatatcactcgtgtttttagatggattttataaggtcagagagtgaggtccaaagactgccaacaaatctccctccaatgatcttgccaatattttacaccctaacaaggggcctggctagaatactgaaagattggacatgcttctttcaagggaatacagaaattataatggatgagggctgaaatatatatgtcagaaaggtcaacacaaaaattatttatcattactatatgatttagtgaattaatatattaatagtaccaaaataaaatgtcaacttgtcatttgcaataatatttagcaattgtcattattccaagtaaagtagttattcattcttctgctgaatcatgcgttagctaatttaattggccttaaaattttataactccttgtaatttaaacatttcaattagttacaaggacttttttgtgattcaagtctattaaaaacaatttaataatcaaactctaaatacagtcttattctaacttcaaagctattttaaagacttttcttaacaatgcgctgtgctgcgcttagtcgttcagtcatgtccacctctttgcaaccccatgatttgtagcccgccaggcttctctgacataaggattcttcagcaagaatactggactgggttgccatgccctcctccaagggatctccccaacccagggatcaaacaatatcaaagcctttatattaaccggttattcctgttaatatgaaaacattctgatttgct

SEQ ID NO: 53469 - DNA, 650 bp, Bovine  19866881066878
  misc_feature (1)..(1): n is a, c, g, or t
ncctatcctgaatgacagaggtcatttttttgcaactgatctgtgtgggtgcaggcttctaattgtttcctgaattacctgctatctattagccatctggccgcttgccagaacatgctaatgtctccagagttcctggcctggagttttgaggagcagatttcttgttctgtctttgggaatgtaggacttggagtgcaggccctgtgagccccactggcagaagctctgtcctctcctctgcccttagctgtgctgagggcaatgcccaggcacagcgcacagctcccagctgtgcctgagagaatgcccaggaacctagtgcacagtcatgcggatgcccatgaggaacctggcagcatctcctctttctcctggatcctggactccacacctgtaggagatttagctttatcagaatgtcctggaaacccttctgagaaaaaggttttttggagttgatgtcatttgcttagagaataaggaaactcttcaaataatcttttgtttggggagaagagggtaagaagggtgtgagaattcaataggcccgttcttctgttgagtaagggcagagcttggccatcacccaggagggctgagtatcctcaacgtcagttactcccatgaccttaaaaacacacagtgaa

SEQ ID NO: 53470 - DNA, 944 bp, Bovine  19866881135221
  misc_feature (1)..(1): n is a, c, g, or t
ntagcttgatcagattccattaaaataatgtatgatttctttaattccagcatgacttagctacagatttatttcatactgaacttttaaaaaaaaaaatggattcaagaacaggtgtctcaggctagatttggggctgcataaataagctttgtgttaggggatgataagaatacatttaaaattttaattgaagaatgccaggcaccagaggcaaagagcgtgcaatttttaaaaatgctaaataaagccagctgccaaaaagggcaagctcactgagattacagctgttcactatcatgcaacaataatacaaaagttctctatttcttgaggtatgtcttatccacttggtggactatggctttgcacatcatttctgtaccctggggttaggttaccacagcatggcataaaactattcaaagtgaaggaaaaatgactttttgcatatctaccatttaatattatgtatattcatatctcttctaattaatttaggagattgaaaatacgtgttgtctctcattccaataacaaaagagactgtaaaataacaagtaaggggggaaaaaaaagagcctgagcttttcaccttctccttatttctggtagtcactaatcaaaccacagaaaagagaaaggacaggagaacaagaaatggcctttcaaaaattccacaaatcaaagtctttttgtaagtagctcttacctgtggtctctgttacaaattatttaaacatggaattgaataacatattcaaaacatattatgttttatactaaaaaggcaataactttaaaatgttagtttgctcttgacaacagataattttctcaaatacaactcatggaataatttatttccgttattttaaagaatgacataacaagatagaaggttcaggctgtttcttaggcacaatgcaaagatttcattcaaa

SEQ ID NO: 53471 - DNA, 1655 bp, Bovine  19866881178403
  misc_feature (1)..(1): n is a, c, g, or t
ncaaaacacagaattcaaaatgtaagtgaaaagactctacagactatgactgaaaaaaattaaaaacctctgtaaacaaagacaaataaataacagtagattaagaggaaatatttgcaacatatatcataagaaaaagatgaatatctagaatatataaaacattttaacaaataaatacaaaaaataaattaattctataagagaatggacataggacatgaactggccaatcacaaaagaaatacaaattgtcagggagcatatgaacagatggttttaggcaaatagatatcaattgtggtttttggactgcagttggtttcagaaccatctaaacaagagtattaaatcataggcaagggatggtcttcagggaaatgggctttccagaaagctggaaaggtttaggcaggctgtaattcagggaaacctggccttgttaaatttgtttctagaaccaagagagttcaagtttgataaacttttccttaggcagaaatacggcttgtatgtataaaggtgatgaaaactctgagtagagaaaggttaaggcataatcagacttgaattgtttcacatctggcttgattctccttgtaggcattctgtgcccggccctgaggcctgggggccagggagagctgtactgagacagccatgtttgttccatgtggccagcccactgctgacaagattttacatcattctccaattaaatccccaccttaatttttttctacattgagtgtgtgtgtttttgtgttcccttcccattaactgataaatatctgaaatgcagcaatgtttatcctaattaatctaaaaaatgtagatcaaaatatgatacatctgtttttatctaactgaacagaacaaattaaaatacctgtgatatccagtgctgacaagaggtggggtaaagtcagttccagcaaactgttcgtatggaatggaatggaattgtcgcttcagtcacgtcaggctctttgggacccaatggactatagcccaccaggttcctctgtccatgaggattctccaggcaagaatactggagagggttgccctgccttcctccaggaggtcttcctgacccagggattgaatctatgtctcttacatctcctgcattgacaggcgagttctttaccattagtgctacctgggaagcccaactgttggtaaggatattattaataaagccatttgggggtcagtctggcagtatctcttaaataccaaatatatttttccctttgacttagcaattgtaattcaggaacatgtgcctatgcttaagccgcatggaaaaagattttactgaaatgttatttttattgaaaatcagaagcaaaatggcatgaataagaaaacgattaaataaactggaacatgttcatacttagtttatattcttccagaaacagatcttgtgactgggattcaagtttgaggtgtctgggaagtgtaagtagggaactggggaagtgatgcagggaagagcagatgactagtgaaggatgtgttattgagccagtgagggaccagagtttaatccttcaggaaaactcagaaggtagtacaaagcacatatctcagaattatcctagccaagggtccagggggctgggatatttatactgctataaatt

SEQ ID NO: 53472 - DNA, 2060 bp, Bovine  19866881248315
  misc_feature (1)..(1): n is a, c, g, or t
naatcagaggtttaattatatttcagtatagagtgaataaattttctcagtacatgtgatagatcagagttaagttgtcaactttgggaagttacatgcaaaagggataatcattgtacttactttatataatttttaataattaaattaagcactgtaaacggcttagaagagtacctggtatacagtaaatgctcaataaatttagctaatcaactagctgtgactgtcaaacattctttcctcagacatccacttggttttatctcttacttcctccatgtatctctgctcaaatgctagctcttagtgaggagtttggcaaaccttaacccttctacttgcttaatttttctccatggctcttatcactcgacataatatttatttactgtttattttgggcttccctggtggctcagtggtaaagaacctgcctgttaagcaggagatctgggttcaatccctgggtcaggaagatcccttggagaaggaaatggtaacccactccagtatttttgcctggagaatcccatggacaggggaggctggcagggtacagtccatggggtcacagaagagtcagacatgacttagcaactaaataacaactgtttactgtctgcattcattcccacctccatcatccctaattagaatgtaaactctataaaaagagaggtatttcttctgctctgtttactctgttattctcagcacctaaaagtgaatctagaatgtaacagaagatcaataaatatttgttgaactaacaacactttctattcataagccctgagacagcaagtgccactttaggtggcttttcccacacagtatttcccaaaggttagaactatgccttattttcctttgcatcacagcatctagaactccacatagtcatgtggataaacacatgaacagtgagtgctacccacgactgggacgttttcctaattccctaacagctgcttcagatttctcttcattccacagcctccaaggagctttctctcactgcctctaataatgactgtgaagaaaaagtctctgagcactgtttcagactggtattcagtgatcagatccatttggcctcattatttttgacattttgccctcccagctctgaatcagggagatgaaggaaatgtcacgtttgttctataaagaaaacaaccaaagagacttttaatgtgattcctgtgaagatgcatatatccaggcatggggctaaaacagaaacaaataaatatgaaggctggagggtgaaggaggagggaaatgggttaaaacacaccagcacaggttgtatcctagagtaaagactaactctgtcagcgtggtatgagtactcagtggaacaaacagagtgatccttttactgagaagtgacactaacattatgcccttccgaacttaaaggcctctttctggcaccaaaccaaaagggcacctaagttcctcaggccttatctctatatgcaaaagagcttgatgaaagatactgagtgttgaaaaaaacacaaacaatggaaataatgaaggaaggagattctgtactttcaacaatgagcaaggaaaacgccacacaaacatgcttctttccgtcttatgcccacaagtatgcagcagaggaggtcttccactgtaaggctgcagagactggcagtgattttaaaaagcatcttttcttcctccatgttgtaaaaatttattttttatatcacccacaaagaactaacttgaaattaaaaatagcatcaaattttcttttgtgaaatctttcttcagactgagggaaagactcctcttgacttcactacctagcatacaactccttcaggacaagtactgatatatgatgacactgtgattaatggttacatgtatactgcctatcagctagatactccttgagaggagaagccacatattatttttggtttctttgtgtattcctaatgtgagaaatgccaggctggatgaaggcacaagctggaatcaagatttctgggagaaatatcaataacctcagatatgcagatgacaccatc

SEQ ID NO: 53473 - DNA, 1335 bp, Bovine  19866881265077
  misc_feature (1)..(1): n is a, c, g, or t
ntatcacacattatacattttctcctgaactcctttaagtgctacggttcatacacgtgaaaataacctgttctcataaatgccatggagaaaagaataacatttatgaaacatcctgtttctgtcactcacacatcttacatgatgcgtaatcctcaccatgactctttgagaaaagtactgttctcattttaataaaagtccctggtaaacagatgaagaaactgataattagagaggttaagtacgtgcccaagaatttcaaattcggtcatcagagctggtgcaactctggttgttgctgttgtttagtcactgagttgtgtctgactcttttgtgattccatggactgtagcccaccaggctcctctatccatgggatttcccaggcaagaacgctggagtgggttcccatttccttctctgggggatcttcctgacccagggatggaatcatgccttctgcattggcaggcggattctttaccatctgagccaccagggaagccccgctgtgactttggataagttcttaaatactatttcagggctagggtcagaaaagttgcaacttgaggagaacaaattaaattttttgttaaattgcaaagacccaaagtgttgattttctgtccagattattcttttcaactctttctcaatctactttctccgcttaaacaactcatccagctggttgctcaggtattgacataaagctggaagcagatttatgtgcccaaagataggagggctctgggaaagcctaccggcctggctggtgagggtgacagcttggtaatgggcctctgagagtgtgtgtgtgaattaagcaactttcatctcctttgctacaaaaacatcaattaagcttgaataatccatgtgtttcccccattttcagacagaagaaaatcagcataaattggctggtatgttttttcctctagccttagatcgttaatcatcttcagccctttcttgcctttcccccaacccttaaaaaaaaaaaatccacactgccatttctgggcacccactgaaaacatttaccaggtgatttgttcagtcttgaatgtaatgaagacatgcattcagcgttttggaggctggttctatggggaaggtgccagtctgttctgttcaaggttggaagagggctcattcagggtcctttgtgcaggctggcaaagctgatgggctttgatatcatagtctggtccctgtacttgagccaaacagatgtgtccctgcaggcctctccatccaacaccagccagaggaagcctcatttgtctttgtaaggtgtccgcaacccacattcttcttggaaa

SEQ ID NO: 53474 - DNA, 1410 bp, Bovine  19866881280824
  misc_feature (1)..(1): n is a, c, g, or t
nctcttgcccccatccctcccgcatcgagtcttttccatgagtcactcttcgcatgaggtggccaaagtactggagttccagctccttccaaagaaatcccagggctgatctccttcagaatggactggttggaaaaacattcaattacctaaatattcaggtaaagagattgttcttacagatttactcttttctgtatgggatttggaaagaaaagcccttattgtgttcattttttgcattgagttttctattacttttctttttttttgtagttcttttttttttaatttttaaactttacaatattgttaatttagttttattttattttttaactttacaatattgtattgattttgccatatatcaaaatgaatccgccacaggtatacatgtgttccccatcctgaaccctcctccctcctccctccccataccatccctctgggttgtcccagtgcaccagccccaggcatccgtttctagtttataaaccataactagtttatccatagttggattacattattacatataaatcactaattcttttctgttctattagaattagatcggatttaatgcttaatggaactctgctgaaaagaccttatgctgtttttccatgcctgttttcccctaacattattgcataaagaaatgagataaaaaggagaacctggacatatctttctattgactgaaattttgtatcactaaaatgtattctggaaaaggacatcctaatcctatggtatattgctgccataataaattacaagagggggtaattttattttattttcaaattatttcctacaaaccagccatctaattcggaaagtggttaagagccaagttttaaaaattatgtaccaggaaatgcctcatttatgaatgtatacgtatttgtgctcataaattgggtaattgtgcacctaacaactctcttcattttaccattattctgttgtttgtatacaaatgaggcttcttttaattcaaattctgtagcctggaacattcacgattagtggatgactatcatttctgcttctattcagtgttaatgcatacaatttcatgtgaaattatagaatattttatttactctggtataactgtagcttccctggtggctcagacggttaagcgtctgcctgcagacgatccctgggttgggaagatcccctggagaaagaaatggcaacccactccagtacttttgcctggagaatcccatgggcgaaggagcctggtaggccacagtccatggggtcacaaagagtcagacacgactgagcaacttcactttttctttctttataactgtaacaagagcttctttactaagcattcattctgaagttaatttggctttatctgttatataaaaatgctagaaa

SEQ ID NO: 53475 - DNA, 778 bp, Bovine  19866881405684
  misc_feature (1)..(1): n is a, c, g, or t
nttaacatggatatgcattttacttctgattcactaactgaacttgcttcaagaaatttaccaaatttgttttcagacaaggtgaaaggcaattttatattacagtaaaatttgaggaagtaatttttaaaaacacagacatacagtttttcaggtatttccaatcaacgtgtaattatgtgaacattagctttaatttagattgaaacctattatccctctaaatagtcttagtagatgcctaggccttggtaaaaatcactaacctgtgcttggaatactcatgtatctataaaattcaacgcagaaacaggcagaacagacaacaatcatataactgtgcacagagaagcaggaaaatgaaaaagtttctgggaaccttcataaagagtcacagataaccatagcatctatacgcagttaaacacatggcactccagtttcgggaatcctgagctcaccaaaactttgacaactaaatttgggttgcttggggtgagtgaaagagatgcgaaaggggactgaggagcctttaaaaacccctattttgactaagactgcagctgtaattacagctgttctgaagcttttcttagaactgctaaataacagttttttaaataataataaccaaaagtaggtttaatgaactgaagaatttaataggaggacttcatagttaaagggtttttttttcttttttactatacaattaattttctattgtttttgctctgcaactagtagataagaattgttacaaaatgcaagaagcttt

SEQ ID NO: 53476 - DNA, 2227 bp, Bovine  19866881465827
  misc_feature (1)..(1): n is a, c, g, or t
nccaaataaataaattttggaaaaaatcatatgggtgcaaagaagcatatggatgggtacatattaggttattaacacaggttatgtgagtgaggcataggtatatggatggaaaaaaagaatgggaggatggttaacaaagaaaaaggacaaaaaagactacactttaagaaagaagacattcctaatatatcagttcaactttgcgggcaaaagaaagcaaagaggatgaactagccaaccacatttatgcttttatgtaaaaatttacatatatatgtcaagaaattaacagagagaagaggtaaggtggataaaaatagtactgtgcccatacagacattcagcaatgtctgtacgggtgaatacattcacaaaaaatatctggtgaatgaatgaacactggctagtctgttggatgtgataattttgtagattgggattttcaaggaccaatttattgactaatattaccatgacccagcagtgcttgtggtgtgttgtcataatcagaaccacttacgttctctggttcgagggtgaaatgatctgcccgggacagtcccagtttactctgcggtcaccctgttcactgaccgtctggagtgatggatataagtggaaatgacaggctccagcctgggattcgaaactagcatcggtggggggaggggtaggactctggaatctgtgttgctgtgctcattaccgcttcagaactgttgctctaggcattgttagctgccaaagtgatgtactgcttttataattaactattcttcaaacaaaacaaaacaaagagagatttattatttgctacatataaaaaaaatcatgcctcggtgtctgaccttccttcgctttattgccagtataagaccgaattcatgtgaactttgtaatgtgtacacagaacttgcaatgaagctgtcattccttgaactgaaaacaccttagtaccttttcttgtcctagctttgtgcaggtgctgacctatcttggcaaaagaatcttaagtcttctgtcatcccaaagcaagtttctgagaacaaaatgcgatatatcaaatattaaaaatagattggcggctagccctacatgctcttacctctcagcttcacccagttgtaacattttgttatactttcttcgaatatacatttttataaataaaacactctagaaaacaattgtgtacccttctgtgacccatccttcctttccccttcccaaaggtaaccgtggaactgaatttagtgattttattctcataaatatttgtgtatgactgtataatgtattcatacacaatttggtttgacattttaaactttatataaaggcatcatagggtgtgcatttctttgctaacagatatgttttgcttagtgatttaccgtgttggcatatgcagctccagctcattcaactgtcatatagcatggcctggtgtggtgtaacactgtatcatggggaatggtaatacataatggtattaccagtacagtattaataggttgctgttgtatgaatgtagtactattaccttttcttccccgcgaaaggacatttaagctgttttcctttttttaacaattacacaatgttgaagtgaacttttttggtgaatttcccctgctctgtggtttttctacatctaggactggacctgtgggttgccctgtgtgtacatctgcagctttgatagatcttgccaaattattctgcaaagagatcgcaccaattcccataaccacttcttgaatattccagcaagttttcctttctgagggctcaaattgaagaacagaaaagagaaatacaagccaaagtaaaaaaacagctttgagaaagcatttaatgatcagtggaacttacctaaggcttatatttccatccaggggcgcttctcccatggaccacctcccttcaagtataatcagtgcatattggctaagctctggtgaccaggcatttgggattcaaagctatacatgcaaggagacttattttctgagagtctaaagattaactgaggagctaagacaaactataggctaaagttaattatttaaataacaatttaacaggaagaaagaaaagatctcactggataatgctgattcatcattgaatcaattgtgcctgcattaattctccagagttcccaagacagggaagtcagagcttaggcgattctaattggtttcctagcaaccaccactag

SEQ ID NO: 53477 - DNA, 639 bp, Bovine  19866881495537
  misc_feature (1)..(1): n is a, c, g, or t
naataaaaagttggactggataaactttagttgtttgtcagttctaaaacaatacatctagctagcttgacaccccattggcaggaactacaacaataaaatatggaaaaacagtccatacttccaaatccaataaaattttaagtcacttttgagccatagaaattccaactacatccactcattaaagagccgaagtcaatctttccaatcaaaagaataaatgaagtgattgatttaaagaccaatgaaattagccaaactatccttccctatgacttgcctccatggctgaaatttctgtcttctcaattaaggtaaaatgtcaggtagttcacactgttggtttcttattcagcatctactcttgttccttccttattaatagagttccttgtttttgtttttatcggtttgttttttagataaccatccaacctccagctacaaaagggcaatttaactagtctgagtcaagagattacatccctgccacctaccccaactcttgtagttggctggaccatgtgactaattaaagtcacaagccaagagttggacacgactgagcaacttcactttcacttttcactttcatgtactggagaaggaaatggcaacccactccagtattcttgc

SEQ ID NO: 53478 - DNA, 815 bp, Bovine  19866881806357
  misc_feature (1)..(1): n is a, c, g, or t
ngaagtgctgatcagagaaagtggttgagtggtgagacttcacaggaggcgcaggagttctccaggcaaacagaggaaaggggtgttgcagacccggagtgtgaacaaagcttacagccgtgaatcagcaccagtgtctgggaacctgagtggttctaaaggcagaagagggggagagggagggtggcagtgtgacaggagctggactcaaacatgtgctccctgtttctttatctctacaaccctgcttctcttttctctcaaactaccgcgtctcctttgtccttgattccagtgtaagcttttccagtcctcagtggtctcttttgactgccttgactctcttatcttcttcctatcttccacttaattctccaccatgacagtttcaatgaaaatattgtctatttactattttcctgcaaatctcttgtcaccctctgttaagtctttcccactgttattgccagttttgcaaagaatgttctggctcatctctgacttgttagctttcttaaactttttggtagctaaaaatccagaggtcagcgttatgctaagttctgctctctgcacttgaccaaggacaagcactgattagtattcaaaaatgatacagcctgtatttttctctgtaatgttttaccctcaccaagacgacagagcaagggggtcctgtctcatggggcatccatgagacgtgactatcgtcctgtggttccaggaatctccagggtcaagtgccttttacttggacaccaaattcatcaaatgaataatgtgcccaaagtacttttaaacttctaaccataata

SEQ ID NO: 53479 - DNA, 1111 bp, Bovine  19866881949936
  misc_feature (1)..(1): n is a, c, g, or t
nattgtgcacatatcattttgattttgtggcagaagagattttcatcttccttcccctgtctccccaattacaacttaccactttgctcatcaaaggacatgggataaattttacattcatcatagcaaatctagaattccaatatcatgtgcagattcagacaaattttttaaaaaaaaattttattggagtatagttcatttacaatgttgtattagtttctgctgtacagcaaagtgaatcagctctctatatacatatatccactgtttttgagattcttttcctatataggccattacagagcattggccagagttccctgtgctatataatatatccttattaggtatctattttatatatagtagtgtgtatatgtcaatcccaatcttccttcccaccccccatttcccccccagtgatgtttgttttctacatctgtgactcaacttctgttaaataaataagttcatttgtatcgtttcttagattccacacataaatgatattatatgatactcatgcagtaagacaaattttatagatttttacagaaactaacctgtgtagttttgaggtttttttgtttgttggttgagttggttgattggttggttttcggcttaaatcagtcatgctctgacagtatcaaagaccatataatgtctgaagattcctcttgtatttatgactcataattttccacatatatagctctaaaaaaaaaaccccaaactgctaggtatggatgctcattaaattgctttgcacaagagaaaggatattgcttttattacagtcaaaatcaaaactgaataaatatccctaatatccctacaaacctctccaactgctagaataaatatcccctaatatccctacaaacctctccaactgctagaatcatcttccaaagctttctagagtcaagcacaccacaagttattgtcctcctttatcttccccatcctctttggtagtcaggttggagccatgttctagccaatggggatgtggtcagaacttaagtcacttccaagtctggccataaatgaccctgtaagaatctccagctctttcttcccccaaccccccaccttgggtgat

SEQ ID NO: 53480 - DNA, 1201 bp, Bovine  19866880113118
  misc_feature (1)..(1): n is a, c, g, or t
nagaatagcattgaaacatgtatatcatcatatgtgaaacagatcgccagcccaggtttgatgcatgaaacaggtgctcagggctggtgcactgggatgacccagagggatgggatggggagagaggtgggaggggggttcaggatggggaacaccatgtatacccatggctgattcatatcggtgtatggcaaaaaccactacagtattgtaaaataattagcctccaactaaaagaaataaattttaaaaataataataaaataaaatgtggagagctagtcaaaggaaaattatgtttaaaattaatgtataatatcaattaaactgaaatagaaggctatttaatagttggtctagttaacccattctcttgaatatggataacaatgatagtatcctactttaactgcaaatcaaatgtcaaaattagaatttgattcctttacagaatccaagataatattggaaaataataaagatagcagcagataaaaagctaagttgctataacctgaatatgtaattttgtgatttgttttgtaattttatccatacttggtgggaatttccagcactggcgaaaccacactgagatcgatctttgtaactgcagctagtacaacacagatgaaaaataaagcaccagaaagggtaaactgagtgtctggggagggctctttgcagcatactgagaaaagtttcaagatgaccacattttaaaaatatttctatattttctgggcagagaaatatgtacctgtgtttcttaatgtcattgattccattcttcagatttcccagtctttctgttggattttgcctacaaaaagagttttcaatcagctcataataattatgcttgagtgaattttacattcaaattttatgctttttctttatccattcattgattttgtcagtaatatgtataaaccaggcacatttgtgtacagggagacagaaaacatatgccctctctggaggagccacagtccaattacagtcagaaatatgaatatatgtatttatatatcccagtatatagctataggccatatatgggcttcctttgtgggtcagctggtaaagaatccgcctacagtgctggagatctgggttcagtccctggattgggaagatcccctggagaagggaaaggctacccacttcagtggtctagactagagaattccatgga

SEQ ID NO: 53481 - DNA, 3718 bp, Bovine  19866880382365
  misc_feature (1)..(1): n is a, c, g, or t
nccctgggcctttatcctggctgagagactgaagtagatttactggggacacatacaaccatggccacctctctggaatgccctgcagtggcctctgccctatcttgagtcttcaccagtttcttctcctgcctccaaccaccttcatccctcccctccctaccaccatgatttcctcaagagttcagacctctagaaacaaaaatcaggaaggcaggttgtctaaggaaaacttctgctttctgcaacacacccctatcctgaggcaaaggagccccagagccttgctgtttggaaatggtttagagaaaaatgctttcataatcttatcatcctgggacacaaacatctctttatcatctggggaagctgatcatttcaaaggggcaaatagtcagtggccgcccacttaggaaaattccttctgttcctctgggtttttcagagttctggattctcggaaagaagaactggaatgcaggggtgaccgatgaatgctttcagagttctttttagaatcttcactggtagcacagaacctagcccttcacagtgctcagaagacatctaaatgttgccatgttgaagaagaaatattggaactggggcttaaaaaatttcaattgtcaagagatgagtgaggattagggaatgaacaaaagcatggggaaatgaaagcatatagtttaagtaccaagaaagcgaggactttatccatatcattcatctgatgttcttcaccaccagccttgggagagcacccagctcagtgaatatttaatcagtgaatggatttatgtagagaggagagaggaataagactagaagacaaagtctagcagtcaggtctcagcaggaaacagaatttcctcctaataactcaagctccacttaactgaagggatgacttaaggagagcaataagaaaggatgggactagcaacaggggtttctctggtggctcagacagtaaagaatctgcatgcgatgcaggagacctgagttcaattcctgggtcgggaagatcccctggagaaaaatatggcaatccactccaatattcttgcctgggaaatcccatggacagaggaccctggcaggcaaagagctggacacgactgagcaactaacactcactttttttctagcaacagaaggctgatagcagccctgaggctgaaagagcaagaggagtcacttggcagaaaagatgcagtaattaccagagacaagtactgaagtggggatgatgtgaggaagaaatactgcaatctctctctcctccagccctcctttctcctgccagggcctcccattggctgaacccaaccagaggccagagatggtgagagcaggagagaaaaggttggagaactaaaaacagaatcagcagcccattggaactgagctgaactgaactgaactgaaactgaaagctgtttttctttttattgagatataatggacacagaacattatattagtttaagacgtacaagctaatgatttggtatttatatatattgtgaaatgatcaccacaataaatctacatccatcaccacacatagctacaaattttttttccttgtcatgagaactttgaagttttactctcttagcaactttcatgaaaggtggttaaaaaaaaaaaaaatagcgccttcccttccctgtgccttcattcattccctcttctcccaagatagtgccaaagaaaaagatatatcatctcttatcatttggattgaaaggctattagttgccattggagattttgaaggaggaagtgacaaaaaataaggcatggggaaaccttatctgtgttcacattccagcccttccactccctaactgtaaacgtgggctagttattaatatttaaaactctctgtgcctcaacttccttatctagacaaccaaggaaatgatggtagctatctcgtatggtagttatgaggctcaaaagagataatctaagtgaagtgcttgggcctaatattattgctttttaaaagcctaccttggatcagatttaggcaaatttgtcttatattgaagtatttactatgaaatcaatgttccagcaaggttttagtgaacgtgacaatcataaggaaaaggctagagtttgttttaatgacttcatgactatgtgattttattatttttgtctacccagctaagaaattcccttccctaagcactgatttttccacctttaagtaacattagaacgttacagaggctttgggtaacacagatgaagtccacctacctgggatttcaaccatacacctgtgatttcactaccaatgcatttctgaaaattgcttctttagcatttcagtgtgtttattcgaaagaacaactgaagcagaaagaaaatcaagcaaaaacaggaggtcttcatttttaaactcatcagttggcaagccaaaaatttgctcagatctgttgggggttcagatgtaaaattggcttctgatagggaagtcagtagctacagtttaaaactccgaagcacgttttcttctccttcccctacccacttccttgttgttctaataagagtgtcacatgcttccctaatagttaagatgtgcaacccttggattgcaaagtactcctgtttataccaccattaaaatttaaacagatatacacttaatggaaagactggctataattatggttctttaaacccccttcccaccattgctaatttttagtgctgctataaaagaaacattacttttactgagttcttgatgaatatttggggaaccttctaaaattataaatgcatttacaattctgatgcaccaatttaacttgcttaggttaaacagcaggacgatgtaaaagtatttaaatataattttcatacccaagaattctagttatttcaacatgtaggtgagccttcaagatgagtcatacagggaaattgcttatttttgtaatgtacactttatacaagtaaatgaatacttccccagtgaactaaggtttttttaaaggtagtgtaaaaaatagtatctctcgggacatgaaaggccttaatcaatgattttcaaggacttcctctgtcattgcttaataacattcaaggcttacagacagacttctgaattacatatttaaaattgtatgtacaatataattacacttgtttcttttaaagcagcaaaaccaggcacatggattggttgggatgagaggaaattcaccaaactcttaacagcagtcatacatgggtgcgtgcatgctaagttgctcagtcatgtccgactctatgaccctatggactgtagccctccaggctttttgcccatgagactctccaggcaagaatattccagtgggtttcaatgccctcctctatggatcttcccaactcagggatcgaacccacatctctcatgtctcctgcattgcaggtggattcttcaccgctgagccaccaaggaagcccagttatatatgggagtaggactaaaccaaagttttaacaaaagtgctagtcccttcccagggatgtttgatcctctttctatactttcttttagaatatggtgtcagaggcagtggtgaagagcgttggaatacccactccatcatctactaccgtgtgaccttgcactggtacatacagctctgcgcctgagttcagtcgtgtgcagaaaaggataacaataacgcataccccgtataat

SEQ ID NO: 53482 - DNA, 5327 bp, Bovine  19866880413905
  misc_feature (1)..(1): n is a, c, g, or t
ntatataagtggctgaaggaatagcatctcactataaactcgtcgaatcatggcaggtgacatctctccactcaagccctagatgaatcaaccaactctgtggttacacttggcttatcttctcatctcctcttttcacacttaaaactctctgaagacgtcagggtttatcaaggatttattatgaacacaggagggctgagaagaagcccaggcacaagactgtctggctcccttgcttggttccatccaattcttgaatggctggatcctgttaaaaagagattggacccaatctggccaatacagatagcagcaatcccctttatgaacttccatgacaagaaggacaaaaagccatccatttggccctgtatctgaaaaagatttttaaggtattcctttggaaaaaaacaaggcatcatttctaccttttaaaaaggcgatagagaaaaaggaagctgactgccatatcaacttaagtatctaaacacaacttaactgaaatgaagcactgcctgactcagggcttagcctcacacaagaaaaagtccttatgatgccactaatcttttgagcagcttgtcataaacttaggtcaccaagacagccctgcttctgccaagcagcatagcagcttagcgctctaagaaaagatttactaaaaaacagtgatgcctaacttttgcctttatgagtgatgcacataccaattcctatcttgctagaacctgttacacacaaactagcaaaatgattagaagtgtcagaatttgcaaaaggacccagggaactactcattcagtcttgtagcagttatggctgttctgagcaccagtgttcaatataaagtcatatgtgcttatgcactcagccgcgtccgactctttgctgccccaccatgctcctctgtccatggaattctccaggcaagaacactggagtgggttgccattttcttctccagggaatcttcccaacccatagctcgacaaagtcataggggaactgtaaaaggattaattccactttcatgagaacataatgtggcaagcatgtgcacatttttcaagtgttaatcttagaaaaatttgtctgatttttttaagtttggggaaacagtattaaaatgtattcaccagaagcagacagaatagatagggtgtcttgttataggatcttgacggcacatcactgaaagaatgatttctccagttagggtatccataatgggaaaatgcattttaagacaaatgaaacaagacaccactggctttgccaaacgcttcatctatcttttttgaatgttgtatctgggcctaagtaatgtgttccctggagcacaccagcaacacggaaactaaaaggcctccttgcccaacaagcctcaacacagaacaccagtcctccaggcttgcttcaaagaggataaccttgaatttgtcatagctagttagtgcttatcaaaggctcaattgaggaacgtgatatttatgaaagattatctaacagacttattttccatctccacctagtctaggtgctagccttgaatcaactcccgggcacaagacttgaatccttttttctctgtcttttctactcctaaagaattacctttactaatttataataatctaatggcagcagtttttaccaaggagtatttgttgtaaacactacacagaacagtttccatgatcatattcaccaagtccttgcaggacatttttaaaaagttttatttaattctttgaagaatttatatggttttgctcctctgatagtgcaaattatataaccaactgtgttttccttttacctagagatttacagtgaaatacaacaatcttgtcctagtcaactggttcttaatattagactattcgttttctcctttccatgatacaaactatttccgatttagtattcccagatattcccagatattccttattatctgttaatatataaatgttattttatatgtattagtatttatatctcctactgtgatattctttatctaacttgctagatcaaacctttctggaaggaagagaggtatcaataaaacaacatgaaaacatacttgcaacatgaatctctgcatgaactgacatgaacatacccccaaattaatcacataaaactttagatcacatccctttgaagtgggatcatctaatcagctctgtctggaacaccaaacagaacagtactctgtggagaggacttgcccaaaggcagaaacccagaggaagcagaggagatgccagtgtacaagtcagcaccacttcccaactaaggccctgcctggaaatccaaatgactctactcaatttaggttaccaacctcctcgccactggctattcggtgagccagatcttttaagtttctcatcattctttcatcccgaaaatcataaggaaatgtttctgtccattctgtcaggagctgaagaattttcggtgcaatttttcttatctgattctagggaggaaaagcaaactgaattcagcgatatccatcaaataaataattacaaacaatgctactgacaaacttccagtgcaaagtctttgagtctaaagaagctctagtgcccctctcccaagtcaatgtcaagtgctaccaacttcaggaaggacctagggatcttccatggcactggacttacatttcttctttataccattccccattccctttgcatagccgtgatactcttcagcccagggagaagccacggttacttcaggagacccacttcacaagatttaagccataatgctaccaaacccaatagaaaaaaagtaaagttcaaaatatatcattaccttatcactgttgggatcacttagtctctggtgctcaacacataagtggcaaactttggccattagctcatacggatgcataaataaccgagaactcaacaggaaggtaaatatgtacgttctctgtggcaagagaaaaaaaaaagttatcatggttagagcctacatctgaaactagtatcttccctaaacctgatacatcatatatcaagttctcctgatcaaagtgaaaatgctgtagtttcaaaagtgatgcttactagtaggaaaacaagatggatttctcctttaccttctggtacatcttttcccttaaaccatactaaaaataacagaagtacaggataagttgagctactaaattattcacaccacatttttatatctaccctctgggagcctgcataccaggacatataactcagcccagtaaagaagaatgaaattcagcccatggagatcaatctaacttacatacaccacccatacagaatcttgttctgtgtccaaatattatggtaacccaatggaaattaaaaaacaaaaaaccacccaacccacatcagttcaaggattctccagtgggtccagtattacacactggggcatttgtgtgcttgtcagaacattcaaagacaggcattcaagtcatctgtttacttgctcaaaggctaagcaatttgataaaacataatatcacactatatacttttctttaagcacactgtctcccaagaagccagtaatgaagtaatgcttatttgttataatagcttcagactcccaataaaaagaaaaattccatgggttttttctccccctgaggcacccttttatggctcataaacacttacagggctgaacaagggacgcctttttacttttgattacaagttttccctgtgtggcaacatatttgaaaatgctatgtaacaaatcacacacagagggagataactcagtaacaaacactatggtgaactccaagtggcaagcacagactatcgtttgcacgccaaggtcattattacatttataaaaggatttgaatccagtgtctggatattttcatgaaatctttatcaacaagcagctgttgagaaacggggtcagccacagcacaaaggaagtggggagaaacatcacttgctctagaaatagaaaacccgggtttgattgctgatgtcgagcgtgagaccatgtgccaaccgaatcccaaatttcaatttttttcctctctgagtctcttggaattgctctaaagactgagaaaatataaatggatttcctgaattagaaaggattacctatacaaatgtcagggatcaaaggaaaacataagcaagcatattatctgatgtccaggctacaaagaattgcatcttgaatgtaactcgtgttctcttttctaggaagcttccctgtgtcacttaacctttctcaacatagtgatggtcttggaaaccaaaaaggcactaaacatttgaggagcatccaaggttttctggcatttctatttaaggatcatggtacacgcacgagtcaaaccttacagttatttagatggtctctgaccgtctacactgtgatgccaaccctgaaaagaaaaacttaaattatgcagaactattgtatccaggctcaactgggtctcaaagcactcaataatcaacatgcaacttcttgttagaaaaattcttagcaacccagatataattctggagcatccagggtccctgtctgctgctgctgctaagtcacttcagttgtgtccgactctgtgtgacctcatagacggcagcccaccaggctcccccgtccctgggattctcctactctattgtaatttctgctggataccaaggatgtgtttcagaaacatgtgaatacttacatccggataataatccacattgggtaccaagtgctggatgagcgcttccagagacccggagagggaggttgttgtcatggtaatacaaccccccacagctgtcctctgcagactgatagaggtttcggttgtaaccactgctgtcaaacatggcagaaaagggaggagtctgaggcatgctttcctaaaatgaataagaaaggaagaaacacggtgtcagtaataggcagtcccaaagaaaagcaaactttaataggcatgaggctttcacagttatgaagaagcaggcaagttttaacccaggttagattctgaaacaatctcagaactcatcaagaagtacactgcttttgaacagcacacgaatgcatattttttgagtagcaatcgtgtccaataaagtaccatgaaatacgtgaatcaaaggctccaatctatgcctaaagtcaagtctctggctgctgtgtttagatcttatgccttcacatttggttaggaaggcagggagaggggttgagctttaaagtgctttatcctcccagtcaagtatcatcctaaggggaaacatgcaccttcaaagtggtggggaaga

SEQ ID NO: 53483 - DNA, 1376 bp, Bovine  19866880415772
  misc_feature (1)..(1): n is a, c, g, or t
ntttaagggaaagtaacctgagaaaagagatgttcaattttctcacagtaataagcagatgtgtgcatccatttacctggttttcagattagatattgctctgtaaaaactgagcagaaatttgagtatttttctgtatggaagtgaaggatcaagattattcatgtactgttgattgaagtgaaagtcactcagttgtgtccgactctttgtgaccccatggactatacagtctatggaattctccaggccagaatactggagtgagtagcctttcccgtctccaggaaatcttcccaacccaaggatcaaacccaggtctcccatatagcaggcggattctttactcgctgagccagtctttcagaaattgacatctcctcgaggtcatagagtagtagttacagacagcagatcagtagatccaggtccaaacaaagaccagtttttggtcagaaagatttcagtttaatgaataagaaaactacagatgttaattgaagttaacctgaaaaaggacctattaacttctttattagcagacaaatgctatgtttgtgtcaaggggagggagtagattcccctctagtcccactaagacaggacaggtcatggaggttgaaatagacttaagcaggaaaaagacagctgagtatatgtcgagctgaaggttgatctaactgtgaaagatggcattagcacagtttatttccataacatctttccagaaagttaagcagtttttcttccattatgtcaatttttccaaggctagtctcgaaatgctctatgaatcagaagacagactcaactggaataatttccagtttatctgatgaggcttatttgttatatgatataggattttaaaccccactagaaattaactagggtgaaatacttaatataggaaaacttaactgagacatcatatgtttattttttaaaaatcaaaatgcaaaatattggcagatccatttatttcttacttagcagatgctgtaaggcaaaatggccgggaaaaaatattcaataaaattccagaatttacccaaatagcaatgactttaaaagggacccataactttaaaagggaccctagtccaaaaaaaaaaagacaaaaaaacaaaacaaaaaaaataaataaaagggaccctagtcatatggtcttatctgagtacagttttctagaatgacctaatatcaatcacagacatgcagattagccttcattgatgccaatattttagacatttggtaagatatttatcttcattccactaaaaaaacagcttagtgcagtatattaaagcagagaagtaatttatttctgcagaatttccaagacaaattttctgtgccatacgttttcttaa

SEQ ID NO: 53484 - DNA, 1127 bp, Bovine  19866880418787
  misc_feature (1)..(1): n is a, c, g, or t
naaagaaagatattaaatgagtaggggataagaaaacagagttctcacaccttcagttgagttcagtcgctcagtcatgtccagctcttggctaccccatggactgcagcactccaggcttccctgtccatcaccaactcctggagcttgctcaaactcatgtccatcgagtcagtgatgccatccttctcatagcttggcccctgttaaaatagaaattatatttgtattaaaaatttctaaatcttgatattcaattatcaaatcccaatcaccaaaaaagtttaatgaagttacttgtttttaaaaaattacctaaaatttttgattctcttgaaaaagtgctaagactcctttggctataaggattgaaaacgatatttaaaagtattaaacctaatctagatgcatgggatgagggggttggagagaagttcaagaggaaggacttggatatatatcagttcagttcagttcagttcagttcagtctctcagtcctgtctgactctttgtgaccccatgacttgcagcatgccaggtctccctgtccatcaccaattcctggacttcacccaaagtcacatccatcgagtgggtgatgccatctagccatctcatcctctgtcgtccccttctcctcctgcccccaatccctcccagcatcagagtcttttccaatgactcaactcttcgcatgaggtggccaaagtattggagtttcagctttagcatcagtccttccaaagaacacccaggactgatctcctttagaatggactggttggatctccttgcagtccaagggactctcaagagtcttctccaacaccacagttcaaaagcatcaattcttcggcgctcagctttcttcacagtccaactttcacatccatacatgactactggaaaaaccatagcctatatacatatatgtatatgtatacatatagctgattcacttcattgtactgcagaaactttacattgtaaacaactatatctcaatttcaaaaaagaagaaatatatttacattaaaaaagtaataatcctagatgagagtccatttatctacactggttttaggcagaaaatgcagagagatttactggtgtgtgtcttttttt

SEQ ID NO: 53485 - DNA, 1616 bp, Bovine  19866880597978
  misc_feature (1)..(1): n is a, c, g, or t
naagaggggaaaaggtcatctaatgaaccgtttaaagaactcagtggaatatataccagacaaacagagaagaagagaaggaaggttgtgtgtgctttttcgccttgactgtatgagaattgctcattccctcctgtttgtgattttcctccatttaagtatgaaaacatctgttcatttaaaattttgtaagatgctctggtaaaacaaattaccactgttgaaaaaataagatggttcttaggcttgtaggtaagatgccatttaattttcaggtaattaatctcagcaaatgttattgtggtactttttgaaaaggagctgattagttagtaaagcatggatatagggttttcatctggaaattcactggggctgtccctctttggagctttaacctaaggaccactctagcaatgaattagcctgtatgcctttctttgataccagcgtcacaactgacttagatggctaagtgtttggcaatttttggctggaaaaggaagaataaaagaatacccctaacttacatcatgataactgccccctagggattgattgtggagttatttttttggacttaataactattttaaaagtcaagaggttacatttatctataatacgtgcattgcttttaatactaatttatcttagtgcgtggctgtagcatgatgtagtcacaaaccaggcaccagctggtagtagcattacggggagaattgccatgtgaaagaatttgattgtaaacattagcgctgactcatgagtgtgacaaaaacagacacgagccgaatggaggtcagataccaaaaaggaatatccaaggcttcttttgggtggggacacatgttatatgtagaagtcaggaaggtggttaggggctgagtaggaagtgatggtgtatttctgacaaatagttgtttgtacttagacaaatgcgattgggaatgttagaagtagaaaaatcaagaaggtgggcctaaagaaaaagaattaggaaaaggatgctctgacttgagatctgtgcatcttcacctcccagaagaaaaccaataggttcctatttcactccagagaacattagttgtatgtggttcctattatatggaattccctcagtagctcatctaaaataccactgtagttgtttcatggcccaacttgagtcgcactcccaagagcaacccaaggaaagaactaaatcttgcaggtctgaaaagacaccgtatgtatatgtgtcttttaaattgttagagcaaaactgactgcctctaactgccctccaccaaggtggctatccagcatcaaagtaagagcatcaagtgcagatctcttgagtttgtggcgtggatgcacaggcagagtgaggaggtcatcctttgcttgtttcctggcagacatatcggaagaatgtccagcagatgatccagtgtctgatccgcaagctggccgcactcagccagtatgaaggaagttctggccaaaatcagttccacgtcgacagatcgactcacagttctcaagaccaaaccacagtccatccaaagggacatcatcactgtctgcagtgacccttacacgttggcccagcagctgactcacatagagctggt

SEQ ID NO: 53486 - DNA, 1437 bp, Bovine  19866880641823
  misc_feature (1)..(1): n is a, c, g, or t
natacaaagttttcagttcttgtctaacatttaatgtcctttctacctagaatacttggccctgtttctttccatcaagaaaatctcattaggaacatatcttaccaagatacatattcttttttgacagaatagtccaaaaataccttacacaaatacctattgtatcatttctcaggctgtattataatccttttttatttttgatgtgttgaattgaattgaatgacacttctgactacctgtcactagggcacttaatattttcaattattttaatagttgcaatagattggtcaacagttatctatattttcctaactggaatatgcattcattaaatagctgattgagttagagatacattgtatagctatgaataggagccaagttaactaacttttgaaaacactaaactttaggtttcatatccttaccaaccaaaatcactgatcaaacctatatttttacagggaatatgatatttcaggaaattagtttgttatagaatgttttactgctttgatattatttgaaaaatagaaaaagaacaggagtgtttattattctagattaaatttcatgtctctttaccacaattgcaatttcatataatttttccacagcaataaaataaaaaggatcaaccataagaaaacatgttttagcattttttaaacatctttatcatagttttggcaaatctatggtaaacctttggaaacagtttagacaaacattggataaatcagctctaaaacagcagcatttaaatggtctgtaggtgtggcgaccacacacctcagttttcctggcattgtctgagcttactcttattgtcttggcacaattgtcagcagcttctttttttctcagtaagatcctagtttgcacagtagaactgtagccatcctacttacagactgtctacacagagattaaaaaggagacaataatttttaatgcctaaatgtccccatgactcagataaaaccccctgaattttcatttttcaataaaatctttttatttcacaaaaacagtttttgtaagtttttaagtttatttctatttttacagatttcctttaaatatgattatctctcctcctaaaaattgtcttataaatattatttatttttctctcaaatgaaatgtgttttaactttataagcatattcaagtattaggtactataaatgcctactggtccaactcttcaaaacccaggaagattccattattaatggagattgaaataaaaactccctcctattcattatgaactgttggttatactcatagggaaaatctcttaggagctaataggttctctttcagtaatgtgttctctgtgatgtcaaatttcctgttcatatgataatgatcttttttttttccccctatgctttaggtagtggagactcaattgttaca

SEQ ID NO: 53487 - DNA, 1462 bp, Bovine  19866880677438
  misc_feature (1)..(1): n is a, c, g, or t
naaaacctgaagatctagaaacctattctgctgcattcatggcagtgccttctctcccaggaaactaaattactctgggtgagaacagtcctcagaagtaccattcccaaatatatatatatatacatatgtattggctgcattctaaaacaatcttgaccaattaataggggtgtgactacctactgctattcacatagcatggaggagctgagagtatagaggtctagaaaattttctcttaagattaaatctaggagataattttggaacactgtgtagcaagaaactagtatattccaaggtaggtaaagcggaagtttacactatcccggtttttggagagtgggtgacatattgttcaaaagcaaaaagaagttaagctcatctcagagttcaaggccaagcttaaacaggttaattacacccctctttccttccttccaaatgaggcaaacaaaaaagtccactagcctctattgcaaaacctgatcttcacttcctgtactgagcgaaactattctaaggccggaaaacagctgctgcccctactctgaaagaggagctttcattagtgggtgatacagtctttgcctaatactcctggaggtaacgcgaggaaaagtttcttatgtgtgtgtacaccagccttacagccatgtctaccatcaattgctgaccatatgggctgcactcaggcaacaaacgtgccatgagggatgcaccttaaaacaagaggcagagcagtaaagacctgtccttagcacactggacatgcatcctgtctttaccgcccctgctactgttgaatcatgaacagagcatcctcttgtattttctttctgacttaatctgctaaaaccattatcctttctctcctaccttcatcattacaaatgcctgcatctacttgcttattaaatttcccaataaggagagagagagagaggacaaaagttggtgatagggtaagaatactgttatggcacttggagaccacactcaagaataaaaatgcaatgaatcagacatggctgaaaaaaaacaaatctttctgagggagtttcctggtgatctagtagttaagattaagactccgtgcttccactggagggggcacgggttcgatccctggttgaggaactaagattccacacggtgtgtaggatgatcaaaaaaaaaaagcctcgtgcacaaagtgcaggcatacctcagagatattgtgggtttggctccagactaccacaataaaacaaatatcgcaataccatgaatttaaaaaaaacaacttcctgatctttaaaacctaaaacaaaattgttccaatttctgtctctcatacccactatcatggactaaagaattccatttccaacttcagggctaacctctgggtagacccattaccttgtcattgtccaaagggtccttctgcacaaaggcttgtacaaattcttctggg

SEQ ID NO: 53488 - DNA, 1810 bp, Bovine  19866880732751
  misc_feature (1)..(1): n is a, c, g, or t
ngctctaaaattacatccagagaaatttaaaacatgaaatcaggaagatggtccagttggcccttggtattctcagagaactggttgcaggacccttgcagataccaaaaatccacagatgtttaagtccctaaaattaaatggcattgtatctgcatataatctacatacatgctcctgtatacattaaatcatctctagagtatttattattcagcaaaatcaagttctgcttttgagaaattcctgaagtttttccctgtgaatatttttaatctgtagttggatccctggtacccagggatatggaaggctaactgtacaatgccaactggactcaagtccaaaaactaacagtgtaagtaaatatcctgagtaaacaaatgagaaatgagatagtgttcagtcataagattcacttgaattttgcgtatcttctttcttgagaaattaggaagaatctgaaccagtgtttccccagatagatgtctcagaaccacaattctctaaagtactctcatgaggagaaagtgatccactctttagagggttcatgagctttttaaaggccctgaaaggtcccaaagtaaactgataacttttcccaaacttacttgatcatggaatgcaattttatgtaacatctttcaacgacttttaaataccctcttttacaaaatcttctcctagaaaatcagataagatgattagaaattttgagatgagctcagtatgtttgaaaacttgtctgacaaatatatcatgatgtccatttcttcttccatttaaataaagggttgggcttgctttctttatagcctctttcaaacatgaaactgtataattccaaaacgtttaagatcaggtctgacattcatgtctctagctaatttttagaaaaacctgaactgggtcaatcaaatgcttataaacttccaccacttagataaaatgtctgtaacccttttaatatattctcaattatgtacatagttttaatgtataaatattccctgagtgaattatctacttaggggacttttttcattgatcctcatgttctcctggtctctctgagtgtgtctaaccatactaaagagataaatttaaattatttttaatgtaacagtctttttcttttccattagcatagataatctagaattcatggcattatggatttttaaatgtcagagattgtaaagctgtcttgattgttacagtaaaaacttcattaagggctatcatgtattcaaagtagagtgtaattcaaagcagctgcacatccagttctccctctccagatgtactattgtcctctgaataaaaacatcagataatctaagtattctttaatttctaggtgccagaaatttctaggtaactctgttttaatactgttgtaatagccccttgccatcaaacccaccaacaatgatgcttccccacccccagtccatgcattttacaaaactgactcctattagaacgattgttcagcccatcactacatcctttctaaagccttatattttagccttgcacttcagaaacatgtcacattttaattcttcatttttaaagatttttggttacagtaggaaagactctcttctttctcactgaaggaaaatattcactttggggtctgacttttctcaactttcttttctttctgtctataaagtctgtgtcatttttcttgaaaggtgacataaatccactgaaatgcaatcttttgtagttatatgtcataaattaaaataatgatagtttcctaataagaacagctgtgcgttaatcactttcc

SEQ ID NO: 53489 - DNA, 1518 bp, Bovine  19866880825875
  misc_feature (1)..(1): n is a, c, g, or t
ntcagatcattgtattgttgaactgaattaagatatggtagatactatatatatacatacacacacatatatatacatgggtttcccaggtggctcagtggtaaagaatccccctgtcaattcaggagacctgggtttgatccctggcttgggaagatcccttggagaagggatcaagcttgcaatttcagcactaataggcccaagaaacacgagtgtggttgtcacagtcacatcacagaggctccaagctgactttactgaggatgaaaattcattttccaaatcaaattgcagaggaacagatgagttaacattgttttatgggcatttgacgttctgacatttgagtcagaaaggagaaaacacccagcctctactttatatgttatttcctcccttttatctgagaaccacaatattccttcttcagtcagtagggatttcagaatgtgcaaactgctccctgggctattgggtacttttcgaaacagcatttaggttattatagcaaaacacaatgagatttaaaacacaacaacaacaaatggatgtgctttataagtaactgtcaaaaattactttatttttaagatttaaattagacatcttggactgttttcaagattttttctatagagtactttgaaagatacaacaaaaacaactcaaaaccctttcagtaatttccagataaatgcctccaataaagtgtgtgtttaggtctttcaggctatgttattaaactggcaactcttctctccttcaaatatgctagggttttatttctctgtctctttctccgactctccctgatctcttcctcccactccttaccttaacatttcagagtgaagcaagagatacctttatgccttttaggtattcaaaaggcatatattggtttctttccctaggaagacacattttgtttttactgattaacatttccctggaagaagttgttgggaaggagaaaatttacctcttgagtaatgataaaatcgacccaagacagactaataggagaaaaggaaacacattttatttcatgggagtataaatctaaaaaaaaatggcacctaaaaattggcaggggcttccctagtggctcaggggtaaagaatctgcctgaagtgcaagagacctgcaacaaatgaaactccgtttcgatgcctgggtcaggaagatcccctgaagaaggaaatggcaacccaccccagtatccttgcctgagaaatatggacagaggagcctagtgggctacagtccatggggttgtaaagagtctgacatgacttagtgactaaacaaccaccaccaagaagtggccaaagtaagcagcttttatacttttttgacaaaaaaattaaaaaaaaatttgtaagaaactgacaagacaaagaattgtagggtttgagtgctcaattaatgaaaaatctaaacagagtttgtgcttgacgtaataaatcttaaaagtaacaatgtcttatataaacatttatgtatagcctttaa

SEQ ID NO: 53490 - DNA, 1190 bp, Bovine  19866880837583
  misc_feature (1)..(1): n is a, c, g, or t
natgggggcaggggatgttggtttgccctattgttgaagtgaaaagggaaaaagaggaatgagtttttctctttccctttcctgagaacaaagaagataaacagaacagtaagtaggcatgaaatttcttagtttttttttttttttttttactttaactggttctaactctgtaactaagtttgcttttctgcctcctaactctgtaggataagatggttggatggcatcaaagactcaatggacatgagtttgaggaaattctgggagacagtgaaagtcaggtcagcctgctgtgctgcaaggggttgcaaagagttggacatgatgtagcgactgaacaacaactctgtaggagctacaattcacatttttccctttgactgtatgctaaatacatcccctatctgttatttacccttaaaacacccttccccttgtagttacatatcagaaagaaggtcacagggcccccaaactgccgggctcaattactgggtcactgatgccagtttatttgtcattgaaacactgtctttgaaacaatgcaagaggaagaaatcaagatcctgtcacctttgttcctcatcactggctcctgacaacaagtccttgtcttatgtaagctcctggactcctcatggcagggatgtgtgtgtgcacagttcttgaggcatgagggtactgtgttccccttgccgctggctgagaattaaaaccacctttctatttcctccaaaagctttgatgggcagagaaggccaagattttggtcagcaacaccatcacctctcctttcaaacttcttctgggttctattttatctgtgttggaatagaagagaaaaactaaaggttacaaagagcaaatgttctttttttttttctgtgaaagtggaaatgtaatttaatacactgttgtgagtcactttacaggagacctggttaactgaaaccctatgtgtgatctggcatgacagacatttaaaggctgactctcttatagggtccttgtttacattctctgaaatgtggatcttcactgcataatgcatggatgaactcctggatcaatctcttccaacatttctcagttcccacctgcatgggggaccctacagcctcttgcttctagggattcctcatcaattcctcccaggtggggagttgactcaaatccagtgatcttca

SEQ ID NO: 53491 - DNA, 1823 bp, Bovine  19866880861151
  misc_feature (1)..(1): n is a, c, g, or t
ncatcatgatttatgatagttcagtaaggctgaggacctataaaatgggctacgtgcccacacggctgtgtgcttctgatgatctcaaatggtcagtgggcacacaacccgcatccctatgaaagactgtgatcaattgcagatttatgcagttgaagatgacattgtatccaccccaattcaaccagctcattctcattttctatgactctgtcatgatactgaacacaggtcttatcttgtctataaagttctcccaaacatcactaggtcattattccaatctcaggagatagcggtcacagttgaaaccacatcagccagaactgcagtatccaatacagtggtcattagacccatgtggctatctaatcttaaaataagttgaaactaaaaattcagttcctcagggcactcgccacatgtctagggctcaacagccacatacatactattggctactgtatcaggcaacacaggttataggatgtttccatcattgcagaaaattctctgggacagcactgggttattctagaacctgatcttaaaaagtagccctttgaattttgcaaaagacaaatttcaagagttctccaatgccactagagcatataagttcctccaaatacagcagggaggtgtaactataccatgtaagctaccccttcaggtcctacaagtacacagagatggcatgatctgcacagagatggcatgagtgggctgcctggcaatcgcttaggttcacttgccatttatttgagcccaggggcctcagcaaactcacagactgcagtgacatgggtttgagagtctctcatgaattcctgaatccgaacctccaagttccacatgtgtcatttccctcagatgttgttctctggtttctctcagtactacctgtctccctcatgctgttgattgcaggagagctcggagtctcccctcactttcttgctcactgttaagtactcatcagagaccacctttttgacaaaaagacaaaatagacaccgagcggctttcagattgagggtgtagagggggacctgatccaaaatgtagttagcacatattagcagagacaagactagtcatgaactcagccagaaaactttataaagttcaacaaataaatcatgagaacctaaaaataccgggttggccaaaaagttagtttgggtttttctgaaccatcttacagaaaaactctaatgaacttttgggccaacccaataaatgaaggcaccattttgactgatatctgaaaattctctaatgtctaataggagttgcttggaaaagtagccaaaacaatggatactgtccataatcactgtatcagtgaatggcaatcccatcttttctaacttctagaaagttatttcttacaaaatttatgaattaaaatatccaaactttacttaaagcctttctctcaagctggaactactggaaaatggaaagtgaattgtaatactgagaactttcaaaaaactggaatactttaaatctctgaattggtgatgttagctatctgtgtttaacccattattccagacttaaagcaaaagactttttggaagggaaaattgaggcataaatgtctgcaaggggaaataaaacaaagaccagtcaatgaaaaagagtagctcccatatttcaactaatttttccatttagaaccaaaaggctctatgaaagcataaagggattatgaagacataaaggatttaatctggtctctttaggacttaatcattacagaatcaattatcgtgtttctccatcatgtccctaatgcaaacttgtactcctgg

SEQ ID NO: 53492 - DNA, 2225 bp, Bovine  19866880905627
  misc_feature (1)..(1): n is a, c, g, or t
ntggagcagtccaagcaatgtctttcctacagctacgtgtttttgtaaatttcacaaaaggataacatttaactgtcatcttcccagactattgagtcgtttctctctgaccttctctgttcatatttattctcctgtcaggaggccttggagtgcctgtgaacattttggggatcttgagatgagagcagatgtaggttggtactgttgtctatgagccttcagttcagttcagctcagtcactcagtcgtgtctgactctttgcaaccccatgaatcgcagcatgccaggcctccctgtccatcaccaactcccggagtttactcaaactcatgtccatcgagtcgatgatgccatccagccatctcatcctctgtcgtccccttctcctcctgtccgcaatccctcatgagccttacaatcagtcaaatgacagctggcttttgctacgtgatgtggttttcaggcacgatgtgtgacacgaaggtgcagttttgcaggtgtgctgtgacacaccagcacttagcacaggaagcaggtgggtcctaaggagaagcacggcttgaaattacagactcaaaagctaatttgtggaagattatttccatcattgaatgtgtacagttttaagcagaggatttcattcatgttgattgctcagtcaaagtagaagttcttacaggtccagaatagactcaataaaacaacatatacaattatcaacctaccatacatttgatagagctactgaagtagaatttgtcagaattaatctgcatttactggacaaaaagctgcagtcattttacaaacaggaagaaagcctgtggcgggggcacagggatggtggtggtttattcctctcagtcattaattaaagaaaatattttaactggtcttattagaagaatgaattatctctttgttctttctatggattgctatttttaaaaatcatcaatatataaaaagctgataaaggaacatgcaaccaaaaactgtagagaaaaactattacagaactatgttagtagttatttccaaaaatctttttgctgttttctggatttttgcaacgtcctaggtatttttcaggttcttataatttgtaatttatggtgatttattttctcattctgaacaaatattcactttgttacctaactttggtattgtgatcttttattctttttcttaaatacatctcccacaaaccccaaatctctcttcacaacccaccgtatttctcactggggtattctttattattttcacagaagaatacatatcaagtattatttattgagaagttatgatgtccaaattgtttcatagctgtggtttgacttggggaaatttgctcagattcccagagctgaagattacctacaaaacaaagcagtttggctcatagcactgctttccagattcagtgaggttaaatgatgcacctgggaatgtgttctaagtcaagtgctatttaaatagttgacctggcatataggccacaatgagaatggaccaccctctgttatgttctggctctgtcttagtaatgacgctttcttgaatctactcatttcttcacttgtaaaaagggagaaaatgtatccaattcataggactctttgttatcagcattaagtgggtaattgacattgctattattattaatattattgaattggcgctcttactcattatcaaaatcaatgccaaataatgcctctaaagaacttcagggagttatacagccctttcaaaatcagtgtattgctttttattaaaatgtattaattatcatttctgtacttttcatttgtatgagattcacttatttttgcagccatgaatattctaccagcttttagttttgtaattgatggtgttctgactttttagcttcagcaatatgaataagaaatatagtaatacagcatgtagcagagtcttaaatattttgtcacatcacttatattgtgaagacatatcaggtcaaagagacaatagcaggcgctattaaatatccagggccttataggcatcaaaaatttttgcgcatgatttggcaagtcaaattaataaagcgtctttcttttctaccaaaattttaaaaatgttttttcttattttttcatacttatttcaaaataatagaattcaagagtaacctttataaagacaggtttccaaacttaggctctttttctttctcaccctgtag

SEQ ID NO: 53493 - DNA, 1590 bp, Bovine  19866880910262
  misc_feature (1)..(1): n is a, c, g, or t
naatggcctttattttattgagttgtgttccctctatgccaactttgatgagggtttttatcatgaatggatatggagttttatcaaatgctatttctgtgtctaatgaggtgatcatgtgactttctttctttggttaatgtggcatatcacattaattgactgcagataatcaaccatccctgcatccctagtaataaattccacttgatcatggtgtatgatactttttatatattgctagattcagtttgctaatattgttgaggatttttacatctgtattcatcaaagatattgacctgtaatttttcttcttctgtagtgtcttttatggttttggtatcagggtaataatggcctgctagaattaatttgaaaaataggcaaactttctggcagatacttgggtggtatatatcagatagcttagaacattcatattcttttatctatttgctatttctaaatatttatggacaaagatattcatcacgtgtgtgcctactaagtcactttagtcatgtccaactatttgtgaccctatggaccatagcctgccaggctcctctgtcaaagggattctgcaggtgagaatactggagtgggttcccatttcctactccagcggatcttcccgactcttaaagtcttcttccttggcaggcaggttcttaaccactaacactacctgggaagctcattcatcaccatcatacttattttaaaaattgaataaaactaaatgtccaaagaaaggactcattaaaaagctgtcttcatttggtgaactatatatgatgtagctattaaaaactttgttttcagaacaactgcatgagaatattgcttagtggaaaactaagcagtaagcctatgtataaatatgcttctaatcaaaatgaatatgtaatatggagagatatatttgtaagtataaaagaagactagaaactattacatcataattttagcatctcagggtgctagagttatagattttaaaatgtgttttacttataaacatatccaggtcttcctcagtggtcatatgttatcttaataattataaataatcaatgatttaacatttaatcatacaaataatggatattgaattttatataatcattcattcatttacccactaattcatcactacaccttttccatctttcacacattgtgtttattttcttgtgatttggctctgtttagttgatatatttttagatcatctagttaataaatttggggaatgaaattagaacacattcttccaaattccaaccaagcattctttgcctgagactacattgcaaaaaaggaaataatttgaaaattaactaaaagaagcaccagaacactaaaaatgaataaaaagaaatcagtgcaaatatggtttgtaccgaaagtttcaaatcttgggcttgtaagaattttggagaatatttttgaaaaactggtatccaaataaaacaagtttgtgtgagatgtaaattcataaacaaaatggttatatgaagtgagaaaggcatgagtctttgtttgcttcgatattatttttaacacgttgaaatattccagtaa

SEQ ID NO: 53494 - DNA, 808 bp, Bovine  19866880917605
  misc_feature (1)..(1): n is a, c, g, or t
nttttttccccaaagatacagaaggtatagatctcactatgccaagtaagggacaaagtatagtctctttgtccctcacttcataattctctttgcccttgtgagtttagatgatttttatccctttactgttacttcttaggctttccagaggagcagaggtagatgggtgtgttcaatctgccaaatttatccagaagcttggactcttcctgtatgacatgtttaaattaataacattacaatttatatactgaagctgtctgtaattttcaagtgtttgggtaggttttctttggccattttaaaaagctgttccattcggcaatcactaatacctgttaaatttaacttagaagagaaaagaaaatgtctcttataaagcctccaaatacattaattttctaccatacttactttaaatatacttaaaaataaaacatatgtttatacaacctgtgttcaaagttgaataaataattatcaaataatgagggttaaaagtaaaaataaaatgtatcaagaagatacttttttttccccacacacttcactggtgctgaaatgtgttatgagctatctttctttgtaatgcttttggcacttcagttcatgcagatcaaaactagcatatgttctttccctgattttccatttcttcactaacttaaacattgtgggggctgactatattactcactgatggggactaaagtagttagcttaaattgatttaaattaaatcggatatttcaaagatacaagccatgtcttgacagcattaccacagcacccatgagatattata

SEQ ID NO: 53495 - DNA, 2196 bp, Bovine  19866880946364
  misc_feature (1)..(1): n is a, c, g, or t
ncattagaaagaatttagaaacaggtctttggtaacttgccagagatcacatgtcaattcaggaatgggatttaagccaaaatgctggctttttaatgtcaagattttgagccacgtttcagaggcacctcaagcccccagttacctggtattctaagtttatacacctaaaactcccaggaggggaaactgaaacatatggaaaggttaagagtacacaaaagccaaaggagaagcaaataagtagaaagttggcacattgttaaaaaataataggattttgctggggggtgggcaggaaaagggcaaatccgatttgtctcatctcatctttcaattcagtgaaaaaaattatccatgcattagacttcaacatggttgctaacgggcacaaattaccttaaagttagtattgatgatggccagctcctttatctactcttttttcctggaagagtagttaacctacaattaattaactttgcaaagaagggtattttctccgcttaaggataagaagtctgtcttgttctattctgcatctcctgtgtcctgtggcatcaacactatgcatgtaattgacaaactacaattgtactataaccaccgtaccaatggccactgtttgctctttcattaggatcaggcgatttcttaagaaaacttttgcagccatccacttatctctattgatttatttttaaattcagtcatccaaacagcatatgataacaccccaaaggatttttttaaagccatagattgtctgacactattttgttactgttaatgttttactgactcctataccatttaattttcatacatttaagtagacaaggacttgatccataaatccagctgtgcattgcttgtcctcggtgcttggagcagagaaggttctctaggcactgaataaatacttgccaaatggatgaaatacttataaataataacataccctccattgcacctatttctgtggaaataattcccatcaacaaaaataaaaggttctgagctaatgacccagcacagatatggaaaatattcatgggtgttccctaggaaaattcctgtcctttttaaaagctctaactcacaaatgagcagtttctggtgggctcactggaatccagcaagcccttgattgtcggcggtgtgttttatcaggaacctctctgttttctagggagttgtcccctttctctttctcactgtgaaatccagctgccatgatcaggaataattaagccaaacacaaaagatccatgtgaccatttgctggtgtggaacatttgccagtctatcattttcacttgtttttgccttccgattacgtttctcaggtctctcttcacagcagcttaagaatcccagtgatgacaaatgcagacctgtgctttttttcccggtgcacactcagttgctcagtcgtgtctgactctttgtaacctcatggactgtagtccagcaggctcctctgtccatgggattttccaggcaaaaatactgcagtgggttgccatttcctcctctgaaaaggtttattaatatcactaataacaaccaacagtaatacattagtagcttacatttgtatttcacatgaggaatttacacctgcagagaatttgatgtttaacaaagtatatctcatacatttcctctctccctggcaaataacgtaggaagcaagtgaggaaaacaccatggaatcagataaacctggtcccaacctccctgctgcagggcaaaactgcgcctcccactcccctggaggttaggtgtggctgtgtcacttaaaacctgcctgaagcctttatgttctgagtcacctgttccctgccacgcagcaacaccgcagagtccccagccagcaagcgttgggttggtacagatggaggtaaccttgcagcttcttaccaaactgatgctgaaaacttagcttctgtgcactggtgctgaattgaagctcagagttttgggtgaagtagaaaaggatagcgttattgctttgccagggagggggacacagcaggctcctgcctctcaaaacgatgtgtgcgaacctgggaggattgggagaggagcttcctaatgagggaggggtctgctgaccaggatgaggttacatgcagggcctgcactcctttcatggtcttctctagaataaagaatgctagcaccttccat

SEQ ID NO: 53496 - DNA, 1226 bp, Bovine  19866880951415
  misc_feature (1)..(1): n is a, c, g, or t
nctggtggttgagactcagggagttttggatcctgcaaaatagttcaagaatgtgtttcagtctgatctttagttttgaaatagaacctgggaatctttacaactgatttattgtctctgatatggttaagttatattctggcctgatggagagcaaggattgggaccaggcttagatcacaaaatggtttaaggcttaaaatggcttctcttatgtcaacaaagtgatagctggttcgcttctcctgggggtccccgaccctgtctgcttacacaagtgttcttaaagcaacccacaaagattaaaggcctccagtcaagttagtttgggcaccagtctgctctattttgatacgccctattcactggtaggaagaaaaatggtgcttcctggcttcttctaagcagagttgagtggcgcttatccgtttcattaatattcaccaggtgctggatcctcagagttcaggcctgtgtgaaaaggacacagagaatggttttgatctggtgatacagactgtgatatatctggaggggcacgaatgggttccaaaatgagcacagtgcttctcaaggctgcgaactgaatatcaagggcaaaggtgggcaagaaagagctcagatcacatttctgtccatgtttgacctgcctcgaacaccaagacaaccgtgtctccagaggtcagaccttttactgcaattaaattttctgtctctgtagatgttgtttagcaaacttcagcactggcagaacaaaattacaagctcatgcagaatgtctggtggaacacgggcagattaatcagagacatctggcaagttgctggtatgactgcctttcactaagaacacttagactatcatttgaaactattgttcttcggaaaggaaagataaaacaaagacttgctgtttgacttcacatgttgactctagtgttcggaaggacaattagtctcatttgtcactcccaccccaggagcaaaataggtaaaagtgggacatgctcgtgagtcacccttttaaacaagatatggaaaaacagcaaggaagagtatgtttgttatcatttgtccttcgtttctaaagcagtgctgaacatttcaatctgccttctaaaaatgcggctcttctactgagcaaaagtatttccatggaatgaaggggcagaggagcctagtgggctgctgtctatggggtcgcacagtggacacgactaagcgact

SEQ ID NO: 53497 - DNA, 1160 bp, Bovine  19866880966133
  misc_feature (1)..(1): n is a, c, g, or t
ngaaacgtcagctgacttacattgcagcacccccttgttttgtaggagatgtgcttcttttctatataaatgttaaggagagggaaattatttcatcaagtgtgtggattagttggattcctctgagaagcaggccccaagaagcagactgaatacacggtttatttgggaggttcatgacagatgagacagagcaagtaaggcagccaataggggcccagaatgaagagagctaccttgggggaggagacatgaggtgggcaaccagactttaatccaacttagaggttctgggaaaagatagcactcacacatcccagttatcctgccaaatacagggaatttggcttggatatttatattcccaccctcaagtaatttgtaaggatacccctagagagtcattaatttccaggcatttcaaaaggcaaagcaggttctagcagtccaagggtaggtatttgacattgtgcatgaaaatggcaaaggacccaagaaaaaataaggagaacacacccacagcctgtcagaagatctcacatcttcaccaaggcttaatcaaaacaagtcagactggggttgtgtatggttattctgtctgttctgttgttttagcttattcctggaaaaaccttacttttcttggaggtaaagaatctgccccactgagaaacctgcactatttcatctttttctgaataaagcaacctgttatcaaagaaagaaatagcttttggaatgctcatgacattgtttccagatgtgtgatttccagatatacactggccagatacagaagagctcaggccacggtgcaggagcagatgcctgaaagtttgggggatatccctgattccatgaagatcctggctttgtggaccactttgatgtcatctttcatggttcattgtggtgtatgttactttacaagcagggggagcatctgggctatttcaactggcttcacttttttgggatagtgtttgagatcattgtttggaaaggcctgcactggaaattgccagtgataacatatgtgctggctttgttcttcccaacattctctcacattgctccacctcacatctgagccatgagagctgcccagaaaaccctttagatgttagtctccacatgcattccctttagaagcaaagaaa

SEQ ID NO: 53498 - DNA, 2654 bp, Bovine  19866881025059
  misc_feature (1)..(1): n is a, c, g, or t
nctatttattaatttattcttctcccctgtttcacactatttctactgatttgctattattacacatgctccttatctcctttatttatataattggtctctagacattttcaaggaacattactatcttagagtattattatattctagataaccttgaaaaacgagaacagtcaaactcacagaaaatatcatgtaaagagatgacagctgccttgtttgagaatttattcttttatcacttaatctttcctcatccccattattatcatttccactttatagagacaagaaactaaaatacagagaagctaaactttacattgtcattattaaaatttttcattttgagaacacaaacaaatttcagggtgtaatgtgtaggttgtatatattaaagacatcttgagaatgggatccattatagatgatattaagagacagaaaaattacatttacatgtcttcactacgctctttgtaactgtcttaccagagtgcaattttggtcaccacacattttaaaaaagaaaaaaaccacaaaccttcagaggaaaagtgatataaataaggtctttccactgaattataatgcttcgtgaaagcaaggactacatatctttaattcataaaataaatgattttaaagtaaagcagaattacctttaggaaataatctttgaatgcctattcagtggatagtaatgtgctaaaagctctgagaatacagacaaatataataatctctgcactcaagaattccataacattcttagggagaattgtagtaattaataacatgtaaaataataatcaatcagctataagaaggaagtcttaaatgccagaacagtaaaataccaaatagcaactccaggaggctgtgcactcacttctctctgtatattcttaaaaatgaggccaatcaaatcatgctgattgatttagtgattgaaaatgactatttattgaatgcattctgtgtgtcagtcactagctcacagtcattggttggcacactgccaatgatattatttagcatcaggtcctgttaaagaaattaattcataattcttcatcttatgcctctgtttacattatcagaaaaagactctttgcttgctttctaaaaccatgtcacttaacttcagtctattaggtatttattgaacatttactttgtagcagaccctgtactagggtctggagttgtgaaaatgtccttgaagaactttcctatggcagtaacacactgaatcaaatataatgtgaaaatactaaggaattcactaatgagatttttttcagatgtttcaaagctttcataccggggagcctcagttcagtaatgatacatcttggattaaaatgaaaatataacccatttcactgcatcacaattaaaagtcaggattgaggacgggatgtaggtagggggaacctcattggtaggaatttcccctatttcaaaaattttcatgcagatgtcaaaaacgaaaacccaggaagagaaactgctcctggactgcaaggaatttaaacactgtcagtcaggagcaaagaaaacagagggggaaattggcactttgttctataatatggaacttgaaaaaaattgtatgcatctattaaaggtttctgtatgtaaatattgaaaagttcataagactgcattccagtattttcattttgatactgaaacgctgaagtattgagtcgaaccaattaatttggccattaaaatttcctaagatctacatgttcaccattatgacaaaaccatattcattgattaccaatcagaattctatctgaagaaggaatttggcgctcaaagatcctcatatgctgcgaccctggatgacctttgtgaaggcatttgcatgcctaacggtgggagcattagtttaacctgaaataccaacatggtgatatgtttgtcagcctgtattttaaattattttcctatagaaaagcacctgaatctcatgaaaaaaaagaagttcaacttaatattgaattcaaatgtatcctccacagtattctaaaatacattgctgattctgacatgcaggaaatttattgagttttgtgaagtaaagatctttgatttcagtatacgctatgcggtcagctctaatgcttttgcattgagtatgtagtgatcccttcctgtctttccataaaataagcatctcaaatgctgctaacctgccacttcatgcgttgcacatgttagacattaacttatatgataagcatctcttacatgtgacacatttaggactagaggcttgcgagagtcttgattctaagagccacaattataggttagaacttattctccctttttatttgtggttaagttttaatgtggtcatggtacatagtcccatgatttacaatcagatggattagccactgacttatgcctcacataagcattataaattcatatgcataccttccagatgcagggaaaatgcagagatattttcataatggattattcagaccattttgagtggggggcggggggggaaccaatccaaagcaaaaacagcttttacatatggcatccatggctgtaacactcactacattgcagaaaacgctccgatgaagcaaaaatgtcctgacaaagaccaaaagaaa

SEQ ID NO: 53499 - DNA, 1822 bp, Bovine  19866881161328
  misc_feature (1)..(1): n is a, c, g, or t
ncaagaagcagagcagtattggtactagaagacccaggcatctgttaactcagtgactgctactgctgcaaagtcccttcagtcgtgtccgactctgtgcaaccccataaacggcagcccaccaggctcctctgtccctgggattctccaggcaagaacactggagtgggttgccatttccttctccaatgcatgaaagtgaaaagtgaaagtgaagtcactcagtcgtgtctgactcttcgaaaccccatggactgaagcccaccaggctcctcttttccatgggattttccagacaagagtactgacagcttgtcttaaatcccaacccagaatgcggccccaatccacactgttctcccaccccagctcagaagcaaaacgttattctgtaggaaacttcaaaggaagcaaagtgtgaaagtctaagagtcaagtctcccccccaccccagggggccatcatgtaccattttactgcaatttctctttgctttgttttttccaacgatgcatttagctacagtaagtaggaaaaaaaaaaatccctattcaagagagtggagtcattatccacacacaaaaggccatttagagaaagaaaggctcagtcagttcaagctgtggctgccagagtccagacctattagggaaaaaaaaggttagctgtttaagtgggaatgtgaaacaaaatgtcataattagggctaactgggcaccctccccccctgccgagaaagctgcctgggatcataaactaattccctgaaagttctaggcttagggggaagcaaatcatcaactctaaatgacagttcagtggttaacctttaccctggaggctaggttttcattctttcttgtttttcttttaggtattttttttttaatagatgtcacttttataggattggactgtttttttttcctagctctccactactggcatgctgcagatcactctgtgtgtgtgtgtgtgtgtaaaacccatgataaatatctcccaataacagtagtttcctttagtgatgaactgtatgggagaattgggaattaattctttgtctctctctctctgtacttcctaattgctctttttaatgacaagtaagtagacaagctggcttaaaactcaacattcaaaaaaactaagatcatggcatctggtcccatcatttcatggcaaatagatgggaaaacagtggtaacagtgacagactttattttcttgggctccaaaatcactgcagatggtgactgtagccatgaaattaaaagacacttgctccttggaagaaaagctatgaccaacctagacagcatattgaaaagcagagacattactttgccaacaaaggtctgtctagtcaaaactatggtttttccaatagtcatgtgtggatgtgatacttggcccataaagaaggctgaataccaaagaattgatggttttgaactgtggtgttagagaagactcttgagtcccttggactgcaaggagatcaaacgagtcaatcctgaaggataccaatcctgaatcttcattggaaggactgatgctgaagctgaagctccaataattggccacataatgtgaaaagttgactcattggaaaagccccctgatgctgggaaagattgaaggcaagaggagaaggggatgacagaggatgagatggttggatggcatcactgactcgatggacatgagtttgtgcagctccaggagatggtgaagaacagggaagcctggtgtgctgcagtccacagggtcacagactcagacataactgagcaactgaacaacagtgcttccactttaa

SEQ ID NO: 53500 - DNA, 1316 bp, Bovine  19866881206304
  misc_feature (1)..(1): n is a, c, g, or t
ntgcttcctgaaattcgaaaacacctccagtctaaaaaaatttttcttaaataagataactttataaaagatcagttagaattttgaacaacacacttttttttaactacatgtttttaaatgaatgcttgaaattagttaaggaaacacttaaaatttgttattactaaatactttttatttcatactttatgcttataaaaatgagtagcattctgctcacatttcttcctttttaatttttgtctgtggaagcctacaagttctgctgattgacatattaggattacattaagtacagagcaatgaaaaaatcttcataaattacctgaaaacaaatttgattctttaaaaatcataaagctcttagtttttaaagaaaattaaactacttaaaaacttagtaagctaagttatggttattttgtaaacaatttaaaaattgaatttaaagacaagttgaatttttgttttccgttttctagctggtaatgaacttgtttcaataacagggaaataatccttttcttgtttgcttttttatgacagaatatgaatacactcgtaatacaatcatgtaatattattcaagacttcaatgtgtttgttcttaacattagcacattacttttgtcatacccccaagcaaaattactaaagtctaaattactaaagcaaaattactaaaagtgcagagaactttataaatacaccacagactcaaaataactctttgaaaggaaaaatgctgtctggttatgctggatctgaaataatttatgttctctgttgcagccagccaattatagtattttcccatgagaaacatgggaatttatatttaataaagacactctgctccccaaagcatttaaaacgtaaagctagagtcaatgagaaggacagttggatacatatatttttttcatttttgtgtatttttatgctgtctctctttagggccactgactgattcagtattccttatattctgtgtatttccatgatttgatgttaaatagccccaggagttccttcagcattttatgtgcaaaaataaatctatgacacttacacagttattatgaaagaaacatatgtgtatttgtaaacatctaatatttataaactttttgtagaggatattcctagtcaaaatcatgacactgacaagtgaaaaggatgccatgcctcttttttttttgaacttacaaatcaaataattgaccaatctccaggatcatatctgtatagatatctacacacatacaagtcgagaataagctacccagctcccaactcaaaagcacattaag

SEQ ID NO: 53501 - DNA, 1454 bp, Bovine  19866881248954
  misc_feature (1)..(1): n is a, c, g, or t
ntagcttttagagatgctactaaaattcatagaagagataattttatgcttctgatttgcttgaaaatagtatggagaagataggaaggagatggcaaagcagtacaggtaaggttttaaatgataatcgctatacttgcatgacacaatatcatcttattttttaatatgtttgaaacttttcataataaaaagattttataaaataatccaaagttcttttcagctctaaatctctatgatgctatgttcaataaatagtgtatttaattagcaatcacttacatactcctgtgacactcgtcattatcctatttcatatcagcatttcataacagtatgccctgtttctttgactacaggtggcctagctctggtatacttgaatttccttttttatatctagatttatatcaacaaatatccaactgattaatgacagattgaaggagtcagattcaaatatgattcgaagtgagttaaggacacaaactgagatattctaaaaaataacctcagacacttagagatgaatgttgacacacatctcttccaaattactacaagtgttaaaacttctctggaaatacatctagctaataagcatttcatattttgagagagataggttttgttaaatttttgactgcttagagcattttacaaataaattatgaaactcttcagtgtgcggtgtgtggaaaaatccatgagtcctaacaagcttgtttctctggaagatgcagaatttaaatcagtctattgctgatatttatgtacaaactctgctcacaaaatatttagcccgtcagcatctgccactgccacagacagattcagatcagaaggcctggttccttcccatgaattttaatagaatgtcctcgcagctgaggattggccagcgtttccaaatggtgatgaatgggaagacagatgggcccttggagtaacagaaggccgagtcttcaaaggtggcaattgctggcattctctaacatcagtatactcactctcgatctataaccaggcatgcgacatcattttcctcggcgataatgttagctgatctgacatcttcactgcagacaaaaacaggaaaagtcaattttctagtgagaaattagacatctatttttattagcgaatctgcgactgatatgaaacaccatcacttaaaccttccaaagatgatgtgtttctgtaacatcataatttacactccaccccttcccccccaaaaaaggatttgaaatgtgtcctaaaaatatgatgtgcacgaggaatccagaggagaataagataaatgctctgggaacatcaaggagttggtgagcgcaaccatgtatggaatttcattctgtgttctgtgccagtgcaactaaaatagctctcctgtgatcaaacaggaactgctaattaataagcagccaaaattgaaatgaactgatcaa

SEQ ID NO: 53502 - DNA, 988 bp, Bovine  19866881264749
  misc_feature (1)..(1): n is a, c, g, or t
nctattttatgaaggcagtgttttagagtgtttctgcatattatatcctctaacgcttacaaaagttgaagtaaatgatgtccaagaaagctcaggaaatggtagtcatctccagtgatagcctaaactttagctttgtaagttactggttttctgggcccaaggcctcagaccgacaaatgttcttttctgagcacaaggacaggccatagacagaataatactttatcttttgagggcacttagctttgtacatctttggtagagtggtaatccatttggtctcacggtgtgtgaaaggttaaaattgtaatatatcctttgaacactggatggcaatattctgaataggctagtccacgtccctgtgtcggggacagtcttacacagggtttatataacaaagcttctgaaatcctattcagtctctggctttctgagccttgcatgctgtttttgccaatagggaagagaaaaactaatttggctaaagtgccagtcagtccatccaaatgcttgcaaaaggtcaatcatattatcctgaatgatggaaacaatacacatgataaattaactccaggaggccaagagctaagttttctcatagtgaaattaagaagctgaacacattcaaataatttctgcctcagtgccaaatgtgagcttcaataattttgcagcattcacatctgatgagcatattctgaaaggggtatggtttgggtgtgaatatgtttcactgtcccccaaactggggagtctgtggaatcttttatcatatgggtgtctttgggacagcataacaccagattctagagaaggacatggcaacccactctggtatttgtgcctagagaatcccatggacagaggagcctggagggctacaatccatagggtcgcaaactagaaatgtgaggtgggagatatgagaacagtgtcagttggctgaaatttggtattaagataaaaggagaaggattgtgtg

SEQ ID NO: 53503 - DNA, 830 bp, Bovine  19866881668309
  misc_feature (1)..(1): n is a, c, g, or t
ntgggctaagggcagatgttgggtaagagcaagaacaggcagagaagacaggaagaagggaggaggggccgggaaaggaagaagtagaaaagaccagtgtggacatcccatgagagctgattaaaaagtctcagctgagccagactttgtcacaattcaagaaaagcatcccaagatttatgggtggaatggtcaactactgagaatggaaagactttccccagtagaagcctatatggtcaagctgatcttcctgcctttatcatgtgaaatgatatatatcccctccccataaagtaaaagttgacttggaaataatgcagccttagagaacccagatatggagcagaatagcagtatcacttagagatgaaatagagaagaggcagaaaaggtcatatctatgtaatatttgattggagaggtttcccactaatcttcctcacccactgactggggacaggagaggaaaatggaagacttactaggaatgggcctggaagaaatagggaaaaaccacataatcaaactccgattgtttcatcactttcccactgtaagccatacttgaatatgaataaacacagcagctaaaaacaacacctacacaacttcgtgactgaacaatgacaaactgagacatgatcattcatgaaccgttgctgtttctggataattcactatgtaaaggcaaaatgctaaggaaacttgaatacatacaggtgggctgggaagcaagaacgagaactaaattcatacttctgtgtctctgatagactccaagtgcctttgtgtgtgattccaacaacgttactatagatgtcacagaa

SEQ ID NO: 53504 - DNA, 701 bp, Bovine  19866881743557
  misc_feature (1)..(1): n is a, c, g, or t
naacagcttacaaatatacaaataaaaaccaacttagagtactacaagtttactttggctatgactggccatgccattatataatctccacatgtggttttattgggtttcctttagagtactttataaagatgcagaaatgagagacctaaccataatataaacccaattctattctgtagctggatgaccttgggaaaatgacttcacttttttgagtactagctttctcacctgtagaaaaaggcacactaaaataatacctacattaggggcttgttttggggagtaagttgatagagagtcctttaccaatttcaacgaaataatcaatgctgcatagatggaaagtactgttactatctgttagaattaaaggggccttaataaccatttaatcctgaactctgtgtatcattggtatctgtatgccaaccatatcaattaaatataatgtcaatcttttctttttgttttaaatcatgaagtaaagatagttaagctttagtgcatatgaagagttaatcctcacaaaaaatgaagtgcttattaagagctcactgctcacctaagtttctaaattctaactttttataaattagatatgtaggtattcttataaaatatagaaaattattcccctatatacatatccttcatattcctaatcattaaatcattcctaatctggcttttctggg

SEQ ID NO: 53505 - DNA, 1609 bp, Bovine  19866880484415
  misc_feature (1)..(1): n is a, c, g, or t
nttttgaagttttcaggatttttttaatgtctcagatataataaaagaaaaattatattttcctctgatctccatacacatgcaaaaaagatgtgggggctggaatttttcataggaaaatagcactgttggatatttctaattttccatgaaatttttccgaaaatgaactatgatctgaagttttcattttatatgaattattctgaaactatcaggaggttgaagagctaattaaaaaggttttctgtagaaaatctctccttggcctaaagctggtagatcagaaaaaagaagtaaagaagagagggtagtctctgtactgatgaatttctaatgaacattgaggggcaacaggtcaagctacaaaagtatgatgtcccataaatacttttttactaagttgaacttgcagtcacatctatcctattgctttcttcaaatgcaaatgtctgtaggttttaagagtggaaaactatcaatttatgattatataataagttgactgattaaaatgatgcatgtcaatacaattattttgccagaaatatgataagtagtagacataatataataataggtgtggaaaaagatgaagggtaaagagaaagagtaaaaaacaatagtattggttagctttagttggtttgattcaaagaattgagtttaggctagttaagagattttcttttcttatgttttgttagcttttttttttttaagttgttttttaaagaaagataaatcaaatcctataaaaattcaagatccatgataaagctaagctcatgtttggatctgaattagaagaaactcttggaacctcagtggcagattttgtggctcttcatgtaaggatttctcccttttcttgattaatttatcacatatccacctgggccagaaagccaggggtataatttgttacaaaaagttgcctgccaatactgtatcagttgatagaaagtaatttataaaataaatcttcaaaggtgccagaggttattccctacgtctgggaatttggaggtagcattagagaaaaactgtatttaaattaagaaggacagtataaggggtgtggtctttctttagaaagatatggaaaggtaacagacaaagagcaattatcaaagattaaagtggtggatttatgatagtgaaaacagactcccatattctgaaacaaaattccaatacaaagatcatggtagtgccacattcacagttgttggttagctctgtgtgtgtatgtgtgtgtatgggcaaaccccactaatttccaacatactcatggtccctgttctcttgtctttcctccaaaggtaaagaattattttgactcattattctgtctgtactttctctcttcacatcatttcgtgaacctatttgcgaaacctattaggattttaccctcaccctttctactttaaagagtttttttttgtttgtttgtttgttttgccaaagttagcaataacctctacttaatcccacaactaaatttcagttggtgttttaactttctagcagcctttaacaaaatttattacttcttcccttcagtaaaagtaattttctttacttaactttaacagtattgcaa

SEQ ID NO: 53506 - DNA, 1876 bp, Bovine  19866880561486
  misc_feature (1)..(1): n is a, c, g, or t
ntataatactctttcattgttggtaatattagaaaccaataaaaaaaaaagtggagccatgtgtttgaagctatgtgaaaagttggtaggtcttatacctatcacttgattatctaaacagaagtcagagaaataatttgatggaaacaaaacaaaattaaaatacataacagcatgaattattttctcacaacaattttccattattctgatgaaactaactgtttaaaagattttgtatttctttctgtcattttccaaacatctgttttataactgactacctccagaggttcacagtgacaaagttatacccaagaaataaaatgaatagagattttagtttccaaaccatgtcattgtgtttgtttttcatacatcaaactaatgatatgattgccttttttggaaatatattcagcatctcaatgtgaactaactgaatgtcaatctaagttgtccatatcagtgctctttttaaagaaatatttctagagtactaattataagccaggtcatcagctaggtactgcacatacatttaaccctcacaacagccctttcaggtaagtcagaagcctttctccatttcatgtatgaggcatcagaccatgaaaacattagtaataactgaaaattaggaaagcaagtttgaaagcacagattcatctggcgttagagaataggttcttcacccataatacaacaaaattcagaatatgtaatagaaatagtaaattattccgttgataagaaagcatgaaacggagaagggattgtaaacagctcacttatcaaataatctagacttgaaaatgcataaaaattcaccatggatacattcctgataatcatgtgcattgagacttcaagaagaaaaacaattagatattcataatgataatgaggaaaccctgttagttgcatgaattgaattaaataaatcaaccactggaccattactaaaatttatgtaattatattatttttaagatgtagattaataattcacttttcgatgattataactcgctgatcattattaggctgtatacacaaaagcagtcaggtgaaaatgcaactgaccattttgagtccagccctggcaggggtcttcctgatgaatattcttcaagacaataggagcatgcagcgttcagttcagaagccagggaaagcttcattctgagatcagagaaagatggtgtaaaaagctcccgctggtgcagccaagctgccctctggctccaggtcctagtgccaggtgctgtggctctgttggggccaccgccatcttgaattgccttgtggtgctcaacgcttctgcatacgagctgagcggtttcgcccagagagactctggtctgaagcagtgcgtgtgaggcctctgcacatagcaccttctgagcaagtataactagactaagccacaaaggaaaaaaaaaaaaaaaaaaagtgagactttattttattactcagaatatatttttatttcctgggaattattactagtttttgctagtgacaaatccctcctctttcttttgttctactcctcattcttgaattcttctgtacttcttcctgctgatttggtgcctcatcgtaaccctgggtggaggagcagaagttttccccaactgcatttagacatatttaattgtccccagctctcagctgggctactcatatcccttagcgaccaactttgtctaattgtttggaggcaaaggacacctgacaatttaagatacacagcccaaatattagcaaaaggagaatgatcacagatcaaatttttttccccaaaaatgaaggtatctagatcttgtgcctgccctgatgttgaggctcactgcctcattgtttttgaaaa

SEQ ID NO: 53507 - DNA, 754 bp, Bovine  19866881018535
  misc_feature (1)..(1): n is a, c, g, or t
naactgtaaactaatgtgttctatggaagcattattttcaagtaatgaaagaggtgttttaactatgaagcttggctgtttcaactttttaaaattagaaaatgaaaaaaaaaataaaagaataaactcacagtagtttaattccatgcatgctcttaatagatataaatctactaattatgtgttcgcccttgggagctttgaaaaagcttacagtccttgctcatgccaacagtcatttcattcatctgttaccattttggttgttttcctgtctactgacttttaataattgagattgtatattgcgcccactctttcctctgcaaacactgacccttagcttctgtggcactagccctctggaactgtctgccctcttctcttcacatcactggaaacctaattcactgcttgctaaagtacaaaactcccatttagctcagcagaagtttaaagaaagatgagtggcagattgaacactcaagatcttctactcacttttgaaacgcagccaaaatatgaccactcttgtgaaagggatgtttgccatgttaaaagtgaacacacattcaaagcgaatatcaaatcaacagtatcatataccctattcatatatatcacatccatatcacctattggaaacatatccatcagggttgcatttctctgacaagcaagcattttacatttaagagagtcacaatgttcccatcacgtaaccaaggcagtaatgccacaaaaccattacatt

SEQ ID NO: 53508 - DNA, 688 bp, Bovine  19866881159781
  misc_feature (1)..(1): n is a, c, g, or t
nactgaacctgggcctcctgctttgggagtgtagagtcttagccattgggccatgaaggaagtctctattttcatggtagacttttatgttagtttcagagtatcttctaattatcaaatgtatttaaaattatgtatactttaatttcctatccagaatataaataaaccttttcaattaatgaattaatgcacaattattgtaggcagttcagaaagttaaattctattacactccctaagtgttaatcaattagccattttcattagctataagtcagaatactggagtgcccccaaagaatgaattctttttaaaaattaaaatatttttataattcaatttaatgaaatatgtcatatctctggctaattttaccttttccttttcattctcactcaaatcctctacccttgccctttgggcatgcacagaagcccagctctgtacatccacacatgacattcgattacacatattcctaactgctggcatgagctgtatactaaatattgtacctatcaagctttacatgttttcattttaaaattcccatttaaatgcaaattctgccatttaaatagagtcttcgtgtgctttattacactataattactatttcccatcttcctggaaccaactgcaagaaaggccataggtcactttaccagccctctaaaagtgcaa

SEQ ID NO: 53509 - DNA, 1204 bp, Bovine  19866881250664
  misc_feature (1)..(1): n is a, c, g, or t
ntattttcatttttcttagcttctgtgtaacatcaaatcttttttagtggctgcagacaggtctgggcttttggtgtgccacatgtatgatgctgatataaatttatggctgaacttgtctagtgtatcactccgtgaatcaatggtctgcaactggcaatcaacctagttcctcctgctttaatctggatgttttgctatgattgaagagcagtggaaaccctggatttttctaatctgctatcagttgttagggtcacaatttctgaagcctgtttcttctggctttatttccttaacttgctagaatgcatcctctagtagtttccttagtaagcacacatgagagataatttttatgaatcatttaatttctttactttgtctttatactagatgagtatagctagatataatttccaggcagaaaatcactttcctagcatgtattctttgtattctgtcttccagtgttggtcttttttccatgagacacatgatcttcagtccttgaaaagttttattaacagctattttagtatatcagtcttttcttttttatgtactgttctgtcttaaaagatagatcattctgacattggaattcttctaataattttctgattattttgttatatatatttttgctgtctttgggagtttactgagtttcaattcttctattgagagttttacttccttttccttttctttttttgacctcactacccagcttgtatgatcttaattcccctaccacagattgaacccagccacagcagtaagagtgctgagtcctaatcactggacttgccagggaattcctgaaaagtttcatttgctttgactattaccttttttttttccctaagaacatcttttcatttctctctttacaaaaacctgcatttgttcttaaattgatgccagactttcctttgtcgtcctgcttttcatttatttgttttctgttttgttttgttttcccgttctttcaaatagcattttgtcctcattttatgtttgtacactttctttattccatattttagaaagtttaatgtttgtatattttcataacttctgatccttatctctttaaattaaaaataggaaagttctaagtgatgacaggtatttggggctgtattttgagctagtcaattgtttgggttcatttcatagaggcgctgtagcaccaaat

SEQ ID NO: 53510 - DNA, 2240 bp, Bovine  19866880424691
  misc_feature (1)..(1): n is a, c, g, or t
natgaggcaaagaaaagcgtggctttgaaacacaaggaaccacacgtgcgttttgcattaggcgctgttgtaatttgctcacagaacgtagtacagaaattatcctaaaagttatagcttgtaaatttgatatgtaaataggcatttaaaattagaaatctccatggccactgaatactaaaagagtaaaaagaaaacggggaatgaaagataaaacacagtttcaaactctctgggatatagctccctcctgcctgatcactgggaggccagttagcacattcagcgtactgggtaaacacaagggtttacggaaaatggacctttttatgaaaaatcatgggtcaaacaactctgtgacatatctgctgttaaaggaaacacatttttttctcctacctgacacgatgatgcatggtgtacttacccacagagacaactgaacacggttcccatcccaaagcttagtgaataccttttttaaactttgaaaaataaatccccaaacatagttcttgtaacatataaaatcctgccaaagatggatgttttcagggacacagtccaaagaaagcttttcatttatttaatggtctctgagctaatggtatcaagaaaatgtgtacttttgttctaaaatacacaaatcactgatgcttatacaatatatagcaaccacttgacttagttactgctgttcagctttaaaagagtagcgttttacctggaactgaaacctgagactgaaattctgcaaaaagtctgggatgacatcaaacttagtattttgccaagctgctgctgctgctgctaagtcacttcattcgtgtccgactctgttcgaccccatagacggtagctcaccaggctcccccgttcctgggattctccaggcaagaacactggagtgggttgccatttccttctccaatgcaggaaagtgaaaagtgaaagtgaagtcgctcagtcgtgtccaactcttagcgaccccatggactgcagcctaccaggctcctctgtccgtgagattttccaggcaagagtactggagtggtgtgccattgccttctccatttgccaagctagtaaaatgatttctcaaaacagcatgctggtatattagcttttagacaaacctaaatgaaatgtcaggaagggactaccatgtttcatcctcttgtccattaataaccatcatggactataataactgacggtcccatgttgtcaatccaacagattattggcaccaacaaatccccttagaaatttgctcataaccacccaaagtccaaatagatgtgacctctcaagttttagattgatgatactaaagaaatgcatttgtaggctgaaaagcttatggtggtaggtggttcagctgctaagtcatgtttgactgttgcaaccccatggactgtggcctgccaggcttcgtctgtccatgggatttcccaggcaagaatactgcagtgggttgccatgccctcctccaggggatcttcccaacccagggatcaaacccagatctcctgcattggcagaaggattcttcaccactaagccaccaggtaagcccttgaaaagcttttaattcaggctaaaatgctccagagtaccaggagaaactctttaaataaatactcagggaaaatctgcatctatgggtgactcagtggtacatacaaaatttatccttgagcaaaccaaacagaaatttgaataatctccctctatttctcctctttacacttttcaaattcaatctcagcattgttcaatctctaccctttttactctttgccctttgtttgaagttttcaactgagttacttgacaatactgttgtagttatggagggaaatgttattattcttcagagatgatgctgaagtgtttagggttaaaatgtcacaaggtctacgacttactttcaaatgaaactttaaaaaacatgaccccctttccccagtagtggtggtagtttagttgctaagtcatgtccaacacttgcaaccccatagactgtagcctgccaggctcctctgtccataggattctccaggcaagaatactggagtgtgttgccatttccttctccaagggatcttcccaactcaggaattgaacctgggtctcctgcattgcaggtagattctttaccaactgagctatgaaagaagtccctttccccagtacatatacacaaagacacaatagcaaatgttaacgatcaggag

SEQ ID NO: 53511 - DNA, 1223 bp, Bovine  19866880436513
  misc_feature (1)..(1): n is a, c, g, or t
nctgctacctcatctaatcctactactccatcacaactgttcatatcaaagccaccaatgatctctttagtgcttcatttttctcagcctctcaacagtatccagtacagtcaaacactcccttcttcctaaaattcactattctttgggccttcatgacagtaccttctcctggattttttccttctcaattgctactgctgtcttctctattcagtgtctgcattggtatcctagggcacagctctgagcctcatcttttctctctgcagtctcatttgatattttatctgcttccagaacttcatggtactaactcgccagcttatatctccagttctgattcctccctttattatcagattcatatgttcagtggtatacctgacatatccacttggatgtttgataaccattgcaaacttaacacatccaaaacagaatttagacttccagttttttcacacattaagatcttgtgtgtgttcagatgtttagacgtgtctgactctttgtgaccccatggactatagccagccagtctcctttgtccatgggattctctcagcaagtattctggagtggggcaacatttcctcctccagggcaacccagggatggaacccccatgtcttacatctcctgcattggcaggtggattctttaccactagcgccacataggaagcccattaagatcttataaattctcaaagaaagattgtcaaacaaggaaacaaaccaccagagtgaaaattagcacaaaaaacagataatattttgattaccccttccccaccaaggactttggatgtttcattatcagattaaaaaaacaaaaagattacctctatatattttaattttttaagtaaagatagaatacaaaagttagcaaacaacaatggactatcaaaattgccagacgcttttgaaaaagaaacaaagagaacttttaggaatgaaaaaaaaaattcactaacaaaaaaataagtggatatgcttatttttgtagtggataaattcatgaactgcaaactagaactcaagtagtttcatttcatacaatagagcacaaatagatgaagagatggaaatataaggaagggaagttaaacagtatggagagaagaatcaaagggactaacaaagccaattcagagtcacaaagagaaagaatatgcaacatggggatgaaacagtagaattcaggctaagaattct

SEQ ID NO: 53512 - DNA, 1165 bp, Bovine  19866880654087
  misc_feature (1)..(1): n is a, c, g, or t
nctgtacatgagacctgggtaatcactgcttcaaagccaagaaaattcaatatctaattctaaccaagcttaaaagtgactgaaagaaaattctgcatgtaatttatactctctgaatttctagaagcagatgttaatgaatttcagggttttaaaggagaaatctagacatgttatttcctttttgacatatgtacttgatccatttaaaaactatggcccaacaattaactgggaagtttgttcaaaaacctggcagagatgactgatgtcacaattccattcaaagggacacactggtatcaacacaggaaaggtgggcacaagaagataataacaaacagacaaggattcttgagcataatttccccaaggaaaccccacccagttccaatcatccccctatccccatgccctgagaacttgcttacatagcttgcagtaaactaattttggatcctctcctgtccgccacgcctgccaagtgttcttgtatcgttttcatgtatgtcggttttacaacaaagtcagaataaaaactctccaagggaaatattaatcacctagaaaattcttaataaatatcatgaacagattttttttttctttgctctcactcatcgggccgagagtgatgtcatgactcttaatggaaggccttaaaaacaatgttgaaaatcgttgcaaatggctttcaggattttcttagaagaagaaaatctttccaggtccaggatcacaaatctttttttagatttgtgatctaaagaatgtgatactgttaagaataccttacacagtgctcaaaactgtacaatgcatttttatattctttagtactgggatcaatttgagtggtagttttcctaattaggaaattggatgcagagaggaaaaagaattcttcttagtaatgctgtagtaggcagtagaccctgtgctggaagtgacttcaagacactatagaattaaaataagttcaaaggccacaaataaaagaacctcccgaaataaaacatacacacacactgaaagatcacaattaacacaaataacctcagccaacaaatgacagaattagaaattggatcagtctgcttctggacagcatcagaaaagactagccttattctatcaagttatttcaatctcctttgaaatacag

SEQ ID NO: 53513 - DNA, 2241 bp, Bovine  19866880670519
  misc_feature (1)..(1): n is a, c, g, or t
nccatgggattctccaggtaagaatactggagcaggtagaatactggagtgggttgccatttccttcttcaggggatcttcctgaaccagggattgaacttgagtctcctgcttggcaggcagattctttactgctaagccaccagggaagccatctcttttctcagaggggtcagcaattcccagttgtctcagccatgccctgtgggcctgtgttcctcatatccgtatcatcagctgtgcactcttggtgccttgtgaacatataaagtgccatagatagacacgaaggctggacagcctctctctccactgatgaatcccatgctcggttttcgggacctctcagctcaccaccaggcacaaaccattgtcagttcatgttgggaccaggtgagcctcctgactgtgccctttgtctggagtagtttatgaacccatccatccaacattccactgctagacagctattccttaaatttctttttatcatgttccatttgggctcactttttggctcacaactattggctactcaatcaagattaaattctttgtctaaactttattctttcatagaaggccccatggaatctgaccctattttgaattacttctccaaacctaccctttgtgctaatcagagatgactcctcaaggccctgttactgcctctttggggacctttgtagcatcagcatcctttcctgaaggatttctctcttctcattccctgagaaagtctgatcaattctgtgagagctggttttaggagatggaaggaaaatgctatcccaccatcccattggaacctcagcagcaaaaacaatggctaacacgtggcctggcatctacaacaaatgcttttgaattgttcacaccttctgacttctatggtttgccttgattattcaactattaatatactgtaagctctttggaggagatggtcttatttgatatttccaagttaaggcccccaagtccattcctctttttctatgaagtactgtccttaagccatcttaaaggcttaaaggacccatttgtcctttaaacacacacacacatctctggaggtgattctgtgtttgcttctaccctaccccagtgtccagcatcttgcactattataaaaatttccttgaaaagagctgagatcccctacatgtagccaggatactatttcttctgctggcgagtaagaacatctggtcaacgtctaccgaaatagcctcaaacaggaggcaaggagcgactgttgaacagaaaaggaaaggtcatctcatctcgccccatgaatatcctacaaatctgaaggattttagtcacctgccacccaaatccccagagttacaaaaggtgtgcttcaaacatcttctcttagaaccctgcatattttttaccctgaatcttggaagtccagatttttaatcttcccaccttcctagttgtagggtaccacttaattcctgggacacaacagctctgcttggcagaaagaatattctcacatagtctagggtattccttgggaggaagaatgacagcgaatgcgacgatgtctcacgtggcacaagactcttatcattacagagcgagacccttgaggatcctctctctcagcagacattttcctggtcttttaggaacttccccgttttccccacccttctcttttagtaagtaataaactaagagtagtagatacgttgtgagaagtcagagggtaagtaactccatctgaacctgtgccattctgcacagcttggcactcgtgcatgcggccgcactctccgagacctgctctattttccctatttctggtcactgatgccacctctgcaaatagcatcatccctatactacttctaggaataataacctgtcattcggttttgcatctggagaaataaaaaaataaacaaaccaagagaacaaaaatggagactcagaaataaagaatcgggaaaaaatgagtagcgatgacatttatttaatactcttccccatacagcagaagacaaaatgatatcattacttcaacaagccggaggcctgtaattgtgacctctgtatccttcctttgatttccttctaaactcaggaatcttttgctggctaaatcccagcctttttttttttttttccccatccccgggccaacttcttggcttgcttgggaacagctgccagttctctgtgctgccaatcagtcaagaaacgtgctcacattgagag

SEQ ID NO: 53514 - DNA, 1711 bp, Bovine  19866880746453
  misc_feature (1)..(1): n is a, c, g, or t
ncaatagttcctatactaaatctgctcttggggtgctgagggccagcactcactgggacacagcatctccttgccatctcccttcccttctgtgcatttttgtctctgtctgctccatccactcaccccccaaaccctcagctcaccaagcatgaactctcgctgccgagcagagctgctgatgttgaaaaaacccaccttgagagcaataagaaaaaaaaaaaaaattgaggaagaggatgtttctgggggcatagagaggatagagatgagagtctatttttgatcaccatctctttagacttttcatgaaaagttaagttattaaagtcccagggtaccaatctgaatgcttgatcccctgaaccctccgcaaagcacagaagcaaacacacgcagacagggattaatatttaaaagtcagttccaccaaataatgaagacacgaaaagagtcaacactgagaaaggcatctttacctgtgcacttgctcattatccagaaactagaggaaatgttgtcatccccggtagctactcgcgccctgcagagctcacaccttcttcccagagcagtgctgatgagatggatcagaaaatctttgaggggttagagtccactagcatcagatctctgactgctgttgtaaaaacacgggtaattaagtgttacgaaaaagtgggtcatccacgactgaggtacaaccacacctccccacactagactccaaatgactgtgctgtgacagggtgggaggggtctgaacgcagcgaaagcaaaactttcatgtggtgagcagtgttttagttttcactagtttaggttagagaaagttaatctcaatgtcaactgcaaaccaactaaaagtttttgaagtttgacgacaaatgctggctgttcgtgtcacgggaaatttcagagacagtgtcacaaacagtccgagggacagtctcaggtttctgagacatgcctgtcgctgatgagcgaacgccgtgactcagggaagtgaagaggtcaaatcgaaaccgaaggtagggaactgagtgctcagtatccacacaagcatctccttctccaaggaaggatcaaggcactgcagaccacttcccacactggtacccgactcgggcgttccacacaatttaccaaagcatctttcgactgtcgtcagaagaaggcatctttcgactactgtcggaaggaagcagaatatacactgagctcggcacatttgttcatctgtcatgcaagagccatagcacagaaattttaattcaagtcagcacactgtatccctattatatactaggacacaaaggatgtgaaggggaagcagaggaaagaacctagaaaaaactgctattaagaacctaaggcttatacagacgatgatgagacctcattacacacaatgtctaatatggatcatttaaaaattttattttttattttttagctgtgatgcatggcatgtaggatcttaattcctcgaccagggattaaatctgacctcctcccacccctactccaccacattggaaatacagtcttaaaccattggatcggctgccagggaagtccccagataacttttgaaacataaaatctcttccagcagctgtttactatacatttaatattccattgacattaatgtttgtggatgacattcctacagctttcctcaggcgattcctttaacaatcccctt

SEQ ID NO: 53515 - DNA, 1701 bp, Bovine  19866880840252
  misc_feature (1)..(1): n is a, c, g, or t
naaaatttactaatcctcttgcttgcaaaggaacatcagatggaaaattctgaggaggcctggagtgggctgggtggggttggtaggggcattccaacccattgctgtggccagtttagggctgtgagtacagtgagtggtcaagacatgtccacaagagacttggttccgggggtcctgggttggctccacatttcattagctttgtgacttggagcaggttacttggtctcttttagaggcctcagcttcctcactcttagcatggggggagtgatacctatctgtcctgtctctcaggattgacggctcttgagggatacagggcttgaaactgctgccaggcacatagtaggcactatctgtttgcttcagtgaaagaggcatcatggaaagagatcaaagctggtatattattctagaaccgtatgacttgaaggagctagcgttactatgcattaacagtgacagggaggaagtgaaagtgaatggttgcaagatgaagaatcacccaagttagggctgatcgaaagaggttagacaaggctgaaacacaaaatgaactaaaactggtaaaaacagctaaagatagccacagacctttgtaaaacaataggcccagagttagatgatgaacaagatgggatagtatcactcctcaggaaagatgacactgttagcaaagaaacgaaacagaaagtgagcatttctgtgttttctctctgttatcacctagaatgaccctcttcggaatgaaaaaggatagagccagtctcttgcagggaattggagaatcattttaaaatgcatttctgaggccaggtgggctccttggcagggtcttgaaatacagtgtggatgtgatggtagaattgctgggggtagtcttttgattgatggttctttttattaggggttgtatttccaagctcatttgcatgtctggtaattttcgattggacgccagacatagtaaattttaccttggtaggtgctggatattttagtacttctataaataatcctgagctttgttctaggacacagttaagttacatgaaagcagttttctgcatttgggtcttgctttcaagccttattagatgcctcgagtacatgccaactcactttagccatgtccgactctttgcgacgctgtggactgtagacctccaggctcctctgtccataggattctctaggcaagactactagagtgggttgccatgccctcctccaggggatcttcctggtccagggatcgaacctgaatctcttagtctcctgcattgacaggcgggttctttaccattagcaccacttgggaagcccttagattccttaatctaggactaaattttttcccactacagaggcaataccagtctgactacctggattaatttgctagagctgccataaaatatcaccaattgggtgacctaacaacagaaaattattttctcacagttttggagctaccagaagtctgagatccaggtgttggcagccttgtttcctctgaggtttctctccttggcttacacatagttgtcttcttgctgtgtcctcatgtagtcacccctttgtctaatatctgtatcctaatcccttcttaaaaggacatcagtcagggcttccctggtggctcagtggtaaagaatccacctgccaatgcaggagacagggattcgatccctg

SEQ ID NO: 53516 - DNA, 1616 bp, Bovine  19866880976942
  misc_feature (1)..(1): n is a, c, g, or t
natggtgcactaaggaccaaaagtctcgaagctcttgaggagcaactggtgtgtgcttaagacaaaatgtgatgtgacggcttatctcctcatctatctgaggctgctggtgtttgcttgacctgctcaagaaatagagagggggagagagtgagctgtgggctttccatgcactgttagaaaactgccatggaaagggagatggaacacacacaaaataggcaaagaatcaagaatttctggctttccaaagtggcaaatgacctccctctgcttcagcaactactccccctcaagacatggctgtgctttgtttttaatgtaggatacacagaataaccttccaagaaaataagctgccccaaaggaaaaaaacctgaaggatggctcaccttctcagacaagcctgtgtcataaaatcagctgtgactttatactgccaaagcacagccaggtattccatcacaggccacagctgaacactcctggtgagctggattaaggtgctaaaatctggctgcaacaggaaggaagcttcactgtgcttcttctccagaaaaccaagtgaaattcctctggcttttagttctaaatgctgagcattcacaagattcttcaatgcatctggacaaaaagatacacagcagtcagtggccaggctcagactcccaacagccagttatgtgactatgagcttgagttcaacttcacctgagcttgagtttctcatgtgttaaataatgctattaatacctgcacaattccaatgacagaattaaataatgtatgtaaagtttaaccttatgcctgacacttatttagtggtcactacagtattcggggttgggtgggtgggggggaatagaaggagaatatctaagggagaactttttaaaacttacaaagaaaaacttattggctgcagaggacatgcttagaaccactgtcagctagccacacacctgaatcgacatcttccagaacattagctcggaggaccaacccccaggcctggaggagacttttctttaatgtcccttcagatgcaaccacttggagccgactaatgtcttcctgccatccactctccccaagagcaggcatccactctctgatggtaagagctttgttaaagaccttcagttgtgaaaaacactctacgaccagctcgtcctgaaacaataaaacccaggagagcctattacagaggagaaaagtggttttctttagaagcctattcatgtctgaaaaagtttttatgtttcctcgatgcttctacaaacataaagttggtttactcctattgctctaaggatattttatggtaataaacttataagtctgctcaaccttaaaagtctcaagactaagtaaaacaataacacttaacaaatcagtaaatagtgctcattgaacattcaaaaatttgcaggcagggctgagtctagttgaatggcagtgcccacattccaagagagcttcagaagaggtcaaacctttgtgtttactacatggttccagactataccttaaatgggaagggtcgtcccaggaacttctgcaacttctttacacctgcaaatccaccagttgggctctccaagcaattctgaata

SEQ ID NO: 53517 - DNA, 1450 bp, Bovine  19866881016571
  misc_feature (1)..(1): n is a, c, g, or t
ntgggttgccattttcttctccaggggatctttccaactcagggatcaagctcatgtctcctgcattgacaggggattctttactactgagcccaccagtgaagcctgttctaatcagcagacttttttcaggcatgcctcaagatatggttgtaaatatcacaggttcatggggtcgcaaaaagtcagacacgactgagcgactgaactgaactgaactgatcacaggttcattagatagaacaagagttatcctcttaaggttgggttattctatcctcacattctgaggaatatgcctaagttctacttaaaaaaaaaaaatcccttgccttgaaatcatctcaattccacaatttatccttgtctggtacatctgaatataacacaatatcacaaagtaggtgcctaataaatatttaagtgaatgaattaatagataaatgtgtttcatttagtctaagtcacattagttaacgtattactcattcatcaaaattaaacactactatgtcatctacatttattatgaggtggtctctcttctctgttttaaaattaactgatatttgggagttatgcttgctgtcagttacagtattaacattttaaatacacggaggattttatgaacattattatgaataatggtcattagttgcttttaatatcctaggcagagtgagagaaagtatacttaagctacagcatgagagatttaagttagataagaaagagtgttctggcatctgacccaattaaacagtggagtagattaatgagagaagttatgaaatcttctttcttgaaaatcttaaaaataagatggaatcccatcaatatacatctgtgtccctatttagagacaaaagaactggttccaatcttttttttgaaagacaggtatatttactaggtgtatatctagaatagtacaattttccagagtataggcatttcacataagatattggtatcaattcataaccaaagatatgaatcatattccaaagaagtgacttccaattctagagtctcatatgttatatggctttgggccatttcacctctaagctaaagattcttttctaattaaataggaatactaaaagaacaagaacatgcaattccactcccttgtctcttctgcaataccgactttgggccacaacgtgtttttgtcaacagcccaactccttactcagagataccagtgcaaactcagtatttcaggtgaatcctgactaagacccattcatggagagttgagaaggataaagagtgaagaagcagaagagcctcatgatataaaaaaggccaatttttaggagaaggacagttaatagtgtccttgaaaacataagaagtggaaataatcttgaagtaatttggaaactaaccatttccttttatttttatggacttttatttggttatggctgggctgggt

SEQ ID NO: 53518 - DNA, 1784 bp, Bovine  19866881092621
  misc_feature (1)..(1): n is a, c, g, or t
ncaaactgaagtgtgatgccttgttcatcttggaagaacctttcattaatcttcagaagaaagctcaatttggcatgaccggcacctgttgaaagcaatctcaaggattcactgttgatttctgctttcctgacactcaaattctgtcctctgaacaccagcttctccacagtgtggcttgttcttcatgagggcaccctgtgtccctaatgtttgcttctcccagggtgctggggcattcaatgctcttgaatgagttcagtgtcatcagaatgaatgacgttctcatacctcgcagatagtgcacctggggacccccagagtcattcaaacatcagaacactgggtgcccatctccccacccctgtgcccccaactctcacctggagagccccacacagactctggggggaatggcatcttgctgctttgggtcagcaattcctgtgtgagtgtaaacacccactgcagctcctagaacctatggcccagtcggtggtattaatgttttcccatctgggaacttccctttcctgccttcgaacttgtgctcgtgcttaatcactcagtcgtgtccagttctttgcaaccctgtggactgtagcccgccaggctcctctgtccattgaattcttcaggcaggaatactccagtgggttgccatttccctctccaggggatctttctgactcagggatcaaacctggatcttctgcactgcaggtggatttgagctcacgaggcacttactatttccaatttccaacatacctaaggatttaggggtaggtagagtggggctgggtgttagaagggggccaggctgcatgacctcaggattctactctgccagaaatgcctatctgggtttccctaacctcagttctgtcatatccagtggctatttggctgtacttcaggacagagccagaaatacgttctttgtagctgatgctgtattgttatgactcacagcctgacttttcctcatagcagagccatgctgggcgaggaagagcttaaggattaggtcaaacattgagaactgtgctcccagtcagcatcagcagcacaggaaactaccccgagagagcagtcacctcccagtgctctttacacccggctaagtctgtcctgggtctgaggaaaggaatgtgcctggtgttaactttccaacgatccagaactgggtgaccgcacgctgacgttttggtagcatgagaggcaaacaggactaggagggagaccaggacgcaaccagctccccacatcacaactgtggtctggagaggggccgagttctcccacagcagccaagagaacagccacagaaaacggctccagccgccgacctggaggcctcgtcccgggggatcctctgatctcattacagcagtcgacactagtcctcacaaaacaaacagaggaaatttatgcctgccttcgcctggggagagctccgcattcctcacttaacgagagttccagcttcagagaccacagccacgggctggggaggatgtctgctttgctccaaagaaagaactgaggtcctgcctcttcccctcattctggggctggacaggaaggaggtgagcctggagagagcccctgaactgatgaagttccctttcttcttctgtcaaccccaccctgccaggcacagtcagtggagccactggctcttgaacggccctgggaaagcgcagccttgaagggttccacctgctaaggccagaagcccaagagagaggctgtactcgggaacaaaactcgacatcgtt

SEQ ID NO: 53519 - DNA, 1610 bp, Bovine  19866881206414
  misc_feature (1)..(1): n is a, c, g, or t
ncgaacagtgggtgatcttgcttgctatgggaagagtgatactcaggcatgacagaatgaattaagggtggggtttaaatattaactcttaatgtcctaaatcttgtggctctaaattagattcagtgctgttataactgggagagtgtgagcatttatatgtatgtgtgtctgtcaccaaaaccatgtttgatcagttgaattgacctttttatttttctcatgaaacacatcaactgtattatgaaacaagccacccaaatgaaaaaaaaaaaaaacatttcacgtatcttgacaggtatttcatgaggacctctgaaggctgatatttcccttctgctgccagagctgaaatgagaaaaaaagcactttatttttgataagtgggacgttgtgttttttctgaacctttttgcctccaagatgtcttatgagagttatctcagtttgggttaaacttcccaataaatgatggagagtctgaaggggaggctcttggagccagtgatatagcaagtggtttgtaaaccaaagactaaaggaagaggaaattccctggtggtccagtggttaagattctgtgcttccattgcaaggggcatgggttcaatccgtgttcagggaactaagatcccccatgccatgtggccaaaaaaaaaagactaaaggaagaaatatgttaacatataggggccaaggaactttattgagtacctatagtgtgcccagtgaatatgaaaataatttgagcaatgtaaagattttagtatcagaggaacaatagaagaagttcagtggacatacagggctggctttcttttaatgggacactgtgttttgtattaggatgtgaagattatatatagaagtatttgaatagaagaaagaaaaggggaaaagagaaaaagaaaaaacttagttcaagtctctctaaagagttaataacaagatggaaaaattccagccactatgatagaattaaatcagcctgttttaataccaaagtgtgcttagtcatgtctgactttttgcaaccccatgaactgatgccctccagactcctctgttcatgggattttccaggcaagaatactggagtgagttgtcatttccttctccagaggatcttcccaaccagggatcgaacctgcatctcttgcatctcctgcattggcaggtagattctttaccacagtgctacctgcgaagcacaataccatgaaatgtattgttcattttcattcctgtattctattagcaacatttctgcctctccaaatccttttgaaaacagagaagtctgcatctgaagctttgcctggtctagggtctgcctcacccagaaaacatcttcaggaaacctaaaatcaatgggattttttttttcagtggataacacaagccagttttgagtgtgatttaaaactcactatataaattcctcctggcttgcttcagctataagtgtcctctattttttattgccaactctttctgtaaaacatacatccactccactttccacacttcagatttcaagtggaagagagctatttgaaggcctactctcaaaactgactcattggaccttgtagacgctttaaaagcta

SEQ ID NO: 53520 - DNA, 840 bp, Bovine  19866881217429
  misc_feature (1)..(1): n is a, c, g, or t
ntactaggcttacaaagcagagggcagtcaagatgaaaactaactcaatacaaaatgacctttaggaactggatcccgtgtatgctgcactgaaatctgcttggtcaattcggagaggaaactcagaataaatatttaccatgtttatttatttctcctactgagaactatctaagacaagaggatgtttagtgatggaagagatttcaagatttctgctttgcgctgtgtcctgcccatgcggcatgaggatagatacaggtcccagcttcataatgaaaccagacacagttcacttcctttttttttgaaaccaccccctcacctgggggatgttttgagatgacacagagttagtcatgtgtcactaacctgagataatgaagggaatgattggtgctcattaccattgacggggtgagtgtgtgtgtgtgtgtgcgtgtgtgcgcgtgtgtgctcagtcatgtctgactctttgcgacctcatggatggtagcccacaaggctcctctgtccctggaaatttccaggcaagaatactagaatgagttaccattcccttccccaaccattgacaataataatatttaaaatatccttctgggaagatggacagcatttgcctgggatagaatatagccctgactaagctgacctgcttcagctgctgatccctacaataccaaaaggagacatttcaactccagagctgctttctcttataactggcctaagaaggaaaggtcaagaagtggactcaggcttacaccttcatggcttatttactgaccatgaactaccaagaaatcaccaacactctttgtccaattccccttgctg

SEQ ID NO: 53521 - DNA, 1486 bp, Bovine  19866881249846
  misc_feature (1)..(1): n is a, c, g, or t
nttctaactgttgcttcctgacctgcatacaggtttctcaggaggcaggtcaggtggtctggtattcccatctctttcagaattttccacagtttcttgtgatccacacagtcaaaggctttggcatagtcaataaagcagaaataggtgtttttctggaactctcttgctttttctataacctgggcgcatttataaaggtgagcaagtgtgagagtatgaattagaaaccagttttaaggaaattaacatgagttctaaagaactctaagttagtctcatgttgttgtttagtcactaaatagtgtccaactcttttgtgaacccatagactgtagcccgtcaggctgctctgtccatgggattcccagacaagaatactggactgggttgccatttccttctccaggggatcttctccactcagggatcaaattcatgtctcctgcattagcagggggtttctttaccactgagccaccagggaagcccaagttagttacacactggatatttaagaggttttctgaatctgaggctgttcctttatttagaaagtggtagtctactgaagtgttagcaagaaaaagttctacagttgctttaatgatgagatgaaactgatttccagccactatcttaatttgttcatttgcaaaagacttgttctttcaagaactaaaacattcatcctgggatgctgcatttactcttagtttagcaaatccacacaatacagttcaaatactctatgaggcaatgtgacagaatgaaaatgtgcctgggttttggaatcaataaaacccaaattcaaagaccggatctgctatgtctagacaggtggtactgatttaacagttaaattattaatcaaatatctacaaaggataaacgtcatcctagattctaatccaaaatctgaattcatgacatctaagtgaatgaggacttagttcattctttcttctggtttctctttctactggactttgtgatattggtggcttttgaactgggcattaaagagttgccctcagtgtacaaaactggatatattgggtagaggaagcttaaaggcagagacaatattgtgctgacgtacagacatacagatcagcaaatgatacatcagttcatgctgaaaatgactcaaatatttgtgttaatttattttgccatattataaactataaccactgaaagttaaaaggctattgttcaaatgactatctttctaaagtatcactgtcaggttttttgaccaaaaggaaatctatagtaccactgctggattttaaatcattagagaacatcagtgtttttaagtaacaaaacaataaaacaacaagagaaagttttcttgacatgggatttcatgatgaaaatcttaaatattatgggtcaatattcatgtgttttcacactacctaccaagttttcaaactgtacctacttatccttttcaaattactatttctatcttttt

SEQ ID NO: 53522 - DNA, 729 bp, Bovine  19866881467989
  misc_feature (1)..(1): n is a, c, g, or t
nggtgtagatgtctgctcggtagtggcctcctgacactcttgttagcctgaataaacagtgttcccctgcctgaacctccatagtgctgccacgttgataaaatctgacattctgcttaatcactttttaatgatactcttccttttcttcttggtatgtgagaaaccagccttttaatttttttaacgtgtgggaaagaattaactttcagttcctaattcagtaaaatgggctggtattacacatataattctagtggggacgggggcgaaattatctaatttctgcttaccactgtctcttcttaaatttaaaaaaaaagaaaaacagttataaacttcctgaaatcatgtaaaggagaaaatctgagataaatacctgggagacgttgcaagaaaagtgcctgaattccgatagtctgtcccctgtatgattgtgttcaatgaaaatgccaatgtcaataagcacaagttttgcaaattatcagtttgttgaaaaaggctgtgggctcttattcttctgaggtgggatctctttcagtttaggctctgtagggaaagaagaaagaaagaaaaatacacacttgggattgaatccttgaggacagagaaagaaacagagtcctttccttgacttggttatttgtagctggtgtgtcatcttggtgagactgatgtcatgcgaattgaatgcagaagcaaactcgtggcggggcggggggcgaggtg

SEQ ID NO: 53523 - DNA, 886 bp, Bovine  19866881678662
  misc_feature (1)..(1): n is a, c, g, or t
ntattgtgcaatagaaaattcggtaaattttgcctctagatttcctccagatctctcaggtgaccacacccaagcctcagcatggccgtgttttcagtaagagacttgagttattactttagaaagtgaccttagtttcttccctctggaggtttttgctggcagagtttgtcatctttttttttttttttttttttggacatcatgcttactatagggaaagaccatgtatgtgcaacagactgaaaagtggcgtaattgtatctacctgttacttgatttcacacttgattggctccctaaagtcaacatggccttcatggttaagagttttcagcctgggtatcgtcagacctgcgttcagatcccagctctgccacagaggagcctggagaccttgggcaatctccctgacctcttctaaacctatcatttctaaaatactgatgaaaacaactaactccctggccgcctcggaggattatgttagatcgtgcccataaacacttaatgctcagcatctgctgagcactcagtcaatgttagcccttgtgatggatgtgaggttaggggaatggcagtgttctcaaaagcgacgtctctatttcaattcaataagtgcctggaatttcacatttgtgtctctttcatgatagccttgaaaagaactgacttatttgcaccaaatttggtatattgtgttttaaatttctagtaagaatatcagctccacagactgacaatcatctgtcttcttgtgggctattgcactaaaaaaataaataaaataaaaagctactgtttgtagacagcgagatacatcctgagagtgacttcaaatgttacagtaaccatgctcatactggggtggagtggggtgggggtg

SEQ ID NO: 53524 - DNA, 878 bp, Bovine  19866881684154
  misc_feature (1)..(1): n is a, c, g, or t
nataggcccaataatattatttgtcttcaagttgctatgaacagtcattcctaagatttattgtctaggccaagtccacaattcaaagtccagagcaagccaaatgttcagagctaggctttggaaactgatttaatttattttctaatgctgaaaacatactcagagggcctccttctgcattatgttttcattgttaggaccacgagtccttattataggtatttaacatgaaactttcgtgatgataatcacttcagagttgtttgaggtggattggtagtatgaagcaatcataaaaattttcagcaggaacagaaaacaatataaaatgttatcacctgtattctttgacatagtttcttaggataggtttttacaaattatctgtgtctcttttagtcatgagtgagcacacagtatggcacatggttttataccatgtatatttatgtatttttgatagatataaataaattagtgcccaggtaccaaacaatgaatagcctcaaaatttgaatttcaaggaacagtggcagaaaatatcatcacttgaaactgaaactttcagacatcaacagaaaaatgactgagattagctatgtgtgaaattcccagaaggtaatccacactcagatcaacccatggtttgtctacccactttttgatatcctttcaataaaaataaatgtagatacttagacaagtgaacaaacagcactacatggggtgaataacctgacaccaaatgtttcttgagatgataagagtatgaaggtatcacctgggagatattctcaccaaacgtgtaatcaagcctctagacttcattccactttaaaggaaatacaggggggttgagaaaggaagttaaataa

SEQ ID NO: 53525 - DNA, 1949 bp, Bovine  19866881720789
  misc_feature (1)..(1): n is a, c, g, or t
ncaaaggcacaagctgggatgtctgggcatcctctgtggcgctaccttccaatttttcctggctttggggtgctcaggcagtttggctccaaggaatgcgcttcagattgaggattcttcatattatcaaaggaagtgttagcagtctttttaatgtcatgctttattgtgttactattggaattcttttgctcttgatgtttttcctcagattttttacaacctactgaatacttagaagaaccataatcttctgatttgggggatttctctttcaacatttctttgcccaagttgtttatattccccttctgacagtgtgaagatcgtgctttctctttacttttcttttcaagctttccttcgtcactatcactgccaacattcatggagtcacaaaactttacaaagattttcttaagttttgtaaacaaataatcgagctgttcatctacaaatttccacaatttttttttcatatctggcagctgctgttcaaataaacgatccacgatgccattctttttaacttgcttgagtttggattctataacatcacagagattcttctgtaaagtagtcactgacttagatattttggacaagtccaggtatttaattagtgatgtaaaactcaaaattgctgactcaataattctatgaaattgtattaatgaaaattttaccttgaatttcatataatttttccttacatgttttcttatcattcgtaacatgtgcataatctctcggacagaagagggtgtgacaatgattggaactattttttccaggctggaagtgctcattgacctctctttcttctctgtttttgaagatctgctagattcacttcgtcttctgttccatctgcttttggtctgatgcattttcatagaggatatcttcctattgtctttatccaaacgcacagagcttttcctactttctgggctagtttttgtgttctgcacttctgtagaagctcttggtttggcacttttgtcaaaacttctttgtggttcaggtttttcattgtcacttataatttctccttcttctaattcatctaaagatgaattcttatgggagtctgcttctgcaaatttgtcagatttgcatattggcttttgattttccttgttgagatcagactgactcatggaggtagaatgagctgaatttggtagaaacacatctgtgaaagagaaaagcatagtattgccacatgaccaatcagtgtttgtcatttaacatttccacgttaaatataacaaaaaattaaatgctgaggcaatttgttattttaatagcttttttaaaaaaaaagcagaatgttaatgtctaacacttatcatatgattcatctttactggtctgagaaggtgcctgataatgatagtgcagtttgatcatttgggtaaccagcaaaaccaactgttcatttcttgatgttagcagcatcacctactctatgccatttgatgatggtttttaaataagaagtatctgaaaacaggcaaagaatatttgaaacaatctgtcccaccattctcttttttgtataaataagcattacctaaatccagactaaaggctcaatgtacattactagttaacaatagaggtctaaacactagttatattatcaaataaaaagcattaattcatcttgctggtgtatttttacattctcacataaagataaattatagaagataatataaagtattacctttatgatgattattatataatggaacttgagatgcactttccagtctaagaacttttgctacaggtctcactggactattcagaggactgatggcttctggaatagggtctcagttgatttaaagtcaatgctcagaactgagttctcatcatcatgatatactggagtttgtttcaccaacttccactgtgtcatccattaactcagtctg

SEQ ID NO: 53526 - DNA, 1636 bp, Bovine  19866880438779
  misc_feature (1)..(1): n is a, c, g, or t
ntaaagtaactattgatatatatgttcctattgccttttcttaattggggttgatttttgtagatcttttttcttctctacatcctgtcatccctcagggcttcacacatctaaggacacatttgcttgtcataaagaagaaatgaaatttacatgttttaaatcattattttataaactgacatgccttgtatgaatgatcacactacatccgaagaatggcagtggaaacagagcagatgttacttctctcatcaaaaaaaacagttgtaagttttctttcggaatttttttttaaccccagatttaagtcatgttcaacatcttcacctctaaatagcattttcttattcattcccaaattttgagtggttttattgtttatatgtcttctgccagagatggattctttaactattaattcatataatatgcatttttatgaacaaatgctttggccattgtatatagtgcatctaaatggcatagtgtaatttaatgccagtatcttgaattagtctattggaggacaaagtttcttaagttaggcatgtgacatggaccataacagagctggaagtcttgctcctatttaaacctcctcatgtgcttactattagctttccctaaccatgtgcccatctgatgaacaagttcctaaaaaaaaaagtgaaaaattccaacacaatttgtgttatgaaaacaccaacattaaaagaccacagaatagggaattccctggaagtccagtggttaagactccatctccatgcttccactgtggagggtggaaggttggatccttggttgaggaactaagatcccacatgaccctcattgtggccaaataaatagataaaatgttaacctcttgaaaaagaaaaaaaaaaaaaaggccacaggataaaaatgtgctcagagtctttaagctctgagtattgagaaatggagatttttactataggagtctttgtacacagttatagtctttaaccacaaactatccttgatatagctggataaataaatgttatcaaattctctaagtgttaattactccccaacactttatttttacttcattcttgacatgaaaattctagaaacaaagatccttaatttcgttttgtttttcctatccttttgaactcattgttctcaaacatatttagtgtaatttaaaactcaatgtttctcaatgaaactcaaatgaaaataaaattacgcccacatcccaattaattctaaaggaaccatttaattagagttgattgctaaattgggaactaggtcttatttgtaacacatcacagtgcaatatttgtcttttaaagtattatttatgtatttaaagtcaacttaaatcatatgatgaatgcttatacttactttggatgtctgagccttaaaatcgtaaacagcttttgcaggcagtttctgaaaaggaaagaaatggttgatgctaacttaaaattttggatttcctattaaaaaatcagtttcatatgaattaaagagaaatgaaacttgaaggatttattaaacacatacaatgtaaatgatatatgcaatttataagcaaatcaattggttctttttagatagttaaactataacagatgacctattcaccata

SEQ ID NO: 53527 - DNA, 1913 bp, Bovine  19866880450418
  misc_feature (1)..(1): n is a, c, g, or t
ntaagatagatacttgcatctttactttataatgcaattaactgtgtatattttgttttaaggcaaacgaaaacaatgcaacagttcataagtcattggccaccaatacaacactttctgtttagaaaatttttatcctttggtttcttgggataaatattcactttctaataagatagttgaacacaaaggaagcaaatagatgatggcctattaagccttaaaccttaagatgtcatcttcagattcaataggtcattaaatacagagagaaagagagaagagaacggtcacgatgtagttctgccatcatcatattttttttcattactacatccttaaattgttccataacatgctccagtttttataaatggttgctcccgtcttcatcttctataggctctatcatagtaattataaactggtggcaaaaagaacagcaagtattaaatctttgagatgaaaaatccctgtaactttgaattacctatgctgcagcataaattatatcagcagtgtaacaattaaacctttatatttataatacttctgaaatcttagatacttttcctctaaaagtgctctgttttgtgtcttacatcacatctttgtaattccctatgagttttaggcctgtgttttccattgtggtatctctccacgtttgaaggggaatatagttgccaccaggaaaaatgcttttgattacgtggatactcactctggccctgtcctttccaacagaccatgagtcccctaggagttactcggccacactgactgatcttggaagaaccacacccagggaaagaagaggaactccagaaaaagaggtagtctgcttagtggcatctgagtctttttcaacaatatacttgagaaagcatttgccagccagagttatgtctaaaaccagtaaagagccctgattaaaaacattaaagtgttgatggagaaactagaaattagttttccctggagcccaagcaaaggatttgaagccacggcattctaacctgagcagcacgtctcccccagttgtagtccatttttgagagtgactttctgagtcttgacctgacctatagattaatagctttgtctgaaacagtcttgagctgggccaccccttggaggaagaaagctttccctatcgagatttctggcccagcgatgaaggggacggtcctatcagctgtgctgcaaatcaatacaaattccatggaaataatttttgctgccctgcttttgttggggaggatccctgaaaaaaaaccctgctgttcctgggaacccccagcctgctggctcttgtccgtggtcctgagccaggctgacggtctggcttgtactatcttggagccatgaaggtttgatagaaacagaaggctggtcctggagtgtcagccactccagaaagttctctaccagtgtctaacacaatccagtgcctatggatccaggatccaaagtcaggaatgatccaggatgcccaaagtccaccagagtctcagggaaagagtggtgagaggatgattggcatcagagaggaagagctacaggtgccccaggcagatctgtgggccccagagcgtgagtgtgggctcgtgtcgaatctggtcaggactcaaagataagcggctggtttactgggtgctgaagagttcctggactccccaggcaatacaaaatgaccaagcccatgcttttggccactaactagcctctccatgataactaggctatatttctttgctacgatgttaacaagtgtttggtaaaaggagtaatgacttcctttgtgactttttccagtcctttaattatggttcagaagctgtgtcaatacttaggacacagaacaattgaccttccatgggttatcccaggaaaagccaaaattatacgta

SEQ ID NO: 53528 - DNA, 1074 bp, Bovine  19866880468280
  misc_feature (1)..(1): n is a, c, g, or t
ntagaaattctagctctgagatgagatgaacataattttgaaaactgaaaagtaagaccagtgtccttttttcccagatgacttgaaaaatttaagtacaagtcttcacacatagaaaagatatcttttcatatttaaaagaaaaataactagctgtctcttaattactctttttctaaagctaaactttctgatctcatttccagatacaaaacgtacttagtataaataaaactgttggattataaacatgaaaatacttcggtttttattttctatattagccacatgcataatgagggaagtactgtgcttgaacgtaaggctctgtgaatcttctttgcttttagggttactgaacatttaacacacttgcattgtgaagattttagcacttctaaatgtgtgataattctttttactatgcaacttttttcaattaattcttttcatcagtgtgaaatagtctgcatttactataaacctctctgcattatataccctgcacacataaatgctccaactcaagatcctgaacaaaacaacacagaagatttgggagtgggaaggcagatgtgtgggaccgctgggctctcggcaaaagatctgaaataagtacccttcagcgagacgtaattgtggaggcagaataacacagagacacaatcacctgggtgacgaagccatgaaaactaaagcagtgagggtgagactttaggcatgaattattcatgatgagtaatgtctttataacttaaaattaaacacccagtctacctactgtctccttagaaacggccaaaatggaaaagcattctgtttcttgaaattacttttatatttaaaaaacaaaaaaaaggagggtataagcaatctgtgcatgtctttgcacttgaaacaagtttatctttgtgatcatagttcataatactttcctgcatatttgaaagtttctaatcaatcttaaaggttctcatcataagaaaaaacaggtaactatatggggtaactgttaacttcttgtggtggtcattttaaatatatacaaatattatgtgtacatccaaaactaac

SEQ ID NO: 53529 - DNA, 1901 bp, Bovine  19866880515742
  misc_feature (1)..(1): n is a, c, g, or t
ntacctgctgtccatttgctgtcccatccctcttatttagcaaacctgctcccctatcctctctctcgtgtgtctaagacagtctcaaatcttatgtaaactctatcaaaatatcaagacatagccaatctctgcaatcatgccctatggcaccacctgcccccccccccttttttccctggtttagagaggcaattggaatggattcagggttgatgaaaagaagaagatactagactagctgagccctataataaaaagcctggccaaaatgatacagatgactggctgagatcatcttgcataaggctggccctcagcaaaattgtttaggaggcataaacattttggttctttctgtttcttcatgagatatccattctcacttttgcccaagtttctaggttcctttcactgcccttttcctgtggcagcagagagctatcaatatccaaatcttcaaccacacctgccctccagatctttccattccttttagaactagttcagtatactgggtgtattggttttgtgtcttaactacaatactcagggcccaggttgctggtcaaataaatccaggacacgaatttattataagtgaacaaattaacttatactataaaatagttaatcaaatcatctaattaaggtgataatgactactagctaaatgtgtttgcagtttagcattgtgcaggtgatgaaatgcaccaggtgtgagtctgtgggctcagctcccaggtgcagtgctaaccagccacgggaagctgggcaaggttgcttaacaagtgttcagtctctctacctgtaaaatgggaattccatacatttacttcatacaattgttgggatcattatatggtaataaggcatgaattacaaggcctgacatcttaagtaagtgctcagtaaggagctacaactattgctactgcttttgtcattgctgtttttaaacttggagtcttcaaggcattaacccaaagacatgactaaagggacatttcattcacaatgacagggactgtgaataagctattgaggggggcaaattcattctgcgtgtctccgttttaaccacactggagatggtctacttcttacaaatgtgggtctactctgcatattggttaaacagactccaggttccttgaggtaaagactatgtcttgctcattgccatgtcccctgcacctaatccaatgtctggcacataggtggtgcttcataaattttgttgcatgagtaaatactagaaatatcctgatggacagcttccaaaatcaatcctgtttcctgacaccaaagctgcaaaagcattccgggacagtaacaacccccatcatcctaagggtctcagacattgttagaatgatcattaatgttttggtaattacatttaaatctgaggctcatattgcatgatgattttgatcttttccattttatgcaatggtgaattcatggtctcatcctaaaaatttcaaagaccatgatattagttctcatcctaaaaatttcaaagatcatgatattatatcatataacttagtgaatgagttatatgtttgcagtggaacctgcaattcagtggtgttcatttttttttttttttctttcagtttttctggtaaagtcctgttactctaaaagatacaagttaatttgaagaaaagctaagaaggtttagaaaaatatcctgtatgaattatgtgattataaggttctggaacatgtttctcaagaatataagcataaatacagggtttgaaaactaaatcaaggacactcatcttgggtgtggtgcgcaacggtttctaatcaaatttcagggctgaccttatatataatgatgtggcttcctgggtactcttaaagacactaacaaagaaaactct

SEQ ID NO: 53530 - DNA, 1468 bp, Bovine  19866880557374
  misc_feature (1)..(1): n is a, c, g, or t
ncatgtttagatatgcataaacaaacggcatatactagacattcaatgcaagcttcccttctataaaacagaaaataaaatataagcaactcagaagttccttataaggaaccagcatttttatgtacagccaggctcctctgtagacgtttcaaagtttacaaaaaaggtacaggtctgaagactcattcacatttcttatttgtcagccccgcacagcacatcccccaagtatagctgtgtttataaatgtggagtcaggccatctcggagccacagcaggccaagaatctccaaggctgttttcccttctcatccgcatagaaagcaatgattatctgacttacattacttcacatgggctttccgctcagggtgcacaccaaaggcagtgctgtgtcagtgtaccattttatagtctcacggtctcagttagacagtttagactgtaggctcattttagacatattctaggtatgctgctgctgctgctgctgctaagtcgcttcagtcgtgtccgactctgtgcgaccccatagacggcagcccaccaggctcccccacccctgggattctccaggcaagaacactggagtgggttgccattgccttctccaaggtgttgtgctaggtccctttatacacattgtctctctcgatttccatagaccaaggacacagaattttgtaaagtcacctagaaactctagaaagccaagagttaaacaaacgcacctttgagctatttgcaggaaggggagcagctccccagactgccctctctcatgtgacctgggacgtctgtgccagccttttactgccatccttaacgacaacaacaaaacccgctggggtccagctcccacgagactgtgtaattaaggccaactagttaagtgaaatacaagattcttttcttctacctcaaatataacaccagtagagccttttcaaagctggaaaggggcaaaaacagaacagaacaatgaacactggtgggtagaaaatacgtgtctttcccctttttggaaatctctgcctgataaatcaatgtagaattctgatgttttgtaaactagaggaatataaattttcaggtttattcagccaagttagagaaaacaaccaaagagtgatttactaatagctactgtcaatgcaaaaccattttgaagaacacataagacagtaaacttttcaaattcaagtagacttctgtttacttaatctcaccatttgctgtaacaacctacattaggacatatataaaaggaactttaaatgcttagaggacttctttgagaaagagatggagaggttaagtgttcccatttaccaggttcatattcctctttgtcaaccaacttgggcatttcctggttctcagtgctcaccatataaagctagcagatggcacacgaagatcctgcctgatatgtgccctctagcaagtgaaggggaaaaaaaa

SEQ ID NO: 53531 - DNA, 2013 bp, Bovine  19866880699215
  misc_feature (1)..(1): n is a, c, g, or t
naactctggacacatgtctacgtgcagatgttataaatgtgcaataaaagcatttgttctacgttgcaaaaatgttgtgttcaagaagtgattttgctattgatttggtgaattgacttaaaacaagtccatttaaccttctcagatctgtttgcttcctctgtaaaataagtgggcatgatttctaaaggcctaaacaactctaaaataaatacatgaatttattttacactcaaattacatattacttgtgtggctatgacagtaagtcaagccccagttataatctaaagaagctctagaatccttcatgattactaaggatcattgccaaaaatctgtttgtcatccaagatgtgatgtgtgggcttccctggtggctcagcagtaagagaacccacctgccaatgcaggagatgcaggttctatccctaggttggaaagatcccctggagaaggaaatggcaacttgctccagtattcttgcctgggaaatcccatggacaaaggatcctggtaggctacagtccatggagttgcacacaatgactccatggtattttgaaatgtgtggtcagagtataatgaacaaatatatgcagaacataatttataaaattgtttaccatttactacagttttaaaaaatgtatcctcatcatatcatctaacagtatggaaaattagatgtttataatccttatctaaggagaagacaactgagtatggaggagacaggaaaggcaagagtttctcggcctgtaaagtgacctagaattatttcacttaaactttatacattcttgaatatttcctcatataaaatgatgcagaaacaagttaaaacaatttcatgaattatggtgcttaaaataaaggataaaaaatttatcattactatttcactgaaaaagaaactactggcataaaatattttggttgcataatgtaaggagatttaaaaaattttttcatttggagaataactgctctacaatgttatgttggtttctgctgtacaacaatgtgaatcagctccaagtacacacatatgtcctcccttttgagcctccctccccacctcaccgcctgtaaagagattcttacctagtgggtctttccaggcttctgtctatagaggattgatacaatgaggcctgttaagacagaagggtagttaacatgaaaatttttaccttggcaaaattttgtgtatccctggacattaagttaggtattctaaaaagaatattgtcaaaattgacattaaaaataccaattatgggcattaaattgttttcccaaaaagaagtcatgaagcctaatttctactttcctcttatctactttttcatctgatatacaatttgaggggagttggttccaggagctccccaaggataccaaaaatctgaagatctcaagtaccttatgttcaatggtgtactatttgcatataacttacccacatattttgtatactttaaatcatctctagattacttataatacctaatgcaatgtaaatgctatagaaatagctgctagcatggcaaattcaagtttcgctttttggatatttctggatttttttttttttttttttgtggggaaaatatatttgtccctaagttggttgaatccatgaatgtggaacctacagatatggagggccaactgtacttttctctgtgtaactaaaaatattcataaatcaaacattgcctagggtgagaaaaagaaaaattaccccttcatgtagaaacagactataaatagaaatttctcacataaagaaatggtttgatgtttaaagaagtatttgtagccatcattcaatccttataaagcataaatctttatacgtttttgtcatattgccaggtgtaatttttatgtagacataaaatttaagcaggacttctttcgtctgtcaacataaacatgactttttaaataaaaaaaccacagaattggtttaaattaactacctggccctgaatcaggtacaga

SEQ ID NO: 53532 - DNA, 884 bp, Bovine  19866880737195
  misc_feature (1)..(1): n is a, c, g, or t
ncttgtacagctcctgatatttagcccgaggcacccctggggagacaatttggagctcccccagaggaaaagtctctgtgcaaagctttgcatctcacaatgacctcatcaggaaggacacaggagaggtaggtagcagtgactcagggcagccttacagggtcctttgcagaaaacgaggaagatgcaaaaattgtctaaggaagaagatgacctgtcttagttttgaaactatgcagcctttcaaatgcaccaaggaagaaagccgctgacctttctgagcgatagctccacattggtgtcagcactgaaattatatttggcgacagcttctccgatttcaccaggctgggctgggggaggtggtcttgcaggctgtgctttttcaggaggtgtgagtttctacaaaggagaacagttctctttattctttgttttctttttaaaattttattggtgtatagttgctttacaatgttgtgttactttctgccgtacagcaaaaggaatcagctatatgtttacatatatcccctctcttttggacttcctgaccaatcagggcaccaaagagctcaaagtagagttcctgtgctgtacagtaagctctcactagttacctattttatacatcgtatcaatagtgtatgtgcgtcaatcccagtttcccaattcctcccacgcctctccccacccctctgttggtgggagtgtaaattgatacagccactatggaaaacagtatggaggttccttcaaaaatgaaaactagaactaacatatgacccagcaatcccactcctggagatatacccagagaaaaccatacttcaaaaggatacgtgcacccgagtgttcatagcaatactattcacaatagccag

SEQ ID NO: 53533 - DNA, 1535 bp, Bovine  19866880775444
  misc_feature (1)..(1): n is a, c, g, or t
ngtgtttgtccgatcgcaaacttttcctgtcacttaaatatgacaaccattggtgccaacatagatttttttaggtctttataattagccacattcaacattcccagaatctcatgagtctaaagccctagcaatgactctacagacttaccttctggcttccctttctaatacagatgcttggaataatcactttttaactcttctctcagatcgtgggatccatataataaatgcaaattcaagaagagaagaacctcacccaccctcactctctcgttcattttgagcagattccaattgccccagatctttttctaatctaatgcccgtcttttcctctctgcactctcgtctttggcccagcaggcaggtttgcattccaaaccaggagccctccgcaacctcccagccaggtatgcggacccgtgtatgcagatggcgctgcggtccctccccgccccccagtttcacctgcagaggtgctgcggctctcatcctggcgcccggtcttcttccccgcaggctagcacaaacctcctctccaagtggactggctcagcaagcagctgcctgcccgagctcggcctctgccgctgctgaactttgccagaaggggctgccctgacgcactgagcaatgatctggcagagtttacagactggaggaaaaaaaaaaaaacccaacccaaacacttccactgatcgccccgggagagctctcggcaggcacagccgacgagggacactcaaatgtgatgtgtattttcctcggacagcttttcctttctctgacatgaactcccttccctccaatcatcaggcttctcaactcccaatccagggctcccaatctcctggcagtaaggcacatccatctccagacacaaatcactggcttatttgctgtgcacgtgggaattcagtgtagccaaagaattcacatttaattctcccttctctcttctctctctgttgccttaacactccttggtaaaaggtgaaggcaaacaaagcttacttctatcatctcacagaatcacaattttcgtgctttttaaattgaaatagagaaacagattgggccattatcttcaatggacagttccttttctctgctgcacacagcataatattcacgagaactcagatggcacagagggcaatcctcattatataagagtgtaggaatgcacaaagccaccgacaatccatcctttgtggagatttgcacagccccggagcaaagcgggcactggcatttcctaccgttctgattgccgtggggattccggattcatccactggcccgatccctgggtagtggggtgccttgatgactgtcactctcttttcctcctcggaggacctgtacagtggtatcgagctgcccacgctgccgtccagagactgagcatgctgggggtatgcctccgaggaatctgcagagaagatgtgaaatatagttgatgcacagggaatcagagtaatgaagcctcatattcatgcctactataatacagtatattataatta

SEQ ID NO: 53534 - DNA, 1349 bp, Bovine  19866881516709
  misc_feature (1)..(1): n is a, c, g, or t
ncgtcctgtgtttactcatgaaaacattcaaggtgggggggaaccgtaagtattcttcttatcttctaaatttgagactaaccttgacccacaaaacagaccattgatgtaccataagtgaggatggtacaactttgcacatgaaagagaccagagtaactaacatgagataagacctccctgattaagagtaattgcaataacttccatctttcacaacagagaacagaagctacttttgaaaaaaaatccatgattttgcaaagattgatttatgcactcgaaaaaccttccaatgctgtagtgattcctaagatttatgaatctgtctctctccctgttctaactcagcatgtagattctagtaactgcagccttaaagacactgaaaatgttctaacattgtttttatacatatttgaaaagcaagagaatgtcaaagtagacctacagtgataagttcatgacataattccgaagttccagaatgttggaaatggcagtcttaaaacatgcactgtttaagttacgtgatgtttactacccagaggaccaggaaaataaatgccttttcacactttctttcaaatccccacctactgatactaagtcaaaccaaccctgaaggtgtcacatactgtctttaaggttgtctttctgttccattttgccctaggaagacagtcagaggttatccacttcctgttggctgttgcctctctgagtcaggagggagccccagggaaggcgcgggtacagggctgaaccttgtcgggctgacctgaggacacataatgcgccccctgctggctggccaagctccactcccctcagttcagttcagttcagtcgctcagtccgactctttgcgaccccgtggacttcagcacgccaggctggagcagagcaatccagcagggcctggcgatctcccagccattggtccctcctcactgctcacatacctggtgcttagctaaaagcacaggtctcagaagccatctcccaaccccaaactagctctcactgggtacagctagaaagaaatttttgttaatgaaaagaaaaggtttggaggaacaaatcgtttaaaatttcatttagttgggggaaaaaaaggtttaaatataatccttttaagtctaaaggttgactttgtgttcttttttacacaactgactatgagatgaatcacagagaataaatccaagactgattaggtttactgccctgcatcatcaatgcattatattagaagcttttaatcaatttatgaattaggatataggccctattactctgtttcatatcatacggagttaatactcacatgtgtttagagctcacag

SEQ ID NO: 53535 - DNA, 884 bp, Bovine  19866881619829
  misc_feature (1)..(1): n is a, c, g, or t
ncatcaagaccagtatctgtaatagatacttataatattggaaatgacaagcctttgaatcccatatatccacataaaacttcaatgaatgaaagttaacacgtttcttgaatatgtaaactcaatgtcatttataccaactgtctaaatgttaccttttagagggggaaaaaagcatcacagttcattcacaacacactttcaaaaccattctcttataaatgatggctacgtggtaaaaaataaatcagaatctgaatgacaaattgcatggcaattatcaaagtaattccttattgatgattagattttagatccatgacattagacgtcagggtcagttcctggatcctggagttataaatggataactgagagactgggaaatcccccctgcaaactgtccatcgaaacccctctggttcaagaatggagggtgactctggggtttctttcagtcttcgagtctataacctgctcccttcctgcattctttatccattcccttcccatccaagctgtctgtctagcatagaagactagatgcttgttactatactactaaaacttcaagctttcaattaatagtaattggaacctactatttaccagcaatattcttagaaatttcactcaacagtctatgcatggaatatataagtgtaagattaaagagtggataaaaattgttgaacacatgtatggcttaagagtataatacttagactgtacataaatataaaataactaacaatgtatttattattaaaattataaaatatactatttaaagattgattaagactaaatcaatttcaataaagaggtaaagttaagtcattcttaagcctacatttcttcaagttttcattcaatcatatata

SEQ ID NO: 53536 - DNA, 827 bp, Bovine  19866881923862
  misc_feature (1)..(1): n is a, c, g, or t
ntcacatttgaatccatgcaacaccagccaaactgaagccaattccttcttgcagttctgcaagcatggccagcgactttaggaaaaggcggaggagcgagcctgcggtagggcagcccaggggcctgggggacccgagtgcaaggagcactagcccaggccgagcagacctcccaggatcaagcaccaccctgacaaaatccttcattagttcttctccttcttctccgtcaagagcaaaaggtgagtggcaataaatggcgtgtaaataatttactagttcaagttttaaccttaggagagctggtccaatgatgaccacccagagatggttagggttagtattttaataaaatatagtttcaaaacaatagctttcctatacacagactaagtcaggatgatgaaccttctgaatggcttaaaggactctgactctcatctgttaatacttttgttgtctccaaatatatcatgtgtgttatttggaacaaacttaaagtatcaaaaaatgtatggtcaggctattaaaagattgcatttacaaacatttgcatactgtcaaaattttctaatgttactacaactagtaaaattaatcagagttataaaatagaaattagtagtagcaacagagagcattgttgcctaaaacataaattgggttggttttttttttaattatttaattctagacaaaagtttgtctaacctatgaaagttgtttctttaatcacttggtttatattttagtcagtattcatacatacagtagaatatccatgttccgtatgtaacatggtgttcaattcacaacagtccattat

SEQ ID NO: 53537 - DNA, 1681 bp, Bovine  19866880378976
  misc_feature (1)..(1): n is a, c, g, or t
nctcttggaaaagaccctgatgctgggaaagattgaaggtggaaggagaaggggatgacagaggatgagatggttggatggcatcaccgactcaatggacatgagtttgagcaaactctgggagttggtgatgggcatggaagtctggcgtgctgcagtccatgggggtcacaaagagtcagagacaactgagggactgaactgaactgattaaaggaaggatttttgctggaaaaggtaagacaagatgaaagctttagcattggtaacttacaaaccaacaacacagaatttctgcaagtaattgaaactattagcctgcttcaaaactttttggtttttatcactaggcaagagaaaagttaatgaagacagtttgcatgatatccttaaatatcagatgaagaaatttactgatgggtacagattctggcaaaacatgcagcagaaacactcagagagtttttccacaagcagctccccaggtttctccccaagaaccaatcttcttttcagtctcttcagtttcatctccacagccatcaattccccttatgctttagaacagtttcttcacagattaaggaaaaatataatcacaggaaatcctttgctattgccaatctaggcaacattagccagaatgagtacaaagtgtcttcagtgacaaatattaagtcatgccagttgctaaagaacatggcactgactttgactattttaacaatgatggagtaatgaaagacatcagggttatcataggtttatatcacccttcacacaggcagtgtgtgtagatgtggagaagagtgagtgagttgttgaatctcatcaggcagaagcgaacaaattaagacaacaaatcactcagatgaaatacaaagaaaagcacaagaaagaagattgcagcaggtgatgctaaggagacagatgacatctgaaagtttggaaaccatgtttggccctcagatgcccagaatttgtagctgaaggcagatgcacactagcagatacagaggcttgtgatcctcctccctcttactttgattttcacccattcagtcaagccacgtccaacccttctcccagggaaagtgtatttatgccttgatctcaagccgtgggccctgccaattatgctttcactaatgccagactgaagtatcctggaagtggagcaggatgaaactttgattaactcccactggctcccacacacacataaaggaatactcaacttcgaggaattcgccaatactgacatgtacccatgggggctccgggaacactcagacctcccagattcaactaaagaagaggaactcttcactcagcactgtttgtttttaattacttattcagacaatattttaaaacatatcctgggtaggggggcggaattgctttctcggagccctgaacgctcccaagaggagagtccttatgctcagaacttgatggaacttcatgtgtgtgggtcctcacctttcatcccagtgtgcagatgtcaaggcacaaccatgtatcaaattgtctaattctgatgtgattccaggatatgtggttaactttaagcaaagtaaatgataaacgtagtttttgttctttaaaataaattgggaattagagaggaagcacaagaagtctataaatgttctataatcataaatgaaaaacttac

SEQ ID NO: 53538 - DNA, 968 bp, Bovine  19866880381132
  misc_feature (1)..(1): n is a, c, g, or t
ntgtgtggttgttgttagttgctaagtcgtgtccctctctttgcgaccccatggactgtggcgcaccaggcctccctgtccctcagtgtctcttggagtttgcccaagttcatgtccactgaatcggtgatgccatccagccatctcttacctgctccaaaccttgacctgccatttggctgatcacccttggctggggtgccagcattcccacccctccagcctcatcgccacctaaactagtctctttctgactgtaggtctggggcaagtggctacagaaggcgcatcgtgatgttggctgcccggggtgggatgtaggctgttgggcggcatggatgctcaggcactgacctctggaccctgacagccagtcctgctaaattgactggaagctggaaggctgagcaaccctataaagcaacaggaagtctggagggtaagaatgggaagtggagggaagcagaggacagactctgcctctggcagccacctccctagtctccttctctgcctttagtccgagctgcccgtaattagccgtctgtaggtccccacggtgaaccaagctgcactgaggttccaggaggcccagagcacttcctgccacttctggtccaactgcatctatttctggcagcttaattttggatgctgtgctcccagcgtgggaaggcaggcaggaagggcatttaggtagctggaccagaggaggaaaccatggccacatgactttttgaaccctgtcccgtcaagaacagactgcttttggcagctagatggtgtcgcccccacctacttgaaggcagtcaggccaggaggggaggggattggctgagcagaggccagatccagctgggatggaaagcactttcttatacttttgcaaaagaaccctcacgttatgagtgacttgggcctcctataaggatggggatgggacttgaagtctgatgggtccagatctg

SEQ ID NO: 53539 - DNA, 1597 bp, Bovine  19866880454814
  misc_feature (1)..(1): n is a, c, g, or t
ntgatctggccccaaaatgtcacagtgccaaggctgagaaaccctgccttatccttaagatgggaaccaagcacacgatgggggactggagtaaggatttcacgaagtacgtgggaacctgacagaccccaggtgtgcccggcacacgtggggctcaagcctcaggttcctcatctgtgaaatgggtgtcctcagctccaggctgctgagtgctggcttccagtgctcagcactgtggtctgaacggtctccatttccattaaacacccacagtttgcaggtgatggagtctctcaggatcatggaaaactgccaaaaccttcgcatcatttgggctttggtatgcagcaataaaatcacccactgattcagaagccttcaactatgagaattaggtatttctagaagtaacctttaaggtctgttattctttgccttattagcaaatcccagaaaggccctggttacctcgaagaggccggcctttccaatatattagagtaatcccggcaatctgttatttctaggctatcgaggaaaggttaaaatgaaaattggatttggggagttatagccattccaagtgcaggtggaaaactcctcggcagcgagaactgggtctgggcctgggaagaagcagttatcaagggaaatgactggtgataactttattgattaaagcagcttgaaaaatgtaagggtttgcgacagcctggcacttgagcggcaagatagcccctcgcgggcatttctcattaaaaatagagaagcaggagcagacaattattaccctgtgcataagacacagttcattcaaaatggccttgttttgaaagaccgctttaaaatgtctacaaatcctgaggcttgaataacattaatggacaattcagaaaaaggggtgggggggtggagtgaagaacatgcctttgcccatcaactgtcaagagggggagacagagaggatgataacgcgggaggggataagatgcagctttgtcatctgtgctcagagccaccagcgaaaacggctccctagtgacccagggccacagaggcgcacaatgcctgcacagcacagtagccacgccaggaattcaaacccccaaccccccaccccggtccccacggccctggcatccacctgaaccctcaaagggcctcggtgccccgtcgggggctgtggggagggcggtttctcattcggaatgtgaaagatgctgaccgggaaagtacctggaaaacaccagaccaaccaacacaaaggtaggagggaaggggattaaccaagctcagctctgcaaagacagccgagaccttatcacaccttaattctcggtttttctggtcttaatttctaggcagtgacagtctgctgttttgctggtgggggaggtgggggagactgccaacagacggctgtgaccatggtgctgacataattctaaatactgatttttctaactcaaattacaacagcaacctttctcccactctataaaaaaacaatgatcttaagaatgtattctttcaaattccctatgagcaggacacaaatgttacgtagttgcttatatttaagaaatggaaagccaag

SEQ ID NO: 53540 - DNA, 4123 bp, Bovine  19866880478520
  misc_feature (1)..(1): n is a, c, g, or t
ntgatcctggttgggtcgaagggatggattctctgagagggtagcactgagtgaaaagctaaaagagtttgccacaggctgtgtccccaaggaagcagactgtaagactgagatgaacatagaagaaatttattaggaactgctctcaagatcaccacctattggggaagagagagaagcagggttggacagaggaagtagtcaggctggggtaccatcacaacggagcctcagctaacaccctctcccctgacaggacactgtgacgctgggatgatccttcggaattttcaggttggattgaaggatgtgggcctttattcatctgtggatacactgaccaaatctcaaatgcttttttgcccagaaaaagaggattgatcttggacgatgagaattccaggaaggataaatccaagaaagggctgtcagcacctggaagaataattcagtcagtcttacaaggggacgtgtgggtcacacatcaccacatctagagcagagactatggagtcaacctgcagctttctgggagaagagcattccaggtgaatagaacagtgagtgccaagcccccgaggtagaatgagatagggttatccaggaagcagaaggaagtctagtgtagctgcagcagagtgaacaaaggggacagcagcaagaaatgaaggagtcagatcattgtaaggttggggatttaaccaagaagcaatgagatttaaatttaagttttggtgtgacagttttggctgatacactgagaacagacttggccgggaaagggttaaaggcagaagtgggagcacactgcctcttttcatcctcatacaatggacattctgggtgggataattctctgttgtgagggtccgtcctatgcgttgtaggatatttagtggcctccttgacctctcaccactaaatgcaggtggcatcccacgctccctcccccccacccccatctgttgtaaaatccaaaaatgtctcatttttgcctgctgtcccatggagcaaaactgcctccagttcagaccccttgagttaaaggctgttacagtgatccgggatagcttggaccactgtgatgggtatgctatggcaagttgtaggattctcgatgtatttttgaaaactgtgctgactgatcaaaggggagcatcaggaatgttccaaggttgttggcctgtgcaactgtcagaaaacagttcagtttgctgagtttggaagaagtgtgctgggaggagctctgtgaaagattacaatctcagttttgaaccttcgagactgaacgaattgaagaataatgattagaaagtttagttccttccctgaagttagttgtagttcattttcactgttatttattatttatgctgattttatcttcttcccatggatttttcattacatttgtcttctttcgtacccagaatccaattgcttcttaacacctccactgccaccagcatctcacttctatccacccccaaaccactggcacccagcgtctggactactgtgacggcgcccttccccagccactatgtcctggacattgcagccagaggggtcatgtggaaactgaaatcacatcatgttacttctgcatcaaacccaaaccgaacaagtgcctaaatcaactccctcctttatccttgagcatggcaaatgctggcttttaatactaaaaaatttcgcgtgcaaagagaaaactttggggaacgaccaagacctgtaacagaaggcgccgtgtctgggatgcgcagagcgcgagactgcacgcggaggatgcagtgctggaatcagtgatgtaggcggcaaaccttgcacctctcacccctcactccgggggctctcgggccacttggcctcacctgtcgaagacttcatgtcccagcatgcgaaggggctggccggccggaaggctccgtgcccgccgcggggcatgatgggggagttggagctttccatcatggcggcttccatttcgggctacaccttcagcgctgtgtgtttccacagcgccaacagcaacgccgaccacgtaggtgttgggccccccaccactccccgcaacccgccgcggctgctagggcttctggcctcggtctcaggccgacgcctgtggagaagccgggatcctttgcccctcgccccctatgctggccgaaggaactgatgacccgggaggctcccgccgccggcgaactcttgctgcccgggtctccttcgccccccaccccgagatgggcgtcccctcacttggtgccttccatcggcatgcccgtcccaggacagcagtctcccggtggagagggatttcccggccggccaccgacagtggcaggagtcgcttagtcctggaaacccagtgcctgcccctccctgagtcaggcttcgagactaatgaggggtgtccggagtcgggaaggaaccgagggacccccgcttcagtctaggagcggagattcccagccgcgccctctggtctgacaggttgttgtggagtgcgacgagggtaactatggctgtcactactcttgttagatgcgagcgtgtgttttcttcgcctcgatgaaaaatgcagatgtcaccaggagtgttcggtggagggtctactttggccgttgcatgtttagttcgctggcgaatgttctaagacccgggaactagtctcagtgaaaatagggaagtgacaggcctttacgtatgagtgatcggaagtgcatttttaatgtccctggcttctggatggaaattcttttatgacattagataatttttgtctttacgtatttgcccaccaagttgagagattgtgttaacctgatttgagtagtgaattatttaagttcactaaataaatgtagtgggagggagggtggtgttgtcattacaaagcaaaatgagaacactgcagaagagggaactgggtttggtttgatgtctgcgatcctagtttccatctataaaactgatttcgtagagaggtgatttcactagtaaataggatggcattaaagtattgtaccgatcattgcttcagttcagtggtagagatcaactatagaaatatacacaacatgggtttttccagaggcagctcctgtctctggacaccaaggcccttgatactgcagccagctctttaataatgtaatgcagttccttctacaggtagtttgtgatcctgctcgtgtcccctggacgtgttaaacatggtttcagtcctgtttcttaacctctctagttcttggagtgcctagtaatatcacagttttatatataaagcaaaattactgtaagcaacctgttgaaaagtggatagttttagttttttttttttttttttttatagtctacagtgagatggccatgttacctagattgttactaacttgattcaagagatatctctttaatatctgcactatgccaggcatggtgccagacttaatagaaatttttaccaatggcaatagtttgcaacttgtatcttatactctacaaggataccttttatgttaaccttgccacatgttgcatatgtagaatactttaaatgtgatttcaatttcacacattttaaagttgaagaaccaagaatttgtttttgtagtatattgttttgtcctggcaaattagtttaaagccgctcattattctgtagctctggagttagcaaactttttctgtgaagggccagacagtaattattttaggcctcctgagccttgtggcctctgtagcaactactcagccctgcagttggtaggagaaaggagccgtagacaataaatacattagaatgactgcttccaataaagctttacttgtggacccaaagctgaattttatataatttttcacacatcatgaaatattgctcccattttctctttcatttcagcaatttaaaagtgtagaaacttattctaagcttgtagccccagtaactgccattaggctggatttagcccacacactatagtttgcctactattataaaataagagtggttcagataatctagacccatagataaataagcatctgtgttatacttggctttagaatgttttgatgtcactgtcgactttttcaaactaaggcctgccagata

SEQ ID NO: 53541 - DNA, 1436 bp, Bovine  19866880529218
  misc_feature (1)..(1): n is a, c, g, or t
ngtcccagcatcaaggcccacaggtctaacaagggccaggtgctccctctgtgtcctccccagcccccagctggaaagggggcgccttcacccccgcaggggcccaaggggggcctaccatcgtggacgagcaggtgtggccgcaggcctcgctgcttcaggatcaggcaggcagcaggggctggggcggtcacctcgccctcggagacgtcaaagcccagccgtcgcagcagccccaccaggtccgcccgcgacttctgcgactcattggtgcaaaatctcaccttcagccgggaccgtttcagcctgcagaggggagacaggccggggagggggctgtcagcaggcagcccggccgcccggggaggggcgtggatgggtgcttcttctccaggggaacagtccagagcaagccgggtctccacgggctcctgaactgggcctcgacagcctcaccggaccctggggtttctgagctggagaagacccttctcatcctcgctgagctcggcacacctgagacgccccgagttcccacgtgacctctgcttctgcctggctcacggccatgcccttccacccgggacacaccgcctcttcacacgtgctaatccgcccgcctcccgggacccactcaacacctccccgcacctcaccgcaccacgccgctcagcctggtggaggtcccctctgagcgtcccagccacccctccgggccctcccaccacagtgagcatctccactgagcacctgagctgacccctgaatatccacatttctccaaaacgcaaaagccggggaccacgcctgaagtgtgctgtctcgccgctgtcactgaagacaggtcggccagacggaggcatcgggtgcacgggcaagctaacgggacaggagccggggatgcccgcggcgtcagcagctccgacagcctgtccgggctcacgggaggccctgcagccccactgtacccaggcaggctctgtgaaggccaagtcacaaaagccgatgcccagagagaagccagggaaataacactgaacccttctgccaacagcgactgagcacctactgactggcacacggacacgccgcagtgcccacaggcgggctctctgaccccggaccctcagtcggtgcgtaaggtgggagaccgcacagaggaggggcgctgggatcaggacgagaggtgacgggaaggaccaaagaggtgaggagacaggacggccaggcagcgtgggcaggacaggaggcctccccggggaggagacagctctggagctgagactggaagggaagcaaggagacaaaggaacagggaccccccagaaggaaggggggccctgcaatagcaagggggccagcgggccggctacctggcctggtccggagcacacagggccctccctggatgcactccaggccatggcgtggggagg

SEQ ID NO: 53542 - DNA, 707 bp, Bovine  19866880664983
  misc_feature (1)..(1): n is a, c, g, or t
naccgcgatgggggagggggatggcggcagggcgtcctcaaagcagagcggaacctctcccagcaaacacccgcccccagtcttcatctcccgtcctcgctgggggcagctggctgcaggactggccgcaggactgtccacctcggacctttgccagcccccagcccaggttcactgtccagtcgaaccaactccaccccgagggggaaccagaaatcggcccgtgaaagaagatgcctcctaatgagatcctaggcggccccacgtggcatgcagtacaagccgagatgggtacgcggctaattatgcttaattacatatcatttgaattcaagaatccattaaaagaaaggattgcattagcagccagccgctgtttgccaacacacagaggaaatcgtggactttcatgtcgtaattacgtgacgctgccgtgagccgcagctggctctctgggggcccccagtccaggcccgcccgccctgaggcccccgaggccactatgcctggccgaactggtcgggagaagaccacaggccatgccggctggtgacctgtgatcctcatggcctcaaagaggtcacactacagaagctgaaccaagaagcccagcagagacatgccctttggcagtgggaacagaagcagagggtgatggacaaaggggctgagagacacccctggcctttgagcaggccctactcgga

SEQ ID NO: 53543 - DNA, 3418 bp, Bovine  19866880764160
  misc_feature (1)..(1): n is a, c, g, or t
naaaagcagagacattactttgccaacaaaggtccgtctagtcagggctatggtttttccagtggtcatgtatggatgtgagagttggactataaagaaagctgagcgccaaagaattgatgcttttgaactgtggtgatggagaagactcttgagaatcccttggactgcaaggagatccaaccagtccatcctaaaagaaatcagtcctgaatgttccttggaaggactgatgctgaagctgaaactccagtactttggccacctgatgtgtataactgacttatttgaaaagaccctgatgctgggaaagattgaaggcaggaggagaaggggatgacagagggtgagatggttggatggtatcaccgattcaatggacatgagtttgagcaaactctgggagttggtgatggacagggaggcctggtgtgctgcagtccatggggtcacaaagagtcggacatgactgagggactgaaatgaactgaactgaggtacaaactattaataccatatgtaaaatagaggaacaacaaggtcctactgtgcagcacaggggattatattcaataccctatgatacatcacaatggaaaataatatgaaaacagtatacatatacacatatatctgaatcactttgttgtccaccagacactaacacaacattgtaaatcagctatatttcaattttaaaaaaagactgaaggtatgaaatttgggcacaggtgtgggtaacagaggactttgtcccctggcttgcaggagaccaccaagaatgatcacacgtgtctccattcaagcaggaagcaggtgcttcgtatacctgccaaactctaccttgctcccccgtctgtactctgcaggtgcctctcttccgtatagtaggacaacgacacgtgatgctcaaaagagcccaggaagtgcttcctgcgctgtgtccctgctcccctgaccctgtccttccccaattctctcctcatatgttctcagcttatcacttggcatttccacacacactccccccgccctgttctctttctcccagtgacatgtctctccacttttccagatgtccagagcaatttggctgacctggcagttcccttctcttgggctcctcctgggaatatcttaaaacattagaaaacagtgactgaaagagcttccaagactggatcccaaacctgcaccaccgtatcctcctaggcggtgcttgggctcagttacttctcaaaggtcctcttctatatctcagatcgtgtgtcaccttgagggaaagccatttgataaatgtctgcaattggatttcaccctggggcaggaatgtggcttcctgtaagagaatgttactgaaccaggctctaaaaatctaacaactaccctggttcaaatctcagcttccctacttcctagctctggggtcgtggcaaaaatcactctggagctctctaagcttggttttctctactgtaaactgggaatataagtgcctgcttcgtggggtcgtggcaagggttaaatgaaatagccaaaaataagcaaaaagcttagcccagtgtctggtccagagaaagtgcccaaggaagaagagctattattgtgaacgcttactgtcgttaccaggacaataccctcctctcactgccttctcaccttctttgatgcttcctccacatttctgaaataaaggagttgattgttttttaaacctgttgatttccaaaaagaaacagtgatttcttaaagcaaaagatactgagtaaacatttttattttggttgcagtctgaggatgggtggctactctttgagaactttcacaaatcaaagctttttttttttttttaaaggaacacttgctctgcttggctgtcagagttcaaagccctggtgggaaatgggaaatgctagcctttaattgtaaatgaactctccaccaccaagggctatggagtcaagtaaacaagtaacaactgattctgctgcgtgggttagtttctttttaaaatccagcacctccccctcccattttgcagcccgatttgagttgaagacgtctgcggttcacttctcccccctttgttaccgcgctgtgccttatgaagctgtctgtctctttggcataatgtcctaccccgtgggctggtgcaaactgcagggttttacctagagaatttaaggtggattttatttcgggaacatcagattttatctcaggtgctttgacacagctcctaagattgctctccctctgcacatactgcagattctttctattgttaacactgttcatggctcaggcggcagcttctcaaggctgtgtgagaggtataggccactttgtttgtggaatcgctcgggaagcttggcatcattgatttgcatcagtgcctcaggaatagcctttgccatctccttcaagatactatctaaactgtgaaattcattaaatagtcccagaaatggatcaggttatttaacacaacatccctaatggtgcaatatctcagctgtctgcgctgatagtgaacattgtcttggccagtgttatcagcccgggacacccgctatgaatattgatcccgagcttgttacagccatcacttgccatcaggacaggtcagggatggaacccacctagcatcaaagcaatttaaagacagcactcaggcagaattttaatgcccacgctgaaaacacaaatcaactctgagcacagggagaaggtggcttgctggagaccgatgtacttattgcataggaacatctcgcatataaatacacgtgtgaggacgtgagcaagtcaacacatctccagattgtttctctaggaagtctcactgcctttctggtcatttacaaagcaggtggccagaaaaacaattcccccagacacccccccaccctcaccaaattgaagaatttagtctgttctatgggtgaggtgtctctttttaagttgggtgaataagaaggagcattttctgttcctgcaatgttgatgggagacaccgtggtgtttctttttttttaattatttatccggctgtgctgggtcttagccgtggcattgggggtagtcagtcttccttgtggcatgcaggattttttagctgtggtatgtgaattctcaactgtgtctcgtgggatctagttccccgaccaggggtcaaaccttgctcccctgcattgggaacgcagagccttaactgctgaatcaccagggaaatcccacatcatggtgtttcttgtggcacctgtctccagaagccaagtcctgaatgcaagagttcacataactttatacagcactgaacacacatatcagaaatataggaaaaataaagggcaagggaaaaaagataactaaaaaactactaggagttcttaaagattcacagtcttacagcaca

SEQ ID NO: 53544 - DNA, 1999 bp, Bovine  19866880899253
  misc_feature (1)..(1): n is a, c, g, or t
ngccttctgggagggccccgcctcctgccaccctgccccgtgcccagaccacccagggtgctgccctcggccctggataagcaggcaagagggtgccagccaggctgttctgggcccctgagccaccagttcctcctctgtctccctctaccgaccctctcctcccctcaccctccccagacacatctcccagcctcctggggggagtttgatccccgctgatggcccatcccatctgtttgtccctctggaagtcgagaggtgggcagacttgttgaacgcccacacccaccctccattcacaccacgtcctttaaatgtgctacctgattggactcaggcgtttgcccactgtcttttagtgaacagtccctgcgctttaaggaggcacctggaggaagcgggggtctcccaggcaccgtccttgtaggcagagctgagccagcctccccgggacagcccagcggctccggcccccacccagtgtcagagtgggcactcagcgctccccgtgcacctcccaaaccatgcagcccctctccccatcccatcccctctggagccaaaacagaatggctcccagggccactctgccgtgcttcagcgtgagaactctaacctctggatgccaggttgtggatggagggtacctgctagagccttaacggtagacttgtcacccccaggaaattaatggtgaaataaactccgccctgacctgcagtgactcatgctctaactgctcgggggctgggaggaccgtccctgatcccaccctggacttgaacccctacatgtcagagggcccgcgcccggagacacctcacctgcctcaagcccttcattcagcagaggggggacactgaggccccatggggaccaggtggacagggcaagcatgggcctccgctcagggtggtgagctgcaggctttctgaattcacccactgccccggtttcaggtttcagaatcagtcagcaggtcggataacttgattgctctgtttctccccaaatccacccagaagccactgacagatcttgggagacttctcataaaagaactcatgagtcctccagaacaggactcccgtgaaacaaaggcaggtgatgataaaacgttctgcctgaatccgagtcccctagcctgttaaatcaggattagaaagatggtgctgggtcttctcatggaaatgagaggtaactggttaggctcatggtgttggcttgcaatggaggcagggcgtttggcctatcagctggaaaataggcagatgccctgcccctggagggggtcccctaatcccagctctttaggcgatgagctgggtgctgtaggcaggcacgaggtggctgcaattcaccggggctcggagggtgactgtgagggagcaggcccgcagcctcccatttggcttgttcccttttttcatcttgcccttttcgtgggccacccttgcccgctgtcctcggcaggggcctgcagccagggtaatggggctctggaggaaggtggcttggtggttcccgctgcccaggagtgggatgcagagggtgtcagaggaacagcaggcacagacccctgctttgggcagagaacataccacctcctgccccaagctgtgggttcagcgaagtggacactgttacctcccacttttacaggtaaggaaactgaggtgctcgaatcaaagtccgactctgcatcccaggccctttctggtcctttccacagtccttccatggggggtggcctgtggtggacccggtggctgtgacttcccaggcgaggggcgccctgacgtcctcccccggagatgtagtgtctttcaggatggagggccagccctactctgggggcaccgtgtaccgcctgagcctcagccactttctgtgtgtgctcagttgctcactcgtagtgcccaactctttgcaacccctggactttgcaaccccaggctcctctgtccatgggattctccaggcaagaatactggag

SEQ ID NO: 53545 - DNA, 938 bp, Bovine  19866880904409
  misc_feature (1)..(1): n is a, c, g, or t
nccatcctgcacagcgcttcacccgggcagcggccgggcccagtgtggcccgttttccagccaccacgcttcctgaagctctagggcaccgacgggtgctgctgggaaagcacacgtgaccccggagacggccaacccgcgggcacccgcgcccgggacgtgggcccccacactgggacacaatttctttgccaaggagactatgctagaagattggactattctagctaggtgtaagatttctgctgtggtctgggatttttttttttttttaattaaatccttttcttttctctttaaagaggcgccggtgggaggggtccggccaccgtgagcctgcggcaagcggcggcaccatcgcctacatggaggcgctgtcctggctgggttgctgcccccagagccggggcgtgaggaccgcctgcaccccaggctgtgggatctgacacagtcatcgtgtggatgacctgcctccaggccagggtgtgtgaaactcgagcccgtggtggggcgtctgtccagggcgtgggctggaggctcaggcagcaccagccagagtgtggaagcgcacaggctgcccctccccgaccttgctctggggccccttgtggacaatgggtttgtttcctttctaaggtggactttgcattttaaaatttctttcagtgtatacaaattcacaaaaacttttcctgctacaaaaattttgttgaaaagtaaggctttctgagagtgaaaatcctcacgagctctccaggggcctgggagtcgtgtctgcccacgggcgctgcactggccctggcctccaccgcgagtaaggcaagagggtatgcggtaatgtaaacgctgaggctgccgccccgatgcccggcccggccccacgggcagcggcctctgttagtcggcggctttagtgagggtgccccaacacgaagccc

SEQ ID NO: 53546 - DNA, 1620 bp, Bovine  19866880920544
  misc_feature (1)..(1): n is a, c, g, or t
naaaaaagccacccttctccctccccagaaggaattatccaagagttctactatgcctaactttcaaaggaggcattgttaatcttctcgccataaataggcaattaacacccactcccgagtccaggcaaaacccagttcctgcgagctcggggacacagcgcaggactagccctcttgcatggcattcgctttctgaagttcttgacgggggcctgaggctgcaagaagagggcaggaactcaggaccactgattccacaaaaattttagagggagtctaggtcgatgccatgtttgaggacaatcgaggactgttactgaagggcctaacttcatccgacccgagtccgcacgtaagccagcagcctgtacaggatgaagccacgggcaggcggcaggcacgtcggctcgtaattaatcacgtccgtctcagggacatggctccctgcttcctggtctctggccctcctgggggctgacccaccggctcaccgagggcgtggagcgccttcccggggggcgtgaccctgacatccccgatgaggagccaggaataggacgggaacgctggaatgcttccgggtttctgtcaagcagccccttcccctgcatccttccaggctgcgtggggctccctgggctgttagtaggttctcattttccagagatgccgccccagccaatgtaaacagacccaatgtggcacccctgagatgcgacccagcaggacgagcctgcaggggtgcaggcatgacctcctgtggccccgagttgtccagccgagtccaggagagaagacccagattcaagtggacaagaccagggacccttcagcaaaggagatggaggctggaggcaggggtgacgggaagggtaggaaccgagctcccggggacggcagagggagcctgatgcgtaaaaggtagggggcaggatggctccaaggtcacgtgtggaaacaaagcaaatcacaaggatcagctacccgtcactgctactgaggaaagatcacggagaaatacaggcaaagcgagggctctatgcgggataacacgagggccttaccgccagccaactctgaatgcagcagcttaaggaacgttatcgttggggattaaggtgatggatactcagccccctgagtgaggtctgtgaccacggtgacttggacgctaatgcaagatcgatcccctggctgggcctgctggccgtacctctgggatgtttgcaccccttacaaggaggcgtgtctccaagctggtccacactggcatgcctgtcaacagccggccccactcctaagtccacgctgctccctgccaccaggaccttggggacggggggctgttactcccctgcttaaaactctctaaggctcccctcacagcactcagagtaaaagacaagcatcttcagaggacctaccaagaaggcccccctaggctccggtcccctgcccacctggtcctgctccgggcactctgggcttctccccgccccttcctgactccaacctttgcacacacacttctgctagtagcccccgtgagcacaccggcagggccgcctcacggcttatggccctgctcacacgattccaaggcactgagagaacatg

SEQ ID NO: 53547 - DNA, 1399 bp, Bovine  19866880950673
  misc_feature (1)..(1): n is a, c, g, or t
natttaactgaacgcaagaaactctccagttagcactgtttttcttaatcgctcattgagagagtttttgaggacttcctctggaggggagaactgctttctcgggcccctggactccccaagatgagtgtttgggcccagaccttggaggagcctcgcatgcagggggtcctcacctgcggacgcagtgtgcagggctcacaacagagtcattaagataatcaaattgtccgaattctggtgcgattcatggatgtactggtaaatttaggcaaagataaacttatcaacgtagtttctgttctttaaaataatttggaaattagagactaagcacaattagtctataaatgttctataaatcaaaaccttacctcttgcactatcatgccttgaaatttactttttcaaagggaaactagtttagcagcagccttcaaagaaccttctttctatgatgagccaaattcatctttgccagaaaagaaattttgataatttccaagattggaacaaatcagtcgtaccttcttttgtctgcatgactttgtgagatcaaaagagagggctttgtttccacttttttctactagcctgatatgtattgtcacttaaaatggttgcctttaaaaaaaaaatgtagaaatactaattaccagtaagtaatcatccaaataagtatgtcataaaataaattacttatttttctttcggggaattccagtgactgcttctgttgcactagccacgtttaatgtctctgttctggagtcttaaatgaaggacacacagcagtataacagaaaggagttctgttccagacctgagttttatgaggaacagactccagacacagcagatttagccaagttcgtacgtaagggagataattcgtgtagatcttctgacaaatcctagtgttagttttatttgtggaagaaagacatttaataaactgtttgggaagcttggttattgaatagagattcatttccaatcaaaataaccacacttttttaagttaccgttgggcatatagctgtggaatgtgtagagactttccttggggaggcacttaacattcttagttaattactgcttgctttctagttttgcccagaatgtgtgacaccactacagacgttcatgagcatgacaggctcctggtttggaaatgacaagaccccccctcccccatttacggcagggtcagcccacgaagctaatgccatggattataactgcctttctttggactcgttacgacctgtaagaataaggaagttgttaaggaagcttaaaatccaggttctgaaaaagtagtttcattttgtaagaaagaagtttagtctgaatggaaattaaacgttcaaactgccgtccttcagacagctagcta

SEQ ID NO: 53548 - DNA, 770 bp, Bovine  19866880967755
  misc_feature (1)..(1): n is a, c, g, or t
ncttgtactgtacttcgtacgacggtgaacaaagaacagctctttgcagcatttgatgaatgggattctgcctcctataggccacactccgagtcttccatacgttacagcctccggactcgggggggtgttgggctagtggcccctcgcgctgggcagcgcccggggctcggggacctgggccgggcgtttgtgccgccgcctccgccagctcgccttgccggagcgggtgcagatggagccaggctgacggttgttcaacaggaacaaatgtttgttgaattgttggatggtggagacaagggactgttttctattgactgctgcaggagttggaatggcattgtttattggcctgggaagccaggcaagcgtcttgtgcagcttacaacatattagcagacttccaaatgacatactagcatatgtgttcccagcagttcccaccggctggagggagatacttccttgatccagaatcctggactctgggtgattacagtaggacgctaccaggtttgaggacttggaaaggaatggagttagtagactgggtgaaactcactgtttctgcagttggctaggttttggtttcattttaatttattcacttaacagtagcttgtctcagttacagttttgatactgaattgccgatctgtagttctttttttcccttctccccctcccatttttctcagctagggacagctagataaactgaaaacagctacttgtcccagtttataggcccatgttaggggagaagg

SEQ ID NO: 53549 - DNA, 587 bp, Bovine  19866881147563
  misc_feature (1)..(1): n is a, c, g, or t
nagctaattaaggcaactgtaattaacatttatgaaaaaccttgccattacgggaatatcctttaagctggccttccaagctgatcacaaggccggccccgcactccagtgcggcctcctagggctcttcgacgtcgcactcgggcgggggagtgggactcaggtaccaagtgcctgcgcctcacctcacggggcagggtcagccctgccgtcgccgttagcaccccaggccctggaacaggcacccggctgaggaccgcggctccagggcagccgggtccgtaggactgagctgtccccagtgctcagtttgtgttctggctcaataagacgcagcctgatgacacaggtcgtgcagaaagagagggagagatccacgtgttgaactcgaggcgagcccccagactcccgggaatggggaacttcctcaccagctcttcccgcggtggtgctgagccccctgcacggttgggagggtctccctgcgggctttcctcctgccacaccccctgcagccgggctgcacctgtgctccctggggagcactgccctggtggggggggggtcaagactgccctgagcgctgg

SEQ ID NO: 53550 - DNA, 2334 bp, Bovine  19866881250912
  misc_feature (1)..(1): n is a, c, g, or t
nccctcgctctccctcgctctccctcgctctccctcgctctccctcgctctccctcgctctccctcgctctccctcgctctccctcgctctccctctctctcgggtttggcgggttagaatgactccagcggtagcgaggatcacgggaatgcttataggagactggcctgtcagttacttctcatgatgaatgagctcttgacaggtcatgcatgcagctggcttcagtttcaagaagcagctcaggctgtctcgttcccatgttcagatttgttttggctccgggtctcaacactttcatgtccctgaataatgtccttcctccccctcctcttgaaatgctacttgcttaaaaaaaaaaacaaaacaaaaaaccccagcagatccctccagcgctgtgagagtgactgtgtaaagtcccagcgaacagagtcccagtttggttcaacagctcattgaaccaaagcaagggttttgcttgccctccatcaagacagcctcatgagggagcctgggccgctttgctctgcgcagggcatgggggtcggtccctctcctgctgggtggtgtggccgctcatccttcccccaagactgggcctttggcggcttttgactacctggaggtctagcccagggaatggcaatcactctagttactgcagaaaacacccccaaggatacaccttactctgggatgagggatcggagatggggtgagcatgctatctctaaggacagcagatgctttattctcactgctcaggccccccagaatcccgggcagccatgagtcagctgtgtggtgtagccaggccgtgctgcctctctgagctgagtttcctcacctgccgcaggtggacgggagcccgagggcccatgagactcaatcatggattcgatgatctggccactgcacctcccagcgaggtgagcctgttctgtggcctggtagccagttcccacgcgctggaggagggccccctctgtgcttgaactgcgatcacctggggacctcggtctttaggggccccagcatgcagacctttccttccttaacttcccactcgagggggccgacttcttacagatcacaaagcttagcaaagtcacgcgcatccagcgtgccacagcctgcacgggactaagccgagagtgcttccgaaccttgcgtccagtgctcgtcccccagcctgttactgactccgcgaacagacacggatcaggtttctgctgtcggaggctctctgttgaggccagaggaggccagaggcaggtccacacccggacgacacgcctggaggggagagctcgccagagcgccctggaaataggcttggagagaagggcagggtgggctgtggcagcccagagagatgggggccaaaggactcagaatctgatatagcggggagccggcaccactgccccaggcctggggacaccctggcttccctggaaggcccttcacctcctcctggcgcccggcgtggctgcacctccatgcgtttggggtggggaagcagtgcccgcatgctttcacccccaccttcccgcctccccactccctgcctcggtgggacccctagtgccagttcaatcgttaagcccagaaggttgaggtgtggcctggggcacctcgggaagagcttatagagaaggggtgtcttgcaaacccagcgtctgtacttcggtatctggtccgtttgagagatcaaatatttgtgggataattatgataaatgttaacagatcctggagtagaagcctcgatggttaagacagaaactttggaatccatcagacgtggttgcatccttgcttcacccttcacagctgggtgaccctgggcctcagcttgtccctctgtaaaatgggaaaacagcagtgcccactcgaagggctgctctgaggacttggtaagcctgggggcctcactgctctggtggttcagatggtaaaagactccacctgcagtgcaggagacgtgggtcttccgtgggtcgggaatatcccctggatgcaggcatggcaacccactctagcattctcgcccggagaatcccatggacagaggagcctggcgggctacagtccacggggttgcaaagagtcagacacgactgagagattaacattttattcatgctctgttaaaggtagaccccacatcacctgttaatttccgcaaacacagaccaggaagctactgggaagatggtggataaaaggttattatttgctgtctgttgcctctgctgtggagttgccttaaatcagtgatatttggtgtcgagcatgtccttggtgttcaagtattgacgtaaaaggtat

SEQ ID NO: 53551 - DNA, 1822 bp, Bovine  19866881327892
  misc_feature (1)..(1): n is a, c, g, or t
nttaaattgtgacatcatcatccttttaacaaaaatggcatatttacattccctattcatctggaaattcattgcacacctggaaaatagggagacaaccagaaacatttaggactctttagctttggttgcagattcatggcttcattcatcaaatgcccttgcttaggggttgggggtcccaggcctgccctcagggagttcacagtttaggggggatatagaagtatttagggcagccctggaactaggactgtattgattggttgactgattagttcgttcaatgaatatttattgaggatctattatgtgcatgaaattgatacttaaattattcatattttgcactcacgtattggttttaaaattggaaagtgccttgagatgtattctataaaaacccaacagatgtgatttgtacatttctaggacaaagatcatctacaaaccgaaaattagattacgattttgagcatgccccatgatgtcctgttttgagtgagagctagacctgtgcacactgtatctctatcctggctacacgatcatctgggggaggtgtcaagaaggatctatgctgtcatctgggccccacccgcacggattatgatttgataggttttgaggcaggacactggataaaagggtgtttttaaaaatccccagtgattttcatgtgcagccacattgtaagccgttggtctataccagcagtttttttttttttttaaagtaaatcgagcacacacttttttatttattaatttttgaccaccatgtggggctggtgggattttagttttccaatcaggaatcgtcccctgtagtggaagcatgggatcttaaccactggaccatcagggaaatctctatatcatcagttcttaaccttagctgtaccttagaatcttctggggaattttaaaagtctccatgctcaggctgcacccagttcactaaatcagaaggtctggggggtggaagccagttatcagtatatgtcacagctccctgagggattccagtgtgcagccaagactgagaaccattggtctgcacctaattatgatcataaactggttggagttggcatcagagaagatgtgtgcttctcgatcattttgcacctgcagggtgggagggacctgtgctcactggcttgaggtgcccaggaggtggaggaactcctggtggccaatgtctgcttccctcccccaaacatcaccacctctggcctctcttcaaagagctctgcatgtccctggacagtggcagcaatccccccactaaaggggggttggtccctgcccagcagcctcaggtatctcctgggcttttgttagaaatgcagatgctggggccccagctgcggtataaccagctttccaggtgttttctgacgctgccaagggctggggagcctggtttcccttagggtggtgcctcagccttccttgtggctagagtcacctgatctgcttgtgacatctatgtgtcagggcctcaccccaagccctctgtcagtgtgtgtgtgtgtgtgtgtgtgtgtgtgtgtgtgtgtgtgtgtgtgtgtgtatctgggtgtcaggctgtgtgggtctctgggtgtcaggaagtgcgtagcttctctgaactccgtgtcctacccactggtaagaagtcctccctgtctgttgcattgagctgacagctgccaggcccttgctaagtgctttacacggtgatggacacagatgccatgaggtcattttcatgtcagcttagagttgcacgcctgtatcattcccattatccagagctccaggaactcaggagctcc

SEQ ID NO: 53552 - DNA, 875 bp, Bovine  19866881330381
  misc_feature (1)..(1): n is a, c, g, or t
naccccgcctcccctgccagagcagagggagtggaaagcagctgaaaaagaagctttagagaagatccagggggctttgctgatggttcagattctctaatctgcctgccaatgtaggagacacggggttcaatccctgatccaggaagatcccacatgctgtggaacaacttagcccatccaccacaactatcgagcctgggagatgcaactaccgaagcccaccccccttaagcccgcgctccacaagagaagtccccacagcgagaagcctgcccaccgcagctagagagtgccccactcaccgcaacagagaaaagccccgcacagcagcaaagagccagcacggccacaaataaatacatttttttttttttaaagaagtaaaagtaaaaagaagtgctggaatttcaggatagtaattaacaaagaaaaaaaaataagatccagagttgcatatgtaatatgagaatgtccaagtttcaaacgaaaaccactcactttgccaaggaccagaaagatttaaaactgaatgaacaaaagataataaacagagctcaaccctgaaatgacagggatgttagactgtccgacaaagacttcaaagcactcatgataaaaaatgtttcaacaagcagtttatgaatatgctcaaaacaaatgaaaaagtagaaagtctcagcaaagacatacagacataaaaagggtagcatctgtgagctgaaagacaaaacggtaagaattactcaatacaaacacttgagagatgatagattggaaaaaaactaacagaaccttggggacccaagggactatgacagaaaatctaatgttttcacatcaaggcctgggaggagaagagaaagaggacaggg

SEQ ID NO: 53553 - DNA, 1159 bp, Bovine  19866881875327
  misc_feature (1)..(1): n is a, c, g, or t
ntcgaccttggcccaaaaggtaattaccacggctaatggaagctgcagctcttgtcaaggacaaatcagcgtctccagccctcagaggaccagcatggccaggacaggctcctccacgcagtccctgtactgtggcccctctctaagggcactcactcacccacagggacacaggagtgagaaccccaggaccttaagccctaaccctctgacctggagggtagagctcacacactccgcttcatgagtgttctaaaataagatgcagaggaccctgagggagaagagggtcgggtctggaatggttttactgctgacagcccatcaactgccatttcaaaacgcaggtaaagtgaccactcctgctgctgacgccaaagcagaggaagtacttcaggcagactgctctgggcagagctgccgggctgcaggggaggagacaacctcatggaggatcaggtcggggaaagctttcttgctcctacccattctcccaactcatgccaatctgcctctctccttctctgaagctccaaggggcacgagctgggccctaaggacagcaaagaaaagttctctgcttcttgggaggtggccttctgagggcacaggcagaaacagacacggtaaaggcccgtcagaacctgaccccactgaactaacccgcaccccaagcaatactgagattctacatggccctgttttttggggttttttttgacatttgaaaaatgagctttattttaaaattaaagacacactgaaaacaaatactttttacaatttatatcaaacacttaaaacataatttaggaatgttgaacattaattcttaattcaaagtaatgacattcatagaatacatcttggtcccagccaatatggggttgaaaaatctaatatttcatatcagcttaaccattaatccttgttaaaattcactgattatgatccaactttacaaggttaagcaagtcttccaggcaatactctcatataactttttcaaatacaaacatttataccagcaaggcaattattaaaatatatatcaattatgctgaggggcttgattaaaagattgtctatatagagatgcgcctcaccttagaaagcacatacacacaaaaacatttaatcgaatataagacgcccgtag

SEQ ID NO: 53554 - DNA, 1528 bp, Bovine  19866880381676
  misc_feature (1)..(1): n is a, c, g, or t
nagttggactgagaaaggcgagtggattagagccactctccaagtcagggatggagctaatgaggcttttcttgtcagcatctgtaaaagtttattacttacacttcaaaggcagtgagcagcagaggggctggggagaggcactgttcctccgaagaggagcaggaaacagaacatgctgctttggagagagtgtgggaggttgcccctgggtccctgctgcaaaaagagcccagctccagggggcatgggtctggatgcatgcacctttggtgatcaggagctagcagtggtcacaggggtgggggagcacagtggatcagagggacgattaatgaactttattgtggggtgggagatgggctggctgccctgcagttgccttctgacagccctcagttctggtctcatgtgctctgtcctttcctggatccggtaggaagtggtccaagtctttcttagtctcagccttgctgaacacctggctgtccaccatctcatgttctaaataaacacagaggtccagatggggtggcaggcagcttgcacagcaaggcggcttgttcactcacccaggcatggtgtggatgatgctgccttccagcttaaaccaggtcacgttggacagtttgtaaagacggggagaggaatgggtattcgtcccctcattagatgttagttgagcatttactacggcgtgtcaggtgctggggatacatcgatgaacaatggcagcccaggtcctgcactcctggggcttacagtctaatgggggacacggacattaatcagagaatcatgcaaacacagatgaacataaaatgacagccaagataagtgctacagggggaaacacatggtgtttatgtagaggtaaaataggaggaactgatctgaacacagggaagaccgctccaccatgagggaggaacatgtggaaagggcctgagaagggaaggagtttcactccagaaacacagaacaccagtgtttccggagtcagctgggaagagggaggtgtggacaggcagagctgaaagcagcctggtgtggacttttgtctgtgttgtccactgcttacccctccagctcctgctgtgtactttgacagtgcatagaaggagttcaagtagaaataccaagtgaatgaaagagtacctactatgtgctaggctctgtgccaggcttctatatcctgtcccacactgattctcatcaaatcaactcatcttactgacagagacttgataaacccagagttatggaagtggtgtatcccaagggtgagaccccaatccagtatgcttcaggaagtttcccgttttgtgcagtggagtaaaaaatcaccaggtgagttactgaactagaataatgaggtggggaaagtttgcccagaataccttagacacaattcctgctctcagaaaagcagtcaacaacagtgagtaggagatggtgcagtcaccatggaaaacggggtggcagttgctcaaaatgttacatatggacctactacttgacccagaaa

SEQ ID NO: 53555 - DNA, 1237 bp, Bovine  19866880412600
  misc_feature (1)..(1): n is a, c, g, or t
naagtgcctactacataaaatctatggttaaaaaaacagcaaaagcctatttcaatttttttttcccctacccagcaagaggtacagaatcagaatgctcactttatttggacaattaccaggaaatagattccatgcttctaaacaaaagaaaatgggcacacctatcttgtgtcaatggttttcctgatggactttcagtttcttctcagtaattctgtgaattggtattgcctggatttgcttcctctttcactaaggaggattaaggtattcatcggggtaaaatgccctccatttctcatactttatagcacttgttaatcaaattgaccacagccagttttgaaagaggcactatattctccacaatgcttgatttcactgaaatttgtgttcagcctctgctacaaggcccctggtttctgctaggctctaagaacctgggattttgaatgatcccacttgcatctcggtctctgtctgcagaatggaaggactctgcaattggatgagagagctgtttatacaaagcctttgaaatttggggagtaaagggcaaggataatttctgcatccatgtgtatgtcagaactgctagaggggatgggatgcaggaggcatgactgagtgtgaagggaggacagctttggctgtggactctcccactgacctgcttttggactctgtgtctgaggagttttctaagcagggagcaagccctgcctaatccagctcgtcttcccccctcagcaaagattttagagtgaggacagagacacaaaatacttagggttttcgggagaaaggtgctggtaatgtgacaaacgtcacatccacgtggactctacaggaaacagcgccagaggttccaaaaaacctcagtgagtgaaaacgagtggtgccacgaccacttcctgtctctctgccaccagctccgatctctcttgtcccttaaaacaaagctctctgccgggatctgagcaacaggcagacagacaaaccgaggttcatcataatgataatggagagaatgtgatcatgatacaataaatctctaccacatacctgttgtttacggcatgccagccacatttgggctggtagcacttttaagactcacagaaatgctctaaacacagtgcagattctcatcactgtgttacagggggaggatgctccaggagggtgaagtgacttctttcaagtcacaaggtagacaggctggatccacaca

SEQ ID NO: 53556 - DNA, 1957 bp, Bovine  19866880534393
  misc_feature (1)..(1): n is a, c, g, or t
nttcaataaaaattcataagaaaaggtgtaataatatggtgtctatgtccttacagtaggaaaatgaatgagatcctatagtatgaaagataataaacatttctactaagtgtggtatcagatgaatggttcctagaacagcaagcatctttcatagggactattctacacactccatttaaatacttgtatgccaaggactcaagcagagaaatcgggctatggagaggtgaccaaggactacagagctcaaaaagtgataatctctgtcctgagttcatgtaaaggtggtttttcccaaacctgtttccatgtttttaggatcaagtaggagtggggaatgctagtgggtttaacagctttacttctggacttcccagcatttctaatatgccagcatgtaatctgaacgtccaagggaggggtagaatatgcggatttctcaacctctccatccacagtttctgagcacatattaccgtctcctgcaatatctcccagaattagtctagaaaatgccagtccagggttactgcagggctgatgttcaaatgtgaatctcaaccaggctacaggctcaagtcacactgaatttatttgtagatatgcaaactctcctctactagacaatcatcttcttgaaggaaggctcttggtatcacatttaaaaaataattttctgtctcaaataacaggtattcagcatgtgctgaatgaacaagctacatttaaatctggtttctttggatggaattattatagacagaaatcatccaaacacaatattgctttccagcatgaagagatcttggttcctgacccaaggaaggctcaggggaatgaagacttgcctagggttgtagaacgccctgtatcagaggccagagcagagggttgacctacatctcatactgccagtcatcccactcaaagtatctctttcacggttatttagcaagttgtcaaatgttggtttccttaatcaccaccatgaaatttaccacggtgtccaactttgccatcaattacctttcccttacttgttcatgacccagtttgatccaaactcagaggtgagtcagtccttgaatatcccaattttgttgttctgcagataaggattcctagagaaattcttcctccctccctagagagccaggtctccatctgcctgtctctggcctaatttggagactgaaaggaacaggatgcagtttacttttaaattgttccttaaagcacatcttctggttaatgttatgtccttaatacagaagaacacgtcctctctgtaagcaatgtctgggatcctgtgcaaataagcctcctataaacttgccatcttctctcagctggcctgccttcccccactccttctccaatcacctgctactttgagttgtcttccccttctcttttttgctggtgtttgtttttaagatactcactaacagcatatgaactgaagtgggttgaatctttatgagactatcatcatcttagttttatttgtttttaaagttctacagacagctgagtgctgggtgaatgacagctgcttgcacagaagagatgatgaatagatagaacagttgggagtgaaaacatctctgtgcaaggatgtgggagttcccctttattccacctgggcagctgcagcaaggaccctgtgctggtgtctatctagtcatccacagctgctatgctttaggggctcccttaacacagaattaacacattattgactacagacatttggtcatggcatattgtcatcaccagagacatattaatacatctttgttacctgaacgttattgactggagacatatcaatacatttttagagagtgatgcaataaacatcaccatggggaagttgttagaacttaaagttgatcaacagttcattatacagcttaggattgttatcattcacatttgctccattatgttt

SEQ ID NO: 53557 - DNA, 2130 bp, Bovine  19866880633720
  misc_feature (1)..(1): n is a, c, g, or t
ngaagctcatctggcaagacagtcttctctgtttctgggcatctggaataaacttggtatgagcctgaaccaagggctctgttacttcctctctctggtgtgagttctgtccttgagaccatacggccaaggttggttaatcctcttctgactgtccttctagtcactgaaggctgtttccacactgcctgggagtttctctactccagccaaatactctgaattaccctaggaaaaggctcccaagttcacaggacccctggctgggacagcagcgcaaaatcacagggtaggagctgtttcctgttacgctctgccgttttccagctgcgtgaccttgaggtagtaaatcagtcagtctgcattagggcccctcaaaggaagtggaggtcacagtggtgtccagcccctgggtcatgggaggttaattgatgcaattttacatacgagtgttgtacttgggagtgggggtcccagttgtccacaagtgcagagctactggtctcaggtcatcagtgaggaggctgcaatatgataaggacaggccagtctcccagagtggctcatctgatgagggtgaaagaggagattggaaatgctgacttaaaactcaacattcaaaaaaaaaactaagatcatggcatctggtcccatctcttcatggcaaatagaagggaaaacgtggaaacaatggcagatttgattttattgggctccaaaattatagatgggaaacaatggaaactgagagacttaattttggggggctccaaaatcactgcagatggtgactgcagccatgaaattaaaagatccttgctccttggaaggaaaactctgaccaacctagacagtgtgttaaaaagcagagacattactttgctgacaaaggtttggatagtcaaagctatggtttttccagtagtcatgtatggatgtgagagttggaccataaagaaggctgagtgccaaagaattgatgctttcgaactgtggtgctggagaagactcttgagagtcccttggacagcaaggagatcaaagcaatcaatcctaaaggaaatcaaccctgaatttgatttctaatgtcagtgatggttaacattggcactcacttttgagggatcctctgaactgccactcaggaaccaccaaccacgagtcttgtgaagattgacctccagtgtgaggataaatctcaccgcccttgctcttgcacccactccacacccacctggccctttggagcccctgccacatgacagtatcgttgtccctgcgcctgtgtttctcagagttgttctcaggaccacaggccagaagcgtgtggggcatccttgggaaagcagatttccatgtctggctccccagacccactaggattcgtccttggtgataagtatttttaaccctcccacagtggtgggaccgcagtctttgggccatgctttgcaaaactgcttgagctgcatgggagcaattctgtgcccctgtctttgcattcccagcaccttgcctgatgtaattgtttttaattgaatggtgagttaattgagttacttgattaattaggttacaaagagaacaggagttattccaggaaatggaaagttgtagtttcctaagagtaaagcaaaacagaattaatcaaagttgccctgaaagaccagaatggcgtttatgatttaaggacttgtgtttgacttctccatgtgagctttcctcaggactacactcaatgcaggtgctgtcctgagtcatacacactgagactgcaggctctggatcttgtacttggcagaatataatctcaagccagaccctcagttggagaacctcactgaaatataaacagatgcctgtactagatggattcacctgatcactgcctcccaaggcccccttccggtgtgagcatcacctcctctctcaagtggattcttctctccccaagacgaggatgagatgagaacgaggtctcatccccaagatggaccccagaacgaggtccatctctgctttatataagcactgcctgtttctagaacagacctctttaagagctttgcattgtagttatttaatatgttcatgtgtgtatctccatcattagactagaagctcttgaag

SEQ ID NO: 53558 - DNA, 1882 bp, Bovine  19866880663505
  misc_feature (1)..(1): n is a, c, g, or t
ngaaggagctgagatagtataatagagctagataaagaatccatttggtcccaaatggatccccttcttttgtaaaaattctagtgaatttttgggctttcttgcctaagattagcaagctgctcagaatcatctgaacaacggaggttacgagcacagactgcagggctttgtgccagatacttgggagacctcagagcgagagtctctgctttcagggtcctcacaggctgaagggaccaggagcgaagcatcgtgaagagatagggaacaattataataggggcagagaattgccaattatgagaatgtcacaggtgtgagccacgtaaatagagggatctgagtacccagcccgtggtgacacctgagagaagccttaaggatgagttggaacttagcaggttgatgagatgagccttggagcacaggtatgagcttctgctaaggcacaaagacctgagaacttgtgagtctaatgaaccacaaagagttcagtatggctgaaacaaaggatctgtgtggacgcctggggctggaagggaaacctagagaggaaccctgaacatatagctaaggatgccgatggtccttaagtacatgcccagagaaatgaaactgacacaggctactgcatggatggaccccgaaggctttatgaaaagagccagtcacagaaagaacaaatacccaatgattccattcataggaggtacttagagcagtcaaattcatacagatgaaaagtacaatggtaactgccaggcagggggatgggagggatgagaagtcagtgttaaatggatacagaagttcagtttgggaagattagtggatggggtgatggctgcctgtagtgtgagtgtacttaatgccactgtacacttaaatggttaaaatgctgatttcttttatgtatattttaccaccataattctctttttaaaaaaagaatgcacccaggaaggatggtgtgctggtaaacacatgtttaggaccacccttctctaatctgtagaaactcagaaatctcaggctgttttgcgctgatgcgatatggaaatcatatactcgtgggaactgtctcaggctcactctttacaaataatcgagcagttttaagtagctgtcacctcctgaaagaggtgaaacttccaatcacataattttcccctcctccccaagtttttttttttttttttttaacaaatgcccctaattttatacctttgggttgagggaaggaagaagacagctgagacagccaggcttccctttgataacttgctccttcttctaattaacaagaccctgcacaactaaacatctgccaatttcaaaaactttcacagtgatgagctttgatcacagtacagcacacagcatctgctctgaacaggagagtttcacaaagcccaaatcagaccattcactccaatgccactcgacttaatccaacctcctgaagaccgttgggaaagtcaaccctgggtaaggaacatacagtcactgccaactggaaggagcaccatgggttccaaggtagcccgtcccctgttccaacacaccccacgttcatggacaagtggattggggaatcacattaatcctatccctcactatttcttggaagaattttctaaaacctgcatttggtagctctatttttagcttcttataaaaatggagccatcatatgatcctgcaatcccactcctcctggggtatatctgaagaaaaccataagtcaaaaagacacatgcaccccaatgtttcagttcggttcagtcgctcagtcgtgtccgactctttgcaaccccatgaatcgcagcacgccaggcctccctgttcatcagcaactcctggagtttactcaaactca

SEQ ID NO: 53559 - DNA, 2059 bp, Bovine  19866880667522
  misc_feature (1)..(1): n is a, c, g, or t
naatacatgtaaagcatggaagtactgcctggcgtaggatgagtgctcggtacatgcaggttctgactattaggtgcctacattacacagagttgggagatggcagaggcccctgttggcagtgcccatctgtggcctgctggggagatgggtccccagacagctagtagaaggcaatcatggagggaagatcaagaagaaatggcatctctggaaggtcagagaagcatctcttagaaggagacttagcccttgccacaagctggggcttgaagggtgaaagaggggagactctcttgagatatgcccaatcggggcagaaggaggtcctgggccagacattaaaataattgcatgcgagctggtgacactcacacccagtggggatcatgtctttgctgtgaaagatgccggtgcttgccaagtgctgagccagcaggaaggctgatggatgtgcatctgactcaggaaacctgagcttcttcatcagggagaaactttaactaaggggaagtcagggccagcctgtgagcctcccaacaaacaaattgtaacttcgcattcacaagcctgccggaaactctggagacaccgtgtccttgctctaaacgagcccatctgaatcccactgtccattgtacaaagatggtactttgacctgcccatagttaacagcagtcagggtgcagagctgagacacaaacccagctctgaaccccagactccaggttcctgagtgctgtcgtggtctgtgtcagtggctgagagttctacaggtgtggagagggaaacctgcagaggagacggtttgctcacaatcacgtggtgagcttggaccaggccagggctgcgaagaggatacgggcctcctggtgctcccccactgccttcccaccctccacttactcccggccatctctcatcccattatgcctcattctgctgtgtctgcccagggatctagatttgtgtatcatctaaggcaaaatatgaggttatataaaaagcagcaaaagttaaaggaaggtagggggagaagatggtgggtcactagcaggccaagggggttttagaaaaccctaggaacttggcttcactagtggctcagacggtaaagaatccgcctgcagtgcaggagatctgggttcaatctctgggtcaggaagatctcctggagaaaggaatggctacccactccagtattcttgcttggagaatcccatggacaatggagcctagtgggttgcagtccatggggtcccaaagagttggatgtgtctgaacgactaagcacgcatgaaccaggctgccctgtgataggtaagtgcactcaaagtctattaatatatattcagatttacctttgccacctaggatttaatcatcagaacacagaacactccattcccctttgctaggctctatagaagtaagtaaaatatctattgtttacctaacactgattatatgctaggcataggccagggctgctggtgtgtgtgtgtgtgtgtgtaaactttcacattcagtcctcaaaacaacctggcaatttttttctgttatcattcctattttacaggcaataatcctgagagtctctcagtaagcagcaaatcctaattctaaattgggtcttactcccaaatctttttctttctaccacatcattcattcattcaaaaaaatattagaatgagcaataactctgtgtcaggtactgacagggtctgtgactgcagttcatgcatgtgctaagtcgcttcagttgtgtctgactctttgtgaccccatggactgtggctctccagactccatgggattctccaggcaagaatactggagtgggctgacatgccctcctccaggggaatcttcccaacccagggatggaactcatgtttcttaggtctcctgaattggctgcagtgatgtactcaaaagatcaaagttctatttctggaatttacaactgaggggaagaggcagatattacataaccatccattaagtatgacgtgtgctttttaaagagatggtaaagagaggctgttggtggtca

SEQ ID NO: 53560 - DNA, 3239 bp, Bovine  19866880698015
  misc_feature (1)..(1): n is a, c, g, or t
ncccgactcccgtcccacacatccattctctacgtctgcgtctgtattcttgccctgcagataggttcatctgtaccatttttctagattgacagtatgctttaatgtatgatatttgtttttctctttctgacttacttcactttgtatgacagactctacgtccatccacgtctctataaatgacccagtagcattcctttttatggctgagtaatattccattacaataagcctggcatgctgcagttcatggagtctcaaagagtcgagcatgacttagtgactgaacaatattccactgtgtgtgtgtatatattatataccacagttgatggggatgtaaattgatatagccactatgaagaacagtatggagattccttaaaaaaataaaagtagaactaacatatgatccagccatcccactactgggcatacaccctgaaaaaactataattgaaaaagatacatgcaccccagtgttcatcgcagcactatttacaatagccaggacgtgaaagccaccaaaatgcccattaacagatgtgatggtcttttgagagaatcctctcccacttagcacctcactgtgtgctaagcaccagggattcaaaagtgaattaaacccattttctactttgagaagcttacacacagaagaaaagagaaacgtataagcagagctacatattatctcatggatacatatgtacatatgtgttttaatgtatatatatttatgatataaaattttgactctgcattcacatatctaataattattgtaaggcctgatgacataaggtgctatggaaacagggtattaggaaaaaagtcagaagtaactaataatatattacattgatgctcatgcctcacgctagaagtgttgctcttacttattcaatagtttctggacactttgtatgttttatcacattgagaaagtgacatgaatatagccctgtgcttctggcaataatcttccatgaatcatctccactgaagtacaggactctttttaaaactgtgcagaataatgactgtagctggcacttacatagccctcttggccagtcaccacaaggcaggcattttattatggtccttagtgtctaatgagtatactgaagcatagactgtttatttcccttaattaaaaaaaatagcaaaaatagggtcttaacatgacagtctggatcttgatcctaggatctgggtccttttccaagtatctcagaatgctacagaaagagcccagttttcgttaatagaagcaaaaaacaaaaatcaacagatataaaaacatacaaacaataaaaagaaacaaaacaaagttgaatttattacttccttgtcaggtcagggaacacacaccaatggggaaaaattactgaatagatggcagagagaaaagttaagagtttttaagtgcaaaaaggggaaggtcagctaggagaatgaagtctgaagactgtgttctgcataggaaggaataaattcataggtttgcacaaagttgttcattgactagaaaagaggagaaaacatcacattggaccaagtcagagcttgccatgatgccagtctattgaaatacaaacttcagttttgatctcccccaggcaggtactggtgagggcatgaatctttcttttcctgctaaattccaagagctgcatgaagtgaacaatataggcaccgggcttgtagatttctagttgggggaaacagaccataaagaagggagttatctcagatgggagtcaatgctatgagaagtgcaagaaggagcaacataatagattgaggagtgagagttgaaggctgtaagaggctactgtttaaagtcacaaaatatgagggacttccctggcggttcagtggttaagactccagttttccaagacagggggcatgggtcccatccctgattggggaactaggatcccacatgccatgcaacactgccaagaattttaaaagattaagtcacagaagatgagaaggttcagccgggagaagataccatcacctgcaggaggaggagtgttctaagcagacaggagcgtgtgcagaagcaggagcgagtttgtgatgtttgatgaagagaaaggaaaccagggtcactgaagggaagcaaatggaggagcaggagtcagagactagttcctgaaggacttcctgatgaactgcaggcaggaggcagagagaagagaggaagtccttaactcatcctggacttggggcttggatggcatctgtgaatggagtttggctctccctctgaaccccaggatgcagccatctgcctgaaggcagcacagggagaggacagagacttcaggacagtttcctgccgtctcatgggcttgctatgtggtcctggagaagtcgatgagctctcttggctgtgattctgcaggacctgcaggttttttctaaaagcagtggcagattaaaaaggagaatccagttcctggtcttagccacatgatattcattaacctagtaccttgaagccagttctttaatctcacatttctcatctgcaaaatgagtatattagttgagctacctacctgcaaggggagttgtgattctccactggaaaaactagtgggaaagcagtttgagacagttgaaaagatacaaattcacaaggaattaatgttattgagctgaccagttcaaagtataaatggcaacacagtgtctaatattttgacacagttattgtcatcatcagctaccacttactgaacgctcactacgtggtaggcactgtagtgaacactttcatgggcagtaatctgtgttggattttagcagcagctcagccattccagtcacttatacaagccatcacgtagcacttacctagggaagctcatctccattgctttttacaagagccccaagagacgagcattgctatctgcattttacaggtgggggaaacaaagatgttggttagattcagtgctcagaagcttgcagcccataagtggaaaaattccagatgtacactcagggctgtttgtctccaaagctgatcatctgaccacaatgtactgcctcctctcagcaaagttctctatagctgtaagcattgctggtacctacaaattacctaatactcagactcagctctttggctgaagagattcaaaagcaaatgtctcctgggcatttacccctgtaccatgttaaacttaggatgggcatagccatgc

SEQ ID NO: 53561 - DNA, 1556 bp, Bovine  19866880946291
  misc_feature (1)..(1): n is a, c, g, or t
ntatggatgtaccacaggtttaacatgcattcattcactgacagacattgtttccactttgggcccatatgaataatgccactgtaaatattcacatacatagtttttgtgtggatatactttcagttctctcgggaatagacttagaagtggaatcccttaagtgtcatccctaagcaaggtgactcctgtttaatattttgaggcactgccggattgtttgtgcccaagcaactagaccatttgcaaacctctatcttggacttagctgttcgtgtgctaagaataccaatgctttgtatctttgttgcatgccagctaatcagacaggtggagcaggtgataaatgtagagtggagaattgcagaatcttctcatccctgcagccacgctgggcaccagttcaaacccaatgagttggtccagtgcactgggttcaaacacagaggatcctgggtataggggtcaccagagaacagatgaagttgtttaaccatgaactaaaggcatgatgctatttaatagattcccatgtctgcgcctatatcctatttacatatcatatatcacttgcatttgtttgtctttaatttcagtgacatgtaacaaaattatttgaaaatctatcttttgcagcttctccacttgcttagatctcttttttcctttgcacaatagtcacaatcaagattcttaatccctccaatctctaattggaggttacacgctctaagctgcaaattgtgctcatactgtggccctgggatgttggttggaagttgcacaggacacagtttcattgaagacatcttttctctggaccaagagaaagaatggagctgagcatattcttgccagaaggcccagggatccctctgatcctgatagcagagcatgtaatgggacttttctgaacagagtcagggctgacccttgtcctctatcctccctgccctgattatgtatctcaactgagatggaacttccatgtttatgacaatatctgcctgacagaaagatccgaaaccaaaattaaacacgtaaatgcttcctaaaccacaagagctttgtactaaattaataaatgcttatccatctcagcagtagcaaccctgctgtgtttcaggcagattctctagagtccttcttgctgtgccaacctgagacaaagttagtagatatgcatggggaagaaaaggctactgggctgtgccttctcccactgctgctgctgctaagtcgcttcagtcatgtccgactctgtgcgaccccatggactgtagcctaccaggctcctctgtccatgggattctccaggcaagaatactggagtggattgccattttcttctccgggggatctccccagcccagggatcaaacctgtctcctgcattggcaggtggattctttacctctgtgccaccaagggatcttttttttttcaatctctaccttgtgaattttggtagacctgtgacttcagctagccagaaaaagagaaggagccttttcagaccgccaggtgcacatttttccctttctcctcacacccac

SEQ ID NO: 53562 - DNA, 1511 bp, Bovine  19866880985459
  misc_feature (1)..(1): n is a, c, g, or t
naaatggcatagcctctaggtaggtataccctctattaggcttctgacaaatggtgacatttaaaccagaaagatagccacactgtgactaatgtagtggctgtcattaagatttcccaaaatgtctgtgactcatgtcacagacagtgggctaatctcaaaattatatacaaagaacttctagaaattaatatggaaaagaccagtaaccatggtcaaagaatatgaatatatagttcatagaggaggaaatacagatttttttatattttttatttttatctgtttggtcatcctgtgagccttgtgggatcttagttccctgaccaaggattgaacctccgacccctgcagtagaggcatggagtcctaacgactgggccaccagggaagtcctggtggtcttccaggactggttcttaaactcaactttaccactatcaaaaaaaatttttaaacagtaaagcaaatttaaagataccaagatgccactttttgaactcctagtttactgaaaaatctaaaaatttggtaatacgttctgctggtaatgctgaggccctctcaggctttactggtggcagcccagatggatacagccccctacagacacctacttggcagtcttgactcagttcctggaacagaaatggctaagtgttcaccaagattcatttttcccttccatagtaatacagatgcaactggaaagtggctaggcagatacagaaagcactcttcagctcccctgccagacacattgcacgttctttccagtgggatatgagtagaaaagtagcgtgtgcaaatgcttgtgcatgtgtgtgtgcctgtttgcaaaggtggccaaaaattcttcccctccctgtgcctgggtcatgacttggcagcccctcccaggaagagaagtccgtcttaacttcctgaatctggcctgcccttattgcttactgccagtgcaacagtaagagacgtgctaggagcagagacctgaaagcgcttgcattggagctcactctcctgctgctgttggaagactgctgctgtgataggaacaagcctgggccagcccgtcaaaggatggaggaccatgcagagagaagccccggtcatctgagctgtcaggactggcatgtagtagctttgccagctggtccacaggtgctgaacaggaacagccaagagatcagccataccgggtcagatccagaccagcccgactgagtcaggccagattgcccacctgcacctataagccactatattaggagtgatttgttacacagcagtgctaactgatacaacgtcctacttccaggacaaggtttctcggaactacgtatacagatgtggacctgggaaagcagtggtggaacggaccttgattcagaactgacctaactcccagaagggtagtgggggcatgtgctagagatgtgtgttagagatgaccttgttctgtgtttggcagaaagaggtctgttacctgcgatgcttgttggaaacagaag

SEQ ID NO: 53563 - DNA, 2145 bp, Bovine  19866881107714
  misc_feature (1)..(1): n is a, c, g, or t
ncacctggcacctgaagaacactccaataaatggtagatggacaaaaagaaggaaggaggataggaaagaaaagaaggagtaaagaaaggaactaaccgcaatgctcctggaatataatctccctaaaaacaacacctttgtcctttgttagctctcatgtatccaatgggacgaggacattgcccggcactggtagaaactattgaatgaagagatgcatgactgaaaaataagccaagccaccactgggaaaactggctcctaaagatacttactcactgacagatgaaactgctctcagattgctttctggtctgtttattctcccaaattattcaggtattttaatcttcatataatccaaaatgagggccagtaagaaaaatgagtgtctcctgtgcgctaagccacaaacaaaattcaggggatgcaagaagacaaggtcactgccctccaagagcacgaagatccagaaccctgcctggactgaatagcagtccagggtgacagcagctcagggagaaggaacaccaccctcggcttcaaggattgctgagaagggacacccatcccaactggagtgtactctgatagcaaggcagagactgacagcatcaattaatccctctgtgatcccagtgtcagaaatgtaagccttttatgatgcagtaaaacaatttttatgggtttttccatccgtttcatgtcttgacgtattttttaatcaaaagggataagaacaggaagtcaagtgggtataaatctcttgctcgtttctctggttctctgtcccccgccccccggcccagggaggaaaggtgagcctccagtgccctagagcagactgtcctgtcatccctgggcatattttccagaaagaaacccttattctagttgtagagtcatgggctttgctttcaacaataaacacgttctccaaaggcaattccatagatggaatcccagtaaatcaaatctcatgtttccaataactttacacgtatattacctttatttccgaggacaaaaccaaaaagtgttccttgcatgaaacgtgcaaagcagaaaaagcatagacacaaaaacaaaaactacttgcaatcttaccaccttgagataatattagactgtaatcagacttttataacatgtttggatatacagacacatgtcttgacaaaaatagggtaacggtagaaatattatgtaacccacttttaacagcttatctatgaaagactggaaagactgaaggcgggagaagggggcggcaggatgagatgattttatggtatcaccaactcaatggacatgagtttgagtaaactctgggagatagtgaaggacagggaggtctggcatgctgcagtccgtagggtatcaaagagtcagagaggactgagtggctgaacaacaacagcagcaatatgccaattctacatcttatttattagtttcatattattctgttatatgaacacaccaaaatttaacaagcctttgtttttagaagttgggttcgtctgaaattttttcttgtcataaataatggtaagatctccctgttttcttctgctatgattttctagaaattgaatgtgctatgtcctgattcactttgctgtacagtagaaactataacaattatactccaaacaaatttttaaaaagtgctatgttacatacacacacacacacacacacatatataaatatatatatatatatatatatagtgttttaaaaattagatacattttgtcaaactgtcctacaaaaatgcttttgtaatttatagtatctccagcaagaagggtctacatttttaaaatctttaccatcactgaaactgtgtatataaattactgccagtgcttaatccccgttatatttttccttttttgattacttgtgccatagaaattttcacatgtgtcaactgagttgtagtccatgacagatttagagggcaccaaactcttcttagaaaagatggcatttttacttttaatctttgcattaattattatcaatattaatatatttatttagtatgtattaatggaaatgctctcccatatgaccagtagtccagcaaaagtttgggggaggaaaggatggatggtaagcaggtaaggacagtg

SEQ ID NO: 53564 - DNA, 1338 bp, Bovine  19866881251066
  misc_feature (1)..(1): n is a, c, g, or t
ntagaagctgctgcagggaacaagtgagatgggcaaaggagcctagcactccctggagatggatggtggtgatggtcgtataacattgtgaatgtacctaatgccattgaactgtacacttaaagacggttaaaatggcatttttatgttttgtatattttaccaccagaaaaaagaaaaaaagagcctagcactgtacacctgacacatggtacataccctgtaaacacagattctctcctgtttttccccagataaatgacaacctactgagggttagctgatagatggtgtttgtacaacctgtgtcatttatctttacagaaacaaagcagatcctctccaactttattatgggtatgtctttgccaatttgctttatacctcctgacaagccatatgagctcattgcagtattgctggttttaatagctttctttggcccaatgcattagacacaggtagaaactaaggtgaaggctgtgctgacgctgggtgttcaagatggggccccaggagccttcaagttcataagaaactaattgtcagaggttgcttcctcctcctctctaccctctttttagtgttgggggcggtttatgggagagacttgagtgaatggggtgattgtataggaagggaagggatttcctggtagctcagtggaaagaatctacctgccagtgcaggagatgcgggtttgatccctgggtcagaaagatcccctggagaaggaaatggcaacccacttcagtattcttgtccaggggaaatcccatggacagaggagcctggtgggctacagttcatgggtttgcaaagagttgaacagagcacactctaccacacaggaacggcaattgtcattttatacacctttgtatttttaaaaatgttaaaaacaactaaatgtattattcgggtaaaaataaattagtaaaagtctaaaaagaaaagtacattcttggcttagctgaatagcttaggagcgagtgtctactaactggttggtgagcatatgcagagaacgcacacggcacagaacacaacagcgagaaggacaccctgcaggctattgcagttaatttggtggacggaaccatggcacccatgggctcccaaatcaatcctcctcaggaagcttagctcagcagaacagtcggtggagaaaactccgggcggctgaaaaatgatcttacttgatacctagtacatacatttctaagactgttggaaagaaactgattccccaaatcacacatgaatgtcagcactgagactttttaaaaaaacttattccagggaacatattggagaaaaaagaatatttactatttt

SEQ ID NO: 53565 - DNA, 938 bp, Bovine  19866881648303
  misc_feature (1)..(1): n is a, c, g, or t
ncagtttgggccgcagtgcttctgtggccttaagatggtctaatgccaatgccaaccgtctgggccagcagctctcctggcttctggtttcccagtagcgagaaggactttcggctccccctctcccagtgcgtggcagtgagggccactcacctgaatgtgaagagggtccccatgtctagcatcgagagcagctctgcctttgacttggggaaggagagccggtagcgcagtgtctcaaacgcggggacgatcatggccttcttggtgttggcgaggtccagctggatgacagacttcctggagagagggtaggcagagagacagggcccctgtaatgccaggtaggggctgccccatgtgagggcgtggaggtggctggcacaaggaggggtcagagagaaagccaggggaagcctctcagtttaaacacaagggaatccaagacccgagggaggcctggaagcttgtccagcagcactcaggagcctggctgtctctgggccagaaggcagagtctttctggagaggaagtggagggggttgtacattcacagtgtgtgcccctgtcagagccaagtgcaaaagccaagagaccaggattcaaagatgtgcagaccagcctgcttgctgggtcccctgggctggccacacgcctgatgcatcactggccacaaggagagctagacataacgctgatgagatgattgtcaacctgggcatctgtggtcccatctctgggactcttcactccttggactccttccgatgctaaaccttcaaacttgcctgacacaccccacagagtcagcacccaacatgccagtgctctggaccccgccatcctctctctcactcttgccttctgcatctccgagacccagctcctgtcttctggatttgtctgcctggggccagctctgaggccatcatttgaa

SEQ ID NO: 53566 - DNA, 774 bp, Bovine  19866881818488
  misc_feature (1)..(1): n is a, c, g, or t
naagcgggggctgagttttggaaaaactgcagagtgggtttagctgctgctgaaggaaggaagtgccacagctggtatggagaaaggacatagggacaggaagcaaaaggaacgggcaagtctttctttctccccctcctgactgtctccctctcatgaataggaagtggctggcagagcagaagtagagtttgcagagccctggcttcagcatcacaaaacaggtttggagctgagaggcaaaagcttaaaagactgatctcagctggagctgtcactattcagtttcacagatgaggaaactgaggcacagagagattcagcaatctgcccaagattaaaccactacctagagcagagccaggatttgactccaggcagtctggcttcagcaccctggctcttaacccctggaccataaatgctgaatgatgaatggatggatgaatgaatgggcaggtgggtggatggatggatggatggatgggaaggccccaagatagtgcttagaccagtgcccagccatgcttcccacaagcacaggtcctcctggcctgactgtctttgttgcccaccaggtcattcactggaactcccccaagaagctgcgggtgaagaacaagcacgtggagtttttccgcaacctctacctgaccttcctggagtatgatgggaacctcctgcgacgggagttgtttggctgccccagtgaggctgacgtcaacagtgaaaacgtgagtggccccagggcttggccatgcaggcaggggggcc

SEQ ID NO: 53567 - DNA, 726 bp, Bovine  19866882003357
  misc_feature (1)..(1): n is a, c, g, or t
nttattaactagctgctgacaagtggagctggaaggtgaattatgggccttcacagaaggagatggctgaataaactatcttctctggacatggacatgcaattgctagcttttggggacacactcaagtcactgtgacccgacttgaaatatgatgatggaggacaatttccccctcaggtttaaaacagctacctgggtaatttttaactcatccattataccatatctcctgtatgaaaaaggaaattagtttctggctgcttgggaaatactgaataataacaatgctaaaaaaaaaaaatagtaaagtaaccctacagagtttcttgttttccttcatactagaaaactctgtaagaattcaatgaatcaggcagctgaatgatgagcaaaaacaaggagagtgggcttgctttttggttgaacaggaaagaataacacgcaacgaactcagagatatctttacattctgagatggccacatataacatggggatctcagaatcaagatgtgtgaccctagtagattcaaagtcaaaggctcagcagaaatgagaaatggggggttttaggaatttatgttagttgcttgctggagttcatggactttttcagactgcctggattaaaagctgatttcaccagccaaggaggtttgtcccttctatttaaatccattcccccttgaggatgggggtcacagtacaggaacctaagcaaaag

SEQ ID NO: 53568 - DNA, 3941 bp, Bovine  19866880600976
  misc_feature (1)..(1): n is a, c, g, or t
ntttgaaagaggaagaaataacatatttataaacatgtacatttgcattctggaatagtttttttgtgtgtgtgtgaatctttaaaagttcttctttaatttaaaataaaaatcaacatctgatcttgccataagaatttctctatcgagatataattgatatagaacatgttaggcatacaattcaatcatttgctatttgtgtataatacaaaatgatcatcaccaaaagtctagttaacattcactataatgcacactcacaaatttttttttcttgtgatgagaactttcaatatttactctgggcaacttttaagcatgcaatacagtattatcaactgtatttaccaagttatgtgttacattactataggttattttttataattggaaatccataccctttgaaccaacttcattcatgtcatctacttcctacctactacccgactgggcaaccaataccctgttctctgtatgtatgagctccttgtatttttttttttttaaagattgcacaaataagtaagattatagattatcttactctaatttcactttgcataatgttctcaaagtccatcagtgttatcacaaataggttatttatgcaaaatattttgacaacattatctaaccacttgatatgaaatatggaaaaataaagtatgatagatttctgttgtgttgttcagtcactcagtcatgtccactctttgtgatcccatggactgtagcacaccaggcttatctgtccttcaccatctcccagagcttgctcaatctcatgtccattgagtcagtgatgccattcaaccatctcaccctatgtcaggcccttctcctatctttaatctttcccagcatcagggtcttttccaatgagtcagctctttgcatcgaatggccacaaatattggagtttcagcttcagcatcagtccttccaatgaatattcacactgatttcctttaggattgactggtttgacttccttgtagtccaaaggactctaaagatcccaggaacctatgataaaactaaaagtacatgctaaaattaataaaatatcatcattattctgaaaaatattcccttatttgatttgttgcagtgtgtcctataacagccaggaactttgggagtaaatacagtcctgtcctgacttagtcaccatggcatttagagacattggcatttacttctgagttcctcatatttaaatccaattagtatttcataagctggaatcaagattactaggagaaatatcaataacctcaaatatgcagatgacaccacccttatggcagaaagtaaagaggaactaaagagcctcttgatgaaggtggaagaggagagtgaaaaagttggtttcaaattcaacattcaaaaaactaagatcatgtcatctggtcccatcacttcttagcaaatagatagagaaacaatggaaacagtgacagactttattttcttgggccccaaaatcactgcagatggtgactgaagccatgaaattaaaggccgcttgctcctaggaagaaaagctatgacaaacttagacaacatatcagaaagcagagaaattactttgctgtcaaatgtcaatataatcaaagctatggtttttccagcatcatgtatggatgtgagagttggaccataaagaaagctgatctcagaatatttgatgcttttgaactgtggtgttggagaagacttgagagtccattggactgcaaggaaataaaaccagtcaatcttgaaggaaataaaccctgaattttcattggaaggactgatgctgaagctcctataatttggccacctgatacaaagaactggctcattggaaaagaccctgatgttggaaagactgaaggcaggaggagaaggggacagcagaggttgaaatgactggatggtatcaccaacatgatggacatgagtttgagaaaactctgggaggtggtgaagtacagggaagtctggtgtgctgcagtccatgggatctcaaagagttggacataactgagtgactgaatagcaacaaagtactgcatatatactccacaattttttttaaagcatgatttagttatattttacattttaatactacagaaaataaaaattatattttaatgtacaaattaaggtggacatcatactcttatgactctacaagtagagaaataaaagctcagcaatggttttatttcaagaaggtaatttgacaaatgactaaaaattaattagtgataattcctaaacaagagctgtgaacttgcttaactttcatgaatgattcttcatgttttcttttgagaaatacttaatgaattttcttatgctaaattgatgcagtcatcaatatggatagtcatttttcatgcctgctctttaaccattaatataacacaaacccatgaattatctcacattttttacatggtaaacaattgcctcaaatattatattttgcaaagtaagataaattgtaatttcaaaagtgtattcctttcctttaatttagtgttgttaaaatctgtgtatctttccttttgaaaagaatagaatcagcttcagttctgttcagtcacttagtcatgtccgactctttgggaccccatgaaccacagaatgccaggcctccctgtccatcaccaactcctggagttcacccaaacccatgtccattgagctggtgatgccatccaaccatctcatcctctgttgtccccttctcctcctgccctcaatctttcccagcatcagggtcttttccaatgagtcagctcttcgcatcaggtggtcaaagtattgtagtttcaacctcagcatcagtccttccagtgaatattcaggactgatttcttttaggatggactggttggcttacttgatagaaataaatatttctcatgtaaaagtggatattgcacagaagtagttaatttttttctcaaagcttttccagtatattagttgactgtatgttccattaagtatgcacattgaggagtagaatgcattcatatattaatagctttacttcattagtaaatttatattcatacttaccacaagatttcataaaattgcagttttagtacaaagaacaaaagcaattgtgtaacaagggcattaagctgtctagtgaactggaatcctgaagttaaattaaatagtgtagcatgtttacatgccaggaagaatatgaaaatgaagtccaaatatacagaaaaacaattgcaaatgcatcagcaaattaccagtaaaagaatgttcgcatgttgcataatgcaaaagtgttacttattcatgcatttaactattgtgctactaattcataaatataaattatgtatatcctattcctctagtgctataagcacttaatgttaaatttgtgcagaatacaaatattacctatgcacttcaaagtattaaaactttgaaatattttgcttcacttctttttgtcagcagagaaattatttatttagtgtctttgcttaaaagaatgaaaattctatgctaagtcacaaattggcttttgctaaggggattataactcttagacattccagtcaatctaagcggagtgtatggctataatttacagtttgcagtaaagattcaaaaattggtaagttatataattggactagttgcttgtgattaaacatttcaaaaaattatgtatgtacattgtttttgttgttggtcttatccattttttaaatttatttattttttattgaagggtaattgcttaacagaattttgttgttttctgtcaaacctcaaacatgaatcatccctaggtatacagaggttcaaaagggaggggattttgtatacttatggctatccattttaaatataactgtgtgcatgtttatctattacaaaccatttccagtactttt

SEQ ID NO: 53569 - DNA, 800 bp, Bovine  19866880617946
  misc_feature (1)..(1): n is a, c, g, or t
nccccttttattaataactgaagtatgctttaaaaaagtggcaagggaaattggaaaaaataatttttagttgaaactgaacatcccaggaaaatatcactacttaagggtattttggatgtaaaattgtattcaaatttattcctagtaataaagcagatatttgcgggaaaatgaaattatgaaattcgggagttgtttttttaatcaaaaatcatagtttacttatagtctatatgttctaatatcaaattgcctatgaaatggctatcctttaatatatttgttagttgggagaactagtttggttttctgaaaaattcacacgttcaatttacaaagtttttaatgcagttgtttttagtaaaataatgcataccctttagctgtttatattggaattaactgttaagacttgtatttgaaaaaaaagatataagttaattaacctaacaaatgagcacagaagaagctggatacatctacaggtggtaaatcatttcaactgtgagggaaatgggaaagtaaaagtgatagccagctgttcaaagcagtgctaattttacacagtaagctggaactcaaaatccaagttaaagcttaatgcaatctcttcaaggcagcagatgcttatggggaaaaaaataacagaacaatttgttgcagaaaattacattgatattatgatctatgatccagacatcaaagatatcttgtaatcaatagtttactattacaaatacagtttgattgcactggcacagaaaattaaaattctgtattaaaaatgccatagtaaa

SEQ ID NO: 53570 - DNA, 1117 bp, Bovine  19866880728099
  misc_feature (1)..(1): n is a, c, g, or t
nactgactcattagaaaagaccctgatgctgagaaagattgaaggcaggaggagaagggaatgacagaggatgagatggttggatggcatcaccaattcaatgcacatgagtttgagtaagctctgggagatgcggatggacagggaagcctggtgtggtgcagtccatggggtctcaaagagtcaagacacaactgagtgactgaaaaacaacaacaacaatgaatataccatattttgtttacttgcttgtcagtaatagacactggaccattttcattttgtgatcattataaataatgcttctgtaaacattcgtgaagatatttttacgtggacatatattttcaatgctctttgacaaataattagtactgacatatttgataactcaatgttcaacatttttaagaactttgaaattgtttttcatagtggctgaataataatcttatcatcaatgtatcaaggttccaatttttctgcatgattgcaattcttattttctggtatttaaaaattttacttatccaagtgggtatgaatgaaatatcagtgagattttgatttccatttctctaatgactaatgtgctgtggtaaatcacatcagtcatgtccgactctttgtgaccctttgaactgtagccagccaggctcctttgtccatcaaattctcctgacaaggatactggagtgggtcatcatgccctcctctaggggatcttcccaactcagggatcaaactctcgtctcttaatctcctgcactggcaggtgtgtactttatcactagcaccacctggaattttgaggattatttcatggatgcattgcccatttgtataagttctctagccaaataaatgcattgtttttcttttgttgcttgtgtgagtataagagaatgtatcattttttttcataattcttagggtagttgtattgaagaaagttctttttcttaaattggattttgcaaagcatttggttacagccttcagaacagcagggaagacttagtgagattaagcaataataataagatcaattctagctctttattatttaaatatgttttccatatttagaaggatgataggacaaattcattattgg

SEQ ID NO: 53571 - DNA, 1559 bp, Bovine  19866880735095
  misc_feature (1)..(1): n is a, c, g, or t
ntgactgaatataagagaaagaccaacttcactagtttattaaactggaccttatcacaattgttaaaaagcttttgctttggtcattgcaaccacctagttgtttaatttcactgtacccatatctctgaaaatgcatatctcagaaaaagtacacatatctcataaaaattaattttaaacatgaatagaacaattttctaaaattattttcagagtttcttttaatatggtccattaatgataaattgttaaattaactttgtgataaattataaaaattaatgttagtatgtttgtgtttaggaacaattcagaataaatacagaaaaattaagtcctaatagattggtactattcaaagaataattcacacaatttaccatttcattcaaaatcacattggccatcataatcggcttcaagtttgacttgctacagtaatggctatattaaagatgtcactattgctttggaaaagtagagacaaatttattaactggaaaacgtcaacaatgtaaaaatgtttgtatgaatattgggagaacaggaatgtaaaaattattttcgagaaatcccgtgtaggtaatgaaagtcataatacaaacatggaagcagagtgctaatcttcagaaaataatttacataagctctgataatatttgataagttgctgaagtttttgacgtttgtagtaaatcagttttaaaaaatatgaatcaaattttatatgaagcagtatcacagaataagtaaatggaaatatgtgtcttgatggcttgagtttatatgaatgcatgcaataaagtacaatattcatacagatctattgtgaaactaattactgtgactacagaactaaagctatcttagaataaagatgtatctttattacattgttacattttggcccaaaggtcatgtcataaattaaagctgaaattagttcagcagggtcccattactttttcttagcatgaaactttaataatatgacttagattgaccttcttcctctattgtttcaagatatcttgttaatattcctccttggtattatatctttctcatcagcatatacttttttctctcaaactatgcattttagcttcagttgcaccttattcagcttgccatctgttgaacatttggatttcagctgcatatgctggcctaactattctgtagggaaattttgccaaatgaccattctttctccagtcattcctaaaaccactgtcatgtgcaggtgttcttactttctagaaaataagtttactatatttagaaattaatgctttcagtaaacaaatgacatgataattaaaaatatttactaaaatcattccatgtacaaagtatgtgttgaaactaatataattgctgtttttgtctgttctaactgaaatcagaaatacaatattcagaaaaacaatacaaatcaaattccctaaaacatcagttttggcaagacagctagtaattttcatgcataaaatgtttgtcctcattttctgctgtaaaaaaaaaaaaaattacataaggtttttttctctctc

SEQ ID NO: 53572 - DNA, 1599 bp, Bovine  19866880802237
  misc_feature (1)..(1): n is a, c, g, or t
ntatctgaaaaaaaaaaaaaagtgccaaaatgataaactgccaagttaagagacttaattaagggaaatttataccagtttaattgcttctgatctcatattatttttatcttaattaattacctctgctttgggcaaaataaaaagaactgaagtaactgaaagaagaattaataaaactccagtcaacttaattgcttgttattcttttaaacttatttgggagaagaaaatgagtggttagactcagttttgcaaataggtctcagttacacatatgattctttactcaatttttataagcggtcaagtttaagtcattttaaaaaaatggttggtaaggggccaaattgcaatttttattggttatatataaggaaggaaatttcaggaaaacctcctcaaaggttttagttaggactctaagctattttctaccaaagctgaacattgtgggcttaattgattttccccttcccttcttgaggaagtgatgatgtgatgtaataaaaaagaaaacaaatatttgtagtgcaaattattgataactaactccaggtatttctatggttattttgtatgttttaacagaatctaacaaattatatctagctcataaatttctaagtgagatgagtgaaattatgactcggattgtccataattgattgtatagttcatatgaaaataagatagcgttctctagatctgataatgttagagggtatcacagacagagcagattaatacagtaagaaatgtaaaactaaaatggagatttcattttcttggtaacaaatgaccttttcactgaatagatgatctaaaaatatttttctcaaggaaaaaaaaagttgaattgacttgtttaatcaacagtcccaaagaactacatattgctgtctgcaaagcagatggctttcctgctgcctgtcctgctgcttctgcctgccacctttttctctagcagctgtgattactaggaagaaaacaaaacaaaacaaaaactctattgcttacatgatgtatccataactgcactcagacttttaaaaagttatttttttcatacaaaagtgagaaatatatataaatttaatggcaagcatacccataaatcttccaacattttaaaaccaaaaattctaaaacttgggcaacaggtcaaataatttattcagtgttactttaaccattctcctctcacatctctcctgctttccagaatgtccctaacacagtgagactcaacaacactctgtgttgctgtcatattaatcttttttcaatggaaagttatttggagagttaatgcaacaggataaggaaggtcatgagtagttggttgggtttaaatgttcttatagatatgtattttcatgatacatgaagattcgttataggtatgcacaagccatttcattagatttttctgtctgctatataactaaataaaccaaacacttgttgattaaaagaataaaacattggagatttatttttgtcattgaaaaatattctaatctgaaaattttggctaagactctataatatcttaaccaatttaaataaaagacattatatttcacttcctaaaat

SEQ ID NO: 53573 - DNA, 1612 bp, Bovine  19866881201728
  misc_feature (1)..(1): n is a, c, g, or t
naacttgatactcattaggttgacaaaaatttgcttatcccttaggtagaaagctaattggtggtggcagggaagtgatgcatttaggataacagggattgtgtcattacaagctagttctacagacatatcccttgtcattaacaactctctggcaattggaaaaaaaagaggttttcagttgtcattctgaaattggtggataaattctgcctacagccattggctatagctctatgttatcttcaccattaactgcaaggaagactgaggaaaggagttcagctcagagttcagaaggaatgcaatctgaattttgtcaacagataactggtttcttttatgtttgaataatcatggctttaatggatgttaataaattgactctaaagatttgtgtgtatttaaatttatattaaaaggaaaatattttctctctgtataacatttaaaaaatcaaattacttttggtaataaaactagtaatgaaaaaatagaaaaatctagtctctaaaaaatgtgaaagaacacaacctattctttttgtacgactgaattttctattttaaacatcttaaatatacagaatgtcttcctaagtgaaaaaaaaaaagatatacatacatttatcctgaaatttattcccattttgatggtatatgattttaaaatttctctcctagaaattgtgtgacacagcctacttaagttatagatgagaaggctgaagtttaagtcatagttcagtttagctcagttgtgtccgactctttgcgaccccatgaatcacagcaagccaggcctccctgtccatcatcaactgactcccagaattcactcagactcacgtccatcgagtggtgatgccatccagccatctcatcctctgtcatccccttctcctcctgcccccaatgcctcccagcatcagagtatttttcaatgagtcaactcttctcatgaggtggccaaagtactggagtttcagctttagcatcattccttccaaagaaatcccagggctgatctcctttagaatggactggttggatctccttgcagtccaacggactctcaatagtcttctccaacaccacagttcaaaagcatcaatttttcagtgctcaactctcacatccatacatgactactggaaaaaccatagccttgactagatggacatttgttggcaagtcataagacaacctacaaactggcagagaaaaaaagcaaacagtatctataaccctacagtcttgttctttttgctgcttcgtattatcttgtgacatgtatgttatcttgttctcaactatagtaatttcaaaatggcacatcaagttgtacatatttacaacagcacataaaatgtaaaaaggcccatgagtgttaaattcaagtgatttccaacataaatatgtttatatcagttatttttaatcacttacttgaaaatattcctgccagaaagggagtataagaggtatggtctattacacactgtataattgaacattcccacatgctgaactcacaaattcaacattttataattgcccatgctcattgtttacgtgaagaaatgtcagtgcattaaagaacttctattaaa

SEQ ID NO: 53574 - DNA, 1137 bp, Bovine  19866881252452
  misc_feature (1)..(1): n is a, c, g, or t
ngggaggaataaaatttaattaccattattagttattccctaattctatgccacatggattgcaaagagatcctcatttttacatattggcttatgattgaaaacactacactttgtttttaggaatgtgaaattaaaagatatatctgcatgataatcatattttgaaattagatggcatgagaataagtggacagagatagtagctaccaatataaaataaatctgggacctgcaaggatttaaccacatctagaataactttttagtgctactgatatatcctcattatttgaaatgcaacagagagatgaaatttaatgttccttagctatagcgctagagagtgaaacaaacaaacaaaaaatagccaaagatccttgatgctacataatgtggaaaggatattttaatagagcaatatgattttaaatactcattaatattattaaataaatatgaatcacatttaaaaaattctgttagtactatgcctaaatctaggatctttcacactgaattaaatgactagcaatcattaatgccagccagctatgctaacactgaaaatcatgcaaacttactaaagattttgactaataagaaaggaaattttattacagaatattaaaagcagctgcaaatgtctacttttaaattggaatatatcctgttaaattaaccatcaataacataaaaagtaccctggaatccagaaataaaaccttgtatttacggtttaataaagttttttttttttttaaggaacttatttttctgaaaagtaaagatttacaaaaatatttcaaaagaaagttttgtcatcaaaggagacagcaattaaacttcagtatacttattagggaattatcatttcagtaataaatcacataaactgcatcatgccaatagataaataatgaagatgccactgtcaatgaaaagatgaaatattaaataaggtccaaaatatacctgggggtgatctaaatttttaaaaatagggttaactttccttggaggcaaattttacattggagggtatgataagggataatgtagaaacctgtgtgtaaatttaataccggtgaatattttggcatagcattattcaaaatataatccacagactcattt

SEQ ID NO: 53575 - DNA, 1872 bp, Bovine  19866880355179
  misc_feature (1)..(1): n is a, c, g, or t
naccacacagttatcaagaactgcccccctgtccccgcctgctgatgctgagcagagcctggtcgacatctgatgccacagttgtcaggaaaagagaataacacaggggtgatgtctggggatgcctctggagggggaggggctggtgcccagctgaggcctccaggggtggaagagggagagtctgtaggagccagaggggacatcaggacagctgggagagcctccagggcaggctcgggcctggcccaggaccacgtcagagagtgggtggggctgagctgaggctgtgtggctgaggggggcagcgcagcagggcagggctttgtgacaagaccacggctcctgcagttgcctccacagtgccggcctgggacagagagtcctgctggctttagggaggtgacttagaccagctcaatgcccccaaacatgagcctccaaccaagagaaccttgtgtcctcctgggccagggagctggaccacccaccaacagtggcagagaaatagtgctgaagtgaagaactcttgtaggtcaaacctgtcccacccaccatcccccttcaatcctgtatccttatccccatcaatttttttaatttatttttttattgaaggataattgctttatagaattttgttgttttctgtcaaacctcaacatgaatcatccataggtgtgtatatatatatataatggcatccgttcagtgccagcccctgcagagaccctgccaagcatgataatccttgggggcaagaactctgcctatcttgttcgcagctatacccccaggacccagagcaggggctggcacagagacgttcaataagcatttgttggatgacagaataaactcattttgttctcacaagcacctgagaggcagacactgtcactcccattttctagatgaagaaaatgaagctcagagaagggaagtgagtagcctgctttcctggaactcaaactggagcctgggtttgctcctcgccaagcactagagacaggggaaaactgagctttgaggccaatcgtttcccttctctgagcctcactttcctcatctgtgaaatgggactatatttacatgttggggatgattaagtccatctgtgtaaagtcaaatgtcagacaaatgtatgctcctttcatccttctcctccttgagttagccctgatagtctaaacttccacacagccacacctgggacacatgaggattgcaagtctcccttctttctgtacaacaggaaggaggtgtatttgtctgctggggctgctgcaacaaagtgccgaagcggcttaaaagaacaggaatttattgtctcacagctctggagactagcagtctgaaatcaagatgctggcagggccacactctctctgaaggctctggggggtgagtccttcttcgcctcttcctgcttctggggcttgccggtgatcctggcagtccttgtcatatagacacatcactccactctctccctctgtcttcacacagcagtctttcccgtcccttctccccgtcttcacatggtgttatcctctctgggtctgtctcctccttatgatgacaccagccacactggatttagggtccaccctactccactatgacctaatcttaactaattgcatctgcaaagactttgtttcaaaaaaaaaaaaaaaaaaatccaaagctaaggtttcaggaagagcgtaaactttggggggtggggaacactattcaacccactacaagaggtgtactagaaaaggtggggggtttggagacctgcaggaagggcttcagattctgcctctttcaccaggaggctggactgtaaactgctctgagtctggactgtagactgcactgagt

SEQ ID NO: 53576 - DNA, 1452 bp, Bovine  19866880417018
  misc_feature (1)..(1): n is a, c, g, or t
naatggtcctaccagtctttgtcatatgtacacatgacatggtttgccacacgcatgtgaccttcacaccacagcactagcagttggacccatctgctcgatcatatatatggatgcaaatccacaaatggtgtgtgtcccattacacacgggactgggaaataattataggtggggagacttgccctgtcccttgctcctaactgccacagcccctctaatccagttagaagacagaagggtctgtgggggccgcactttatcctccttcacctcaaatccccccaacatataccctgagctgatgtcagaaccttactactcatgaccccaaaccccccacttctagagcttaggaaagctttgacccatttgaaggtttattttctttgagctgcctgacctactgtgagcccctgcttaggggagtcacagaatcctgaaatgcccctgtcatttcacagatgaggaccctaaagtccagaccctacgtctctgggtgggaaggaaggtcttgcaacctcagtgaaaattcctctgctggtctcacaccagtccagtatctgaaccctgttgatctaggaagtaattttacgtagcctctctccctagagaattggaccaagttgcttgcaacaattttgtggtccttggggaccaacagactccaggagccatcccatctatcccaccacagacaaggaagaggaagtcagcctccagcagcactccccaggggatctcctggaacgatcctgagcccttgccccaccctggtccagactccagagcccagagcgaggcagcagctgtccttggtactgaaaagagaagctccgtttgatcaaaggcaagaacagccaaagatggccctgtgtggacccagctgaaggccaggccaaaacccacctgtgtcctgggaacccaaaactctgaccccactttcctctctgctcccacaacctaaagaatgttagatctagaaggaagctgggagacagacttttaaccaccattttacagaagaaacagaggcccagagggaaagtgaatttctcaaggtccctcaagtgagagccaggactagtcctctaaagtttcagggtgagtttttggaggcctttctaggacaacatgaggaaaataaaatggaaggaacaggcaaaaagcaagggaactagaggggaggctggtgcaatcatccaggctttgaaatgaagaggagggaacgggcaaggctcaagtcaatgagaggtatggaagatcctgtgatgggcagacccagaacccagaagactgggtcccagagaggggtctgtccccactttacacagccctgcccttcagggaactgggccatcccagaaggggcagcagggtcatgctgctaggatcttaccccggcacagagcttccagggccagtgcccacagtgatcagccccatacctcc

SEQ ID NO: 53577 - DNA, 3300 bp, Bovine  19866880427346
  misc_feature (1)..(1): n is a, c, g, or t
ntccctggtggctcagatggtaaagcgtctgtctacaatgtgggagacctgggttcgatccctgggttgggaagattccctggagaaggaaatggcagcccactccagaactcttgccgagaaaatgacatagtagagtttagatgcctaggatttaatatcaatgtcagttttgccctttgctagtaaaggtatcttgggtaaactatttaacctttctgggcttcagtttcctcatctgtaaaatggggagaataatacaattactttgcaggagtgctgtttggaggaaattagttattaaaggcaaagcacttagaatgatgcctggtgtgctgtgcttagtcactcagtcatgtccgactctgtgaccctatgaattgtagcccaccaggttcctctgtccatgggattttcctggcaagattactggagtgggttgccattcccttctccagaggatcttcccaactcagggatcaaacccaggtctcctgctttgcaggcagaatctttactgtctgagccaccagggaagcccaatgcctgctagtaagggctgtatatatgagctactgctatgggcacattgtctctctggcctccagaaactctgaaattgttcacatctctcttaccagcagtgtagggggaacctcctttcctcacatcactgccaatgatagacactctggtaaattttttttttttttttagatttttctctcaatttaaaaattatgacaaatatgtgaaatttatcatcttagtcactttaagtgtatagttctatggcataaagtacattcatattgtacaaccattactgtcatccatctccacaatgcttttttgatcttttaaactgaaactctacacccattaaacaataactccaaactccctccttccctcagctccagcaactaccattctactttcagtttgcgtaattttgactattctaagtgcctcatataagtgtaagcatatatttgtctttttgtgactggtttatttcacttagtagaatgtcctcacgtatcagaatttcctttttttaaggctgaatgatgtattttgtatgtatatacaacttctggcttatccattcattggtaaatgaacacttgggttgcttccacattttagctgttgtaaataatgctgctgtagacatgagtggatcacacggtaattctatttttaattttttgaggaacctccttactattttccacggtgactctaccagtttacatttctatcagctgcacaaaagggtccagcttatccacatccttgccaacgcttgtcattttctgctttcttgattgtgaccatcctaaagggtgtgagaaagtatctcactgtagttttgacttgtatttccctaacgattcgtgagattgagcctcttttcttgtgcgcattggccatctgtatatgttccttacagaaatgtttattcaagtcctttgtccatttttgagttgggctgtttgtttttctgttgttgagttttaggagtcctctacatattctggattttaatctcttatcagatatacaattggaaagtattttgttttgcatattctgtggattgcctttttactctgttgacattgtctatcgatgtacaaattttttaaattttcatgaagtctggattatctattttttcctttttgacctatgcctttcatgttatatccaacaaacccatttcagtgtcatgaaatgttgccccatgttttcttctaagagttttaaagcttttagattttttatttaggcctttgacccatgttaatttttgtatatgatgttaagtaaggatctcccttcattcttttgcatgtagatatccagttttcccagcatgatttgttgaaaagactgttctttccccattaaatcattttggcaccgtggtggccatgtgatcttatccatgcgggtttatttctggtctgtctactctactccattggtctatatgtctgtctttatgccagtaccactcttttttgattactaaacctttgtagtaagtttcaaattcaggaagtctgagtcctccagttttgttctttttctcaagattgttttggccacttggggtcccatgagattatgatggctttttctatgtcttcaaaaacatcatttggaatttgatttggattacatggaatctgtagattactttggctggtatcaacatcttaacaagattaggtcttccaatccatgaacacagtgtaagagacagcctctttccttacaccctgttgtcaattctaaacaaaaaaacaaacagaaaacttttgcccaccttataggtgacacttcatacctgtttttcattggaaagtcttcgatcagtattaaactggaacataggcttaattcttaatgggcattcatatttcttttgtgagttgtcattatgttctttgcttatttctctattggaatagttatctttttttgtattgtaggagcctatatatatatattagagattatatccctaatgtttttctacttcatcgtgactttcaatgttatttattttttgtcctttataagtacttgatttttatgtggttaagtctaccaggctttttcttcataactttagtattttatgtcatgtatagataggccactttttctttaaataataaaaatattcactttgctttagtacttgtgtcatttcactttttacactttatgtttttctccctttgaatttatttgtgtgtaaagagtgagtatgactccaacctctattgttttctaaatggttgatcagctatctcagcaaaatttgattattcgatctttctcccaatgaggactcatgagagaacaagggtaaataaataatcttccaagacagaaagggatgccaataggtcaaaagagtagttctgacaggattccccagagtctgctaccagttaatccctgagaaatcctcttcactgtggtccttcttgctcctcatgggcagaggcaggcaggatgttagagggacagagccagagtctgcactagtagaaagatatccttccagaaggctctgcatgtgcaagacagccttgttcccagctctcagcaatccaggaaaaaattctttcttttttgaagttaacagtaaattgtcttataacttcagatcattgtcagcctcccctcctgtttctctccccccatcattactcaggtcctcagcactgctgtgttaatatgtaattaatctgtgttctttttctacaccgccac

SEQ ID NO: 53578 - DNA, 2350 bp, Bovine  19866880541910
  misc_feature (1)..(1): n is a, c, g, or t
ngatggaagcagaggccggtaccctggatttcgaagattttgggaagtgctgacaagattggtgggattcaaggtagagtccattgagtctgagtgtggctccaaagaccgggccagactatttcccagggcaaaggtctcacctggaaaacagtaaaaccagagttagaacagggactagtctggaagaactgcaagggcgctggctcccaagagcctatttgggtggagtaagaggcagcaaaacagagagctctgggctgggccgcaggaggcctgtgcaccagccctggctctggctctcactaggtggccttagtcaagcccagcaccaccctctggacttggatctccttagagactcttccctttggactagatggtctctgagttttcttctggtctggatgtgttaggctctttctgatagaaccttaaaaaaaaaaccaaagaagaaagctcttctgagaagagtctgtcctaacacacaagatgctagagtaggggataaagtgctgaagaagagatacatttgcttacatgagggcactttagaagtggaccctctcagacagcaggacatctcagaaatgcttcctgatgcctggctcaaggcttgtctgcaaaggacctgctcttatgctgcctcccttctttcacatttgcctcgttttatggaaatagtccaaggaagctgtggttgtactgtagtgagaacatgggcacagagcccagaatttgggtcagaatttgactctgctacttagcaggcaaagtgctttcctcagaaccttagtctcctcatctataacatgggagccccctttcttccaaagggcttgtgaacgtcaaaagagaatggctatgaaaacctttgtaaaggggtcctcaccctgacatttctacaccctggtcatggcccaaccccaggcagcagcccctaatcactggactacaaaaccagaaacagactccctcctgtagttggcttctgctcatatcaagtcagaactggccaccgcattctctgtttatgggagatgtcttgggtgctggaccacatcacactgtccttggtggcttttcttaaacactgagtattaagataatgcttgaaattcatttcgggcctctgatgaacacttaattcaaagaaattgccggggcacagactaagacctcttcggcgagatggtttaggatttcaggactactttctaattctcacttaaaattgcttggtaaactatgggataacagtcaaatctggcctgagacagctattcatccatatgaaatttggaaatttaactgatgaagccctttcctcgaaatggtcctgaagagagaagtctctgagcttccagaatacctaaaccatatcctacctcatttctgcagatgaggtttcagattcctgtttttcaggaaagatgcttatagcaatgtcccactttgagacacgcacaggagtccaatataagaaataggatgcctgggttccatctctcagctcctgactttcactatgtatatgagtcaaggtaactcgtttgtcttttctgagtactagtctcttcatctgtaaaatggggaaaactcaccctctgttatgcttagaacattaactgagaaaacagaatgggatggctgttacaacagtatggagttgcattttattcttcattcagagttacagtggtacaccgaagttctctgtagtagctcaagaaaaagatgaactctactttctgtatttatcggcatggtggtaatctcacctttctagtactccttttactcagctaagactgggttagtaccactgacttcacatgagctaacagatgtgaagaataattatgatgacaatgccaggggctcaccagatgctgatgcaaaatcagttaagtgtctctagtcttggcaatgctaagaatgctaactgaaatctggattctgagttgaggggtctggaaatctggactggtggcacctggactaggcagggtcattaaatcttaacctaatgagatgaagaaaaatgaagcatagtgcccaaggctctgggaggttctagtctgcttaaggctgatcaaatgaggcccaggctgccttcagtagaggaatgccagggcagaagactgcaatgctttccagctgtgctccacagagccctgcagtacacccagctcctgggtggagtctgggcctcatcccagcgtctatcaaaacaactttggttttgacttttttagaccagagtttcatataatcttacctttgcaaaaagagatcaatttattcccatgaaggggaaaacatgcttctgagcattgagtccttgaat

SEQ ID NO: 53579 - DNA, 797 bp, Bovine  19866880558521
  misc_feature (1)..(1): n is a, c, g, or t
nagaaggaaatggcaacccactccgtgttcttgcctggagaatcccagggacgggggagcctggtgggctgctgtctatggggtcgcacagagttggacatgactgaagtgacttagcagcagcagcagcagagatacacacatacccggatggaaagaagagaaagtagcctaaatacattttatggtaaaattcttatggaagacaagagacaggaaaattcttctgattgtatttatcagagaaattttcacaaagcagatagcactgaattgagccttaaaagatgtctatcgtttttatggaagagttgggaaaaaaatacaaaagtggggaccttgaagagtggttcagagaatggagactgttctagtctcactgagggttaagaatgtggccagtgcatgtgtcccacagataaagggtggtggttagaggaaactaatgctcggaagatacgcttcaggcagattgtagagtgccatgaagtctgtgggtagtgtgtggatttttcttgcttgtaagtggggaacctttgaggatttctgaacagaggagtggcctggtaggtcagtgtttttggaccagcattgaccattgggaaacattaataccccagtcagtgcactgcagggcctcctcattaaggagactccagtctgctcttgagtcgctctgaatgtctttctttgtgagtgtattcagagaagggctgttttcagcagaactgcaggcagtttttctgtttaatggggtaaggtaagatgcaaactttctgcctcttttccttcctcag

SEQ ID NO: 53580 - DNA, 1117 bp, Bovine  19866880586211
  misc_feature (1)..(1): n is a, c, g, or t
nctctgctgactcctccggagacttcaacaagtggagaaggaaagacactacgatttgctgagcattcacacacacgctggcactcaacagtttaagtcttactgagtatctgtaacaaacctctgagttagtttattattctgattttacagaggagaaactgaggcttcagggaacaattgacctgctccagggataagtgttgcggcaggaattcacaccagggtctgtgctcttccgcctaccctgagacacctctaggcgagcctaggccagacagaaactctcctggggaaagggtgccaggaactgccacgctggctcagcaacccctgcacagatctcctctctcttccaggattaaaggggatccccagttgccaagccattcaggcccctccgagcccctcctcattctgatcccctccctcactctgctggcagcacctcccacacccctgccccaggccttgggagcagctgcagtgacctcacccggccctgccctgagcccagctctggggagggcttagcagctgtgccccagccctgcaggtggctggggggcagggggtggaaaggaagagtgggcatggtgccaagagaaccatctgctctcccaggggcatggccacccgcacagacactggcctcacccccaggggctgcccttggccctctgtccccatgccaaggggctccaggaggcctgagcagcccacccagactggggcaccagccctcatctgccatctgtcttctcccggagcctgagaggtccttgcagggcacattggagcatgaatgtccgctggaaaatgaacaagtgcttggggtaagttctagggggcagaggccagaggccagggctgggtgtgctgagcgctgcccgcccagccccagtcttgtcaagccaagagcagacaatcccctgggggatgagggcctccatcccctcacatctgctcagctggcaggtgccgctggcagagggcaagccccttcccccacagccccagctcaggttacaaaaggaggcaaggccagctgaggacagggggaggggacaggaggggtggaggaggcctcacagcttcccagggtattgggggaggg

SEQ ID NO: 53581 - DNA, 1539 bp, Bovine  19866880588500
  misc_feature (1)..(1): n is a, c, g, or t
ntgcttacctgagataactgcaccaccgtggccctgcttgaggaagctgaagacggttttctggtgataagcacagtcgatgcaagcctgcacagcctgctgcaacaccacggaggctcgggctggcccaaaatggtcagggagctgctggaccttcttcttatctaagtgggggcctgtgctgccattcttgttcaagtaaatacaaactgcaggagacaaagaatcaaagcagtttaaagagtttcagagtacagaagtcggagaacagagctctcttcgtctttcctaccctgggctctggcctctacaggattcccagctgctaggctggtgaaacactgtgggagggagtacagggtgactatgcccagctgctgccagcccaaatgcatgaccacaggctctgggaacgcagcctgctgggagaagagcccagaccagcaaaggcacagaacttgcactttgtcttctttacactgaaaagaaaatctaagcaattttccagatggctgtactttcattttcagttcttggctgctttacgtattcttggtatctctcacatgctctgtgtaccaagctgtggggctatggcaatattagcatgagtgtgcttgtgtgtgcctggcctgggacctagagtggttaaaccaccagttacttcccttgctttccattctaggctttagagttcctttgtcatcttttacattaagacttaggctcaaagatagtagtggaaatagaaaaaaattggaataaagaaaaacatgcaaagggcctgaagggcccatctgtatatttgtttcagtcgtttcttctgtcaagatagctgggcactctcccaactgcaaccccccaacctggcactgtgctgcaaggggagaatcagggtgagcacggaagaaagagacagagctccccagagctgcttctcttggtctgtcgagaagactcatgtgcctgaccagctacagcattctttctgctgatctgatttttaggcttccacttgagtagggggtactctgcttcttcacactgtcctggctcactaactgaatggcaggagggcaaaaagtctcttttgttgttaaaggcaaaaagataaaagcagtagctgtgtgggctgtggatggactggtgtcctctctgggcctcaggtctgccgcccacatcacagaggggctgagccagacattctctgaggactctttcgccttcatcattctaaggggaagcaagatggagagaagaaaatggagagaagcaggatgtggaaagtgacagatgaaaaagaaagacagggaaaaaaaaaagaaaaagggtaaacaagaggaattgaaatatacatttaactcttttctctcttaaaaccacaaaaatgagccagataacaagaaaggagacaacttaaaactctggaagctggaaagcagagtggctttcctaaacagcagacctaagaaagctgaatctttaaccaagagtggggaatgatgagagccaagctgttccatctgataagtcacaaaa

SEQ ID NO: 53582 - DNA, 1000 bp, Bovine  19866880590879
  misc_feature (1)..(1): n is a, c, g, or t
ngaggacgtaggtgatgctgttgactgctggcaggttgagcgtgtgctgctctcggtcaaacacggctgtggagttaagtaaacagggcccagcatgtcagctcgtagcacagcgcatagctaaacaggaggagtccggcccactgcttgcctcaggcttaactggttacacagaggtgaatggtgcccaggtttccctcctcccctcctctccctcccctgagggtttgatttttgcctccaactccaaagggtttgcaataatgggagtggccaggctaggtctgttgcacctggggctttggaatgattctgctcaggctgtgaaacaactgtgaacataattctatctgctccatcagttggctgggcctcccaaggaaatctgctcatttccttaagaactgcttaagaacagaggagctgggcagcagaggagaacacagctattgccagcaatggctgaggtgtacaatctcatctggataagggcaactcgaattttggcaacattcatgtctttttttttttttttttctaaatccctatttatttctattcaaaacatatcatataatccctgggcttccctggtggctcagattgtaaagaatctgcctgcagtgcaggagatcagtgttcgatccctgggtcctgaagattctggagaagggaatccctaacaagcaaaaggcctctgcatccgtctttgagggcagcaagggaatgtggagataggtcactctcaggaacaaatctaggggacaaagaaagaaccttaaagaaggtgtgggtggcagtcactaagggaaggtggtaaagatggctgggtccctgcagactgcagcatggaagcaaatgagaagccaggcagaggccttagcctcacaaggaaagaaaggcttgatttcccatgcagtttttcagccatttctagcaattctttccctgcctgtccccatcctctgggcaggcaattaattactctgtgtctgggctc

SEQ ID NO: 53583 - DNA, 1493 bp, Bovine  19866880656336
  misc_feature (1)..(1): n is a, c, g, or t
nactttatagcaagaggaagacagataaaaagatacagagattcaagcagttacccagaaacaaacactgactgtcttaggacatttggcaggcagagtgcaacagttcagaaacagtcacggataatgcatctttccaaaacattgtctcaggggatcccctcaagatttactgcccagtcatccactttctcaaatgccacaaaactttctaaaagtctgaaggtaacaaatcctgggcagaaagaaaaaacaaggcttctcttgaataaaaaataaaaataggagtgacctactgaaaacagtttttttttcccctgctttagcataaaaggtgccaaaaattctctcttgtctcccctccaaagggttaggtgtggtatgaggtagttcctccatgacccacccttactttgctcccacaggtgaactgttttgaatttctaagttctggccctgcttcagggcaattcaagacctattattgttcaggaggagttgcctgaatctttagggcttgagggtttgagaaagaaagtggttgattcagacagtggatgaccagggactgagaggagtatagcctgagaggtgaccaggctggcatggtggcagggggtgggaggtgacgcctactggctctcggtgtttggagcaggggctgagacccagaaacaggagttcagcgtgaggatggcatcctggagcggtgttgcctggcaggggtgctggcatcacgagactgcctctggactttaagactctctctccatcttgggagtgaaagtcaagtaggtctacatctcttgggttttagaaactctggccattcctgaatgatccaaagaggtcagagtggtgggggaggggaggcactgtccacaaagggcgatcttggactctgctgatctacctgggggatgctcaagacgatgtaaattcaatttggatagaaaaattttttaaacacctcacaaattcttcctcagttacagaagggtaacaatggccttctgccacatctccttccaggggacagtgactgttgggacttggcaagactcagcactcttggtcaccaagtttttctcgtctccatcactcattgtgcataattcaccggaactcacaaagcccctttgtgtgtggtgagccggatcccgggcagttggaagggcccaggctggcgctgtcctcgaaattaactgagagaggtacctctactgatgagtctggagccagaaaaaatagaaggtctaggaggaaaaataaccttccaccaaaacgctccagtcttgtggaagatccgtatcacattggatgatcactccagggacacaatgggactttcattattctttgtgtttggagacaaaagatctttctgttcagcttaatactgagccttttaaaaattacctggaaatggaaacctgttttgagagaatagcctctgttggcaacttgcacccacttttaaggagaacctagca

SEQ ID NO: 53584 - DNA, 1714 bp, Bovine  19866880658559
  misc_feature (1)..(1): n is a, c, g, or t
nctgagtgtttgatggtgctcttttcctacttcccagtgctgctaggtagctatatactttctcctatttttagaatcttcttctgtcatctcagtgcacgtcttttaaatgagttttaatcagaaggaatttgcctttgtgttatgtggatttccttaataagctgtgaggactgtattcagaaaactctttgaaaagtaaattatattcatgattatgtctatcaactccttacatcccctcattacctttatgtaatgatcttgtcagatttgagagtgacttacagatactaaaggacccaacttgtttttgttacatttttagagattttttttcttaactatttctctctcagaaatcaactatgagttttagttacaaaccatccaaatacattttttaaattcagaaagtagtcactttctggtcatgtcatgttttcattttatgctcggttttttgttgttgttgttgttaatgattaggtttcatttatttcattcaaaaatagtggctcctctattctaggcaatattccaagtgccaagatacagtgctgaataagtaacacagacaaggccccagtggaggagacaaacaaacaaggaaaatactaactagtgctaagttgctatagaaaattaagagtggtgtgatagagtctaggtgactactttggattgagtggtcagggaaggctgctctgaggaggtgacatttacctgagacctgtatgataagatgccagccctatgaatactagtggagtgttccaggcagtatacaggccctcaggtagtaaggaagtggacctgcagcaggagcagaaaaggccggccagttggagcagaatgaatgatgagagctgtaggagaagaaacggaagaggtggggtcagtcagggtaaggtacttggatttccttttaagtgctgccctggagagcagttgaagattttaagcaggggaataacatgctctaatttatagtaatgtgtactctagatggggccatataatggagaaaatcaaccagtgctgagactccctagccaaacataggcaagggttgcatttactcctaggacattctaaatataagtaactctgttctcctagaaaaatcctaagcctcaagacaagaagtggaccaaattaccttgctatgaatccagctccacagtttaactgtgacttcaggttataagtcatttctctacactggttaccttatcaataaaatgaagatattacctacctttgggtagtaagtattgagcaacttaataccagtgaagtgcttagaacaatgcttggcacatagacagttcagttcagttggtaagtcatgtctgactctttgcgacaccatggactgcagcacaccaggcctccctgtccatcaccaacttgtccattgagtcgatgatgccatgcacccatctcatcctctgttgtccccttctcctcctgccttcaatctttgccagcatcgggggtcttttcccgtgggtcaggtctttgcatcaagtggccaaagtattggagcttcagcttcaggataagtccttccaatgaatattcaggactgatttcctttagaattgattggttggatctccttgctgtccaagtgactctcaagagtcttctccaataccacagttcaaaagcatcaattcttcggcactcagctttctttatagtccaa

SEQ ID NO: 53585 - DNA, 631 bp, Bovine  19866880660449
  misc_feature (1)..(1): n is a, c, g, or t
nctgtgaggaaaggaatgacagtgatgcaaagtggcagccaccatgggcttgggagtaaaagttccttgcaatttccaactgttggaagaaggccagaaaggtgtaggagatagcacagttggcctaagtctagaagatgatgaagacatggcacttacaagatgggcagggatgattgggcctccaagaacaatttatgaaaactgaatatactgccttaaaatagaatatggacccaaatacccagaagcacccccccgttgtgaaatttgtaacaaaaattcatatgaaaggagttaatagttctaatggggtggtggagccccattagagccatatcaatgctaccaaaatggcagaattaataatcgcatcaaagttgtcctgcaagagcttcaacacctaatgatgtctaaagaaaatctgaaactccctcagccacctgaaggacagtgttatagcagctaatgaaaaaggagaaaccacaggccctcccctacccactgttcgatttcagcagtcttcattttgtgcggtagtaaactttctagaatagtaactttctacatcttgtagacctcaatgtactataaagacaactctcattcaaaaacagtttatcttaagata

SEQ ID NO: 53586 - DNA, 723 bp, Bovine  19866880728178
  misc_feature (1)..(1): n is a, c, g, or t
nctgcgctggtgaccagaagacccaggtggagggtggggacacggtgggggtgggctgaacgcacgtgccatcggagctattgctgttggtgctcccgtctgtggactcccggctgccctggcgagggacccgactccgcatctccacggcaacgcccgtctctgtgctccgccggatgttgctgcgcagtttcttggtggccccttctgtgaccccccgaagcacagagagggaagaaggtcagatcgctgatgaggtttcgctgagatcactgctgaagtcaacctcttgggagggtacagaatagacagggctctgactggaggcagtggcaatctgagatgacctctagagccagcccacagcctgacccctgatcctgctcagcgcagtgacgcaaagtagatgagaaggatggctgaaggcacaatggagatgttggggctatgggtggggagtcagcagaattcagcccttgtccctcagcctcatcctcaccaggatcccctgacccacaccttcccactcaatctcagcccttgacccaaagggttaagtttcttcttctggaaagtttgctttctccagaatcctcagatttgtttttcattttccaagtactgtcatgagccctatcactcccggagatcacaaaccacctctgtgaaaccttcacaggtcctatataaaaaaaaaatccacacaaactcggccactcacaa

SEQ ID NO: 53587 - DNA, 862 bp, Bovine  19866880734014
  misc_feature (1)..(1): n is a, c, g, or t
ncccgttgcacgtgctcaaacaagagggccagctctctgcaggagagggcgccgtcagcggcaggcaagggccctggcaccgccccccacctgaggaccctgagctcccgatggattccccctgggcccagcctgtctggagatgctcagcgaacacaccaggcccgcataggcaggggtgggaacgggagagtagccttcctctctccttctctcttcttagctcctgggaaaccctcaaggatgcccggtatgattgtgctggatgggcaccactagggggcaccctcccaagggggaaggcagagacctcaaatccacctcactgctcagcaagcggagtgcctgcacgcggagccgtgcccacctggaggccagcagcagccctgaaatcctgccctccagatctgactggagtttaggggaaactgaggctgaggagggagatttgataggcagcccacttccttctgcagccctcatgctgggttctccaagactagattgagggctcagcttcttttgaactctccaggccatctcctgtttctctaacccaagaaatagatcttgcctctctttgccttcccattgcacggatgaggaaactgaggtccagggagcagaaggaccagtggacccagaattgcccaaccaagctctgactctcttcccagaggacccaagaccatcacccccaaatcattccttcccatcacacacatatttctaacaaactagcccctgccctacttcccagggcctggcccttgagtcctgaggactgcttctagaaagaagggctctttctattaataatctaaccaccatccctgtcttttggggtgggcgcttgcctctg

SEQ ID NO: 53588 - DNA, 5572 bp, Bovine  19866880753767
  misc_feature (1)..(1): n is a, c, g, or t
nctatgggattttctaggcaaaagtactggagtggggtgccattgccttctccggtgtctatctctatcaattaataattagcattagagatcattattcatttttccatccatcaagatgcttaacaaagtccctgtctgactcttgaagtattaaagatgaactaagagaccccatgctgctcctgctactgttgctaagttgcttcagtcatgtccgactctgtgcgaccccatagacggcagcccaccaggttcccccatccctgggattctctaggcaagaatactggagtgggctgccatttccttctccaatgcatgaaagtgaaaagtgaaagtgtcccgactcttagcaaccccatggactggagcctaccaggctcctcccgtccatggaattttccaggcaagagtactggagtggggtgccattgccttctccaaagagaccccatgagatatgctaattcctctgtccatccatctatcctgacccggccaacaaatactgtgtaaccttggacatgcttcccactgaactcaaaacagttcaaggtaaagtgagagtagccaagcatgtcattccttcctcctagcgggagaagaaaagaaagaaaaagcattggtttgggactagactgagactaataaaggaaaaccactggagggcttaagggggtagaaacctttgactctaatgtctgtaaatcacacttatacagctgctggtggggaacaccctgaattctgtcttcctgtcctgtgtttattcaaggacaggagatgggagcagcatggagcacacgtcgcagggacccagtgcttaagagcccaacattttctcacacagctatctccttccccaaagccccaagcacgagccccaggaacctagtctctcccaattttctccccccccagagaccacttcaatgatgtttgtacctattttccccaagcagattgagaacccttcttcctcctccatcccccatccatcagcctattctcacctcctccttcaaacatcttggtcacatcctcccacaggggcgccccctccttggcgttctctggatggtgcaacttcacccatgtgctggcctcggtgggcagggtgatcaggagctgctgcagcatgacgatgcctcctgactgaccttgtccacttctggtgagcaaatggccagagcctctgcttagatgcctcacagttgcgtggtcctcctgtgatctgtctcctgccctcaggattcttgcgtgtgcctgtggcaccagaacctaggggctcctagaggctgatgtggctctcacagctctgaaaaactgattcctctctaaaattaagtcctgcctgcttgcaggtggctggttgagtaggtctgagtatacgcctcttcatattcttctagaggagcaaaaggcagggaggagggatccacaaaactgatcatacagatagaactccagaacttgcagaaacatacttaaaactgaaaaagatccaaaaacaaagatttagtatcaatgtgaaaataagtataatctatgctgtagatgcagctctaatttctagttccatacacactttcacaaacagcacaaatacacacaaataccaaagatacacaaacatgcacagaccttgccttgactttcctctttggaagctccaatactttggccacctgatgtgaacagctgactcactggaaaagaccctgatgctgggaaagactgaaggtagaagaagaagagggcaacagaggatgagatggttggatgacatcactgattcagtggacatgaacttgggcaaactctgggagatggtgagggacagagaggcctgacatgctgcagtccatagggtcacaaagagtcggacacgacttgacaactgaacaacaagctgcatacatcttctgcttggacacagacttgggagttaagagggcaagcttaggaatcagacagtctgggttagaatcccaacacgggcacttaaaagctctaagacacttcagttctctgagtttccatttcatcatctagaaaatgcatctaagaagtgtacttcttttaggcttgtaacaatgttgggaatacagtaccttaatagacattattataaaccttttgctttaatgtgcaaccacaacactactttttaaagtaatctttaaaacaattatagatctgaatttaaagtttcaagtatctcaaatatagtacttcgaatataatgagaaatattggagaactgctcccggcaggaaattttggaaaccgcctatcttttcgcggaagcccttgacatctgaacaggcgcctctacagcgaccaagtacagtgtattagggcttcaagaacaatcctagtcctagctccctgaaaagggagctggcccaactttttgaagtttgtggggcagggtgtttggcttcttgttttcagctgtgactgatgcagagaaaggagctgtattggagcatatgaaaaatatcctgtccccaaatatatgaaaagtaaaatggtttgttacccaagtggagaaactttccaatcttattcccgaaatggttaacgacagagaagcttcatttcgagtatgccccttctcattagtcccagacatgcctctgtcggacctaagaaactgcagacacagacagcgtagcttcctactcaccagagaggccatggacgctggtacgaccagagatgggaggcgtgagacagccggttcttgaggctttcagctccagagggtgtctctttagagaaggaccggtaagagattttgttttttcccagccttttatagacagaccacatcgacatccaacacaatgacttttttaaaaaacgccgaacattcacgcaggcttccttctgaagcccaaaggactatcggcctccagacgggaccagggctcctttctaaatttctgagaggaggcctagggcgggtgctgaggcaccagataaacccacagcccctccaacggcactttcccagccacacccccgggagctgggctttggggacccgcaaggccaagggaaccctgaaccggcttccaacggacccgggctaggctaccgctcgcccgccgctgctttgatgccaggccggcggcagtggcgaggcccaccggcgccccgcctcctgggcctcaggccgggtgtcccggcccctccgcagtagcgaagcgccgttgcccgcgcccctgttagccttcgcccaggtccgggtgctgcccccggcgcagccgcagtgctatcaaccctggtaccctcgagtcttccggcggctcggcccgccccgccgccggctccgcccatcaggaacggcgagagtccgccctctccggggaggcaggcgctcccgaaaatccggaacacagattccgcggagcgcgcctgggcacgccgcccccacgactgcagtcctctttggtgggaccctaaatgtgtttttctaagggctgtttcaaagaacttctcgctcaaaagacaacacatttttttaatttaatgccatacatttggcaattggaaagtaaaagacaattaaaatgccatccaccaatcttaataaaaagacatcaatatgtattaggaattatggtctaattttcttaggtgtaataatggcattgcagttaagtcttaaaagagtggtggttatcttttagagatacatcccaaagcacttgtggataaataaaaaaaaaaaagcatcattatgaactaaagtctacataaatatctccataaataattcctaggcttccacaacagcattacaattgtgattttaaaaaacctttttgcaacaaaataccaaagagattgataaggaaacaagacttttggcatagatacaagtgaacatacgaatatgacattaaatggtagtctagtgtcagtattaatcattgtacatatattcattttacatagtgggatgggcaaattacaatccttgggctaaatgcaaaccaacacttgtcttttaaataaagttgattggagcagttacaccaattcattcatgtcagtggttcccaactaggaattatcttgccctccccaggtctggggaaatttctggttgtcactgtggagcggggaactactgacatccagtggccagctgctactgctgctaaacatcctacaaagcaagatagccacctacaacaaagcatcccaaaacattagcagtgccacagatgagatacccatatattgtctctggatacttctgcactaaaatgatagagttgagtagttctgacagaggtcatatggcctacaacacctaacatgtttattatgtggccctttacagaaaacatttgccaatttttctctatgaaaccaaaaaatgtaagtacctcatgtttagctggttacctattaagtctagaaaacgctctttaacattatttctagaatgagacaattgacatttttatttctacctcttctagccatataaagggctatagtaaaggttatattttattctgattcattaaagggatatttaaatccgtgactctcaaagtcaatcacagatcactggcttgtcatgatgatttcactgccccacagtgaaatgagaaaaataaagacaaatttgggagatttccataaaactaatttaatgtaagagactgttctctataattatagtcttcctatattttaaaataataaaacgccctttcttttctgaagcaatgctgataataggtagtttgtttttttaacacagcaaaattagtaattgtaccattgggtcaaaccattaaaaaaaaatgattcgttcttgaaatctgaaagtcagaaaatccaaatttagaggcttttgctccaattgggggattctttgatgttgaacatatttcacataccattgctgaaggtgtttcttaagtgtgttttgcagtgtcaaataagtggtgaactacagctgaaggcttttccacattcattacaatcatagggtttttctccagtatgaattctctgatgtttggcaaaggatgaatcatgcctaaagcctttcccgcaatgactgcattcataaggtttcactccagtatggactctctgatggatagaaagatgtattctctggctaaaagcttttccacattccttacatttatatgttctttccccagtatgacttctctggtgttgagttaggtatatgctgtggctgacagttttactgcatacactacaaatagagggtttcacagcagtatgaataatctcatgttgcctgaggtgtctaatatggaaaaatgcttttccacagtctttgcatgtaaaaggtttctctctgacatgagttctcagatgctggatcagtccaatgctttgactaaatgctttctcacatacaccacattcacagggtttctccccagtatgaattctgacatgttgagtaatagatgatggatggctgaaggttttcccacattccttacactcatagggtttctccccaatacggattctgtgatgtggaataagggatgag

SEQ ID NO: 53589 - DNA, 1873 bp, Bovine  19866880757031
  misc_feature (1)..(1): n is a, c, g, or t
ngactgtcttacctcctttcttgaaaactggtgtctagaagttaacagaagacttgcgttaatgccctaggggtgtgctgttgggaggggcacgccccctgtgatggaaacaccacactcaagagtcatcagttcggtgagtcggggttttctctaaggtgagaggggaggaggaaacacctgacaggtggtacaggacctgggagttaggagtcttgggttagagctctggttttgttgacagctttctctgtgaccctgggtgtgtgtctccttccccttctgagcctttatttcctcttctgcaaaatgaaaggcttgggttggaatagggaggcaaatcagtttgacctcatgagctggttctcatcaattggtgatgcagcactgtgttaagaagaattctgaagttaactatggccctagtgagaaggagagatggattagtgatgtctagggagagtggtaagagccttagtcacttaccattccttccagactaacagtccaccactctgtgacagattccttggtattttctgttgaaagagtgagtaggtagtttcatcttgggcttttgggtagccttactgacactcacgggcttccatggtggctcaaatggtaaagaatctgcctgcaatgtgggagatgcgggtttgatccctgggtcaggaagattccctggaaaaggaaatgtctacccactccagtattcttgcctagagaattccatggacagggcagcctggtgggctacagtccatggggttgcaaagagtcggacatgactgagagactaacactttcttctttcactttcactgatgctcagagaaggtttattacttggttagacacgtggtccaaaggagcaaggggcccagggtggccaggcagaaacttgagttctgcttttgtcaggattcaggggagggtgtggggagcctttagggtactgagaccccagggcagaggtcaaacattgaaggctggaaagaaaacactccttccttggggagcttggaaggtatctgctggcatggagcttggcaggtacgggggacagtgggaagggacccctgaaggggatgtccaagctgtcaccacagaggcttcagcagggggaacttaagagtgattcttccatgacctggcaagatcatgggacggtttccttccatcaggaaccatgacctgggttggaaaagggacagtcctgcttggaggcagggcattgttgcagtgacttttgcagacattcctttagccgtctcttaggaccaccaatatgtgaaatgctgtgtgtcggcccctctccattctgctcccatctccacctgctgccctgttcctacccctgtgctctgatgacttgggggctgctgtgagcagcactgcctccctcatagaggccaggtggttggctgtgactggttctccatcttgtccatcttgagctagactggctgcccaagaagcaaccggagctctgattctgagcctgctgctgccttgcgtgtggaaaggactcaaaagtcagactttatctgaccctttcggtttacacacagatgaggaacccaggcccagagaaagtcacacaaagaatctgtatatacattatcatctagcctcctgattctgaactctccccagctgccctgctctgcacttgggaccagaggtcaggccctgagaccctgggccctcctaaacattcaacagctctcccgggcagttaaagatgagaacgcagctgtggatggtgcagagtcctggatgtcaaaccatctgcttgtcagttccattcattattcatgaggaaacacgagcccctgggttggcagggtcaagaattttgtcccttact

SEQ ID NO: 53590 - DNA, 805 bp, Bovine  19866880769378
  misc_feature (1)..(1): n is a, c, g, or t
naccccaaaatgcccaacaactggggcaagaattgagtaatgatatattcaaacaatggagtacaataaaggcatttaaacatttttaatgtcaggaaaaatgcttatgataaatattaagcaaaacaccaatgatataaaactatattacagtagtataagcttaagtaaaaatgggtgataacgattatatgaaatatcttctacattactatactttttcatactttccaatgatttccatcacaaatatgaataactttcataatgagaaaaagatagtttttcttttttagagaaatagcatttaatgatgtttagctaataagcacaactgtcctgggaatctgttcctatcgatccttaatttgagtcacttgtgtcagatgcctattcacagacaaggctcaaaaccaagtcagaaggctcaagggagctgagctggaatcttcctgattccaatgctgtatttaatgatgcttcctttctctcacaggagagctaggaatgttcacacaacactcacactaccagaaagacctcaaaattcccctcagtctgaaacagttcctctaactcatctcctgacatctaccttgggagagaccaagttcccagtcccttacagctattctcacaataaaaacgctttcgatacagcagaagaggctgagtcttttcattctttctttttcaaatcggctgtcacacttcaaatggtctccattaagtccattgtttccagctattttgaacacaagcatcatgataagaatagggagtttccttcctctttctcatcaga

SEQ ID NO: 53591 - DNA, 1189 bp, Bovine  19866880792351
  misc_feature (1)..(1): n is a, c, g, or t
nacgcactggtctagcaaacaccctcttccacaacacaagagaagactctacacatggacattgccagatggtcgacacagaaatcagactgattatattgtttgcagccagagctggagaagctctctgggaagggaaggtctgaatttgctatcattgtgggtatagaagtagaggtaagataacctcttggtggaaacactaaatcataagaaggaagagggaggctggactaggtaacctttagaggtcttgcccaaatctgagagcctataattttatgggagtatggacctcctgctttcatcattacaacacagtgcaacttaaggtctgcataatggacaatgtacattatttgcaacgccaactttctctctgaaagcttacagaagagtgacagagggacagaagaaatactaagatcattatcatgatcttacttcccttctgcatcttcatctaccacatactggcactgtggtggacactttacacagtttatccagctaggttattgtgagactctgagctggtaagacattgtctttgggttttactttcctcatttggaaaatgaatgggttgaacttcattattcatgaaaggggacatcgaagttccttttaatttccttcatatcatgagtctggaggaaagtagcagcagggacctagatcaattatttcctccctatgcaccacgatttaacctggcagatactctgaaatatcttccttctttggagtaatgaacaatgtgtgccatcttcattttatacagtaaacacagtcctaaaaggttaagtgtaaatagaaattttaataaaaaatgaagtacattttgtacacaccaaaatggttagttaaaagcaggctttataaaaataagtgcaatgtttgctgcaaagcaacttgttctatgagaagagctcactggaaaagaacctgatgctggaaaagactgaaggcaaaaggggaaggtggtggcagaggatgacagcattaccgactcaatggacataaatttgagcaaactcaggggtatggtggaagacagagcagcctggcatgcaacagtccttggggtcaccatgagtcagacaagacttagagactgaacaactagttctataaatttggattttatgtatggattttctgttatcacttgtcttccacttaagta

SEQ ID NO: 53592 - DNA, 1729 bp, Bovine  19866880876833
  misc_feature (1)..(1): n is a, c, g, or t
nttgataataacactttcttgcctttttatgggactttgtacttttcagggccttttcatgcttgttatcttatttgatacagaaacccagggaggatgggcaagaaggagggatagaaggtaacacctaatcatttctcccatgccatctatccccttaaaacaatgtattttaaaagaatttagaaaaattatcccttcgttctttttaattttgtttctgccacgccacccagcttgtgggaccagggagcaaacccacgccccctgcagtggaagctcggagtcctaaccattggactgccctttctgctctttaacaaacagatggaaacgttgagattgaacttgatttgcccaagatcacagagcaaattagtggctcactgggtttaggaggtttccaatcatggatcatacttgagtaggacttgcccaacaccatcttgcaagatgctactggccatggcaaggtacctctgagaaaagtggtgttttgggcacggctgctcctttgaggcttccaggagtcatccacaatcttacttctccaggccctggagagacttgactaccccccggtggcctggatagcaacaggaacccacggaagtaaaggtaagacataaggattcagtaacagttcctctggtatcagtcaggataaatgccattggaagagtctgttttcttgttttgattgcagagcacttgcggaagggtaagacaggaaacattgagaactgcgggtttatccctccatcatctcctctggaaaagaggatgcagaggggatagttcctacccctcctcccttccaaaaccctcgttggtggccagagcacacccttccccgacctgtccgtgttgggccccctaccaaccgtgctcgttttcgattcccacctcatcattccagagcccatcccttccagccacagcatggagtccagttatcttaggaggcaggcagtaagttctccatcacacggttctgatagggaaagatgaggaagcagaaggagcgtgagactttctctgtgctctctcaagggtcccctgtgctcctgccccagtgccccagcagggagcttaatgtgcttgcctgtggcatcacccagctcaacactggcaaacagcacacctgggcagttaatcatggcagtcagcttagtggcagggcaataccatgccagtctgggtgaggacaagaaaacagaaaaggtgcttggaattcaaacagaggtagtttatttcggagaactggttggcttgagggagcaaaaaggtaaggtggagaagactagagattagtggctgcaggaagcctcttccacccccagatctggaggagcagctggaaggctgctaccagagccagaagtgccactgatgctaccgggttgttgcttttgaagtgatgctgccggcagaactgccaggggtcactggagcctagagccacctctccagtaccactgatacttttggaaatactgaaggcctctcaacccataatcaacagctgctgccagagtctccagtggatacaaagagaaaatgttcacatctcctccagccatcccatctccagccatacagttgcccacctgtacttcccactgactgaatctgactggaagtcagctagcaagaggagactgggaaatgtagttttcagggccctccagggcctggcactcttcagtacaaagaagaacatgagagt

SEQ ID NO: 53593 - DNA, 1020 bp, Bovine  19866880894865
  misc_feature (1)..(1): n is a, c, g, or t
natttctgctgtgagcaagcatccctttgtgggtgctgtggtggctgcagaatcagggaagtaaagcgagtgtttggtggaagccgatgaataaaccatctgaattctacagggacacctaccagtgacagaagtggaagcagctcccctgactctgaaatcactgaactgaagtttccttcaataaaccatgactgatggtaacgtaagtgatactttgaaacttgttttcttttaaatggtggtgacaccagaatcctaagagcatcatgaaagttcagtgttgaaagattgtatctgccagaggatgtaagtggtcagatcatggtgggcatcaaatgggtgaggacccggccccccagttagagtacatctacccaccctgctctggggactccactggggtgacaccaggcacagggcaattgttgtcttgctgattgctgctttcaggtgccaatctgacctaacctgggggaactggattcttagagccatgttatttcatgtagccataaacttggagatcttgaaggaggtgacaggtgtgacaacatgctgtcatttctgcagaccctcaagttttcaccagaaagtgctttaaaaccaatacatacagcacttttgtgttgcttgcttattctggaagtccattacaatcagagcagttactggataaacttggaatgtctgtcttttgtgaccagttggaaagtttataaagtgtagtagctgtgggcagctgccgagaattgtctaaaatcccatgaagctaactgcgtgaacgctcggcagaaatacctgctcagaagggggctggggtgtcagccgggtgtctggggggtctaaaggagaaccgtgggtgtgcagggggtcccaccacagggaagctgaggtcctgcctcaggcatgggaaggcggcctccccgaatcctgcacactttgcctttcccaccaggggacctctccactggcagtgggtctcttgggcatgcggtcgtgctgagcagccgctggcct

SEQ ID NO: 53594 - DNA, 1909 bp, Bovine  19866880903343
  misc_feature (1)..(1): n is a, c, g, or t
ntgacctttacagatcccagaataagttgctcaaactggtggtggtgctagtagggcctttaattacacctgaaccccaagccctcacttcgggtatgatttctccccacttgaaaccaagaatcacctcctaagatgactcagagtcttaatgaatgctggtcttcaatagatgttgttatcccgattgctcttacattctgaccgcacaggtctactctgcagtaacgttacctgggaaggggaaggtgttctgggaactgtagatgagaaatgactacaaactgtaggagggtagggagaaagatgacagagggtaatgcatgcacgcagggggccaggtcaacaggaaacatctcccattctgacaccatgatctccaacttagcctgctccccaaacctccataaaatgtttccaattttaggacaggaaacacaggattcacttgaccaaaatatacttcctcccaattttaatatgtatcggtcctataagggtatctgagctcaacttgaaagagccactcctgtaggcctagggaggtgtgacaaagcatagccacaaggccttcctgagctagtcagacaggggaacaagagttgggagatgctgggagggaccaagttcaccatcctcacaagccttatcagctccaagctgaccaagttcagtgtggcagagaagaggtagataaaattctcgctgacttaaaaaaaaaaaaaaaaaaagcatactgccaactcatcactgtactaccaactcaattttcccaagaggacttccaaggtatttctaaatcatttcaggaaaatgagggctcatgttagcctggcagatgtcaaatcacatatggcgtgccctgcagttggggcgcaatagtcatgagcttttcagaatgattagccaatcagggacagctcttggcagactcccttgaagtttcccggtgctgggataaagccttaggcaggcaaagcgctcaccactgcggaggcacaagcaccggccaaagaaggtccctgaggcatcatgctgcagtgaatgcctcgaggcagggactgggatatggtcatctgtaaacccctcctgcctagcactgtgtctagcaaagagcaagcactccataaacttccaaattatggataaaaaagtgagcagggaataaattccaaaaccatagtaatttaaatctagctctgtcccattgttttttctttaggcagacctagcttcaatggcaccccactccagtactcttgcctggaaaatcccatggacggaggagcctggtgggctgcagtccatggggtggctaagagtcagacacgactgagcgacgccactttcacttttcactttcatgcattggagaaggaaatggcaacccgctccagtgttcttgcctggagaatcccagggacgggggagcctggtgggctgctgtctatgggatcgcagagtcggacacgactgagcgacttagcagcagcagcagcagcagcagctccttactagaatacacacggctgtttaggatgggtcctctgcctgtcttttcaacctgcctagatgctcccctgtgctgactctaccctccccgcctaccacttccagtgctgtttctccccaccttgctcatgctgtgccctctcccaggaaagccctccttccccgctttatttgattcatttccattattccctgtaagactcacattaatcctttcagagaactttcctctgacattctctgctaccacctccctcacatcttttgtcgggtaccccttgtgaagcactcccataacaccctctacacaatcctaagaatatcttacacttcccacatggcaagtgctgtaatctctaagtatttgtagccccaactagattcttaaattcttaaa

SEQ ID NO: 53595 - DNA, 3967 bp, Bovine  19866880906980
  misc_feature (1)..(1): n is a, c, g, or t
naatgaatctcactgaattctcacaatgctggaggaagatatttattacactgtttttatactgaggcccaggaaggagaagtgacttgcccaagggcattcagctgagaagtggctgatatggggctggagcccaggtgtctgggcacctgtctaggacctctgatggacacgggtcctattttgagctctcagtgaaaagcagctggtgtcccaagcaggctccgtccgttggttggccaaagtgtgtgtgtgtgtgtgtgtgtgtgtgtgtgtgtgtgtgtgtgaagttaggctggctggcaggctggaactcagctagcatcaacccctgtgcttctgtgcttgggccaggctgcagctgctgccccattgggaagggacctttccacttgccctcctgcatcaaggtttttttctcgtggcctgcctagctggagagaagagctggtcatggcatgactaacagggcacctgccagcccctcccacgctggagtctggccatctaatgccttgcacatgacaggcatggggtgggcacagggtggggagagggatttgtacttttctaatccaggggctgcagccctcttccgtcttggccagggccgtgggagaggtttgtccctggccgccacccctccatgcctagcagccccagctcaaatccctggcaagtgcctggctcctctgcttggggcctccccttgccctgcccatgctccccgccccacccccacaccaactgaggccgagttgggacctatgggggcagatgctggggtgtctgtgactggtggagatgcagcgccatgcagcatctggggctcaaggatggggcaatggcagggaggtttggggcccaggctggggcagagttagggagaggacctgacagggtgcagagttttgagtgtttggggctaatgctgggccaccccttcctggagaaatttggctacaagtcagggaggcaaatgtgtgggccgtgcccccccctcgctgggcggtaaacacagccgtctcccaggagacgggcccaaacatctcggccccccacggttatttataccaggactccctctccttctcaggcctgttctggcctctcaatccactcctgaactgagcgttctgagtggagggtccagcccctgtcaaggcaggagggcccagcagcaggcctgcttaaaccccactagggactgggcactcaccacctcccagtggcatgtctgctagaggcactgggtcttactgatcagaaatgtgctcatgaaggccagggcctgcggaggaagtgggagtcctgggatggagctctgcctttgctctaaactgctgtatgactgtggtccctgtaacctcagcttccccacagttcagcagggggaaagggtcctgatggtacaaacttttaagcagtagatctgattctttaaaggaaatgtgacacaggagtacaatatacaaatacattaaagctgagctgctctgggtgaaatcaagggtgggggtccagacttctgcccactcagcctctatggccctgcatgccaccaacctggagcctatgcatgaccctccttattctagaacacacttcaggggaccctggagttcccatttcagggctagcacaggcctctttactagttcaccagcccaaggtccagtgttgtgtgagtgctcctagcatcaagagcaaatgtttgcagccagtgtagatcagagcaggcttgagctgccacaggaatgtacccgaggcccttccagtgaggaatgagcccagtgtgggaggagaagagggcacaccaggggctgggcactggaggggagcaggggctggctgtcccctctctgccagattctagcatgggacaccaaggagtcaaagattttaaacctggccttccagatcggtacgaaggtgaatatgtcaggaaggatagaacgtattttatttaacagcttgttggctcttatagtgtgtgggtctccatttgtactctttcccagtcccaccagtgttcaagatggacttgcattggctctccctccatccacccacctctgtaggaacgccaaggtgcccttacccagaaatctcaggctgcagaggacagtgggaaattcctgtctcacggatgctcaaggccctggagacctgggtcttcttgtttcctcccagatactgtctgagcttctacttggccagcctgggagatgtggaagagtcagaaccggctttacccttgatggatagatcctaatgagctgttgttggtgggttgggagtggacagaggtagaaactgtctctgcacaaagggatcctggggtcctcagagggggccaggaatcccaaccaggggctgagcaagtattcctcaaagcagatcagggattcttgggggaaaaaggggaccatcctgaggagaggagagaacacaaaagtcaccaaggtagaaatagggtatggaagggtggagtgtgggcaatgcctagtgtgtgtacagcctcaaactctgggctgagaacctcaggtggaggtaaatcagtgaggggtactcagactgaaggggtaattgaactggggtgaggatggggatggagtggagtcatggtggtcagtgaagagggaagaagggaggaggaatgaggtgagtgcttggcaggacaggagtgaggggctgggaagaaagagttggtttcaactttgccttctggaacctcctctcctgtgtcctcctttgctctgtcttggtttctgcctctttctctcaccgttctgctggggagaggagcacctcttcctacacccatctccccagataggtggcaagtggaagcccacagctgtgtaagagggaacctgttcattcattcattcactcaaccaatatttattgataatctgctcatgcaccaagccctgtgtgaggtgtgggaaagatagtggtgaacaagatagagaagtcgcttcattcatggagcttacatcatggggggctggggcctagaaactatacttttccctgatgttccccctctggctctttggcccatgcccttggatgcccaggagtggggcctctctccattacccactcattcattccagctcacctggcattagcacccatcttcagaacattgaggaggggggttcaataaccatggtcccaaccccagggaccacccatctccatgatgaccctggggcctgggggcagcacccgggctcaggccctagtctttttcacttacctgtgactttgagcccctcacaagaaatttcctggcctcagttctttataatgtggggctttgggaagtcccaaggaagcgaggggagggaaagacctgccagctccaatgttccccattggtagacagctcctctggctgtgggtagaggtggagaagtgccaagggttcaatatcatcatcattatcaaccaagataataatatctactgtctactgtgttcactgtggccaacctcatgattcctctcatttaatttagtcctcacgaccagctcccgatggtccgtgtatcttccctccccatttgccagatgaggaaactgagtctctgtaaggtgacatgcgtggtttgatcagttcacccgcgaacctatctgactctgggagcccttgaggacggcgcgatgagggtgctgcttggcaccgggctgcccctcctgcctcgagaatagtaacccagccctagtgcctcaccccaccctcctcgggggctggcaccaccctgagtctgggcactggatcgacaacactggccagagcagtaccaggggcccgatcagtccaggacccgatttaggggccttggcacctctgggtcccggggctctcagtgcccagcaagcggccttagtgggtgggctagccgtgggcagtcagggtgtcgcgccccttttcggcccccgtcgatgggga

SEQ ID NO: 53596 - DNA, 1328 bp, Bovine  19866880960742
  misc_feature (1)..(1): n is a, c, g, or t
ntctacttccgtcgatagcggcatgttaacacattcatatgtatataccaacactatgcaagaccacagaatgctcttgttagacaggaatgcgagttccagtcctaaagcgtcagaaccagaatcaactgactgaacagcagagagaagaaatttaccctcgatataatttcaaagtcttctagaaaacatgaaattttaggcagttttctaaatctccccccaaatactccttgaaatgtattccctaaacccccacctgctcccctcttgttatacactcccactctgcctttgggtccacacatgcctccactacacacacagagggagacagaagctgacaactatgaggtccgcattacacagcaccctgcactgctgctgcaaggccagcctactggaacatggccttataggcagataatccaattgttccatacacactggtcatggcaaccaaggagaaaatatacaaaagatgccattttgaagttgaaaatagacactctgagaggcaatattccaaaccgttttgaaagcaaagaggaaagatagtgacataaactgggtagtgattagcacaacataagaacaaagtcataggtaagtgaacatattcaacaggggcctatgagcaggctcaggaagcattaagcaacattaaaattaacaagtaatcactctgcaataagggatcagtaaaaataaagaaagtatttggatctggctaatctgtcaagaaatcggctctaataagtaccagcccagtatcagggaaatctgggcttaccctaactattttcacaccttctaacaagtatctcgagtgtttatttctccatttgtaaaatggaaagcatataagtaaatccaatttacattcaactactggatggcttctacataactgagttaactactgatagttggctgcaaatttttcttgctgctaaaatttccctcatcacaagagctgctgggcctagaagtgttgtctgggcttgagaaatcagcagagagaagagaactagacttacagatagcttgaagtcactattataataattataactcatgaatctctaacttgtagagttccaaaaaataaatgttgaggtgaaaaaaaaaaaattgcaaaatagatggttacccataatcagacctgccagcatcttggagctgttgaaaagctcttcaacaggaagggtccaggaagggagagaaactctcttccatcttccatccaagccctgttgaatctaccttggaaactttcccagaaactatccatttctacctagaccttctcctatctcacccataag

SEQ ID NO: 53597 - DNA, 2026 bp, Bovine  19866880979077
  misc_feature (1)..(1): n is a, c, g, or t
ncggcaggcgcacatgctctgttcgctggctcagctctgactcccctcctccctgtcctaggccttgggtgggtggcagggcccttcctgctggccctctgcccaccctctctctctctggccctcctcagcccctgtcaatctgtgaacctccccagagcctcggcctccccgagtcccctgggaggccctgggccaggctgagagcccagggccctgggaggagcagcccgcggtgaggaatcctagaagcccctccaggggaggcccctccagagactcacaggaagagaccaccaaaacacaggcacacccctgacctccgccatggagcccccaggcaggcagcccctgcgggagctcccccccagaagagcccccgcctgaggactcaggtgccaaggcagctcccagcaggcacattctctacgtgggccacctgaacccccagttctcggtgccagtcctcagctgcctgctgagagacgccctggagcggctcgaactgccggtggctcgagagcacatcgaggtcgtccggcggccacgccaggcctacgcgctggtgcaggtggccacccccgaagacaccctggcctccctgccccggcgcctgcacagggcctgggggcagcaccagatcatcaaggaactggtggcccgcgggaaggagccagtgctgggtgagggccgggagctttcaaaccgccgagaggtaagccaggcttcccccagcagggggcccgccagccccagagcctccctcgggagaggcctgggtatggatggccttgcttggtgggcgtgaggggtgtcttcaaggaattggggacaaattggcaaatttggggctgctactcaaataaccaaggtcccagagggacactgacccttggagcttgcctccagcctggaagcaggtgaaagcctgagtatcagaccctccctacgcctatctacagccagcaggtgggtccggccaggccaggcccaagcatatacaggggtcctgaccttctccttggccgagctcatccactcagttgacagacacctgctccggggggcagcgcagcagagagcagggcttgacctcactgatctctgaggacagattccccagggaatgaaacccaggctggggcttaggcaatgggaccgactcagtggaaggacatccctagcagagggatggggtgcataccaggggcccgggtgtggtggcatttgcagggtggttggtggctgcccagggtggggactgacaaaatcaagccggcgggcagggctgtgagaccacagcagtgccagaaaaagtgggcttttgtgggggaggagggaacagtcaactcacttttgaggtggtaggctggtggtcttgaattgtccttcttgaattgaattttgaatccttgaactgaatttccttctggatgaaggctccatgacatttaaactgttgcagagctaaatgggcttacatttcaagacctgtggcctgatggcatgtttatatgacattgaggcttctctcgagtctctgctaagcttgtcttctctgggagctgctggtagggcttgggagtggctctcatcaccacaccccaacctgcactaagctcccagccctggaagccgcttttgaaggctggaaggcagcagggaaccagggaagggtttatcaggacagagtgactgcgggacttatatctggggtcagcaagagaatgaggagagcctggaggtagggagtcggtcggtgagacccagatcaggacagtggtcctgagcaggctgctcctggagccctcacacacagcagaaaccacgaaagggactcaggaaggcccaggggtgggagagactcaggccctatcagccaggttttcagggagactaggaagagggtgtgatctttgggaggccctctcaattcagagacctgcagctgggtcacaggggacctcagggcgctgaggcatcttccagaatgatcaaaccctgtgtttctgaggccgacgcaaaa

SEQ ID NO: 53598 - DNA, 1883 bp, Bovine  19866881072357
  misc_feature (1)..(1): n is a, c, g, or t
nagtacggggctagaggtgacagcatagataaaacactcccaagaaagagaaagccctgccctgattaagtgttctgagacctggtgcagtataactctggttacttggagaatcaaaagcaaaggactcgaaatagataggaccatatggggtagctttggcaaagcattgtttctaggagagatgaggatgacttagaatgagggggtgctctttggagaccttgtggtgaagaagtaaaaattgagaacgacaaaaccagatctactatcctcctccccaccaaatagtcatttcactttactaacggaagagggcgctcttgaactaaaaaattcagtaagtctccccagatcctttcacctgtgtgtgttattgctgattcaggaaaataaggtactacaaagaatccgcctgccagtgcaggagatgcaagagatgaggggtttatccctgggtggagaagatcccctggaggaggaaatggcaacctactccagtattcttgcctggaaaattctatggacagggaagtctgaggggctgcagttcatggggtcacaaagagccagacacgattgaacacgcatacacacacaaaatgaagtatcaagtgacatttatgtaaaactattatgagaagaaactaaaaaaatgaaatctaaacattttgaggaatgaaaattctttctccaaaaccagtcacgaagtggaagaaaactgttacacaatcctgaattaaatgtcctctaacaaacacttgcaggcaagacaaaacagcttgaatcaaaaagtgaaaaacttagaagcaaaatggacaaataactgaaagttgtgaaatgaaagttttctaaactcaggaaacaaattgagaaacaacacaattatcttaaaaatagactgaattacaagttagtcagaggagaatagattcaactggaagtatatttggcatagaggaaaggcatgaaatagctcagagaaaggaaactaaatatagagagcactaaaaagaaggaaggaaaggaagaacttaggcaaagaagatctaacataaatatgcttgtttggcgacccccaaaggtggcactaatgctaaagagcctgcctgccatgcaggttctcttatgcctgggaaggtcccctggaggagggcacagcagcccactccagtgttcttgcctggagaatcccatggacagaggagcgtggaggactacagtccatagagtcacagtcagacacgactgaagagactgagcacccacacaaagaagaaagataaaatagtggggcaggattaatatgtttaaaacttaatataagaacatttcctagaaacaaaggacttgaataacatgttgaaagaaactactgtgtgtatctggaagaactgactcagaatggtcacctcgatcatatcccagtaaacttttaggctttgtatggtaagaaaaaaaatccatgagtccatttttttttttttttaatgggtgtgggatagagggagagaaagccttctttgcagaagaatgacaactaataattatagaaagaacagggtattcacatatttgcaaagaaatactcttcagattacttattaattacaatgaaagaacatatgatggatacaatcttagataagtgatcaaacgaaaattatcaacagtggggcacatcagtattatgcatttcttggtatcttatactaagaaggatataatatcacttacatagaattttgggggtcttccctggtggtccagtggttaaaatttcacttccagtgcaaggggtgtgggtttgatctctagtcggggaagctaagattccacatgcctcacagccaaaaaaccaaaacataaaacagaagcagtat

SEQ ID NO: 53599 - DNA, 800 bp, Bovine  19866881173226
  misc_feature (1)..(1): n is a, c, g, or t
nacttgaaacactagagaactcatttctaaatttacacacacaaacacacacacacacacagaggggacttccattaagataagaaaagaggaagaagttaaaattcactgtgtgtgcattcaggaaataacactgtaggattaacatgtaaacccacatctcaagatgtaagctctgtgacagaggcgcggggatatttacggacttcccaccaccagcaaccgccatgaaagacagggtggctgtttgcaataaagggaaagaaaaggtgctctatttccgcacatctctatgcggggacaggcttatcagctgcagctgagactaggtctctcctcctcctgtatttgctctattattttcactacatcataaaatggaaaaggttacacgtttgttccttgggtgaggagaaaggacatgaagcctgagggatctggttctctttgtttctgattaagacagttctttttgtaagttttgacttgaaattaagtaaggataaacaaagcattttccaagtggacttatgaaatccagtactttctaaataaaccatatccaacagctatttaaaaagcaaaccagaatacccataggaaatatacaaatggggaaaagagggctatggtcaacaaaaatggttaaaaagctacttaacattgtttgaaaacgagcagcaacaacaaaatcccagcaacaggctgcagaggtgggaacccgggacaagttccagccacacaagagggagcatgggggtttcaggggcgtgatgcacaaactgaagacgaccaccagg

SEQ ID NO: 53600 - DNA, 925 bp, Bovine  19866881261077
  misc_feature (1)..(1): n is a, c, g, or t
nctgaggtttcactcttaactgctgtgtcctgttctttacttccttccccaaaatgtggagggaaatgttggtcagggtgaggcatgcagtaacagggcccatatctgcctgtatctcagtaaagatctgctatttcccagtagatgaaggctccagttacactgtgggtgtgacccaccaccttggctggtgtgtaaattccctggtgggggccaagggggaggtcaggtgcgcccttgaatgcccagcttggggccgtcctggctcagacttaggagacagagttgggccaggcaggaaggggcagcggggggtttcctcagggtgggtcggcttggctcttgttgtgctggaagccagcctgaaaaggaatttcccagtcatgtcttaattccatcttccttgcagagtaagcacagcattgaaagatgggctggactcttcacttcctcagaaaacagttgttcaaggaggaagaggagacgtgaggtacctttcttttggggaggaaacaacactatctcataaggtttcagggtctgattcttctctcctaggaagagaacatacctcaacaactccagagctgattattgcccagggaggaaatcttggcttggctgggtgatcatcagctgtttatccagagttgtgtaatagaaacacaatatgagtcaatatgtgaaactgtaaatgttctagtagccacattttttttttaaagtaaagagaaacaagtgaaattaattttaataacaaattttatttaatccaacatatccaaaattatgatggcaacccactccaatattcttgcctgggaaatcccatggacagaggagcctggtgggctacagtccatggggttgcaaagggtcagacagactaaagagactaaacatcaatcaacaacatgtcaccaat

SEQ ID NO: 53601 - DNA, 1338 bp, Bovine  19866881364648
  misc_feature (1)..(1): n is a, c, g, or t
ncacacacacacacaaacacacgcacacgcgctagagtctccaaagacagctgggacaggcccaggagccaacaggcatgcagcagggcaagggagccagaaagacgtggagactatgtacagggggaggtgggaggcggccatgccccttctcacatcgcacccggcctctccctgaggtccttaggagcacgaggggctggtggcgctctccagggaggactgggacaggcgcctggtgagggagccgagcgtagagtctgccacggaggacgtggggaagagtttgtaccagccggtgactgcggcgctcaggtccagctcgtccagcatgatctgggccatgcccatgaagcacttgtgatccatgcggccgtagtctccccagacgatcacctgccagtgggcggaagagagagcagctgagccagctctccaactccagggctgggcggtggccgaggaaccgtgtagagactgccagggcacacgggactgcgagacgcagaactcagactgactgcaggcaacaacttattaagcacttgtggtgtgccacgcttattaagcgtttatggtatgcattatggtgtacagactttacatatattctccccattgttacaaccatctaggtagaggtgctatacggatcatttccacaaaaaggaaatgtagctcagagcgaacaactaacccaaagatacacagcagttggtggcacagctgggattagaagctggccctgacttccagagcctcctagcatccaggatgacaggcttccagagctggaagcaggctgagagtccaggacccgggccacagctatcgctctgctgctggatcatgatgataaacattaccacctggtggaagaaggtggtcaaactctgcttctaggggacttccctggtggtccggtggttaagaatctgctttctactgaaggaagtgcaggttagatccctgattggggagttaagataccacatgtctcttggccaaaaaaaaccaaaacataagacagaagcaatattgtaacaaattcaataaagactttaaaaatggtccacatcaaaacaaaaaaatcttaaaaaaataaaacctgcttctacctaccagctgtgcaacgtgggggcaatcaagttatccccccaaaccttggtttccttatcaaccaacaggaggcaataacacctcattaggttgtaacaaaaaatgggtaaagggtattaaagtgctggcacaggataaaccgtaagtaaattttaaatgacagtctgtagtctttgagagttgccccgctccccggcctcatgatgctcacctgcagca

SEQ ID NO: 53602 - DNA, 863 bp, Bovine  19866881405746
  misc_feature (1)..(1): n is a, c, g, or t
ngccctgaggtcactgggcactccgccctggggaagggcagacggtccagccctcaccccctgtggagtggagcaatgccccatctggcccccaacaccaaaaataaaactgggtcactttccagtctggcgttttcatttccttatcactccaactatatttggcttctagagtcctgaggctgccaggggtcctgggtgagatagaggccacaggccctggcagtggccaggagaggaaactgccagtttctttcaaaaatatctgtgagttgtgcaattgttctgtcataatctggaaggcaggggctgctgccaccgggtggcaaggtaacccaagggcaccgaaggtggactccccgcttctgggaggggtgggggaggtggagcttaggggtactgccctcactgttcactcagcacggaggccagagtgtaactgggtgtccctgagggttcaggctctggtttggaaccgggactctctctcttgtttgtgaggccatctattcagatttctgaagccatttcctcagagacagatacagacggtccccatcttaggtggtggtgaggctcacatgcaatgtgagacctttagcacagggccagacccctaggcagcactcaagaaatgataataatgactactccacaacaataatcatgccctcgaggagtcacagtccaagtgggagtagtagcaggtaacaggcctggaaagttgtcaggatgagttggtacacggaagagttgggatgaggactaggaattaggtaggacggcccagcaggcaaacccagagaagggagggtttcagctggtggtggtggtgttggggggggtgggggtggcgggagggt

SEQ ID NO: 53603 - DNA, 1158 bp, Bovine  19866881406132
  misc_feature (1)..(1): n is a, c, g, or t
ntggctctcactaagaacacggagcctgcccacagggctacggtggtggtgtcctctgcatggtcttctaggagttggggtcacggaggaaaaatcctgaaggctgaggagaagtagcacaaggagagatggctttgaccttcattcccacaccccctcaccctcagtgtctcctcctgatgggcccccccccagccctgaggatcaatgggggttcactttcgctgagctcagtgacactgctccctccccacttcctgtggctctgagctgactggcccaggagaccagcggggtctgggccagggacagctcagtggcacacccagagctgggagagaaactccccagatccctccagcacctctacctgccaggtggcctcagtctcttgtcctctgtgggaaaaggaagcaggcttgatctttctctcacttcctcctcccactgtcagtggaggtggatccctggaggtcaatagggtcaccccctgagaaccctccattcctactggaaagacttcccacgaggagaagggctgctaggaggagggaattctcacagcatctcctggctccatccaaacacatgcctgaaaaacggtaagatcggcggttcacatttgtgcagctccctgcacagctgtgactttttcatgtattgttgcatttagtcctcctgatagccagagaaactggggcagaggtgaagtgccccagggcaccagctagtccagaggcagaatcaggaagcccagacttgacctgttgctcagcgctctttctaccgctccccacagccccccactgccaatctctctcagtactgtgcctccaactccccttcctgagctctctcctacagagctccagcctctgcggcatgcctaggctcagcccccgcaggctccctgtttcctatcaggcctaatcggacccttcagcccccattccaaggtccctttgtgtccccctcatcaagcttgctcttcctccccatgttctgtaaatcctcccctttcccactccacccctcacctacacacacattcactacagcacaggggtatttactaggcaagactcttcaccgagtctcagtctccttgtctgtaaaatggggggtgtgaatagtattacctcagaggctgctgggggt

SEQ ID NO: 53604 - DNA, 1124 bp, Bovine  19866881593534
  misc_feature (1)..(1): n is a, c, g, or t
natattatttaatgttttatttgagcatgcaaaatgtatgaggtacttaaattttttaagtaaataaaattttgtcatagaaataggaggttgagatattgtgttaaaattcttatcttcctgtcttatctcttgatatttgcccttatagtgatgttttcttcttagtccatttcctcttgtagttctcatggatgaactcctctcagttttcaaagtcactttcacatacatttttaaaaagtctttcattttgtataactcctcagagctccatttatttacttggctgtgttagttcttagttgccgcatgcaggatctttgttgcatcatgagggatcttttgttctgatacatggactctttagttgtagcatgctatctccaattgtgggctcagttgcctggtggtatgtgggatcttagttctctgaccaggtatcaaacccatatgccctgcactgcaaggcagattcttaaccactcgatcatcagggaagtcctatctcgtattcttttaacagcttctttgttttgaccactttgttattttcatattagctctctaggtggcaggatcctatttgaagactattcagccctcctgtacctagtatatattatttttccctcctctttgcactgtggccatttatttttgaagtgcagtgaatatgggtcatttatatttttggatttctttcagacttggaggatgaaacagaaaccaaagagacaactttaaagaatgacatttcatgggaagaattacaccatgccctgatgatggaaaggttcctgagaggaagcaccttgatttccacattgggaagaatctccaaatgtcacaagttagaaaactaccaggagaacgaaggaatgggtgagagacaaatccccttgatccacaagaaaaggctcactcaggagagaggccaagaatctaacaaatttgagaaaaatattaatataagctcaaaagttataggaccagtaggccctccagaaaaaagacaccatagatatgacatatctggaaagaaaagtagatgcaatttagatttgattaatcattcaagggaattatacaagaatgaaaatctttgaatgtagtatatgtga

SEQ ID NO: 53605 - DNA, 1357 bp, Bovine  19866881596931
  misc_feature (1)..(1): n is a, c, g, or t
ntaattgtgttatttcggtctcagttactgtttagggcaccacctgacattcctgacttggatttcaaagtcatagtcaactcaacctgcttttggaacttgctccaggcattgaaatatctgacctttgtctctggttcttgccattaacacctctggtgaggacacaaaagtatctcgcaagtcctgccttttcagggtcaccttagaaatcctagcacttgaagatttgatatcatgatggttagtctctttgctcaagtgacatcaaagcctttttctgtaacgtgcagaaatgaacagttctgttttccccagtcacagtggcatactttcagtatgtccaggggagattggggcacagagggagtacccagtgccccaggggcagtgctactgcgtcccgccacccagatgccctcacatactcctctgcccccttcttcaggttcatcttccccaccacccggcttggggccgaaagccagttcagcgatttcctggatgggctgggaccagcccagattgtggggcgacagacactggcaacaccgccgatgggtgagtcttcttcttttatttattatttattgtaatcttggctgcgctgggtcttcattgctacacatgagctttctctggttgcagccagtgagggcagctctctagatggggtgctcagacttctccttgcagtggcttccttgttatggagcacgggctctaaggctctcaggcttccattgttgtggcgcgtcggcttagttgccctgaggcaagtggagtcttcctgcaggagggattgaacccatgtcccctgcattggcaggcagattcttaaccattgaaccatcagggaagtcctgggtgagtcttcttaaaggcagggtgagtagggcagtggcagccaagcagcagaccaggtgagctcagcaggggccccacatgatgcagtacaagccgcagaaaggagccctcactccagctcttatgccagtgaggaggcgtcagcatagcgagcctcagtccctcccacggcagagaggagaggggttccagcctttctctgctggccacactgcagcagcttttctggcacattcccgccctcacatcaccactctcacccactatctcaccacctaccatgcgcccagcagtgctagtgccaggcataagatggtgaacaaagattatcatggcatcgacgtccacggagtctgctctgtcactgattctttgtgggaccttgggcaagtcacatcccttctgtgagcctcagtttgctcatctgtaagatgggaataataatgcctgccttagttctgcaatctgaagactattttttagtctctgt

SEQ ID NO: 53606 - DNA, 1141 bp, Bovine  19866881656435
  misc_feature (1)..(1): n is a, c, g, or t
ntccatgtaggatgaaggtagcacttcaggaaaatgaggggaaattcagtataggccttttaacaaatagatggactatcaagcaagttatttgggaaaataagagagagctgtgttcttaccctacacgggtataaattccaggtgaagcccatatttaaataataatgccataatgtaccagaagaaaaataagtgaatgttttcacaacctggggggatggaatggaaaagacttttctaagcatgatgaaacctgtacgccaaagggaaaacatcgataaatttgactataaaaattataaaactaaaaaaacttctatagagaagtgtgatcatattcaagtttgaaagacttgaaatacaaactggaagggctgcattccagttgccctcttctcttgcccctctggcctgccagcccctcccccgagccgcgaagggcatgagcagaagggacggatgtggcagtgacactcaaggcagagtacatcgaaaaggctcctcccacggcaccctggccagggtccacctgttcaggggccgggaagccccggaaatcccagcctgaccatctgggtccacagcaggtgccttagcacagcggagccagtctgtgccgaggctgctcaccacttccctcgtgtggccatagcaggaactgcaaccttcgattccgcttatgccgtttcccagagttaaggcaggaagactttttcttaatgtaaataagagttaaatttttgaggaagctaataatgttccagaccttgtgctaaacacttaacatagactatttcctttgacccttaaaacaactcttctaggggggtccactctattatcatctccatttgacagaagaggaaatagaatttggacgaagtgacttgtccagtctcttaagtggtgccatcaggattcaaggtctgactcctggccctacttttaatgcaagaaagccaaatccttggagaaaccaataaaacaacgtgttttttttttaaaccttgatcccagccttatcccaggtgctggcaatttagaattgagaaaaccagccattaggagagacaggcagagaaacatttctgactcaatgaatccggaaacagcagagaacatgttaatcccaggaagg

SEQ ID NO: 53607 - DNA, 574 bp, Bovine  19866882053232
  misc_feature (1)..(1): n is a, c, g, or t
nccgtgaatcctgctgtgagggagagaggaaccctccgtttccatggcaacatagcagccctgcttctcagcctgagcccaggctcctctgagccatggaagaagtgggaagaaagcccctccttgggcttttgagcccccaccaagtgcctcagctcaccccatatatctggtgctcctgaccccactgggactccggaagcatccacctgccccgccccgcacctcctccaacgctcccagggtctggggacctgtcttgtctgcacagaactggatctgagcccgagctctggagagtggcaggatgggtgaattccagtctctgcctgtagaatggtgctcatgttactacctctcagggctcttgtgaggagcatttgaaacagtgcttgtggaagtgctttgtgaattcagagcatggggtcagagtgggccactgtggagtagagattggcccaggctgttcgaagggacggcctttcctcttacaactccaccgtagtccgccttcctgtagaaacgcatgtgtgtgggctcctcggtgcacacggggtgggggggcccctgtaat

SEQ ID NO: 53608 - DNA, 2490 bp, Bovine  19866880116020
  misc_feature (1)..(1): n is a, c, g, or t
nttactccttgatagaaaagttatgaccaacctagatagcatattgaaaagcagagacattgccaacaaaggtccgtctagtaaaggctatggtttttccagtggtcatgtatggatgtgagagttggactgtgaaggaagctgagagctgaagaattgatgcctttggactgtggtgttggagaagactcttgagagtcccttggactgcaaggagatccaagcagtccattctgaaggagatcagccctgggatttctttggaaggaatgatgctcaagctgaaactccagtattttggccacctgatacgaagagttgactcattggaaaagaccctgatgctgggagggattgggggcaggaggagaaggggacgacagaggatgagatggctggatggcatcactgactcgatggacgtgagtctgggtgaactccgggagatggtgatggacagggaggcctggcgtgctgcgattcatggggtcactaagagtcggacacgactgagcaactaaactgaaccgaactgaaactttgaaaaaacaggcgtcaaatcttatgtgtactaaaaataagcaatttattcagattatgtatgtattgctaaaatattctagaaggggaaacttctgtatatatttctgatagtaaatatcattgttccagattttctattgtcaatttggtttacctggaaaatacagttctcatacagtcattagattcttctaatctctatctttaaaatgttattttatttcattttttatgtgaaccatgacaaagtataaattattagaacaaaaaactaccataaatagtttcattattgagaaactgaggggagggataaagccatatgctaataggtatcttggggctacccaggtggtgctagtgggagagaacctgcctggcaaagcagaagatgcaagagacttgggttcgatccctggattaggaagatccgctggaggagggtatggcaacacactataatattcttgcctggagaatcgcatggacagaggagcctgatgggctgcagtccatagttgtatagatttggagatgactgaagcaacttagcatgcaatagaaatcttgggaaaaggcactctaagaagtgattacactatttggaaaagaagatacaatgtggaaagatagataggtggataagtaacttacttttatacttggtagaagtcaagctgtgattacactatttctattattttaattcatgaaagagattaaattttacttatcccatactgataatagtaagcataaaaatatatagaatttttactctaattgaagaaaagttttggacatataaatatttatctttatatataacagaattatctttacatcaaataaattcccttaaattatattttaaaataaatatcatatcataaaagcagtacaaaactgaagtaaaaatgcataactggtataaaaatctgtaatttcaattatacttacatttgaaagccataaggctttcataattaagcctcttaattaatataaaagtattttcgtttttggtcaaattgttaagacaggcatattataagactgaaaatcgtttaatcataaaataatagtaaagtatatctgggcattgtctgagcatttatggtctcctaataaatgagttaatagagattctttgaacaaatatcttggcttaagatttaattaggtaactcctgaaccacagctgaagtacagtgtagtacacagtgtgaagcagaatttttaatgtaaaggttaatgagttaattagccacatttaaaggtttaattcaaataaatgctcaaccagttaactgtaaagtttagtcatttttgtcccctttgttaaattcttccaaattctttcccctctaaagtttgttaaatggactaacacataagactgaggagaagaacacaagaatttggttatgttactataaatgtgtatgttgtgatgaaacatatgatcaaatgtggtaaatattaataatcagataatgttaaatgtttattttctcggtctccaaaatcactgcagatggtgactgcagccatgaaattaaaagacacttcctccttggaagaaaagctataaccaacctagacagcatattaaaaagcagagacattactttgccaacaaaggtccatctagtcaaagctatggcttttccagtagtcatgtatgaatgtgagtgttggattataaagaaagctgagtgttgaataactgatgcttttgaactgtggtattggagaagactcttgcaagtcccttggactgcaagatcaaactagtccatcctaaaggaaatcagttgtgaatattcattggaaggaatgatgctgaagctgaagctgaaactccaatactttaaccaactgatgcaaataactgacttattggaaaagaccctgatactgggaaagattgaaggcaggaggaca

SEQ ID NO: 53609 - DNA, 5176 bp, Bovine  19866881216923
  misc_feature (1)..(1): n is a, c, g, or t
nctggcagcttttaggaacaaattctatgcacacagtgttacagattttgccaagtaatcctatggtccaagacattaaattaaatatattgaaaaaaatgacttatttcctgacacatagtggcacatcatattttaactcattctataaagctattttcttcattatacaatttccaatgtgaatttcattttatgaaatttactctttgtaaatagtgcttccagctggtgtgtaataagatggttattatttttcagcaaaagttgctaattttttcaaagacttttaggagtcattggaatcccaaacgggacttgttcatgatacaaatatggagactttatatcgggttggcaaaaaagttggcacagaaaaacccaaacaaatttttggccaacccaatataacattataagaaaaactacctatggttccagaaaacttaaaatcacaatatgtacgttctctcttaaaaaaaaaaaaaaaaagccaaccttttgtttctcaagaaaaaatataacaaaaatctataccatgaaaaatactttttacttgtcttctttggcttctggtacatcattaattgtgttagaaattctgaatcatagattcagggggaaaaatgccaaatgatataaggaatggtggcagctgctgaacaagaataaaacaggctcaatatgtagcaagaaaaagtaaaggatctatggaaggttgaagaatttaactttctctttttcaggtcaggatttgaattctggtttctcagctaaaccttcatatgatattgactctgattttaagacattatgaactgcaatttcttcatctgtaaaatggggctattaagagtactcaccatgaagaattgttggaaatactgtgagagacagtatatttgaagggcttcccaggtgacttaatggtaacgaatgtgcctgccaagtaggagacagtctcgatccctgggtcaggaagaccccctagagaaggaaatggcaacccactccaatgttcttgcctgggaaatcccatggagagaggagtgtcgtgggctatacagtccatgtggtcgtaaaagaatcagacacaacttagcaactaaataacaacaacaatatattttaaatacttagcatacaatctagccatcagcatactgccagtcataatttatatatataaattttatatattataaaataataattaccatatgtaatgtatttactattttattattctcaccattattagtgacataattaatatgttcatagtcatcaatactacaagcagatgttattatttattttgaatttataaggaagcaaagggggagagaatttaagtaatttgcttatatttccacagttcacagttaggtagtttcagagctacaatccgactttaagttttcgtgacacaaaactcacgctcttttaatgcaccataacacttccgtctctccttttagaccagaatagaatccatcaattcctcggtagagtatggcctagctaggctgatggtgaggtggtcagaaaagatataaattactcagatagttatctttttaagtagatagactttgaagagtgaccataaaattaatgtaggattgtatacagtatctctctatattttttaaagtcagatgaatgacaagcaagatatgccaattgtggcactgacaaaatagacagtattatgacagcttaaaaaaatccagaatatatatttaaaatagtcttttcaccatctgtctcacaagtgtcagacttgcttaagtgactgacatgcacatctggtgagaggctgctgtgatccatctgcatatatgccacttgccagttgcttgactggtactaatttgagaagcctatgctctaaaaaatattcatttaatggctagtaagtattcattcactgatatgtgcatgtgtgttttcaaaatgtctcatataaaactatgccattaggaggatgagaacaactggaatttgaattttcattcttagtccttgtagcatatggttctaactagtgtaagcacaaatttttcacttgtaaaatagtactaataaacttccctgtgtattggtggattcagcaaagtaaaacaagtaattcactaagtagtgtgctttgcacatagtaaatacacactaactaccaccgctgttattactgttctagtactgttactactgcggttagtacacaaagcaagacaatgaattacctgtgataggaaaagtgcagtcacttggaggcaaattaaagagtttaagatacataaagtggaaccagaagaaaataaggatgctgtaatctaaattgagtggcattgtaagtattaaataagaggaagaaattacaaaaaaagtcaataggaatgtagatataaaataagacaaaatttctgcccaggaagaattactaaaatctagtctacaaatggcaaatgcttgagagggtatgaagaaatgggaatcctcctactcctacactattggtaagaataccaattggtacaaccactatggagaacagtatgaattttccttataaaatgaacaatagaactaccacataacccagcaatcccactccagggcacgtatctggagaaaaccctatttcaaaaagacagatgcatcccagtgttcattgcaacactgtttacaatagccaagacagggaagcaacataatgcccattgagagaggagtggataaagatgtggcacatatatacgacggagtattactcagctataaaaagaataaaataatgccatttgcagcagcctggagggacctagagactgtcatactgagtaaagtaagttatactgagaaagacacacttgctatatggaatctgaaaaaaaaaaaagatacaaatgaacttatttgaaaaacagaaacagactcaagagatttcaaaaacaaacttgtcattgccaaaggggaaatgttgagaagggtaatgaattaggatcttgggattaacatacacacactactatatatggaatagataatcagcaaggacctactgtataccacagggaactctactcaatattctgcaataacctatgtgggtaaaaaaatctggaaaagaatgagcacatgtatatgtataaatgaatcacttagctctacacttggaattaatacaacattgtatgtcaactatacagcaataaactttttaattactaaaagctaaataaaagatacaagacctagaaacctacttcataaaaattatttgcaatgatgaaagaaatggttaatactcctaatatgtaaaaatcttttcaatcaacaatgaaaacactgaaacttccttttaaaaacagaaactctacctaaacaacgtacctaaatagtaaaaataattgttaaaaataggaaaaatgtttatcctcattaatcagaaaggtagtcaaattaatgcaatgattagaatttattttcatttaacactcagaagctattgtcaaatgttgttaatatttttttttagagtaaaatagatcaggttgttaatatctgcagggtgtaagaaaaatatctgacaatatgtatcaagaaatttctaaaatattaacctagtaatttaactggtggtaatctatcctgatttactagcatttagacaaatgcctgtgttcaaaatattgattttagtattctttcatttcaaaaattgaaaacaagttgaaaatcaaaaatggaaaacaagttcttgaataagacacttaataaataatttcatgtaaatttacattattatatcatagtattattatattacattacaaaataaaattgttaatagtcatgaaaaattatgtgacaaattaccctaatagaaaattgctagaaagaattttaagataacagtagggtcagttctttgtgtttctgcttttggcaggaccaacttccctcactcagctcatacttaacctttctgattcagtagcattctgtagcagggctcatggtggtaataaggattgaggtcctggccctggggagaaatactcagaggtgtactgtagaacatgtggagggcagagttcaggagtcctagaacccaggtaccaaaacctccctttccagtgtctgtcaacccagcctccataaacttgccctgccttctctgggtcgcgaccctccctgcctagatcagcccctgggtccactgtgtgggcactcttgcccactgctgctctcattaatagtgaatgtgaaattacagagggtgtttacttttttacttttcatttatatatttgagacctttatacaggttacaaatcttgttttatatataggttatacttagaacaatgctacttgaaatccatggaggctatgcaaacttggggtgtcgtataaactctgtacattaaaagtatttttaaaacttggtgttgatgatttcttattgtccacgttgtgatcccttaatgagtaactcttcatctccagtggaatgagcagtcagaaggcgatcaaacaagaacaggtatacctgtcctcacttgtgtccagtgagagtcagctcatctccagcttcactgaagagcaaccattgatttccttacaaaggtggaaatgcaacaaaatctttgactatttttgtttctttctgaaaaccaacgtaatgaatcgtttgagtctgctatgctgcaaggcaattacacagtgacaaacggtctcgagataggatccaggtgctgtatttgatgtgtgatacagagacttagagaaaatgaacagttttcattgttcattacagttatgtgagccaatgattagaacatcttaaatcttctttctctctctcttgctcttccttctcgctccttctctttaattaaggtagtttagtcatgacacattttcctttttccaagaagaaatgtgtatctagaaacaacaaaggaaaacaaatttaaagatgctggttttaaaaatgacttattctgtttcagaaagaaaataattgctttagttggaggaaagtggaaagttctaaaagtttgcggtaattgaaagcaagtcaggcaaactgcgcatcaaaaggaactactatatcagcaacaatcagtgcccacttgaaaaatagattaaataaataggtaca

SEQ ID NO: 53610 - DNA, 1482 bp, Bovine  19866881261278
  misc_feature (1)..(1): n is a, c, g, or t
ntaaaaagcaaatataactgagtgttaagtacagctccagtacaactgaagctggtcaaatgaatgaaagtcaaagtaaaatacatgaaagaacacttggggttcttccctcagttctgcttgctgccaacaaaataccttgagtctatgaacggaagaattaaaaatgttgaaagtgttaatatttaatttataacaaagtgatacctaacagattcttcaaagaacccaagggaatttctttttattagaactatctgagataaccttactttacggtttatagtagcaagcactcgatacctgattttaatgtatgtataaaatatgtgtatctgtatgtatatgtatgtgctgtgctgagctgcttcagttgtgtccaactctttgtgactttatggactgtagctctccaggctcctctgtccatgggattctctagccaagaatgttggagtgggttgccatgccctcctccaggggatcttcccaatccagggatcaaacccatgtctcttgtgtctcctgcattggtaggcaggttctttaccactagcaccacctgggaacccattccaggtgcaaaattactcaaatgtgtgtatgtatctctctctacatattatgttgttgtaatatatatgcatgtacctttctctttccattataatacatatattcaaatcaaactaaacagtgacatacataataatgaaaaatttactttactaatactattttaatgaaaatatgtgaatgattatcatagctgatgaaagtcaggctcgacccaagaaagtcctggaaggatggtaagtgtgaagaattggttatacacctggctggatggtgaggtgtttatgtatctagaatgaggtgttagttgaaactttgtgctcttctcttgtgttcagtcactcattcatgtccaactctttgtggctccatgaattgtagcctgctaggctcctctctccatgggatttcccaggcaagaatacaggagagggttgccatttcctcctccaggggatcttcctgactctgggatcaaaccagtgtctcctgcattggcaggtggattcctcaccactagcaccagctgggaagcccagatgagtctgtatctgatgcttactgctcagtcatgctatcacttctccaaaacatgaacacaatgcctcaagatacataaagtattatgattacctttcttaaatgtatttaaaacaaaaaaaaatgttgtgacagatgttgtcatgctgatatgaagtttctcaggagtcttcaagaaattaagtagttaattcactaaaaatctgtttggaggatattttaatatatttatacattctaatttaattcccaaaccatacacaatgaaaccccagtgccttttctcataggacatgaacataaaagatttgaacagataccataatgtgatagcttcttcaattaggaaacatcttgattccaata

SEQ ID NO: 53611 - DNA, 1867 bp, Bovine  19866881802530
  misc_feature (1)..(1): n is a, c, g, or t
ncttgcctggaaaatcccatggacagaggagcctggtgagctacagtccatgtggttgctaagagttggacatgactgagcgacttcactttcactttccactttcatgcattggcgaaggaaatggcaacccactccagtgttcttgcctggagaatcccagggacagggaagcctggtgggctgccgtccatggggtcacacagagttgcacatgactgaagcgacttagcagcagcagcagcagggcagtatatatgagtggagtgtcccttgccaggaaagaagaaacatagggaatgttgtttgctaagaagatatgaatctaggagataaaaatgtatgattgacaaattgcccaaactttggctaggcagaaaacttacacccaacagaaatgtctatgaatattaacaaaaccaaagccaaattcagaactacataaattggtatggagttttttttttttaagtggtaagaaaatgattcaaataactgcatattttattaacttcctcatcttaaaaggcagattaaaatgtgttaagctgcttatattgagatttttatagttacctctcctcaaattcatgtgccttatcaaatataacttaaactggagcaccaaaggtctcttaatgaatctagatgtttgtagattaatgcaaggccttttgcaatcatttgctatttttctacaatgaacacacttttatttatggtaatgacaattgttgagtaggcaaagtataacttatggctttttataaagagaccaagactatatttttaacattgcaagtgagtttcaagaacaatgaaggacaaggacagatcccaaaccaggagggataataccctatggaactgccaatttatccacaatttaattaaatagtttcagtgatcccacagctaataagacccacaacagtaatataatttgcaaactctcaaacatttttaagtctttaatgttaagaaataataaaaacataaaatgattagggaaaaaaatcacattggaattttgaatacccagttaatccaagttaatttacattatggataataacatagatgtatataagcacataattatatacatataaaatggaatatttgtaatataatttgattgcataaatttgtaatttatatttgtatgattcatatttaacctcactaaaatctaatgctcataaaaactgggatttcttctttttctactgtattctggtgattaacacagtatctagcatatgctaggacttgatatgcatctattcagttaaatctgattccctcactgtatcaaattcaggtcattaacattgtcctgccctgcaggaaattcatcattttgatcgacgtgtgtttgtgtgtatgtatccacaaaactgggtttccctgttggctcaaatggtaaagaatctgcctgcaatgcaggagacacaggttcaatccttgagtcccctggagaagggaatgacttcagtattcctgcccagaaaattccacggacataagagtctacagtctctggggtcacaaaagtcagacatgactgagtgactaacacattcaaaaatgttcatccacaaagctataacttttccctagccacatacctccctttcatgtgctgttctttcttcttttattagtttccaataatattaaataagattaattatcctgcatttttatttcagcagtacttgaagctatactcaactgttttcaatttttatttagaaaattgaccaaatcaattaaatttaccagtttatactattgtataaatatggaacatatgcacttttctaggtcaataaagaagaactaacttcacttgcaagacatt

SEQ ID NO: 53612 - DNA, 1019 bp, Bovine  19866880357443
  misc_feature (1)..(1): n is a, c, g, or t
nccaaggatgtggatgtaagacctgagatataaatgatggggttgtttattattctcttccttttccaaagagacagatcaagcaagagttacaagcaagaattgtatgaatgggaataaaaaggacgcctcaatggaaacattaaacccattaattttagatgtttagtccattaatttctactgatccaccctttggaatatcttctgtatctggtcctctgtttctattcccacaactttcccctccttccaaatgtttttcaattcacgtaattctccctgtgttcattccctctcacctttaattcattctacacatggccttgaaaattaactttttaaaatgctaatcctatactgttgctttaaggctaagaaaaaaaaaatctcaaatgaatattccttatgtcaggatcaagttcttactaaacaccatggcattcaagttttccataagtttcatttatctttaaaaagattcaaattcttttagtatttcccaatcttattttttaaggctttgctcatgttttatatctacaaactcatctggttgtcaaaataaatggactgttctcctttcaaagttcagtctgggccatcactccaactagaaccgtctttggatcactatatttaaattgctctaaatatatattttgagaaatttattttaattaaattaatactaacttttaattatttctgtcatatttataaatagattgctatctactggaaaacaagaatcaggttgtgccacaacaataaaagccactatgattccttatgagtactcattatgaccagggtatgtgataagcaccatgtcttttattttttaatcttcaaagtcattgcaaactagtctttattatttcatttgacacatgagaaaataaaggcttatagataggtgtgaaatagctttactaagatactgcaaataatatttggtagagctggacttaaaacctaattctgtggaaaactaacaaacagaaaacccttttcag

SEQ ID NO: 53613 - DNA, 2292 bp, Bovine  19866880455103
  misc_feature (1)..(1): n is a, c, g, or t
ntccctgccttcaatctttcccagcatcaggaccttttctaatgagtcggctcttccccaggtggccaaagtattggagcctcagcctcagcatcagttcttccaatgaatattcaggactctcaagagtcttctccaacaccacagttcaaaagcatcaattctttggtgctcagcctactttatgttccaactctcatatccgtacctgactaccagttaggtgcagtgctatgtctatgcatggggaggaggtgtgatgctcacgtgtgttgcttggtgccaggctgtgatgcacaaagagctgtatcagttcagaagaccagagtgttcctttgtcttgttaaccacgggatctgcagcaccaagcaagtaagtggataataaataaatgtttggtggttgaataaaaagttagtgaatgaatcaatgcaactaagtattctagaacaaataacacaaaaacatgtacacaggtgtacacaactttgagtgagaatatcctttcaacacagcttgaatctgaacggaggccaataaatttttaaaaattaaaatgatctaacatatttaggccatagttgactttttcaagaaaggctttggtatgaccataggcttaaatgtaaaggccaaagcaagtcagcatatgatatagcttttaccggactagtctatccttctcccaaaagagtaaaatatataaacttatagttttaatcagttttaattttagagctgacatccatcaattctcttagcttaggaagagttacttggtgaaagaatagtctttaacgaactgaaaacagaacaactaccatattacccaccaatcccactcctgggcgtatactcaaagaaaaccataatttgaaaagacacattcaccccactctttgttataacactagttattgcaatagccaagacatggaaacaatccatcaacagaggaatggataaagatgatgtggtacataaagataatggaatattactcatccatgaaaaagaacaaagtaataccacctgcagtacaatgggtgaacctagagattatcatactgagtgaagtaaatcagacacagaaagacaaatgtcacacgatactgcttatatgtggagtattaaaaaaaaagtacgaataaacctacatgcaaagcagaagtagagtcacagatgcagaaaacaaactcagggggtgggggaggggtaaattaggagattagactgacatatatacactactatacataaaatagacaataagaacctactcggtactctgtaatggcctagaggggaaaagagtcttgtaaaatagagtggatatattgaagttgaaatagttgataatatagtttttaaaatggcgcatggatatggattttagtccacaaattcggatgtgcaaatgatgtaactgttttttattattctactaggtggcaggataaaaaaaaaatcaactcttcctttcccaatgtgttaagtatatgtgtaaatatttcactttgctgcacacctgaaactaacagaactttataaatcaatgatactccaagaaacatttttaaaaatcacactctcgtctttcctcttgcttacctgtactttgcagttttgtagggcattttttttttggtcaaaatgtgatagattctatcataccatcatcaatgagagggtgctaaataagccatctgaagcactgtccccaagccccaccatttctgctccctctcctcgcagatgggaatgactatagacggatttatgctgctgtgcctttaggcttcataatcagcattcaagtgtaccttctcaatttaggatttgtcaagtattatcaaaactcaccaaccctgacagaatatggcttatactcacagctaaagtttattttaattcagagtataaatagaaaataaacagaaaaagagccaatattttctttcttccttttttattagaagcttagaggtctgataccaatcagtgtttgataaacagagatggcagtgagaaaacaatcaaataatgaacataaaatccatcatcagtgcacagccatattaagttacctacttcattgtgctgtcctaagacttgtacagactccaagtaaactttgggcttgtaaatgagagagactgttgacaagtaataggagacaattaggaaaggggttttttccttgtctaacttctctattagtgagttggaaacactatcagttgcataacccatatccattcctgaagattccttactaacattatcctgatt

SEQ ID NO: 53614 - DNA, 929 bp, Bovine  19866880489085
  misc_feature (1)..(1): n is a, c, g, or t
ncatatatatgtatggctgagtccctttgctgcccacctgaaactgtcacaacattgttaaacgaatgtacttcaatataaaattaaaagttttaaaaaactgaaaaaaatttgtgaaaagagcacatacttccaatgtgtgtgtattgaggatggaggcatacaggtatgtgtgatcttaacctcaatcagcattttatattgttggaaatacatgggaatgtcatgaaagtttaacagttaccttcagttaaatttggagtacagtgaaggagaaaaggaacaggaactaagagccaactacacaatactttgtgcagaaaggatcccaactaaagagctagatggcatttatgaaaatgactaggatggaaaggatgatgttttataaacttgctatatacatatatctgcagattttaaaacatatcctctattgctgaaagacaatttagagatagttggatcaagttattttacaggtagggacaaaagcctgagaaccctagtaatatgtccataacgtcatagctagagaatgccagagttggaataatatcccaaattatcagattcaagaaaaaaaaattgaacttgtaaaagtcagaaaactcagagaaccttttataaggtctgtagggaaaagtaaggtttatatgtatctaattctcatgtttttggagattggaactggggaaaagctttgcaggatacttaaaatcgagaacaggctctaacatggggtttgaactctactgggttagttgttctatccacaaagacaagagtagactgaacttaatattggaaggtttagaagctgtactgcatgttagaaatgtgttatctctagcctttttcctggtgttaaataaatgagttttaaatctataaacctatttatcttcctatggctttggacatatatc

SEQ ID NO: 53615 - DNA, 1367 bp, Bovine  19866880524904
  misc_feature (1)..(1): n is a, c, g, or t
nattccgtcaatttcccaaggcatagtatgcatagtacttgaatcaggtgggatcctaaccccttaattctgcatttcccccctattattgctccaaagcaaagaaattctcaggtgcatcatataaatgtgaacgaggaattgactgtgtgcctaattccccactgttgcttttctattagtaaagaagttttatgctgagatccttatgcagaaatgtacctaaaattggtgataaagaacagaaagttaattcagaatcctttcacaaaaatttagaaaatatgattatagtctgtgctaaaaagcaacaggccagacctatggtggtttattatccaacagatatttaatgagcttctcctttaggccagagactatgctagacaatgggaagatattagtgagtagacaaagaatctgctcctaacaaactgacattctcaggaagaacatatccagcgaacaaataaaaataagtagtgtgttggcttactcatgttatagacttcattgggttgcttatttacatactagatatgggagtgctttaaaaataaagcacttacattggtacaaaatattgttagttgggtcaatattgaatcaaaagtttgatatcagtataattcttaggacatgaacctgagaagaaatattgagaaggtatatgaatttaggagtgtacctcaaagtcaaaatatgtctagttcaacactaggaatagtttcaaaggcaaaaaaaaaaaaaaaagagagagagagagagagagactatttaacatttagggaagaaatcataaataaggtcccagggcaggaaatcagagacagacacattgacaagaaagagcagtgatcttgtcacaaatatgttggataaattcaaataaaaagtgaacaacacagctaggaaacagaaggtaataataagcaaagctgggaatgtgtggggtatgaactaaatgtttggctttctcctttattagatttccatctgttgtccaaactttgcagattctcaataaaccctgttatcctgacatctttttcctacaaaattatgtatttttcttgggtcaccatagcgtctgtaggggctgtccagagtggcagttcccagctacagtgcttcagtgctaagtcgcttcagttgtgtctgactttttgcgaccctatggactagggcccaccaggctcttctgtccatggggattttcagacaagaatactggagtgggttgccatttccttatccaggggatcttcccaagccagggatcgaacctgcatctcttacaagtcttctgcactggcaggcaggttctttacctctagtgccacctgagaagtccctgttcccagcca

SEQ ID NO: 53616 - DNA, 1448 bp, Bovine  19866880527034
  misc_feature (1)..(1): n is a, c, g, or t
natatttagtgttcttgggttccctcaatctctgatgaagatgtcatgcaagaaaagggctgaaaaagacacaaagcatgttttactcttctttagcctcaatgacaaaggacatttagatgtgcaattaagtatttttcaaaatactgtgcctatttatttttctatcaacacgtggtaaaatatgaataccccctgactctatctaattacacaaagaatattgaagaagcaagttccttacatctcactggaaaggagcagccacactgctggactgcattcaagaagtcaccgctttcctatcaccagacaattgtgctactttacataatcagtattcaggggatgctactttgctaataggcaaaatcctacaatgacaatttaaatggtttgaaacatgtgcaagataatttggagtcacagctctgccaattgctaaacaagtgcagcaggaatggagactctgagcatcaagagtgctgctgggagaacagcctgtcctgtttgatcaaggaaactttgctcacatcaagtcaggagctcaagccagctaatatcatcatctcagactcttactaggggagattaactgtcttcactggataactccatcgctcaccatggtggaaacaaagaataggcagatggttttcagtggataggagtgcaaactcaggctaaaatacaaaaagatcttggtttgagccctggctatgtactactaattagctctgtgagcttgggtaagtcagtcggtctctcttaaattgactattcatctgtttgaaaagtaaaaaacaggacttacctcctagagctatgaggattaattgcaatacttcatgctctctcaaagtctgacaaatagtaagtactccataaaagttaacatctgctgtttaaaatgtggaattaacataattttgaaatgatgaaccccacatgaatgggctttagggagtcaatgaatctccaggaaatgtgacaaaattctgaattttctgggaagaagtttcattgctgctgttgttgtttagtcgctaagtcatgtctgactcttgtaaccccctggactgtagcctgccaggctcctctgttcataggatttccaagcttgccatttccttctccaggggatcttccacatctcctggcaggtggattctttgccactgagccaccaggaaagtccagaagtttcatagctttcattcaagtctcaagtatgtgaatagcaacaacaaaaacgtaattaccactaccttatgtattttccaatacagaaaagatatgttgatgaaccttcaacaaatattcttcaagtttcactaagtacaggcaccacactaaattctgaggatgtaacagtgagttttaagtgccttttctcagagacgtgtgtataggagagtggagaatggacatcaacaattaatccataa

SEQ ID NO: 53617 - DNA, 1365 bp, Bovine  19866880602370
  misc_feature (1)..(1): n is a, c, g, or t
natatttgttcatatactttatacacacatcagataccagaatacgtactgtgctgtgtggcatccctgccctttaattgctagtgtttcgtgctgtccttgcacacaggaggtccccagcatacctgctgagcaccagacctggggaaaaatgtcagaactcttttacactgagtgcttgtctatccacacaacactgagatcagcctttcccagtgataaatgtagcttgcatgacaccacaacatactgcttcctttttatggatgggaacaccgatgttcagaaagttaaatgatcattcctgggtcgcgtagctaatacacttcagaaataagatttgagtctaagtcctcattttctaaattctgtgcttttgtgttttaagttgagtgttcttccaagctacatcacagtttctccaaatttctttggtttccttggtagaattactttaaaaaataaaatacaacttatatgcatgaattcaagaacactgaaatacaaatgaatgtgtgtgtgtgtgtgtgtgcataagaagtagttagtctcttatttctcacatcaaatttagtaactttcttctgggcacacatactgtagttgtgtggttactgtgattctacatggtgtgagtgccaagtcacttcagtcatgtctgattctatgctacctacggactgcagcccaccaggctcctctgtccatgggatcctccaggaaagaatactggagtggattaccatgccctcctccagatactacatggagttttacctgtaacagtatatacctctgagtagctatgtcatatgcagaaaaaagccttacatttagatagcatattgcattgtgagagaatgttgcaatggtaaacgttatatatgaaatacctcttagtgttacccttatttgggaatgaaaagactagctatgtctttagaagtaaaactgagatattgtggtttactggaactcaaaatcaggaacactaacatggtgtttctggaacttatatgtctccttgccggtattatcttttgttctcaactcataattttggagactattatattatttcctttatttttaatgcttgctgtaaatggcacaacttctgacattcaagacagaaattgagtataaatctgttttccccaaccgctcttcattgacctaaattcttctattctggcttctcatcacccgttttcagcctttcaaattttatttctgaactctacagctgacttagataccagcatttcaattttttaaacacaaagttagtgcatttgtctgctttattttaccaagaaacagtaaaaagcactaaaagaggattaataaagagaaattatccct

SEQ ID NO: 53618 - DNA, 1546 bp, Bovine  19866880603129
  misc_feature (1)..(1): n is a, c, g, or t
nacaagctaaaacacacgagcagaccatgtctccatcaataaatgaataagtaaaaaaatgtggcatatacataaactggaagattgttgatccttaaaaaggaatgaaattcctcaatatgctttaataagaatgtaccttgaggatattatactaggtaaaataagctggtcattaaataagacaattattgtatgattttacttatatgagtctcttagaatagtcaaaataattaagacaaaagtgtaatggtggttgctagaggttggtggggagggagagtggaaatgtggagctattatttaaggggtattgagtttcaattttacaagataaaaagagttagggggatgcatggtggtgatgatagcatagtaatgtatttaataccactgaattgtacacttaaaatggtgaagatggtaaatgttatgtgtattttgtcacacaaaaagctaaaacaaagagcaaaaacagatctacttctataccttaatactttcagtttataccactttactactttctacaactttatgaaactttcagtagctttctaaaatttataagcactggattttctttgatctgaaagatacataaaaacacattatatcaaaattttagtttccactactgttaaaagtgcactgcagggatctatgaaaacactgtctactaaatagatatatgttggtttcgtgtgtaattgcttccatggggacactaaatatagtccatagactgcaaggcaatcataagtcagaagcgacactgagtgtctaaatgtaaatgcttgtcttgcgtcgtgggggaaaactctagaaccactcctcttaccattatttcaacagccactgtttttgtctgagaggcaaatcgttggagcaacaaatgaatgtcatgttttgctttgtttcagaatccttgtgtcttgtccaggtaaaaccacataactatacatcttggtttttagttctgggatcttataatcctggaattccagtgaccttgcatggcagtcagaaagtcccagagaaacatttgtacccttagaattagttcatttggagttatattagctttagcttttgggagtgtatataggaaaaagtacttcttatcatatgaccaaaggattttgattaaattcttatccacaatttcagaaatatagctaaacagagaaaagcagcttctagtatttagaaacttaaaactagaaaaaaaaagtaatcatgttgataaaaagaataaaatataatcaacattttttagttaatgttttctgcagacatttaaataaggatgaagagttatacatgacatagttataggggaaaaaatggtaaagcaaactggagtttttatcctcaacttggctagtaaaactgaaatatgaaattatattagaccattatttaaaggacttttattccaaattatctcatctaaatttttacaagtcatattacttttgtgtatctcagtaacaccatctatgaaatgtgaaaagaacccagatcatatgctaattttatt

SEQ ID NO: 53619 - DNA, 727 bp, Bovine  19866880604134
  misc_feature (1)..(1): n is a, c, g, or t
nctaaaatgtaacatgcaaactttcttttgcaagaaaagcactgatgttattttattctcgttcatcgatgttgcctttcattttggatcagtttcattgcctctctcattttgtgtacaggaaatatattctagattactgaattcagtaaatgcactttgttcaccctgcttctctttgtttcacatctattagttatcttcctgcgccaattttaaccccctgaggttagtattctgactgttcaagtgaagagaatatctaatctaaacagtcaagtctcatcatactttgttctattttgacaagtgtggtttagcttttatttattaaaaaaatgcctcccagtaacctgtaaatgtacagtaatacattgtgtgaaaataacagcatctgaataatatgagccaatgcaatttcctgaaaataatctggtgtacatgttggtcagaaagatgaatgcggtttgcataaatatgcaaaattacattgcatatttaaatgtcatgcaaataccaccctactgtattcctgagagaaataaagaaaataattagaaattgaggtaagtgctgaagaggaaataaacaaagggctaaagtagaaattaaggatgagtggaatacttagagcaagtgatcagggaaagatcttgctgaagaggagacattaaatccaagacaagaaaggatgagtagcatctgggctatgtgcaaaattcatgtg

SEQ ID NO: 53620 - DNA, 1721 bp, Bovine  19866880619872
  misc_feature (1)..(1): n is a, c, g, or t
ntgggatgggatggtagcaccagaaagtctttcaaagtaattaaactaaattttagtccttggctttgatatatttgaagggcaggccagtagaagcaaagtagtagttatttggacagtcatttctattgttctgcttaactcatattaaaatgcttagcagtaatagttttgaatgattaaatgggtctaaatattaagaagggtcttaattaactgaatggacttgcttaagaagcagatgctaccattacatataccattgtcaaaaatacctgctctttacccttaggaattacattgtctaacgcaaggtccctgttacctttccaacaacccaaagtgtcctccgatgaaaggatgtttgagggagctgtaattagactcgacaggggtttaatgtagtgaagacctaacactgatttggttttatatttgcatttatggtatatgcttatacttgatttccgtaactgagtctgacaactatattggaatattagcaaactagaaaggaatggcttgcatgaaatatgacaatatggttcagaccagagggaggttttctgcattgatgtgatatggcacctgaggatctggtaactgctagactcaatacgaccattaactgaatgggaaagcatttcactcttgagatgagcctatctgactcatacacttggcccacgtacttccatcctctctttattcacaacagatttgaagccttgcggtatacaggcaactgggttcgtatcatctcaagccacacattaacattagctaacaaaaatgaatgcaggggaatcgttgctgtgagatgagagtaatactagagagaacatgatgactaaaggaagaaatgatagaagctggagtaattaaatgcaaacattcaattccacatttctgtgaatgtattataaatacaaggaataaccagttttttctcccttcctctgtttggccgtcagttcagttagtcgctcagttgtgtccgactcttcgtgaccccatgaatcgcagcacgccaggcctcgctgtccatcaccaagtcccggagttcactcaaactcatgtccatctagtcggtgaagccatccagccatctcatcctctgtcatccccttctcctcctgcccccaatccctaccagcatcagagtcttttccaataagtcaactccgcatgaggtggccaaaatattggaaaatacaaagtcaaggaagccagattaatacctttttttttactccttgccttttattttgatttgcttggtgccttttttcttttcattgtttgaaccattcaagtttggacttctgtaactttcattttaaggcattttaatacaggaatcaaccactgtattctgtttaaagaagactttttatgatatgtaactcttgagctgggatttaaaataattatacaaatgtatttaactttttgagaagttttctgagggcagagttgctgcagagtatcattgttagttgaaggaaatgtgtataagcaaggaaggtgtttgtttcctccagggaagccgtgcctggagaacagagttccaatagttgtattttggtaatttgtaatctaaataatactaaactatcattctgagatttatttctgaaagttcccatatcctgacagttgccttccacaagaccatatcttttatagagtcactgcttcatgactgacaattatagtcc

SEQ ID NO: 53621 - DNA, 1893 bp, Bovine  19866880691210
  misc_feature (1)..(1): n is a, c, g, or t
ncatgtcccaggaaaggtaatttcaacctaatagatttcattagactgtgagttttagcttaaaggcatttctacaagcatcgctatggagtgaaatacaacatagtccaaaatgttccttagtacctgccttacttagtatagtcttgctatttctggttatgcgcctttggaccaccctaaagtattgtgctcctagacagtgcttacatccttccagtgacttgaatttgtttagtaaaatctacaggaggataagaccttccttactatgttagcatatttaacctctggggaatgtctgttttgacataattatgcacagattttatatttatacaaatattttgtgcctgcagggggtgtaaaatggatctccctcatgaatattcaacattgccatttcttctagtaagacacaaacatctttctttgtggatactaaacactaggctgtctatatattttccccgtcattcttttcttgcataaacctgatgagattcgggggctgccaaaacagacattaattttcccaggtacttcaatattctaatatctccacccagttgattcaatagaatttttcagattttcagcatcatatggatttctccatatataattctagatgcacaaaataaagtgatacatttaaaaagcttggctttgaactgtgatagaaaggagctaggagggatagggtgcctgtaatgcagagtctctatgtagcatgagttcttataagacagtcttctcacgctcagatttcaaatctaacagtaacgaaagacaagtgagcagcctctggaaagaaattcggaaattcttaaaagtgagcaatttctcttatatagtaacattgttcacataaagaagtatcattgcttccttcacacattcaatcgatgctctgagcatccagtgtgccaggaagtgttctaggttctgagaatacaatagagaacaaaagagataaagtccctattataatggaatttacaatcctagaggaggggagacaaaacagataataaatgaataaataaatgaatgaatggggaaaaatggatgaatgaatgagtaagtagtggtgagcactataaaggtgataagacgacaatttgacatgttacttgtcacagatgtgtgtgtagtgttttatagattacaagtgcattgctttatttacaataatagcataaaatttagcatgggttgtgtcactttaaaggttagacacaagaaaagattaactgaatacaacacttgcccactatcaacacagctactatggagcagaaatgtggattcaatgcattgcaactaattccagctccaagagtttcctttctcagagaccgtgatcttagggggttcctctgttcactcattttatcatgattcttaaaaatgaccttcagaaagtcaaaatacaaaggataaaagtatggttgagagtttctaaactaaacagtaacactcaaaagggattgaacagcaagaaaattgtagccagctaaataaagactgtggtaaaataggaactacatcttgggaagttgttccatcacttctcaaccaatttcaaaggattgcctcatacacatgtgaaagtgggagctttggtgagaggctgaaggaacatgtaacattaagaacattagtggaagcctggattccaggcctccttctcgattagtccaacccagatgatgcaaacagaattggaggtcatgcccagaaataaagattatacatttcccttgcattgtgtgtgtgtatatgtatgtttccttctggggtgtgtgtttccttctggggtaaggaggtttaggattccaaagggggaagtgaaatctcatcaagggctccaagaaactatcaaaaagg

SEQ ID NO: 53622 - DNA, 1118 bp, Bovine  19866880724694
  misc_feature (1)..(1): n is a, c, g, or t
nattagtagtaaagcctgcagaatttggggtgtttagatacattctgacaatagctggactgtggccacttaactgtaggtcaggatttttcattaacctcttaataatcagtacattcaccattgccctgattcttccccttatacaagaaagtcactgtttattgctctctgatagatttcaatgaataagctaagctgctttcaaattatttaaataattgtccttactttcagcttgctctatcttgagacttttcatcattttatccatccaaagcaatcctcctgcctcacacagagataagaggattttgttctgtgtcttaaatatgaacattgatcacaataatttactcattcagtcagtagaagctctaagtcctactgcaatgcctgatacatagtaaataaggcacagattttgccctcccagagcataaaaatcatgaggtgtcaaaacctgtgatgattaatgtgatataaaatcatgttcctaaagacagcagctacccctatagtctggggcttgtggcaagatagccatctctcatctagtcacacagagtttgggctctgatgaatgattgaatacatcccactaaattggaaaataagtgtgtatgtcagtgtgggtatgtagaaagggggtaaaaatttaggggagagcacagaattagggttagagaagaaaaatagccataagtataaaaagttcaggaaaagctaaagagaaaccaacacagctgcccagaacccatgaagaaaatacgtggcatgcttaggaaatcttgagtaagtttcctacaactggaagttaaaggccactatactttttctttaagaagtatctgagaggcaggaaagagacactgctgctgctgctgctggtaagtcgcttcagtcgtgtccgactctgtgcgaccccagagacggcagcccaccaggctcccccatccctgggattctccaggcaagaacactggagtgggttgccatttccttctccaatgcatgaaagtgaaaagtgaaagtgaagtcactcagtcatgtccgaccctcagccaccccatgaactgcagcccaccaggctcctctgcccagggattttccaggca

SEQ ID NO: 53623 - DNA, 757 bp, Bovine  19866881017153
  misc_feature (1)..(1): n is a, c, g, or t
nctaactgctgctgctgttataaaggatatatcttgtatctgttttcggtgtgaagaactgttcagcactcactgtttttaagagattaatagcctttggccatggctgagctacagtgactgacatctggaatccacttacgagagtttattatcagtagctcaagctcttgatcttatttttgcagtcattgctactttgaagaaaattgtattctttctctaggttcccataagtgaaatatctgagcatagatgtaatgttctttcttgggaggtgagtgttttatttgcacattctggggagtttgtatataagatatgaatctaaatatagctattcacaccttctgtcctgcttttaactcttctgccttcttaacagagactctacctgctaaataaagagcacagtttacattacacgttaagcagtgttatgtaaaaattaagtcctgagaaaaccctgctgtagttttgtaggggagctcagtatgtttgccatcagatttattttagtaataccctgactgtgcttgcattgtcaaagtataaaaattggaaagaagtgatcacttaatcatctaccaattcatattcatagagacactgggatagaaaattatcattaaatctgctgactgtttttaactgtctgagagacttggcccttaactatgtccattgggagattgtcttcatagctagttagtgcccctgggatagggtcccttaatactgggaaaattagcatttt

SEQ ID NO: 53624 - DNA, 1215 bp, Bovine  19866881020258
  misc_feature (1)..(1): n is a, c, g, or t
ncgtcctcactttctctctctctctcttcccctctttctccgatcctctgtcctccccattctttgcactcaatttcctatgctggttaaagtttgttctacatttcaatatctgtctgcattagcatgttcactgttccaggaacagcatgtccctgaacatctctgctggatatgaaactttcaagcataactaatatgacagcaaaatgaattttatttaaatgaacaatacatttcttggccttcatgggtcaaggggacagcagtgggaactgcctctgtttacaatcatttgtcatctatccacaaaaacctagttagcctagaatgcctgtgtctacacaggaatgcatttctttttaatagcatattgtctttggaaaacaaaccagaaaatcacaaagagatgataatttatagttcagatcaactgcttcagtttgttattataaatagaaagcatagaaaagtgattactagattaatagtttttaaccttttaactaaatcagaaatataatgaagatgaacagcagtccaccagtcaaagggaactgagaatctcagtgggaattgaccccaagttctgggttattgactaaaccatcgttgactgcctgattgggcactcttttcccctgacatataaattcactacaccaggctgcctccctgataaatgccattgcattctccatctcttgctactgcaaaggaaaagtgttgtttgcttataaaacttcccccacacccacattttctatcaggggaaaccagtgcctctgggtatcacataccaagcccatcaccccattaaactggcagagaagcagcaaattactaccaatccctacatttcactatttcccattcattcacccattcagcactcaaaccccgttttgtgcctttagtgcaccaggcattgtgctggctcagataggtgatccaaatatgaaaaaccaagaaattacactttgagaaattttaaagtgatgttataaagaaatgcatagaatagaacagagataaaaccatcatttctgaggcagtttagcaagttttcaccaatatttgtcaattagtcagtctattggagagcagttgggcatttctttagatgaataaaagcattttagagagaacagcatgccaaggtccttatatccccatgtaagaaattagaatgtaattctgcaggcaactggggat

SEQ ID NO: 53625 - DNA, 1331 bp, Bovine  19866881033080
  misc_feature (1)..(1): n is a, c, g, or t
ntccctcctcccttaaacgagatgccagtccaggttcattgcctttcattttaaacttttgttttttattatcataattacatggtgacaaccaataagctcagttcattgtatcttacaacttttttaaaacataaacaagttgagatacttggaattttactgagctttataccatgcttctatgtaactgtgtgggcctattagcaataatatgagtattaactgatacagaaagtttaaaaattaagtaaaacatgtagagataccatcatattacattagatttaacagttttctggccattaacatttttctctttatgttacagaatattataaagatagataacttttctctttgttgaattgtatcatagacccaaagttcttatagatcatccttaaaggaggagagagggggatggaggtggaagagaaagctataattttagtttctcatttctctgtcagttttattacatatccataatagaaacctgcggcacaagcaaaatatatttcaattgctggatctaatgagaaagagctactggtgaaaaaaatagaaatcttaaatacaagtgagatttgatgtattcctgacatatctgacatatgcttatttatagaatcagaatgaagtttgaaaaacgtttgaatttgaaagaacaaattttttagtactttttattattctttttttttttttaataaccctctctccacatcactccccaaatccctctctgtttctccaagaaacacacacacacacacacacacatacatgcacactacaggataatgttccttaatgtcctgtactcagttttctattaagaaaacatctattgagtgcctcaaatgggctaggtattgggctagttcccagatcccagtgcacataaagtttatgaacttatgctcagcacaggcataaacaaaatgtaatcttgttcactcatcatagaagtcctctcaggtaggatttcctcctatgccatggatgagtaacttgctcaatgtcacttcaataattaagtaagagaggtcttccaactcaagtatttctagagatacaacaagttttgaagtccatatctttttttttttcttaccatatcacacatataattaacttcgagagaaaaccatttttaaaacccaaagtttgttctgttggttcagttgtttagtactttgtatagaaaatgttttgatctgtatatcacaacatggcatttgcttttttcatccatgtgttcgttgacttatttattctagttttattaagcgcttatctgggacagattttataacaaggtaaaa

SEQ ID NO: 53626 - DNA, 690 bp, Bovine  19866881104956
  misc_feature (1)..(1): n is a, c, g, or t
ntgagggtcttccctggtggctcagtggtaaagaatcttccagcaatgcaggagccacaggagatgtgggttcgatccctgggttgggcaaatcccttggaagagggcatggcaacccactccagcattcttgcctggaaaatcccatggacagaggagcctgatgggctaccttcatagggctgcaaagagtcagacattgatgtaccttagcacgtgtgtaatggatgaaactgaatcataataggtgtgagattttagctatgctacctggtgtatgcaagttccagaactagaaaaccaagcctgggttgtcttcctcaaagcccactctcctaatgacagaagcttctcttatccatatctaagccagatctggctttaccaaccaggaggacagggataaaagtagatgcttccattagaaactggcttgtaaggaacagtaacaacgcagtgcctattagagtgcttgcttccctaatgtttctccagaactgtgtgtcttcacctctgtgtctccttgctggattttggcacagccttggcttgccaggatttcttttccagctgtcagcccggtacacagtggcattgcatgctgtctcgctgtaccacagagcgaagaccgtgcagagcatggcatctgacaaagtgcaaattgtttctctgaataagcattattcattt

SEQ ID NO: 53627 - DNA, 1918 bp, Bovine  19866881168729
  misc_feature (1)..(1): n is a, c, g, or t
ntttcttttcttggtacccctcattgaatgcatttacaatgatgtacttatttagcttgtttcagggacataatcaggagtcacatacaagtaaaccatgataatgccacccctgataaaagacttttggtgtaaaaaatgtatagactgaaaagaaatagaaagaatatagaaaagaattgatagactgagccttacattctcagtataaccttgaagtattaagtagattgaaatcaaagcagtggtgtttgggctttttcttaataaacagtagaagacaggaacaaagcctcacttgatattaccgtttatttctaagcattttgtactttcaactaatgttgtctaatgttaatcctttcaactaaactcagcatttcatctgtaaccctgtcatgatggtgaaggagagctctacaggaataaattcagtgtcaaaattgacaagtgggtttagtcctggctctgcctcttccctgctctgtgatttagaacaaaatgtattgtagttttttggttttttgttttttcctggaattttgctcccaaattcacagattgtaatgatcggacatgataattctttagctgcacagccctctaaaaatctttgattccaagcaatgcatgatgtaaagctacaaaactaatttacattcgttgaatattgattctatcttggcagtaaagtaataaaccataatcccaaagagttaattttgaaaagtaaacttccattcaattcactgaagtagcccgggttcttggcagtcagataaatgaaagctgaaattgtttaaaaaaaaaaaaatccaccatccttgaaagttcctcatggtttattctcaagaaaaaaaggtatttctcaaatccacatatttcttctataaagaaaacaatttggatccaactgtatatgatcacagtgcctctgtcagaggtaaaaatgttaagggagacctttctaaatatgtcttacaaatattttagaaattaaaaggctggtaccatggcaatggagaaataaagaaaagcaatgatatttggattatccaagaaattcttgcattcattcatatataatctgaatggttttctctactgaactgaggtatgttaacatgaaatacctccatattctgcctccagaactttaggaaaatggactccaggattattgctgttctaaagaggatacacagggtgatgcctgttcttccaagagcccgcactggcagatggctggcagtgtgcgtgttgcctcatattttcagttctctcttttgctttccaatgctgaaatatggaaaacacagcattgtaaatgatcctcacataactgagggagtgatgcttctaacaatttacagatattcaagttcaaacaaccaggccctgggtatatcaaatggcatccagccactagaagttttggtaattatttcaggtagctgattttgattacagcataatgagatgacctgttctacatctcatcagattgtcctctataattttattaaaagttaatacttagtggggaaatgacttaagtgtcaacagtcccttgtcttttattacttttcagccttgtgtcaaactctagtttgacaagtttggccctgatgagtccaaattctggccactcctattcctctgcaaagctttatttaccagtgacatgactaggaccacagccagcctttggaggaaatattattacctgagttctaattgcaaaaccaatagttcaaagtagtaaggctgttagtaaattctttcacacttctgaacctcagtctcctcttcagtaaaatggggatactgaccatctaaaacttgcatggtttctgtaaggcttaaatgaaacagtgcacgtggaagatctagccccgtgtattaataaagttcatgg

SEQ ID NO: 53628 - DNA, 1729 bp, Bovine  19866881214965
  misc_feature (1)..(1): n is a, c, g, or t
nttggttggttttggtacagctaatcttgagttctggggtgcacttgttcccatttctttgcggtcaattctccgaattatggcagctcaagttctgggtatagtctagtcctgatgtagttaacttcttcacctgttttggtatctctaagacagctcacaggatatggctcagaaaattatctatagccctcgagaaagaggaagggtccttgactgtgcttactgactccattgttgttatttagtcttctctgactgtttttctttgtttcagtatctctcacttctcccttcacttttctttgactaaagctttccacaggcaaaaggcaggtagaggatgtggggtggggaggggggcaaggaccatatggtcctgctccatttcaaagtcaatcctatttcagttatttaatatgtttaaatcatcatattgtgaatcataaatcttgattttttttttttttactagtacaccctttgctttctggcctgcttctttcttttacattctctttttcttttccttccactattattattttgaaatttcccctacgcccaggaagctatttttatctccctattttttctgttttaactagctagactgacagtaaaaaagttgagattcatggtcatgaaaaatatttccatctgcctaagatttctcattcttggcttgtggctggtttttccagaaatggtaccaaaatcagggtctgggcgaaattttgatgcaaaaatttctcaaactttgtaaaaactaagaaaacaggaatctggagagttcaaaccagataaaggaaaacaatgtgggctaataacacgtggggaaattagcaagatggtgccccatactctcacgccctctcgccccacgtgccataaacagtgactttgcaaggctgtgtaacagctgagatcgctacggcagtgcacatgcgtgtcacagggtacttggccactggctatgtttgttctgtaagtaaatacaagcttcacctggaaaagcccggaagagttgtgtgcagttatgttgtgtggtgttatgtctgctgctacgggctgctgtgccagccaggagagaagacatgtgtctgcggttcctagggctccttgcattttcctccagcctcttagcttgcgcctgacctaccatgggttcaggcaacagtgcgcacagtcagacacaccaagacaattggcactatgcgcaggatcggcaatacagcacaatacccaaaaggaaacgaggccttttcaattctatccacagaattgtaaatgtctgacagtgtgtgtgtcagattcagtacatgatcatgtgaggtcctatgcatacaaagacagaagtagcactcacggcctcaccaggtttggatttactttccactgaccgcgaggtgggtaagttttgtctttgtgtcttcaacatgcaaaactgtactttgcttttccctattcacctagcgtcatccttactaactacacgagcttgactacctctgtgcatcattgcgatcttagtccaggctcctcatttaagattattctcaaggcagccaagctaattactgtgcactttaagtggctgagttaaaattaactgcagccaaatatttaccaacattgggtaaacagaatcttgctcatttatccccctcacatatatacattttttcctctcaccaataaaaggaagcacagtgtagctgaaaaagaa

SEQ ID NO: 53629 - DNA, 941 bp, Bovine  19866881281159
  misc_feature (1)..(1): n is a, c, g, or t
ntatcttattaattaaaaaactgaatatgtctttcagggattttttacctctgcatgtatgattaattcataccaaagtcatcaaaatacagccaagtgagggccatttgatgtcctggtgccctttaatgagagatttcaatctttttccctttaattgagaaattaaaaaaaaatctagtcataaatagaactcagcctctaaaaggaccttggctttgcactgaaacataaatgcttatgaaatcagggagatttcgagtacgttcttttctatcagtaattctgattagtctcatagatataattcagtgttgttaagattataaaattggttcattcatcttgagggtaagagaattaatgagatgatacctggtgaagcaatttcaattcagaggtagactctaaaagtgtgattcatatttgtcattattgctggttgctgtatttacttttataggtgtgatgaatatggttttaatttattatggttgcattgactgtatagccatactgaatcactaggacagatattgccatatgatccacatatctctgaaactccatctttttatagaccagagcagggttaaatccctggatttttttttttttttttgaaatatgcatgaaggattactctacaattaattttattagttacaattattgagagctatgtatcagctgctatgctaagtgctttaaaaacacttttcttttactattaaaacagccctgtaagctaagtattatacccagtggactgttagtggcaacacaggaatttaagtctgggacttttgattttctttgtcatgagctataccaggtaagggttaaggagattaaaatcataacgcttccactcttgcaagcaagatagtaaatttattttaaacttgttttatttctacattaattatcttagaaaccta

SEQ ID NO: 53630 - DNA, 710 bp, Bovine  19866881283497
  misc_feature (1)..(1): n is a, c, g, or t
ntagagagccctaaatatctaaaaatatgatactgttatggtatattctccagtgaaactttctgaacatcagttacttactattaaaatattgttatgcttttctacccttgtgttctcaactatatcattgaactctcaattataaactgttgttgccttggtgcactttattctgcaaaatagactgtaagctttctatggacaaagtcagaaattgacattccactgttttcccccactcgactagtaccccattaaatccacagcaaaattttcattttgtaatttattctttgagcagatgtaatggaatatctttattttctttcataaatataaatattatccaaaatatctctacttaggataaactaagaactttattcctgttgttaacaaagggaaagttgctttggtataagcatttttcttaagtttctacaatctccatttatttcactgagacaaaatagtcacagataaaagctattttttttcccccaaaatgtacctaatgattgcatacacaaaaatattgctgaatgtattagtttttttttgtgaaaaagttcattagtgacaattttattttgtaatttacctagaagtctatctatggatactgcaataagaaggctttaatactcttcaaatttgcttccctaattatggtaaatatcattagctgtgatttcacatgttcaggg

SEQ ID NO: 53631 - DNA, 794 bp, Bovine  19866881356173
  misc_feature (1)..(1): n is a, c, g, or t
nagggtgaataaagatggaggggtatatgtatacttatggctgattcacattgttgtatggcagaaatcaacaaaatattgtaaagcaattatcctccgatcaaaaattttttaaaaaatgagaaaaaaaaggaaagaaaatcatgggttgggcaggagcagggcagtaaggggtatgtgtaggggagaagagttgtagactagaaatgcatagataaccacatcaggaacctggagttcccttctgtgaagatttgtaactttatattaacctgttagtgaaaaaagggccagtatataaaaaagaaatcaaagtcctagggggttcctttttgacacactattgtattatcttcaactagcatttcttagtggctcagtcggtaaaaaaatctgcctgcaatgcgggagacctgggttcagtcctaggtagggaagatcccctggaggagggcctggcaactcactccagtgttcttgcctggagaatcccatggacagagaagcttgatggactacagtccacggggttgcaaagagtcagacatgtctgatcgactaagcacacaaaacattttaagtattctatatgtcccttccattataattaaccccaaactttttaaaaataagggtgattggaaggaagttaaatactagagaactttctgaggttaattgccaattacagagaatgctcttggaaaaaaaagttcaaaaagcactctgcttctcatttatggagctgtttgaacacaactcaggcaggtcaggatctgttacctaaatttagg

SEQ ID NO: 53632 - DNA, 935 bp, Bovine  19866881389678
  misc_feature (1)..(1): n is a, c, g, or t
ntagattattgaaaaaattcaagaaatagcttagtttttcagataggacacaagatctcattaccagcataagttgggatcagcaatgcattcactctatttttgttgcccagtggtaacatgaattctaagatggtcaattccttttatataaccatgaagtcaaggcaaatgagacagagtatgaaaaagaagaagaagaagaagaaaaaaaaaaaacccacacaatgaatttggaagatagtgtgctatacaaatccaagcaagcagtgctctgaagaacacaatcttaagcacttcaaatgcagtaactagattgttgatacaaagaaaactctcttctcccacctgctctttcttcctatgctctttccaggtgttgctgtataatttttctcataaccaggcaattacacccagtgaattgtgtggttagtcagctaaccatctgctttccaagagcaatcatgtgctgtgttcacaattttcttgattcaaagcataaagaggatgtagaaatctcatgtgcaacatttgaggcttctttattttcaaataatgaactataagaacaaagaatattggaccagctttccttgacttgcctcaaatgtatttaggacattgcagaccatagtttaagaagcaaggagaggagcaataaaagtcccttaatatataaacataaataaatatatatgactattttaatttttccttgattgcattttctctcaacacccaaaactatgaataggctgtaaatgtatgcctccaaacacccagacaaaagcagcaatcttaattagccaaattaaaacagtaagacacatccgattatccctttttagtctgaaccagcttctaaagtgacaactgatggaaaataattaaaacaagacagacggaaaaagaggagaaataatgtatttaga

SEQ ID NO: 53633 - DNA, 1560 bp, Bovine  19866881402356
  misc_feature (1)..(1): n is a, c, g, or t
nacttgtcacatttctaaacatgaaagttacacacagattcactgtgtttcaaggatgtctccctaaaactatgagttttccttgcacattagcaagtgaggccattgttcctataatgttcatagcatctcttatgacgttggaaattacacaatctatccatttatcttcctcaaacacacactcataagcaccatgagcaaactatctttttagataaatataagacataattttttttccaatacctttctcaatgaagcctatgagaagacataacttaaaatatacaagcaaagcaccagctagcaaaataacctcctaatttactactaatttaaagagtgcattgaaagctgttatcagagatagtttaagagaagagctgccaagcctggagaaacaggaagctagagatataattggcactcaacactctgaaatgcttctcaaagaagagaaaatcatatggttggaaatcagtaattttgtgaacattaagttccaaaatattttgcatgaactcaccgagggatgatcattacagtaaggaacactcagctagtatgaacaatgcccagtgagtagctcaggtttgccttcactggactgcagtaacaagctacacctatgtgttcagacactaagcagagaggatttgggtaggatccctgaggttatctgaatgcgttcagtgaagaaagaattgagcttactcaagctgtagtctagcctactagcaaagacttaagagtcaatattgaatctttttttttttttttcctattttgaaaaatattagcatctatatccctaaatgtctgtgactggtccagagtttattcatatggaacaagcactgacttttgaaatatggtttcactttcttatgtgaacaagaacacagacttctctgaaatacggtctcttcatcatcagaatagtgctctagtccaataaccctgaatgcaaaggtatgagttaatacataaaagtaacagcatgaggcatagtaagagtggttcattgaacaaaaccaatttgtatttggatattggggaaagttgtgcttcctgagaaagctgtgcatcacctctaacatactttgtctctaacatattttttcaatgtcatctgattctgggggacctattttacatctcccagttgtagataactggtatcactggaaagttattgagtatgaatccagcgtggtagaagaacaacttttccctgctcccattgaaaagatggttttgacattttaagttgaaaccagttaactcagcaggcctgaggtgcccaaatccttcatgttccaaacaaagactggctcttggtcagttccagggagataacctttgggctcatagaatattcttcctgataaaaatgttttgtgtactttttaaaaatgctttgggccactctgtactaggtaactttatcctaatgacgctatttatggtgaaagcctttttatgttgttctgggtggtgggctagagtctgagtcacggagcatcagttacaggacagtacacgtttacagacgac

SEQ ID NO: 53634 - DNA, 698 bp, Bovine  19866881560382
  misc_feature (1)..(1): n is a, c, g, or t
ntgaaatggccaaatgcagaagtgaaaagtgttgtgctgtagtttcagtgatcagatgtttctcctattttttgttgtctggaatcctctcttaagccatgaagattaatagccctacttgacaggtggatcatttaaagtgttaagcatcagtgataagctaaccatctgatggttggaacaagctagtagggaaaaaagcagtctctgtcacagaccagtggcccagtagatatggagatcatctgattcagcagtgttagtttatccacatgatcactaaagcttcctcaaggaagaaaaaaagcaaaagacagccatcagactgcatgttccaagtatttgccacctatttagagatataaagacaagtgaaatagctcaaataattattgttgcatggagaaaatactgactctataaagttcctgtaaaaaactactcacagaaatagacttgggaaggttttattttctttacttccccctctgccattctaaaagaactaagctctggttcttcaagaacagaggttcttaatatgcaacctcaggaccagcagcaacagcattacctgagaatctgttaaaaatacatgctatcagaacccaccccaagtctgctgaattggagactcgggcggggggggtatgcttggcaatctgcttttgcagccctccaagtgattctgaaataca

SEQ ID NO: 53635 - DNA, 1110 bp, Bovine  19866881712231
  misc_feature (1)..(1): n is a, c, g, or t
ntctctaagagggactcggaactgcatgtagctgtatatgggatgcatctatggaaggaggaaaattcaggggtctcaaatgtcaccatcttggtgacatcccatggtcttaggaattcaacatatgaattttggaaagatatcaacatacagtccatttccaacacctcctctcagtgctaagtccgtcttactgttactgtccttgaagccattcaaaatgattgttttatttggaaagcatattggtgcccacatgttcgtaataggaaaagcatgtacttggatagaaccttggttctgtttttaaaagtccagtactaattacaacccccatactggcttgtggttattcccttcctgacttcctggctccatcagtttatcatgttcatatacatcattattttgtgcataaaaatcaatgaggcttgaaagggtgactggtgggggtttctctctttatgtactctgctcctttccaggcatggcagcttggatatacagaatgtgcccacagggcattttattagcaaatgttgtcactttattctctttccacttccccaaaagcgcttggaaaatttcagctggagctgtgtgtacagctgccatccccactgccctgccatgtctttctcagatgttccatttggcttagcaacatttgtcatagagccacttagctgtgctgcagtctctgagatttagtattacaaagtatcatggtgccagttccacaagaattattgaggctgctacgcggatgaattacatgtaggtcatgtcctccaaaggctctaaccttccattagaaaagatgtacgcaaacgaaattaacaagggaataataaaaaagaatgcccaaggataggacaggcaagaatcgtatagcaatgagtcagcttcggtattcctcattggatcactgggctgacacagtgcaaaatctactgtaaaatcatagcctctttggatttagtttcttctccagatatactgagaagaacgctgatagggactccccatcatagatatctgatatctgatacatagatatcagagttggaggtgccttcagaattacacaatccaattctattttggaaa

SEQ ID NO: 53636 - DNA, 1281 bp, Bovine  19866880409984
  misc_feature (1)..(1): n is a, c, g, or t
ntagagtccagctcagggtgaggatgcctgcggtgggattatagtattgtgtgataagttcttctgtacaacttgatgtttgaccttctgcagatatgaatttaatagaacattttaatatacatatctttattcagcacctgtcatatcatccgacgtgctagaagcttggtggactggagagactcagtctcctcttaattccttattgtctccttggagagagaagatgctaaaccaaccatcaaacaaaataatcagtatgattacaaattgtgatgaatgctgtaagtttaatttcatagcacgcagaaagttagcactacttgtataaacttaagtctttaatagagatactgcactgatttttaaaatgtaattatttgagaataggaacagttcttttcttgagtagcttgttgagctcaaacggcatgctgcaaatcagatctacaaacacaacagctgtctcatttgttcccttgttactcattttaatgaatcacttgaacagacttcaaaacgttaaattagatatataagcatgcttgaagaattatatcataatatcatatttcaaatttagtagtgatatcattgtctaaacatagtaagttttaagaaagtcagttttttagctactttgccctctataaataatgtggtagtaaaacagcagataaaaattaaccgaagaatccataacatccaagtatagaaagctggggaagttcccccacatcccttcttcctgacataggagccttgatgcttggagtaaatcttttgagggtcctcaaaggtggaaatttgctgttccttgcctttgtagtagaggtctgagcaacaagaaagtcgggaaggcattaccagcacagagttttcctctgtgttcttgatacttcctgttgccgagggtttgtccaaagggaaaagataaatgaacagaggaagatgtatttcagctgtcttctcattcctctcgcctttcataccattcacagcagtctgagaacagaaaaaaaaaaaaaaagttacatcttgtgttcctctaccctgagcatttgcttattaaaataaaccttgactgctctcatctcccctgatttgggcctctctgtttcctccatgaaaaagctggtgagggtgtttaaagctgataactgtgtcacatgtaagatatagtcataaatcactggaaatgaactgtttttagaacctgccagaactatcatactaatgcacttctacaaagggcggtaaatatgataattaagggaa

SEQ ID NO: 53637 - DNA, 1545 bp, Bovine  19866880480816
  misc_feature (1)..(1): n is a, c, g, or t
ntagggaggcaaagctggggatgttccagttttgcaaatgtggtggggaaatggccatggagtgccctggccagaacattccagctttgttggctgacccaggggccgtcctgcaaagacatcctaagcaaatatttttgcagttaatgggcacaattattgaaatttcacacagcacttcaattttgctctgtagttcaatttcccttccacgttcaatattcaaccttttaaaagacacatttccagagctaaattggcattagcaagctttgaaaagttctaccaaatgagtggaaacaggctgtgaatttcttctcttttccatttctttttctccagatccttctgtcctagtttaagcaatgtgtgaggtcaggaaaataggtggggtttggaagcaggaagagggaagggggttcatatatactgtcagaaatcagaaatatctttttttttggataaaatctcatcagggaggagccacaaattttacatacgagttgacctatctttagtatatttatcaaattatcttcatttatactgagattatttctaccaaaattatttccaccaagaaaaatttgaggggattataactataatcatatacaatgaacaggataataagatcagaaaggaaatttaaaagtcatatatgcaggcagagggaagaaacctgtaatggaccattaatttatattcaaatctttacagtaaccaaagcaaaagaagaaatataagcatgtaattgttgagtgaggtcttgcagtttacccagctctgggtttagacacagaaaagcactcaagtaatgtataataatgtcaaaacaatagtacctttggtgtcttcactgtggagaaaatttagtgatgattagctttattctgcggagaaggcaattgcaccccactccagtactcttgcctggagaatcccatggacggaggagcctggaaggctgcagtccatggggtcgctgagggtcggccacgattgagcgacttcactttcacgcattggagaaggaaatggcaatccactccaatgttcttgcctggagaatcccagggacagggggagcctggtgggctgccgtctatggggtctcacagagtcggacacaactgaagtgacttagcagcagcagcagctttattctgacgatagttaactgtgattatcaaaacatgcattaagcaaaagtcaggtcccgtggttaggactccatacttctactgaagggggcacggaattgatccctgatcagggaactaaggtcacacatgctgcagggtgtggcccaaattttattaatatgtcacgtctagggagttatagactttttgtaaaacatatctagggatgtgcaaaggtgctgccaccatacgtaactgaggccaaagtcccaggtgtggtgtctgaggccccaccataggcaactgtgaaggctttagctggcaggctcttgggggaacatctgccctctgtgtacagtctggagggagttacagtcagactcacgtccccacaggccgg

SEQ ID NO: 53638 - DNA, 1199 bp, Bovine  19866880660225
  misc_feature (1)..(1): n is a, c, g, or t
ncctttcattttaccagactctatgtgcccatcactcctgtgcttgattgcctcatggtcacaaaatagctgccttaagaccaggctctccagttaaaggcaggaagcagagggtaaggatggcagcagatggtggcaaaggcagagagaaacactatttgttctcattttctcaaagagcaataaatactttacagaagaccctcagctgacttcctactatgtctcgttagaactgagtttatgattgtaactgaatagaactgggttgtaggtttatgatcatctctagactggaacctcatgtttcatgcactcaaggaatcatcagctgatgctggtggggaactgtagtgtgtgaagtggatacgaatggaaactatgcctcttgatggacaagcagagtggctgcctcacacaggaaccaggagtttgtgaacctcactctcttctaacaataggttcccattggcaggaaactctaatgtctttttcctccttgtctcaaatgccagaggtctaagagaaagactcatcggctctacttggcctatcaggtagaatctcaaagtgaaggcacagctctggtgtctatgctggtaacatcagtcctcaaaaagtgggaactggagacatccctggtggcccagtgattaagatgcctcacttccaatgcacagggccagggttcaatccctggtcggggaactagatctcacatgctgcaactaagagcccacatgccataaactgagacccaacacagccaaataaataaataaaaattttttaaatgggaatggcctcagcctggagataaacacaatggacatcctttatgtctatgttaaatgaaatactatcaaaaggtacctactgacttcttaacttgtagaaggaattgtgcagaaccctatggggatacaatctgtaagctttggtccttgccccaaaagagactgtgctctatttcaggagaagtcagggtaagtagcacaacacggagaagatgagagctgatgctaaggtaaagacattaaatgtttcaaccccaacaagttctgctgaagataatcagatagaaattacttcaggaaaaggaaggaaaggcctggagatgtttaactaaaccaagttggaccataaagaaggctgaggacaaaaaattgatgctttcgaactgtggtgcggagaagact

SEQ ID NO: 53639 - DNA, 719 bp, Bovine  19866880740186
  misc_feature (1)..(1): n is a, c, g, or t
ncctccctcagaaactccattccttagcatgaaggccccagtgactgttcttcctttttgtgggggagccagattaagcttagatgtgtcactctcaaggttcagagtctcctatgtcagacaaactacattttgcaaattaccctaacctattctttcagaagttttatttcaccctcccagagaatcaggcacaaaaacaaatcaaacacccccccaccatggtacctcccaaggttttttttctctttaaacctatagtttccaaaagtactttccaccatgcagattaagagaggctggggttaattctacaacatagtggatggttgctgggctaatgattgatttttttcacctcaaatgacattcaattaagaaacatgtataaattatcaactgtttccagcttgaacggtaattcataaagttgtagggatgagaacttataaaatattttgagcctggaagatgtgttccaggctggaatgtctatgggaaacagcctctccatgaagatttcctgctccaaaatgccttgattaattaccgtaaacagctttgagggaaaagggcgcagcatctcatgtctggcaggacattggtagggttcgttggaaactcgaatgcaagccaaacgcagcaaagccaggccccttccattcagggctggtccggctccagggaaacgccttgggcttgggacagctctggaaagg

SEQ ID NO: 53640 - DNA, 1868 bp, Bovine  19866880752660
  misc_feature (1)..(1): n is a, c, g, or t
natgactaaggtaatgtgaaatacttttgaattactagtcctgattccgttttggatttaatgacagttaaatgcggctctaaaccggcgacccctgctccttttgccatgccatactctccttaccttttctgtctggtttgaggtttcgatccacagggggtggttcacagtctgcaacaggaactggccttctgggaggggtcttggggctggacctgaagcccatatgagcgggaggaggcacttgcattccaaatgaagaaaagtcaaatgtccctggagtcattggaacataatttgcctcctgaattggttctgtgaaactgctggaatgttgtcgtggtggagagttgggattcatgggcacgtaattttcatccagttcttcacttgatacacttcccgctgtcaatatgtttttgattttctaaaacacacaggcatttcttttaataagcaagaactgttgtcaaacgggaaaacatatttgtaagtcatgcctattcatgtggatctgaagggacttttatttcaggatctcatttagtctccaggccctacgtgtaaaggtttggacaatgaaatacaattgatgatgccaaggtcaattatacttacaaaatggttgtggaagccttcgagtgaactagatctatcacttggaaatgttcgtggagtatcatagcagtcttgagaactagcatctgaaacagagaacaaactatcaattttctccccatctctgccagttctcagggtaagcaggcatgaccttctctctctcttttcaggtattcatgcttcacacacataaattttaaagaggatgctcacaaagaaaaatatcttgaattgaaacataaaataactagaaaatgcagacacttacaggctaaccagtactggtatttgattatagcactgagacaggttatctaaagatggaaaaagaaatacttctacttcctcatcttttgtacccttgggtccaactgacacctcactaacttataactacctcaagatacattacagccacttcgaggactaagttagaaattggtactgaatggctagacaagtattggtacaagcaccattcacaacacatcagatcttcatcttctttaaaacaactggataactctatcatgaaatccaaaagtgtcagcagcacatagtttttagggtctgtgccttttaaacttttttttttttttttaatttccagatctctaagaacctcagaatctaactgagattcaacggtacagaaattggtaaaatgactaggggtaaggggagggaagattattaacagctttaaaaataaataaaaccaaataaaaagcagaatgacttgattggaactgagtaccaactggcagacacagtgtaaaaactgttatctgggaaggaaaccaacagagccctgagtaccacctggtagacacagtgtaaaaactgttgataagggaaggaaggaaacaaagccaaacagatgtaacacagcagtggccgtaccaggacacaaatacaggaaagggcatgacccggcaaggctttgtggctggtccatttcctgttcctctgccccacgggtctgctcacccaggatacagagaaagggagaaagagggctgcaggcttcctgaagcctaaaatattactaaggccatacttcttcagggatgtaaaactcctcctcttcttcccttacagcaaaacacgcatagaggcacatgccgaacacacaaacatactttccaggatttactgagactctgacacctttggtatctcagtagatacctgcagcgctgaaggaaaaagggactgtcttttaacatcacactttgcttcca

SEQ ID NO: 53641 - DNA, 1268 bp, Bovine  19866881004731
  misc_feature (1)..(1): n is a, c, g, or t
naactaggtttatttttttctgaattcttctaagaattaaaaacaaataatcaaaccattataatttgaaccatcagattttatttcaggaaaatctaatacttttcaaaagttataattttaatgttattccacaaaattacttcttaacattaaaaaaaaaaaatttcccatccaaagattcccatatttgaattacattactgcaaggcacatttggaacgcacctccctcacaacacacagacaatatacctcctgaaacaggattttaaaatactgttaactttgctaagaaagtatattccctgtgtaacatttttaacttcagtatattaaacactaagtaatacaataaacttcacaattcttaggtaaaaatgttgctcctggaggataatgcacctttttaaaaattaattcagtacatatgtataaagataattctttcttaaacctttgtacttgaaatacagatatggtgatgctaaaaacagccttaaacaaacctgaaaatactgcagaatgatagattttatgttattgccttcatgtgaaattgtatcatttcctctagtatctccaaagatgaatttaacaatggctaactactatttccttcatctctaacatcagttcttttataagagattacaaattttatatatatatatatatatatatatatatataagccaggacaattttaatggttcttccaaatttaatgcctcttatttagggcccaaatacatatattccctatgaaaatttttggtcaagtatgtttaaccatgacagcaaatagcatttttaagatgttgatatttttcacatcatgcattttttgttaataaatatattgtcaagaaagtaaaaacaagcgctgtgttttcttaattataagagttgagtgaaaagaagaataaagatagtaatgacatttgttgcagtctgatacttcaacagtcatggtgtttgtgttttgcagtcagggcattgtgaaacatcacaatatttcttatcccaaatatcaagtcaacagaatactactttcattgcttatgtcttcaagaggtgaattattaaaattttttagctatctcaattatattcacctgtgcatggttatagactacaaggcagcatatattaatatcagaacacatattcagagcatttctgtaaagcaatcattgcaggcagagtctttactgtctgagccaccaggaaagcccagtttatcaatactttccaattacagccagg

SEQ ID NO: 53642 - DNA, 806 bp, Bovine  19866881106801
  misc_feature (1)..(1): n is a, c, g, or t
ntgccctgttagagcctctccctctcacctgtacccttttaggcagttctctctgagcggacagaccacggaatgctaactcaagatctcagtttaacagcaacccgcttacccgccatgagtcactcttagtttgaaatatcctaaaaagaggttcttatttctgaaggtcaggcgggttgcagcatgcttgatttttcagtatctctggttaataatgattttagagagtagaagaggaaatggttcttatatgagtgtagcataaaactatatggcctcgtgcaaatgatctaacttcatatgaatcctggcttatagacagaagctttctttgtataactagattcaccactctgtccttctctgaaatactgagagaataatctcatatatcacatacattttttaaaaaatcagtattcagaggcaggaaaattaccaaacagtccacattcttccaattctgatttttttttttacatcattttttggtgttttaaatttgcttttattgtttgaggtcaaaaatacattttttctgtcctttttattttttgaattgaaacctacatccatgaaattatcatctttatagtggttgactcctggagtttataatcagaagattgtgagacctttggagaacaaaatagaaaataaaattaagtttaggaaataaatttttcttggacattgcaaaaatagcaaaaaaaaaaaaaaagtggatgaataactggcaacacaaactttttcctgtaagttcctttttcccaaactcttgccgtcatactaaaaaaagtttt

SEQ ID NO: 53643 - DNA, 755 bp, Bovine  19866881384082
  misc_feature (1)..(1): n is a, c, g, or t
nttcctgagtaaggaaaggaagggaaggaagagagtgaggaggttggggggaaagaaaggaaggaggaaaggtcagccagctgagggtggtgaaaagactgcagtacactctgggttcccacagtggaaacatgagcactttgacatagaactggttagagtaaagtaaacgcaaagaagaacatcttgatgaagagatggttagagcagaggcaggaaggatttaacaaaagctgatgacggtcaagtttaggttcaaagaaatagaacatatacattacacacagggagagagagagacagacagaaatttgaaaacaaaactatagtcaagcagaactattttaaggcccttttacaaaccaaccatgtctcaactaatcaaaaattagggcaaaccagacatgtactataacgacaatgggaaaaaatatctgaaatgaactatcccaggaaatctggactgtgtattaataatatgctttcagatccaataaccagaaaaaccagaacttctggcaagcagttaatcctctgtcacctctcctctccgtctctaagccattcagaaaactcaattcaggaatgtacatttcttttttccaatcgatacctacatacacaatagcttccttgatttcgtaacatctttgagtttcttggcgatggttagggtaccttctcatattctaacctttcaaaaaattccctttcacttttgtcatcgagaagaatttgatcaaaatcactgcagg

SEQ ID NO: 53644 - DNA, 2791 bp, Bovine  19866881595749
  misc_feature (1)..(1): n is a, c, g, or t
nttccctctgtaaagactcatttacaaccttattcttcaggtattctcatggttagttgctggtagtgtatgttgaagtcatcttttttgttgggcaatttttaaagcatctatcaatatttaaaatatgtatgcccttgactcacattctgtacttaggaatttatccaaaaggaatgtttgtacagatgaataaggatacatgtataaggacagtgattgtaatggtatttgtaatagctccatattatcaacagtataaaggtacattcagaagttgcttgttgagtcttagcatatccgtaatatgtaaaactctgaagctgagtagcatgaagtagacctcaaagtacccatgagataaaatattcatgaactattaagtggaatgttacctaattgtattttgtttaaaatgttttatatatgcatatacattttatttctttaatagatacatagacatgcatttatacatgttagatttgtatatgcataggaaaatgtcttaaaggtaaaaataatagtaaaagtaattatgtatactttaggttaagttttctttaagaaacttaaatttttttaaatttttttttttttaatggggttttgggagatgggaaaaggagcatccttccctttttactttgtaaatttctttatgtgttacattttgtgatgagtgcatatagcttttataatgaaaaatgtaccaaagattttaaaccttcatcatatcaaagagaaggcaatggcaccccactccagcactcttgcctggaaaatcccttggatggaagagcctggtaggctgcagtccatggggtcgctaagagtcggacacgactgagtgacttcactttcacttttcactttcatgcattggagaaggaaatggcaacccactccagtgttcttgcctggagaatcccagggacagaggaggctggtgggctgctgtctatggggtcacacagagtcggacatgactgaagcgacttagcagcagcagcagcagcataccaaagtaaattgtatcatatgccaaaattatctccagagaatttagagataaatgtaaaaatctaatcttttaaggaaaatagaaataaatatcagttgaaagtaaaggaaaaggcagagatgtttttacaaattttagacttccatgtgtagaccactagcccccctaatgaaaatctctgtgtttatttaaatatagttttcagtaattggttaagaaattttgctaaagcaaattaagcaatagttttttttaagaactttaaaaacaagatgagaaagtgctgatggcttgttgcatcataagaacatctttgctaatgttttaaaaagtcaagaaggcggcaaggaggttcttggcagtgttctctgattagaacatcataaagcagagggacttcccagatggtccaatgattaagattctgcaggggaaacaggttggatccctggtcagggaactaagatcccacatgcccagtggtgtgcccaaaaaagaaaaataaaaaagaaagaaaggtatagaagaggggcaatgtcaggaagactggggctagggggaaaggcagaaggaaatatctggaatgcagggtattgtgcagtcaagtagtttctcccttttttctatccagccacatgcaagcacctcaagggagacaaaaatggaacagccatttaaaaggaacatctggtagaccagtcactttctcaggcctcctggcctgcatttcaggataagacaaagaggctgtggtcaggtggaaagtgctgtggcttttgtcaccaccctgacactgagaaggcctaggagggcctaaagtggaaagaagactcagggccagttagggagaaaccaagcctgatgaccgtaagtatatttcagccaaccagtaataacaaggaaggaaaactgagaaaagatcttggttgcccacgttctttaactgttatactgatgttgcattcaatataaatttggcatttggaaataacagttaatcattaccctagatttttttttccctaaatgaagagctctattttgttatggtgatggtttttagaagcatgattgggtggaagaatgtgctaagatcttcatcccagtaagccacacctgtgaatgtcctcatcttgaaaacaacaaggtcacaatctaactgtaagtcctattacagatggtctggcttagggcgaagcaaaggacgttccctctgatttctaattctaatttcctcttaaactgtgctaggctgcttgaatgaagcagtcaacaccccaactgttcttttgatggttttttttttaatttgctctactggattttcatagctgcatgcaggctttctctagttgtggcaagcagaggcgactctctagttgtgctgtgcaggcctctcattgtggcggcttctcttactgtggagcgcgggatctcgggtgtgcgggcttcagtagtcgtggctcccagcctctagagcacaggctgcatagctgtgcacggacttagctgccccgcggcatgtgggatcttcccagaggagctgaacccgtgtctcctgcattggcaggtggattctttaccactgagccaccagggaagccccacccaaactgttctaatcatatttatattttgggcacggcaatcagaagatgtgttgattaatctccccctcctatttcttccagttctcctgggtcccatgtacacatataatcaggactctccctgcagtgagggagcaggagatgaaatggttaagta

SEQ ID NO: 53645 - DNA, 1266 bp, Bovine  19866880123573
  misc_feature (1)..(1): n is a, c, g, or t
nagacacgtgtaccccaatgttcattgcagcactgtttatcatagccaggacatggaagcaacctagatgtccatcagcagatgaatggataagaaagctgtggtacatatacacaatggagtattactcagccattaaaaagaatacatttgaatcagttctaatgaggtggatgaaactggagcctattatacagagtgaagtgagccagaaagaaaaacaccaatacaaatagtatactaacacatatatatggaatttagaaagatggtaacaataaccctgtatacgaggcagcaaaagagacactgatgtatagaacagttttttggacactgtgggagagggagagggtgggatgatttgggagaatggcattgaaacatgtataatatcatatacgaaatgagtcgccagtccaggctcgatgcacgatactggatgcttggggctggtgcactgggatgacccagagggatggtatggggagggaggagggaggagggttcacgatggggaacacatgtatacctgtggcggattcatgttgatatatggcaaaaccaatacaatattgtaaagttaaaaaataaaaaaaaaagtccatggacagcaacgaagagtagctgccgctctgtgcagctaaagagagcccatgcacaacaatgaacacccagctcaaccaaagataaataaattttaaaaacataaagtacatattctcagataaaattttaaaaagatcaagacacttccacttctgcttaggatgtagaaagtcacaaaataccatctctcttatcctaaaaatgagtaaagactagattccataaaactgtatcttttcatgaacccatttgaaaacaggcttcaagaaaaccaagtgatctgaatttcaaagcatggcaaacctctgtaagatgagaacaggtacttcaaaagtatcaaggtaatgaaaaacaaggaaagactgtcaaagcgtcacagacggaaacctaacaacactgctgatgaaagtacaaattaaggcacagtgccaagtggggaaaaaacctcagaggaaacactggggagttacagtagaacagctagagtagagatatccccttcggcctctagactctgaaaatggagaagggattggtcctcaccgtccatgaagtctgtaataggccaactgaagtgccagctgaataaatgtatcagggtgaagctgcttctccttggttagctttttgccaaaagacgtaaaggcatataccaca

SEQ ID NO: 53646 - DNA, 920 bp, Bovine  19866881272467
  misc_feature (1)..(1): n is a, c, g, or t
naggactagatggttgcgtggcatcatagactcgatagacatgagtatgagcaaattctgggagatagtaaacgacagggaagcctggcatgctgcagtccatggggccacaagagttggacacgactgagcgactaaacaataacaatcttgggtttattgtaatgaaagagagcagatgttagcacaggcataaatccctgtctcatggttttgaatcaggaggctgaaggctgcagctcacaggtctgaaacttaaaatacagctccctctcttcttttgctcatccaggccactgggaccaggttggctctgattgcacagaatacagctaaccttggaactgggattatcatagcattcatctacggttggcaattaacccttttgctgttatcggttgttccaattattgctgtatcaggaattgttgaaatgaaattgctggctggaaatgccaaaagagataaaaaggaactggaaactgctggaaaggtgggtcaaataaggcttcagctgatataagtatggttgttaagacatgggttttatttgattgatttgttacaacatgcgtgttttgataatgttagtgctctccacaactaatggtggtcaacactgaagatgaaatatcttactgtgtcaatgcctagaacttgaaaatgggataattaatgtaaaacttttagcgtatagaaagtgctatattcagaaaatttctgagttttcagagttcgttttacgttttactttgtacactgatgccactgttaggacaaaggttacccctgttttacagatgaagagtccttaaagaagagaaatataagtgtattgttctaagcagacagtcctgttcttggttgtgatttctgtagttaagctaggcagccaccagagggcagtaatgctcaga

SEQ ID NO: 53647 - DNA, 784 bp, Bovine  19866881812025
  misc_feature (1)..(1): n is a, c, g, or t
ntgtaagtaataataattgaggtgagtttgtggtacttgatgtctaaatactttaatgcatattttttccttttacagtaaagccatttgcaaatgaggaagaatataagaatactgaagcaattgtctggaaatttcaaaatggcattggagaaaaattgcagcagaaattacttcaaagagcaaaaggaagaagaaactgggtatttatgttattgtatttattagaatattgatacttaatgaaaagtaaatgtgtagctttcattttaaaattattactgtagaatatactgtagaatactattactgtagaaatatactatagaatcctttatcacggagaaggcagtggcaccccactcaagcactcttgcctggaaaatcccatggatggaggagcctggtgggctgcagtccatggggtcgctaggagttggacacaactgagcgacttcaccttcacttttcactttcatgcattggaaaaggaaatggcaacccactccagtgttcttgcctggagaatcccagggacgggggagcctggtggtctgccgtctctggggtcgcacagagtcggacacgactgaatcgacttagcagcagcagcagcagcagcagcagcatcttttatcatccaaaagaatgaatgaattgtttaactctggggagttttaagtattgtgtgtgggttcctcttattatgtaggggaacttggtaaaatgcagaattcctgggaccagtattctattcagtatctcggaaagggtgcccagatat

SEQ ID NO: 53648 - DNA, 1192 bp, Bovine  19866880393220
  misc_feature (1)..(1): n is a, c, g, or t
nattctttccaggagcagaaaaaaatggattttccatgttataagaccttcctttctaagatagtagttgagggtttgtttctactataaattacttttcattatgaaaaagttcagacatgaaaaaattaaaaaacaggacactgaacatccaatacattactccatccagatctaatcattgctactatttccagattttgccatttttgcttcatctatgttttcggctggaccatttgaaagtcatggcacttttgccttgagcatcatcttcaaaaataaggacattcttgtacatatcacaatgcaatttccacctctaacctattaacaagattccttaaaagcatcgaacgcctaattcgctttcaaatttctccactttcccccaaactgttgctacttgaaagagcaattttattgactgatttatttgctcagtggaacccatatttaagatggcactctattgttaggaaacattttcatttgcttgcatgcttttcccagcgcctctccttgtttgaagtggagataaacaccagtagccaaatgctttctattatattacctgttggactaaaccagttccattaaggcgggtctctatttcacacaactatttaatggcatgagatgtatgaactcatttgttaaattggggtctgtgaacaaaaacaaatggaggggaagagcaacagagacaatgagtaatggaaacagtttccagaccatagaagccggggcttttgtggaaaatatatgcagcccagagcagaggctttccagggtccctgtgtctgttacctagcaacaagcccattacaccgggcacaccggagtccagttaacagggctcagggtgagcacgtgggaatgaggaccacatttctccttttctgctctgttaataactcagctttctctgacaggggtgagtgtctgaagagccttccctgtgtaatgctttccccgagctaaatcgctaaaggaagaaaatggttttagcttaatttactgtgcacgtgtcgatccggatttgtccatatatctgtctgataagagttaaatacaccatgtgaaacagaaagtcattgaaactcaaattagtttttgatccatgatataaggcttcaagacccatccaaattcattcctcacagcaaatgaactctgggtcacagattta

SEQ ID NO: 53649 - DNA, 1093 bp, Bovine  19866880470068
  misc_feature (1)..(1): n is a, c, g, or t
ncaacctgcctggcccacggatgagatggagaagacggaagcagatggggtccatctgttacccataaacacttcttcattagtgtcatcctcagatttatgtgtgttatgtttttgagaaagactctgacattgattatatttaatctatatttttaagcaatcaaaccactggccatttttcatagatgtggatcaagatgtacacgttgtacagatggacttttttttcttttttgtcaatatgcctcctggatgtaaatcatgtgatgtcagttacatccaaatccctctaacagagtggtaagtgcacacagattattcacctagctctggatataagaagcccacacagcggagtagaattaatctgcagtagaagtgaagaaacaggactatttccaggtatgccatctaccttcgtgactctcaacaaccctgcacctcaaactcataaaaaagtacagagccaagggatgcaacgtgaaactctgaaaaatgcattatggtagaattcaaaagatgtaatgcaaattactgtgtaatgtaagtataaatgatcacaattcacaatgatgttgtttttgttcagtcgctaagtcctgtccaactttttgagactccatggactgcagcatgccagactcctctgtccttcactatctcccagagtctgttcaaactcatgttcattgagctggtgatgctatccaatcatctcatcctttgttgtcctcttctcctcctgccttcaatctttcccagcatcagggtcttttccaaagaatcggctcttcacattaggtggccaaagtattcgagattcaccttcagcatcagtacttccaatgaatattcagagttgatttcctttagaattcgctggtttaatctccctgttgtccagggaactctcaaataaaggatgttccccaaataaaggatgtcctattcatttctaaatcttgacttactactgggaagattgaagtgacagaaaaatttaaaacaatctttcattcaattttctgcctgaatcttagaattactttgaggagccaagtgaattgagatgcagaaaagcattttttta

SEQ ID NO: 53650 - DNA, 2143 bp, Bovine  19866880530170
  misc_feature (1)..(1): n is a, c, g, or t
nctcagcagatgaagacaaccggcacttcttagctcatctttctccgtcggaagaccgcttagggcatcaccaggccgaaatcaaggtgtttcctggccgaacattggtctggaggatctggggaagaagtcacttccaggctcatttgtgttgctggcaaattcagttgcctgtggctctggcctgaggtacccatttcctggctggcattgggcaagcagtgctctcagcttttctaaggttctctgcattccttgtcatgcctctccagcttcagggccagcagtggctcattctgacaaatccctctgacttctgcctttgccaccagccctagacagccctctccttttaggacttaagaggatgtgccatgtaacaacatggcatcagcatgttaccataatcatcatcgtgtatatctcgataaacctaacagtgagtataatcccaggagtggcatgtcttcatattcacaagttctatacggtatggaatctgggagtgggtacacttgtagtatcccatcctccatgagatgaaggctatctctgagcacccctggctccatctgcaccctgctggaataagcaccagcctgggccattattcagtgacccagcaaacatcttatttcagtgtgtgtgtgtgtgctaagtcacttcagtcatgtccagctttttgtgaccccctggactgcagcctgccaggctcctttgtccgtgagattctccaggcaagaatactggagtggattgctatgccctcttccaggagatcttccccacccagggatcaaacccacgtctctcgcgtcccctgcattggcaggcagattctttaccactagtgccatcaggtttggctaatttcatttggttttaagaagtctgcagtcagaaatttcaactaaagtatgatcattttatcttgatgcctcaataggtattggaagttcctgatggtaatataaacctattagaaaagaccgcatcattcaaggcttttagtactgaggatatgcagactcttaatgtgtcttgcaggtgagacaaagacatgggtcaattcaccgctcgttttattgtgggaatgagtctgcggaactggcccactcggggttcctgcaaatatagttgagattagaggtcataaattagtaattagaaggttatataaatgggcagctgcagtgttaccttgttgatcaggtaccgagtcttagggcgaaaagcagcaacacccaccttggattcagttcaccgaaagttattgattttttttttttttaagtttgcctcctaaggagtcctcagggccaccaggcaaggtcaggcaataattcacgtctgggaagagcccctagaatagagtcaatgtctgttactttatcagagagataatctcaggaaagggcacctgtatcagtgagtgttctcaggttgcaagcactaaaattggaccccagttaatttaaagcagaaaaagagtttattgtaagggccttggaaagctcacagaatctagtggcagaccagagagctgggctggggataaaggtcaggagagatacagagtagtttcaggggaagatttattacctaatgactgccctgtcttttgggggtaggctgtagggaacaagaccgattttctctctctctctgagcaccacactaatcaagactgaaagccctggagagaccctcctgtggacctttccagagaaccagggacccagagcctgtgaagggggatgcacacctgtggaggtggaggatgcaagcaaggagggagtagatgctcggggaaaccctaaaacaaaaacaccaaccttcactctggagtctttgtgcttaaaatgcttttgtgaaaactattctaataaaacgtattgggtggtcatttcaaaaacacacttttgccttaaacgagattgcatttattgctccgtgaacgctgcctttaatcatagaaacccaaaagcctcatgaaagctataaattagactatttcaggcatgttcccgtatttgcataatatcaatgaaatcctttgactaggtggctaagaaggacccacttagcatatcacaatgaatacctagacttaaaaaaaaaaatctgcaaacaaaaacacgga

SEQ ID NO: 53651 - DNA, 2978 bp, Bovine  19866880642323
  misc_feature (1)..(1): n is a, c, g, or t
nggcttgagtatatttttttctaactgagagtgacaaaatgaagaggtgctgggtggtgagccctcagaagccagcactacgcggtcaggaggcaggaaagaggagagacaggccatggccgactctcaggaccaagacacaggtcctgcgaaccaggcaaggcacgaaatgcaacctgacaaggaggcagagactgaagcaacgttccatcaaatatttttaaattcagttccacacaagtcaactcggttttgcccagagattttaccagacatttagctggtgtgtatataattacttgtctgtctgaattgggtttggggagtggaagacagcacaaggggggctaagcgtccacagaagggaatgaactgaaagttgctgagactcggggattcattccaatattaatttttttttactgtttgcatcctttagtgacggttttttaaagtatagcaactattacccgttgttttgctcggaatgttaagaacaaaactataatgccatttattcctgatgtgaagatctaccttctgcgtcttattcatatcacaggcatccacgaccaccctaagatccttagcatgtgttacaccttccaatcatctttcaaagtccctcaagttattttcagtactgcacgcatccttagaatattattttcagaattcatatggagtatttagtagttaaaattccttggaagaggaccaaaatgtcactgctttatataagcctcagctcagttttgaaagatgataatcttgcagtaaacaaaagagcactggtacacaacttctgaagccagacccatataaattcacatgtactaaaacagaaagtcatatcagacctacgtgaacgtgcacgtagatcccctcttagctgctctgttcctattgtctacatctttgctacctgattcaccaacgattaagacgaaatagaatcatcaccactaacaaccatgttcatgtgcttgtgggctcagtcgtgtccaactctgcaaccccatggactgtagcccaccaggttcctctgtccatggcattctccaggcaagaatactggagtgggttgccatttccttctccaggggatcctcccaacccagggatcgaacccgagtctcctgcattgcaggtggattctttaccatctccaccatcagggaccatgttcatgatcatatgtaaataaatgtttttttctgtcttccacagtctgattcataacattgagcatgctacaacacaattaatagactgaaaatatactctggatcaaaacaaactttaagaaaaaaaaaaacattttaaaggagtgacagaatccactttaaaagagaatccatacataggaagcttcctgtcttacagccaactcttcacagctgccaatatggtccaatagagaagaaaccagcctcatacagctattgagcacctgaggagcggctagtccaaattgagatgcaagtataaaatacacaccaaattttgaaaacttagtctaagaaaatgtaagagatctcattaataaattttatactgatgacatgttgaaatgacaatatttaaatattttggttaaataaaatatattaaaatatataatgaaaggatattaaatcttttttacttttttaaatgcagctaccagaaaatgttacattgtaacctgtggttcacaaaaatatttctattggacagagttgaaatagtctaagatgcaagtcaaccatccactaattccagcgaaagtataagataacatgtattctgtccctaactttcttgtgtgcacatgtgtgtgtgtgcacatcctgcagggggctggaattgcaaagctgcccatcaggaaggtctctgaaacacaagattcagctcgttgcctttagcctcatctcttgacatttaaatcttccaaaaatttcctctgcttcactgcttcctgctgtgaaagctttcaagcaaagcctggtgacccagtctcccagggggtatgcactcaagctatggcagccacccctgctctagaaactggtattcaaacaggtctgggaagggacagacacctgtgcataaaattatgtcgggttaaacataagcaggatgtctacataggtcaggccactcactcaagccacctgtgctgttctcatcctgcaatcatgaccaccaaacagaggtggggaggggactgggttatggtcaagggctaagtcccagccctaagcctatgaaaactctccactgcttcaactgcctcctaccctcctgtccttgcctccccacttttctactctaactggacattcctggtggccatggggcatccacagcagggcactggatgctctctaataaacactggggacagcattcttagcctttccacagaggagtttcaggatatatatatacattcattcatttgagcaatattgctgaatgctgaacaggaaaatcttagcacaggacaaagataagggggcctgggaccaaggatgcccagaacagtagttatagggagagagtggtcagcatgagcctcattgggaaggcagcgtctacactggcctcccggggtccagggtgaggaagtgagctgaacaggcaccctggtgtgggctcgggcccccagggcctctgtggggagcagcacggccagcctggtccatgcgcaggacggcagccacagctgtggccacaggggccgagtgacagaaggatgcagaggaaaaatcccagaccaggcaggactcagggccatgggttgctctgagatgagaacctgctggaaagcttcaagtggaggaaagatctgctctgacatctgctttgtagaaaccacccagcctgtggttctggatactccaggttcaagggtgcaagcacagactattgaactaaaatgtgttaagcactgtggcaatgaatagcgaaacaacagttgagacaaaaaggga

SEQ ID NO: 53652 - DNA, 1849 bp, Bovine  19866880650812
  misc_feature (1)..(1): n is a, c, g, or t
nccaactctttgcgaccccatgaatcgcagcacgccaggcctccctgtccatcaccaactcccggagttcactcagactcacatccatggagtcagtaatgccatccagccatctcatcctctgtcgtccccttctcctcctgcccccaatccctagtatcaataatgtgtatatgtcaatcccaaactcccaattcatcccacctcactttctccctttggtatccatacatttattctctatatctatgactctatgtacagtggaatattactctgataaaaaggaatggaatagcaccatttgcagagacatagatagagattatcataaagagctaagtaagtcatgaaaagggaagtaaatcataaaaagataagtgtcatataatactgcttatatgtggaatctagaaaaatggtacaggtgaacttatttgcaaagcagaaaaacatatgcaaatggactctacactctaagtactatggctgcaccaaaggaagaagacatgctgctttgggaagctcccacctctctgatctgagtcctgggatctctcttctcatctcactctgtgctgggcattatgtcagaccctgtgtggaggagaaatgaaggctacagggaagacgtggatgatgataaagatgccccgatcctccaggaaggtcactaggggaacagaaagcagttacaaaggagaaagatgaacactgctacaggagccaagagaaagaaccaaaaattcatcctgaagacatcctgtcctcaaacatgccgagaaaaagaaaactggagtcctcgacaaaaggcaagaagctgagctatccagggcctgttattctaagaatctgcataataaggctgttatttggcagacctcagcgtaagtcaacaaaaaagccaagggattttctgggtattgtactggaattctggtttaatgcttcagtcgctcgtgtttgattttatgttccaaacataaaaagaatgttaatgattacatgttctgtatctttcaaatttatgaaacataaaagcggtgaatacttactcaacatcaaacttcaattctcaggccataaagaaagtacactttgaagaaaactaattcatcatataatgttttaaattgggaaactgcggaaactccctgcaaagttctctaagaatgagacatacagagcacagaaagcaccgtgattctcccccgtcattctacgtgaccagttatttgctaaaacacagggaactaagcacattaacccttctcaaggtcaacacaactggagtatctttctttttaaactgtttcctcaatatacgatgtattctttccacgggtacggactaaagtgaaaaggcggtttaaagggggagccctggactaggaggcagggggtctgggagggctcagttctgtgtgtgcctgtgtggcttcaggaaaactgccagctggcagtgtggagacatgaggcaaagaatgtacatttgccaccagaaagacctaaggtgagctcccactctgtcaacttaggagcttttctcatctattctgctgtactcaactaccctctagtacattataaggattaaacagctttgtatataagtgcatgtttatatacatacacatacatattgtgctatctacctatctatccagttacctaccttcctatcaggtaaacaagtcaatgtcggctccctttctctagtgtcctgatctatataatgtagcttggaggaattagactgctggtttttcacactgtgatcctcagaacccttaggttgtgaaggttcttccagacccactccaggtctttctaaaacccgactcagcct

SEQ ID NO: 53653 - DNA, 1931 bp, Bovine  19866880732822
  misc_feature (1)..(1): n is a, c, g, or t
nattcatttccttgccttctccagcttctatttttattattattttttttaaagtttagttttgcctgcaccacttggcacgtgggatcttagttccccgaacaggtctcaaacacactcacccaacaatagaaatgcagagtcttaaccactgggcaaccagggacagtgcttctacagacaggtctccagcttctaaagaccacccacaacccttgattcagcataccttacttcatcgtcaagtcatcaaggttgcatctccctgaccccatcccccccatagtcatatctctgtccgaccagaacttccaggaatgtttctctgcttttaaggattcatatggactgcaaggagatccaaccagtccatcctaaaggagatcagtcctgggtgttcattggaaggactgatattgaagctgaaactccaatacactggccacctgatgcaaagagctgactcattggaaagaccctgatgctgggaaagattgagggcaggtggagaaggggatgacagaggatgagatggttggatggcatcactgactcaatgggcatgagtttgggtggactctgggagttggtgatggatagggaggcctggtgtgctgcagtccatggggtcgcaaagagtcggacgtgactgagcgactgaactgaactgaactgaggggttcctggatcttcacggctggatggacacacacacacaccatgcacagtgatgcccaaacagcaggtgtaaaccctggatcccaggaggcagagtcacagtttgtttttttccatccaaatgcagttgcagaatctgaagtgcttgtgtctggaaagcagagctttgactggggtctttcacatggtaactaagcacccctagagcatggattcctaatttgaagggtcttttaaagttaactgcacctagggtgttgattaaaattaaattgtacacacataggtatcctactgaatgtgctgaagtatttcaaagtaaatgagaggctatataatcaacagtcttctcacatggtgatgctcagcccccgctaagtgccagcagttctgagacctgcccacaagccccatttcaccccagttcccgccacccctgaaatctccctgcaggagtgtcaactgctgtttgtcatcacgtttgctctgtcgtttctttcacagttgtgttcaaaggaaagtggagtcttgatttactaagtctctgtccaatgaaggaaaatgaacatcagacctgggagggttgtatgtttctcactatagaactaggagagagtacagtgattatttatttgtgacagatgtctatgcaatcaatgtgtaaagcaaagcaaagccacttagaaaagggacaatttaagacactgcaggggatggtttttccaaagatggctgtggctgttctctaccccatagaccccccagtgatgtgactggtcacccttcagtgacaggtggggcttacagatgaggagacagtcgtgaaaggtcttgctatggagccacccacgtgacctgcagtaccatcgggccctctgaccccagcatattgctcatggtaaagtaaacgggaggtgagcgcaaggaagcacaatggggctggggggtgagaggcaagctcgggagatagaaggagagggagagagagggagaaattgagacggagagagaaaaatactaagaaactaaatcactggtcagattcaaaagggacgctggagataaaggcaagcctttcagaggcaagaatgtagaaagtgggacttccctggtggttctctggggttaagactccatgcttccagtgcaagggccacaggtttgattcctggttgggaaactaagatcccacatgtcgataagcgaggccgaaaaagaagaatgtagaaagtatcaaacaaagatactaaaat

SEQ ID NO: 53654 - DNA, 1048 bp, Bovine  19866880737908
  misc_feature (1)..(1): n is a, c, g, or t
nctctggatgattccttggtctttcctggagaggtttagtggagctgacgggccgatataagtgacacacttcagggaattaattttagggctttctaaaatgggatggatgcttcacgctgcagtctcatgcctcagtgggtgaaccagctataaagatcgttatcccattggcagctattttggtggctaactggaactttgtaagaagacacataaggagttattacattttatttttggatacatacttgcattcatttgtatcctgcccataatctgggactgagcacagaaaaattcataaagaatttcttggcaagctctgtgaaatgattgtgcagatcattattttaaataagtggcctttaatgcatagttgactgagattttatccgaggagatgatgataaattatatcttaaagtgaaatttaaaagcttaagtggctgaaagggaaataaatacggctatttagttaattgtcggctggacatcctagctcccctcggtggtgggtgacacatccagataattcattactctgccaactctatgccagatgtacggggtcacacgtgaatacagcggccccctcctagaggatgccctgaaaagttggtttttccaatatcctgttcttatttgagtgcttcaggttttctaatacagagctgcttcttaatttgattttttccctggcgccttctagagagcatcttttcttctgtgacccagagaaaatgtacagaatattgaaatctttggcataaggcttggaggcatagactgggtttggtccaggcaattttgaagcaaataggaggaatcaatgaggtcttggcagatgcaggcgggccgggagggcgggggggtcgtcatcttgggaagggatgagcccgctcccacagtcagccctttcacgctgcttcctcttcccatctctgctgaccatgacacctgtcctgttaaacacacaccttgcggaaattgtgtcccatccccgattgtactgtgtaagcacaacgtgcctgagctcccgcgttgg

SEQ ID NO: 53655 - DNA, 1816 bp, Bovine  19866880781418
  misc_feature (1)..(1): n is a, c, g, or t
nacactgcatggaagtcattgcacccttctgtatggagtcgtttatgttgtctttgaagtttatctcttttctttttttcgcttgagtcatgtggcttgtgggatcttgggtccagggattgaacccaggccctcaacagtgaaagtgctgagtcttaaccactggacacccagggaattcccacttatgtctttcttaattcggtatgaccttctttccccataagacaggcagataatggaccgatttttcacttgtgagaatacttcgtgtagagtttgatatgtaagcaagactcattgataaagagaaagaggatctgtgtgttctcagtgacatcaagaaatgaatgtcagtgatgtgctgggtaatttggatttggctgagatgctctggggcttccctggtggctcagttggtaaagaatctgcctgctattacagaagatgcgggttcgacccctgggtcaggaaggtcctctggagaagcaaatggcaacccactccagtattcatgcctaggaaatcccaagaacagaggagcctggcagggtcatgtgtccatgaggtcacaaaagagtcaggacacgacttaatgactaaacaacaacaagacaccctgacccctctgctgaggtttgcatcctgggtcgagggctgtatcacatgaacttgattcccatacttgtctcctttttccgagctgcccatgatctacaatagacggctatcaatttacaaccagcacatcatgtattctgagcggttcacagggactgcaacacaaaccatatacttattagtgacataaatcaaggctttgtgcgcctgaatcaagatgcagccatgatctagacctgcaaaagcagagctgggcagcagagccagcttccccatggtaaacactaataacgccctcccccgaaccctggctatacaacttggattctgtttccatgggaagaaagagcaaataggaaagtcggcccagggcttaaatcagttatggcctcagaggaccccagatgcgggaactttcttaactatgatgcatcttcacgatggagaatgaagcctggaaaataagagttgtaacctgcataaaagataacaaaggggccttctgcacaaataaaaaaccttctgcctgccagatcttttctgatgatacagctaacaaggatttttctctgagagagacagaaacggcccaggccagaaactttggcttgacaatggctgtctcccaggcagcaaatggaataaatcaagattagatgactttgggggcttcccaggtggctcagtggtaaagaatctgcctgccaatgcaggagatgcaggttccatccctgggtcaggaagatcccctgaaggaggaaatggcaaacctctctgctattcttccctggagaatcccatggacagaggagcctggcgggttatagtccgtggggtcacgaagagtaagacatgacttttggatgccaaatgttctcccagtggaggtgaataaatgctcactaggcatctgacaggcttgtaggttctggaaggtcgtgaggaatttgttaaaggaggcaagaacatgaaactcctggtagacccttggctgggggtgggttgctgcccagacctggtgagccccagcccctgggcagatccctgggagaatcagcgaggggcagcgtggcccagggcacccaggggtactgccagctcccctgcggcctgtactggggactctgagatgctctccaactgaggcagaggcagacttttcatcaggctcagaatctctataagcccgcaatct

SEQ ID NO: 53656 - DNA, 2884 bp, Bovine  19866880840278
  misc_feature (1)..(1): n is a, c, g, or t
ntttttttttctaaaagagtttgcagtattttcaaatggccctgtggcaagtctactaaacacacttcaatagaaatgtaaagagtgtgtgtgtccacatatgtgttcgaagagtcactattaggtctctgtcggccagactggagttttttcaagtgtctgaagcatttactgtttttcactttaatatcgaaacattaaaatcagtcagaaacaaaaaatgttaagtcatttaatgatcctacttaaaattaatgcagccgatttaatgtatttctgttcgtccctggtgccctattgttgcgcagtagttattatctttgaaatgagagttgaaaaagataccatcgttttctgtgtctttcataacattgcagatatggtgcaaaatcttgattctaagtcagacatgttttattccattttatttaaaagaataacatatttaaatcactgtgtggtatgccagaaccattagttggcattttaagtgtcatttaaagaaagtactttaatttacatcagaaggaaaactaaattagaattcaattgcatcttacttctgccttttttcttttactgtattcaaaatgaaaatttttcttgttttaaattttagttttgtccatgactattcatgccggtcgttcaacaaatcattgggtgccccgatgctagcagtgctaaataaacaaagccaagttgacccacaacttggtcttcagggagtccccattctatttacgtacagctctgtgtgccaggcaccaggctgtgtgcgttccctgcaggagctattttaacccttccatcagtgcaaagagagcagtattattatttcagtttaaggaattaggacacagagccttgatgcagttggcagtcttgacctcatgggtgacagactggttttcaggctgtctctctgtgtcctcatgctgcttttgtgatgtgggttagagtcagggaaaacctggaaccacttagattcggtgttaggaactaagcttaaaaagagtttgggaaggtcatgttcacactgctatattcaaaatggatcaccaacaaggacctactgcacagcactgtagagcacagggaattctgcagaatgtcatgtggcagcctggatgggacaggagtttgggggagaatggatacatgtatatgtatggctgagtccctttgctgctcatctgaaactaccacaaccttgttaatcggctataccccaatacagaataaaatgtttcagttcagttgctcagtcgtgtccgactctttgtgaccccatgaatcgcagcacgccaggcctctctgaccatcaccaactccaggagtttactcaaactcatgtgcatcgagttggtgatgccatccagccatctcatcctctgtcgtccccttctcctgccttcaatctttcccagcttcaagatcttttccaatgagtcagttctttgcatcaggtggccaaaacgtttaagtttgaataaaaagaggggtagactgtgcactgcaggtgtcaggatgtgtccgtgcaggtcatcagggagggatattgatcatgggctgtcacatgtggaggcaggagacctctgtaccttttcctcaattttgctatgaacctaaaactgctctaaaaatggaaattcttaaaaaaagaaaagaaaagaaagtctggaagcaggctcagaggaagattattaagatgcagagggagccaaccgcatcctatgaggggattttaagggattatggaactaggatctgtgggtagaaggctctgggagtctggatccaggtcaataaggaagagccattttacctgcccacagatggatggctcatgaatggagaccctgaaccagtgggtggggtcagggctcaagtatcagttggatgaccttttatgtcaggtctccaagctgctcctcggagtcatccagccacttgttggaaggctgcattctgacctcctggtatcagttttaatgcttttaggattaggtcggcctgatcctctgaatttccagtcgacccaagagatgacccatttgtgggttgggagtggtggggggtgtggcagaggttacagaggtccaaagaccgttttttaaagagggtgaaagtgaaagttgctcagtcgtgtctgactttgcgaccccacggactatacggtccatgggattctccaggccagaatactggagtgggtagcctttcccttctccaggagatctttccaacccagggattgaactcagatctttaccagctttaccagatgagccacaagggaagcctttgaagagggtacatggattttattagaaactgaaaggccaacgtggggagcattgagttacaaaaaaagcagaggagtaggtggcagaaatgggagggtttcttgaaccctgggaggagtcttccatgcaattggaagtcttttagcctcaaacagctcaggataacaagattaaatatatatgtgtagatgtgcaaacatacacagagtatttttaaagttcatttggactgtgaagaggacggatttaaaagtgcctgtgggaacttcccaggtggtccagtggttaagactttgcctttgaatgcagggagtgtgggtttgatccttggtcaaggaactaagatcccacatgcctcgggggcaaaaaacataaaatggaagccatattgtaataaagtcaattaggaaaaaaaaaagtatggacacagaggggctggatggatggctacaggtgattctgtagactggggaagcaccccaggtgaatgaggatggagactgaggagggtttgggaaccacagtcagcaggacttgaggacagatgttgagtgagggagaggggagaatgaaag

SEQ ID NO: 53657 - DNA, 834 bp, Bovine  19866880954619
  misc_feature (1)..(1): n is a, c, g, or t
ncaggctacagtccataggatttcaaagagttggacatgactaaagcgactcagcagacatgcacagtctgtaatatcaactctatatcacggacccctagactcctgttataaagactactgttgtattaataagatgttgttatagaaacaacattccaagttcctccatggaaaatggactcttgatgctaaattgccaggggttcacttcttgtgatgctgggttgtgtctgcaatgcccggctccctatttaattgaggcggtgacactgagcaccccagttacacccaggtgtctacaaaactccaagtttgcctcggctgagtgtttgtttccatagctgtgagggtctttcctcatttttgcttgttgaaggcctaactcaaattaccacacacagatagatgtcttagttcctccaataaaatttctctctcctcggaagtctgctgtcccttatacagcatctgtcccactgtatagcatctatcccactggtcctctgggaagtggtgggtgagcagctgtctccttggtatatttgaaagctccctgatgatggacttagtttcatttcatgtttgaatcttttatctttagctgtcaccttgtgggctgtgttgacctaacttactgatgagaaacagctcttagttcatatttcagatgatctcaatgagtatgaaaagtgcttgaattatttacttgaacaagaaataacatgcatgtaataaattagaatgtattattttcttattaagtatcttaggataataagcaatgaattattaatgtaccacatcagcatgtattttattccatttttgtgt

SEQ ID NO: 53658 - DNA, 2074 bp, Bovine  19866880964084
  misc_feature (1)..(1): n is a, c, g, or t
ngaacacctgatctgctggggggcggtctctgccctctttcctcccctccaggaccccatagccgacatcaggccatttaattaacaacaccctctactgatccgagccccactgggactggccagaccccactccaaactttccgagggtcagcaacacaggcctctcagcaagctccccacaggggctggaaacaaaagggaggggctctctaaaaagccacccgaacaggatgaaatggtcactgacaagcagagacaacacggcaaggatccccataacatacacacgggacatgtgccaacgagtgacggttggggagacatcacaccacgttcagatgcctggatgcgaaaagtcaaggcagtggagaacacaggtcacgggactgttgtcaaagcagcctctttttattaagtttcctcacttgagaatacgccacagtgaatgaagaagcaaggagagcctgcctgctgtaccgcagacgagcaatgggaatgcgcgggctgagctctgagcaggtgtaatcaatttcactctatatcagaaataaagcaggagatgatatctattactccctgtcatggcagcttcttcctggtgatacacggttcttttaatacaccagaaactaaaatcaaatcatgcttatctaccacatagtgaatttcttttttctttcttagagatcagtataataccaaaattctactttatggcactaactgatttataaatttttattacatatgataaaaattataggctcatttttacacatttaattaacaaaaggtaacctttttcctttaaatttagcaactgaatctctatgtgcctattaatttctaagggtatcaagcaccaaacccaccacctgagcatactgttaagattactataaatgcttttaaaaaatcaaacttcataggaaaaaaaatcagcagtaagcagaagtaatttgtgttttctcttccctaagagaactttattcaatcattcactcattccaaaatatttgttgagtttattaatttactatgtgattgttgttgtacagtcgcccacttacgtccgactctgtgaccccatagactgcagcatgccaggcctccctgtctctcaccatctcccagagtttgcccaagttcatgttcattgcattggttttgtcatccagccatctcatcgtctggtcgccctactctccttctgccttcagtctttcccagcatcaggatcttttccaatgagtccactcttggcatcaagtaacccctttgtcatggcaaagggggctgtgtaactcaataatgctttgagccatgctgtgtagggccacccaagaagcatgggtcttagtggaaagttctgacaaaacgtgatccattagaggatccaaagagatggcaaaccacccccagtatacttgccatgacaaccccaagaactgtataaaaagattatgtgattactaaatgcaaaacactgtaacttgattctatacattatgagtatttattttaaaagaaatgctttagacaactttatatttgtatctagggagaatatcacaatgaggcaacttcaaacttgtggttttaacattatttaaaacatctcagactacaccagagaagacagatcaaacagaaaccctcagaatggactgcaggaagggtgtgatccagtgcctccccatcccatccacagtcagaagcccatgttagaccctgttgtgattccaccactagaatcagggagaagtaccaggcctctgccttccatggtaactcaaactaaaacatattctcactgtctgcaataaatctgctttctgcatattgaataggaaagagatgaaagggaatactcaaccatctgaaaacaaacggatgctctctaagtgtttctgttctgaggcccatacaaaccacatgctttgcttctgcctagctgttgtatttttaaataaatcattctgttaaatgctagctccctccttcaagggagagtctaaaaactctgttttcacaagcctctgacaatttgaccctcattctctctcagctg

SEQ ID NO: 53659 - DNA, 1767 bp, Bovine  19866881031738
  misc_feature (1)..(1): n is a, c, g, or t
nacaacactaagcttatggtacatccatctttctttttccttcttacattagtaaatttcttatcctttaatgtcctacttcaaattaatgaattgattttaacatttcttttatacatctgatttttttcccctttggacaatgaaaaatgtctagtgcttccctaatatccaagaactagacttgggaagaggtgagagggctatcagaaacagacatggtgaagataattctatcctcgaaggcgctctctaaccctcttaggaacaaaagcattccatctgattcgagacattacatgttcaaatcccaggtccaccacttacttaccaggaaaccttagataagccccatgctgtgctgtgctgtgcttagtcgctcagtcatgtcctactctttgcaaccccgtgggctgcagcctgccaagctcctcggtccttggggattctccaggcaagaacactggagtaggttgccatgccctccgccaggggatcttccccaacccagggatcgaactgaggtctccagtgttccaggcagattctttaccgactgagccaccagggaagtcccgataagcccataggttttctgaatcttggttcccacatttgtgaactatggatgtagggccgttctcaccaaactgctgtgattcacagctggaagaaaatgtatgagcaagttatcatctataatgcattatatctgagtaagctctttatgccgtgaacatagaggttcaaggttaaaggcctccaaaataagattcctgccatgcttttcctccagcagggagcgagcgggtagcaagtgggcggaagtgactgctaatgcattaaggactgacgtgtgacagtaacaatgagacatacagatgcagtctgacattaatggagaaatttgcctgtggtcatggacatggcgggaggagggagaccactccacctcctggcttgaacttggatatgaaatcaaacgtcagctgagattaattagaagcctgaagtttcattctccactgttgatgggaagagaacatttccataatgtgaggaaacgtttccgggggacgcaaatctgcctgacattgagggaagatcggcctcattgtgaatgctgccgctgccctgcttgtcagggccattactttccgctcaagaggctttgctttttaacattttataatcctaacaacaaaaaaaattctggaagcaataattatttattatgttaattctgtagctttctttctgaaatttctgcatgaccattaaaaaccggctgtgcccttgaaaccaaccaggagtttattaattctcagccaattaagaggcaaaaggcaaagtaacagaatgctccataccagcaattattaaccaagcggtcggtcagcactctttccttgccaccgcttttattccaggaagcatcctgtatatttgactgaacaacaacatgaaatgtgttcatatctttataaggacctagaagatctgcaaggaccagacggaacctgctgtacatgtctgggaaacgttcagatccaggtgcttagggaagccacacccctgctgacctctcacaaacatggaaagttctgccagcatctctctgcctctgcatccttccagagaagggctcctaagcaaatggcccttttatctgcagttaaaaccctttctccagaacacgtgctctctctcatgagtgcacggcgcgcacgcgcgcacacacacacacacacacacacacacacacac

SEQ ID NO: 53660 - DNA, 1689 bp, Bovine  19866881151888
  misc_feature (1)..(1): n is a, c, g, or t
ncagtggagttaaataatgcctctaccgagaccttaatctattgttccgaacaattcaacagccttcctatcagagaaggccatctatttcctgcccggggccagcgggcccagctctgggagagtcacaggcagacaggaagccactcctcttcctcttcctccatctggcttcgttgccagggcctggctccggaaaaggcctcggtggtcccagctgccctggcccctccactcagcgggaccttggggcaccccggagcagccatgtcccccgaggtctcatccctgcatagactctgtccctgaaagcattcccgccccgccaactgccgggtttatctcctgctctttcctgagtccagccaggcggtcacagctcacccgtgctatcagctctctgcttcttcccctgcagatacgcctgggaacaacttcagaatacaaagcctttaaacaatgagcagcgtttgagctagaattagggctgagtcctgcacaaacagctggaccaaatacgcctttatcggtgactgtctccaatttaaacaacccgtaagatgtttgttcaaaaccccgctcagatttggccatgctgcgttgaagaattccacgccgccctgcctacccccgtcagctgcaggagaaaatgacgtcttttcctgaaaggagattacagtttcccctcctctagggttgtactcccaccagattcagcgccagctccgtgtggctcaaggttgacctggcctcttttcctgggggggctggtgttcacagctggcgtttctagggtggcaggggttggaggtgcaggagcatctggcatgtagctgcctgtctgctctggcctttctgatctccaattcggttttaattgaatactttgcagaagacatgcgtgcctgctaagtgtccgactctttgtgaccccatggactgtagcctgccaggctcttctctccctggggattctccaggcaagaatactggagtgggttgcaatgccctcctcaggggatcttcccaatccagggatcaaacccacttttatttcttgcgttgccaagctggttctttaccattagcgccccctgggaagcccttgcagaagatgccggggaacaaattacaaggagaaagtcatcagtgacatttccatgtcacgaatgaggccagggagggatccaagcagaaaactctagaaggagaggcagggtgagagtaggccaggagtgaccttgactgcaggtcttctgtctggagtaagctgggcccctcacagaggaggatggttcttggatggttgagttcctgctggccccgcccctttctgtctcgtgccttcaggatccagattctcagagctctcatcccagcttgagtctccaggaaagagagaagatgtgtccacattagtgtgtgttcctcacatcctccccttagatgccaggtccatgtgccactagaaaggggttctcacagccacctcactgcccgactggaacccacgcccgacgactgtgaaaactccatcacagggactgcccgagacacagcaggcgagccagccgagccagggatacggccggcagaggagggacagccctgtgggcatcttttcttgctgactctggtaatcttgtctgcaaatcctgtctgcttgcgtgcatgaggagtcctgacaca

SEQ ID NO: 53661 - DNA, 880 bp, Bovine  19866881282709
  misc_feature (1)..(1): n is a, c, g, or t
ngatggaagacattctttgtaagagaaggggtctgatcctagggttgagagttacatttgttgctgagggggatgagggcaggagccttaggtgagagctcactgttgctatttttggcgaatcaacataagcagcctgaggcagaggcagctgcctggggccctgctccagtgggcgcccatcatgcaatagcctctgggtacattgacaaatattatttttagatgtcatttctggctctcagaacttttggctatcagagttcctcccctctccacccttaaattaggtttcttccctgtggaaagtcagagattctgtgatgaaaccagatcaactctgctcggaattgctattaaatcttcttttgagaatcttgtttttctttttcctgttaggggtggccccttggtagaaggacgtttacacagaataaaggagaaaaaaaaattgtttgctgaaggcatcagctctgagaaatatttaacagtttgcaaataggcaggcagctcccagaccaaaagagtagggaggaaggctgttctgctcttatgaaaaggagatgtattaaaatgcagtcattaactggtggaatgttctagaattgctgacgacctactgggaatttgggctaagtttctcgaggctataacacaactgtacatcctcctgggaagccggaaaggaggaggacttggagcagcagggcgtggatcttagcagagtggagcggagatgggagaggaaatgtcttcccatcattgttctgatggaagatggggaaggttgcccgtggctcagcaggtagacgtcattaacagggagagaagtccccaccagagctcgccaacggccaagtgttactcattcacccggcaa

SEQ ID NO: 53662 - DNA, 766 bp, Bovine  19866881323626
  misc_feature (1)..(1): n is a, c, g, or t
ntctattgggaagctctgcttttcccgactcagccttcatccacgtttctctgaaaatgactcttagaaaaacagctctgaatctgacacctttctctcgttccacgttcccagctttttgtgtgtgtgtgtgtgatatgtatttatttatttggctgggctgggtcttagttgcggtatatgagatctttagttgcggcatgtaggaacttagctccccaaccagggatggaacctgggccccctgctttgggagctcagagtcttagccactggaccaccagggaagtccccacagccttggtttttaacgtttaactctggctaaggcttcttctgtaaacgtagcatctctgaaactgacctcatcatcttagcttctccgctgtgctcagtccccctgttctgaagtcaccagggttcctcatttacccatttctttccagaatgattgctaccaacctgtttgactttttagattttgtgaacctcttcaataacctgctgtgcttttgtctaaatctctttcacatcaatctcactacaacggaaagaaaaactttctgaaacattattaaagtccaaatagttttgagaattgagcttgtaccccactcttcctcttggggacacgtttaaacacaatttttctgaacttcttagcccttgtgcgttatttgatgacacttattcgttccgtgtctttttaattttttcaatttttattttctttatctgcaatattgtgtttcaggtgtacagcaga

SEQ ID NO: 53663 - DNA, 1798 bp, Bovine  19866881358613
  misc_feature (1)..(1): n is a, c, g, or t
naaatgagagagtataatgttgcagggcaaatggaaagaaagatctctacggaatggagttagcttcaaaaggggctgtctcaccaggcagctcggcaggtctttaagaatcattattttggtttctctgaaaaggaaaactttgttatgagaacatgtgatgttcgtattctcaactctttgggtgaattaaattcagcttaatcatacccattggcacatgcgtgtgattagtctatcttccatcattgttggtgacggaggcaataatgacatataattagttactcccttctaccccatcattaaaatctgcactggtgttccaggctctagatttttaaagactgaggaaactgcagggattcttctgcaaaattcgagaaactcggtgcacaggacaaatgtgttaggaagagtgtgctattcaaaaccttggctgacagagaagcagcatctgataacttgagagatggagtatttcctgccgtatcagtacacaaggatgtcacaggcatcagagattgcagccttccagtgtgagcctcagggcatccaggaaagagaacaatacctgcgatctagcagtcttcaggcttcagccactccctacggtaagccccaaaggagctcaggatgtgaaaacacaggatactgacgcagaatagctaaaatgcctataaaaggaatgacttcagccagcccagactcttgcatcttcccatacatagaaaagtgctaaattccttaacttgggatgtctagttttccttaattcataatactcttttgatgttcagacgacctgccctttgttgcaaaccttctatataaccttgctcctcccctcgcctcctcctcagagttctctctacattacttgagatgctgtctctcacgcttgaagtcttaacaattcccaccaagtaaaatacaactctcaacttttgggttgtgaccattttttttaagttgatatgatgccctttttcatgagagttttgtgttgactatatgtgcgtctgaatgtgtgtgtgtgtgtgcgcgctcacagcatcacgcatgtatgctgccctatagcatgtgtctggtcattatactcaaatttcctcttctacccgatttcattttgcaacatgaataagtcatggccataacccacatggatttcagagcccatgactgcttttaaggccttacggaaatagccccctgagacaatctaaaactgagctctgcctgctcagttaagaaagccttttcttgtcaatttgtaattctaaatttgatctcatcctttaaacaacaaaatactacatccctcccctgtctccctcagccggtactaaaatggtcctaaagaatatgtcttttctgatgggaaaccttgtgaaatagggaaagtgaagcctgcagagaaataaatgaactcaggagcaaatctcaaagagaacaaaaccgctgcggggaggtgccaccagcactgtagaaacacttattagcacccatttcagcctgatgaaactgctctcgccacaaccactctcctgtcctgcagaccagctgtcaagcctccttcctggggcacaggctcttttgtgctcctctcaaaaatgtcacctgagcacacgtatgaaatatgtgttttgcaaccactagagaagaaaacttctaacaaaaaaattctcccttcatccaaatgtcctctctccctttctatttttgccctctctcttcttgcctttctgatggattctcaataattactgagcaggaagaacatctgtgacttgcactg

SEQ ID NO: 53664 - DNA, 753 bp, Bovine  19866881484120
  misc_feature (1)..(1): n is a, c, g, or t
natccttctttccaagcgcgtactagaagaacatgtttagaccccgcgttctaagacaatgcaccatatcaagtagcccataatactgctataactgaatgaaaaggcagtgttctcttggtgagacacggctttggcaattcattctatctgcaggagtctcaggtgccaaatttgctgttaatcgggttttctgactcggttgacagtcctggtggagtgtcacacttctatttccttgtgctatttaatgtcacaattcaactttagggacagtgggattacctctacctgatgcaccatgtaaaaagacaaccagatttttgatgcccaggccccccagttttctggggaaaacacttattgagacaaatggtaaaaatcgctcccagaagattctcacgatcagacaaactttagtctcaccactgcaaggctcacccttcctgcacaaccttttcagaacccgcaaacatccacctcatgccatttaccgtgcaagtctcaattaccttgctgcctggactaaaacgcagtaccctgggagttggagagcaggggggggtgttccggaattccaagattgatgtaaaggcatttcaacctcattaatgtttcttgtgaatttccattaatcatgttccatttcaaggactattacaaaagctttctgagacgcagcccaattaatggatgaacaaaaccgaagcttgagctcttgatcaatgaaagcaggtgatgtaggacaaggga

SEQ ID NO: 53665 - DNA, 758 bp, Bovine  19866882033694
  misc_feature (1)..(1): n is a, c, g, or t
nctctgtagcgctctatgacttcccctgttgtatccacatttcatttaaaagtaaaacaatgtactagagagagaatagtttagctcttgtagaatgttataaaatcagatatattataaaattttaatgatcacacaacttctttcccttgaccatagagaactcactttagagccaaaacttagtgaaattaaaaaaaaaaaaacaaaaaactataccagtaaataataatgcaataaatacttttaaatgtacttaaatgtaatgattcttttttagcaaatgtagtcacactcaagcatgacattagctggaaataaaacaatagtcaaacaagtaaaagtgtggacatttctggcactgattcttttcaatataattttaacgttttctaaatttttcaaattatacaggaaaaatttacaaataaaaatccatcagatttagtttagagtctatttgtattacacagtaaaacagttaatatccattttatcaaacatttcttcataaagcaatgtttccaataaaagtcaatcccaacaaaatatttaatattttctcttaacaaaaacatgtattgttttagtttgctgctgcatcaatttcaagtagcatatacttctctcttttacatccacaggaaaatctgaaattttcagaaattgatgtagttatttttgaaagtacgtccacagttctttattccgaggtaaaacaccagagttcaatacacagattcacacacatttaccag

SEQ ID NO: 53666 - DNA, 1694 bp, Bovine  19866880455766
  misc_feature (1)..(1): n is a, c, g, or t
naatgagtcaccagacttccctggtggtccagtggttaagaatccacctgtagatgcaaaggacacagttccatccctggtccaggaagattccacatgcccaggatcaactgagcgcatataccacaacgactgagcccacggggtgctactactgactcctgtacactctagggcctgtgccccacaagacaggccgccacagcgtaaagcccacatgccacagttagagagtaaccctcgaaccactagagaaagcccacacacagcaacaaaggctcggcacagccaaaataaaaacagttgttacaatactttaaaaaatgcaccaccaaatctcatggcagaacccgatataagtttatttctcactcccatgaagtccaatgggcacttataggaatctggaggggtaaatggtgaggactctgctccacatggtcattcaggtcaccaggatgagaaaagctctgcagactagactgggtagcttccacgatcacaacagccgtcagcattcagatggcaacagggcaaagagagaaagagacgggtcaggagagagccacaggtcaggcccagagatggcacgtttcacttctaccgatttcacactgatcagaactcagtcacaccatcacgctgtctgcaacggacatgggagttgtagcccagctgtgagaaagaggagagggaagtggtttgatgctcacagccagtctcccccacaatggacattagtgtgaaaatatttgaaacattcaaaaggcctaagtgagagataataacagctattattttttgcaagtgatcctttattttctgtccttttattaaataacctgtctttttaaaatatttttgtaatacaatgtgatgagtattacaatggtgttgtgcagtgagaacacccagcctggatctttttaggaagtgaagacagacctaggtcttaaacagtggatattaggcaggcaaaggtgtataaagggtggcgtaaaggaggcgggcaacagaggacattcaaaaaaggagtggacaccaaaaaaattacaggaacgtgtcagcgtgagagaaggtttggaagggcataaaaatcagggtatcaggatgtgaaatgaaagcagcccacatgtttgtgacaagatgatacgagttagactagacataggagtttgataaagcatttgtaaacatttatatctatagcagactgtgattacaatactcatttcttaaaatgcaatgcaactttaagatattaagtacccttccagctaaggtagaactatgcactctcatctctcttgcttcattccacttccataagctttggagctgtatcatttctactacttcagccgaatcgaactggcattccagagtattttagaagagaaataaatggcaactttgaagtcaaaaagattctcaaatgtcttagaataaaaatagaggattctaccgaggagagcgctgctttgagttttagctgccactgtgagtgaaagtttattatacacacacaacacaacatacggcgtacacactcagtaaggaaggtatacttatcagtcagaaccgggcactcattagccaaccagaatggatgctcaggagaaataactgagatgaatatattgtgaatactaggtgaacaccagtgccactcacctccaccagcctctcactta

SEQ ID NO: 53667 - DNA, 1659 bp, Bovine  19866880591049
  misc_feature (1)..(1): n is a, c, g, or t
ncttgcctggaaaatcccatggacggaggaacctgataggctggggtccatggggtcgctaagggtcggacacgactgagcgacttcactttcacttttcactttcatgcattggagaaggaaatggcaacccactccagtgttcttgcctggagaatcccagggatggtggagcctgacggggctgccatctatggggtcacacagagtcggacacgactgaagtgacttagcatagcatagcatgatactataaggaagtatcagggggtgggatacttatgatactataaggaagaaaaaatcaatctacctggatatttaattttaaagcaatatcaggcaaagttctctagcttaaattccaggctattacagtttaagaaccaatttagatattgttgcatgtagatgcctttatctgttgaaacaaattttgtatacactgtgtatttttagttttctatatctttgggaatatcacatactttatatttttagaagtcttaaagacaactttaactagaatcttccctgattttaaactgactcttctccaacttaggctaaaattcagcaggtgtagtgatttcatttttccttactgatattctaaacaatgatatatctatactgatattctggagtttagtgtagctccaaagaaacaaatgtaaaatgggttaaagaaaaaaaaaatctggatgtttccttaaagacaactgtcaggtttattaatgtgttcatttatcagggggaactgtgacgttataggaggtaaaaatagaaccagtatttgtctgctctccattgtgccttctcctcctgtccctctccctccgtcactttccattccttccctgtatgtggtcttttctggacctctcccacctcccatagacaatttagaatgctaatgagttaagtgagagaaagacaaatatcatcttgtgtgtgtcttgtgtgtatcacttgtgtgtgtctaaaaaatggacacaaatgaatttatttacaaaacagactcacagacaaacttatggttaccaaagaggaaaggttgagggaggaataaattaggaatttgggattaacagatacatactgttatatatacaatagataaccaataaggtcctattgtataatacagattacttggctcaatatcttataataacctgtaatgggaaataatctgaaaaagagtagatttgtgtacatatatatgtatagctgaagcactttgcagtacatctgaaactaacacagcattgtaaatcagtaaaaatgaataagtaaatgaagcgtggctccttatttatttattatttttaaattaaattgtattggagtatgactgctttgttgtggtgggaggaagcttcaggatggggaacacatgtacacctggggcagattcatgtcaatgtatggcaaaaccagtacaatattgtaaaataatcggcctccaattaaaatgaataaatttatattttaaaaaaataaaaagaaagaaagaaaaaaaaaaaacaagctttagatggcaccaccagacatctgcctcggggctaacacatttctacacaataacattcctcctgtgccttgcgtgctgtgtgctcatttgtgttcgactgtttgcgaccccatggactatag

SEQ ID NO: 53668 - DNA, 4599 bp, Bovine  19866880667188
  misc_feature (1)..(1): n is a, c, g, or t
ngagcctaatgaatcataaaatatcaggtccctcctttgctcaagccttccaatagtttctcatcctgtcacaaaagcttgaatcttactcattcctgtatgctcctcctccagctcctacatggaaggaatcccttggtcaggaaagtgtgagagcttcaggatacaaggaattaaatagggattatagggcttatctaaacctagagtattctatgtatcattatgaagcttccaagaagatatcgtaggtagcatttttcaaacttggccaagaaaacctttttggaaaagaataacactgtacctattttccattgacaataatatttaccagctctgcctgcttgtgggaaaggaaattgggcaaacttgaccaactccattaccttggcaaaagtgaaaaaagccttgaaaaaagtggccaaattccttaccttcatagccagatcagggatatgggctgaacagctgggttgtgtttttcttttttctagtttctgaatttggtaataaaaaacacagccagtggattaattgatgtttattaatttaaaaagagagtatcagcatgtttttaagtatggtggttaatatggagggttgagtagtcaagatgaaacaatgacaccctatgtatctaaattggtatacacagttgttgttgttgtttttaatctgaaaggacatatgtatttttaaacagttaataaatgcatttcactttttagctggactcaagaaatagtatttgaacacagtaaaagcctttaaagaggtagcacttaagtaaattgatatcaatcaaaagtgttaaccatgctgagctgacatacacttcattcagggggcagaaatcaggtgattaaaggcccacatagcttttgtgcctgcttgtaactggtgcacagcaaggactcactgtttggtgaggtgagtgttgagagaatattttctgtccctgtatgtcttgaagcactctgacagtggtggcatttggaaccccagaaatagattaaaaaacctgccttctgaacttgtggaaagtaacaggtttcagcgaagcatgggcatgctatgaatttaacaaccgacacaatcagagccagccccacactgccccatctcacaggcccttcctctttatttctaggcctccatgtgaggccagaaaagctcagagtctgaggcataacctggtccagctgtcctcttcagagattcatgcctgcagctgtccaaatggtgctgttgttctttcttcaaaatctgatttctcttcctattcccctgctgagcttcaacagatgacatatttctacaaacagagcatgtttgtgttgtcggtgtctacagagatcaagaaagataagccaaactttgcaaagccagaggttttacccaaagaaagccactacagacacctgacggaaaaacgagatgatgtttgccaaagacaataaagagagagctcacatttgcccccttgacataatgcaatacagtgatggattctaagtgtcctaggaagatgaggcatcccattagatgcctattgaggcaattagggttgccttatgggtcattataaatcaattgaaacaaccattatatttattatttttaaagctcaacattcagaaaactaagattatggcacctggtcccatcacttcatggcaaatagatggggaaacaatggaaacagtgacagactttatttttggggggctccaaaatcactgcagatggtgactgcagccatgaaattaaaagacacttactgcttgggagaaaagttatgactaacttagacagcataataaaaagcagagacattactttgccaacaaaggtctgtctaatcaaagctatggttttttcagtagtcatatatggatgtgagagttggactataaagaaatctgagcactgaagaattgatgcttttgaactgtggtgttgggagaagactcttcagagtcccttggactgctaggagatccaaccagtccattctaaaggaaatcagtcctgaatattcattggaaggactgatgctgaagtggaaactccaatactttggccacctgatgtgaagaactgactcatttgaaaagaccctgatactgggaaagattgaaggcaggagaaggggacaacagaggatgagatggttggatggcatcactgactcaatggtcatgggtttgagtggactctgggagttggtgatggacagggaggcctggcatgttgcagttcatggggttccaaagagtcggacatgactgagcaacgctgacctgaactattgaattatttggctatgtcaggtcttacttgtagcacccaggctcagcagctgtgttgtgcaggcttagatgctctgtgacacgtgcgatcttagttccccaaattgggatcaaaccaagtctcctgcattaggaggtggattcttaacgactgaaccaccagggaaaacccttttgtatttactagggactgggattactttgccattttgaaaccatcctcaagtaccattttgtttatatttcccattgtctttggagagtttcactctcagaaatagatgcatgtacctggtgttaaaaatggaaaagtttccattttcactgtttattgatataatatttatatagtagaagtctcatccaattaatcatgctatatgagtgtttgacctagagatcccctttgggaaatagaggagaaaaatataagagtgaggtcaatgggtatatgtggcagataggaaagatgtatttgacagagcagaagaaagcatattcaggcacaactggaacaccagaggaaaagagaacttttgcttaatggaggaaaatgactcagagagataagtggtatattctttatatcaaaaaggtctatgactatagtatagaatttgaatgcttgctatgtagcagataacactctaggtcctggggaaacaaaaagtacatatttatgtgtgtgtgtgtgtgtgtgtatatatatatatatatacatatttatgtgtataattacatatttatgtcactacagatggtgattgcagtcatgaaattaaaatatgcttactccttggaaggaaagttatgaccaacctagatagcatattgaaaagcagagacattactttgccaacaaaggtctgtctagtcaaggctatggtttttccagtagtcatgtatggagtgagaattggactgtgaagaaagctgagcaccgaagaattgatggttttgaactgtggtgttggagaagactcttgagagtcccttggactgaaaggagatccaaccagtccatcctaaaggaaatcagtcctgaatattcattggaaggactgatgttgaagctgaaactccagtacttgggccacctcatgtgaagagttgacttattggaaaagactctgatgctgggagggattgggggcaggaggagacggggacgacagaggatggcatcactgactcgatggacatgagtttgagtggtgatggacagggaggcctggtgtgctgtgattcatggggtcgcaaagagttggacatgactgagcaactgaatggaactgaaatgatatatacacataaattacatatttatgtacatatatatatacacatatataaatatatatatacttctgtcttcatggggaatatctttagtaaaaactatagtcaaattggaagaaatggagtagcccacatagtcaacgatagagtccaaaatgcactacttggttgcaatctcaaaaatggcagaatgatctcagttcgtttccaaggcaaaccattcaatatcacagcaatccaagtctatgcccgaaccactaatgctgaagaagctgaagttgaatggttctatgaagatctacaagaccttctagaactaacacctaaaaaagatgtccttttcaccataggggactggaaggcaaaaataggaagtcaagagatacttggaattacaggcaaatttaaccttggagtacaaaatgaagcagggcaaggctaacagagttctgccaagagaatgcacagattatagcaaacaccctcttcaacaacacaacaggtgactacatgtgaacatcgccagatggtcaatacctaaatcagactgattatattctttgcagtcaaagatggagaagctccatacagtcagcaaaaacaagactgggagctgactgtggctcagattatgaactctttattgcaaaatccagacttaaattgaagaaagtagggaaaaccactaggtatgagcaaaatcaaatgctttacaattatacagtggaagtgacgaatagattcaagggattagatctcatagacagagtgcctgaagaactacagatggaggttcatgatgctgtacacaagcagtgatcaaaacatgcccaagaaaaagaagtgcaaaaatgcaaaatggttctctgaagaggcgttacaaatagctgagaaaagaaaagaagtgaaaggcaaaggagaaaaggaaagacatacctatcttaatacagggttccaaagaagagcagggagagataaaaccttc

SEQ ID NO: 53669 - DNA, 852 bp, Bovine  19866880672997
  misc_feature (1)..(1): n is a, c, g, or t
ncagcatatgtgcacataaagagataggcactaggaaacatacgtgggtgtgtaggtgggggtggaggagtggagcagctgctgctgctgctaagtcgcttcagtcgtgtccgactctgtgcgaccccatagacggcagcccactaggcttccccgtccctgggattctccaggcaaggacactggagtgggtggaggggagcagaggctgtgctgaatagtgcaggatccagagaaaaggttacctgccagactggggtccatttttactctggtccggtactctaaccctctcctcactgcaggtcttcctagacttcatttgagaaatgcattttcattgcttatattgattttatacccaactttctcttgtgtagaaaaggacaagactattgtaagctttaacaattggctgggatttatatggtcaaatggattaagcctgtagagaaatcattaggctttctttaaaaataaagcaacaacaaaaaaatcctactgttcgcttaatggaacaaaatagtctctacccagaagatctctcagggcctaaataatgcatataatagtatgggggattctattgatccccctgaacccatctataagtgctaaacctgccttattctttttctttttttatgatgagctgtttaaggaaactgaaccatttaaagtttcaaattgcactaagttggagcaagttacttaacctttccaaatacttgacagggataaattactggagagcaagcggctactgtcgtagggttattgtgataattaaatgacatgcacaggaacagtttgagacttgctctgtgctcagttaacatccattttcctact

SEQ ID NO: 53670 - DNA, 3544 bp, Bovine  19866880696661
  misc_feature (1)..(1): n is a, c, g, or t
naagaaaaattgaaagaattttatagtgaaccctcttacattatacctactatctaccattaatacgctatggtatttgatttatcatatatctaccatccgttcatccatcatccattctgcatccatccatcaacccatcttattttctatgcatttcaaagagaattgcagacgtttgcacatttctccctaaatactgcagtagcatatcactaaccagagttccatatttattcatggttattttaggtaaaatttgcatacaatgggctgcacacatccaaagtagataatatgatgagtttaacaaatgcatacacctgtgtaaccccaaaaccttccaaaatagtaagtatgcccttatgcccttaaccagtcactcctgcacccggaggacaccactgctctcatttttttttttttttttttgtgaccatgtattggttgtgactatcctagaacaccacattaatggacttacataaaagattgttgagtcagtcttcttttgctcataaagatgttttgtcaaatggcttttgacaagttacatgagttcttgccttgtttctcccattgaatgaccaactctatgaggctggggctctgccataacatctctgaatgtactacatcgtgaagcactctgtcttactcataatagggattcaatttgcatttgatgaaatggaaggcagagttcctaagagaatctgaaatattagaagaaaatatattttacatgttgtgctatgctgggttgaaattagaggcagagtaaacatttctaaagttctacatttggtgaggagtatataataagtatctgcttttcacagttgcttcttttctttcttttcttttctttctttctttcttttttttttttttttacaaaagagggagctgagtgaactcctaaagacatcctcagagtggctatactcttggggcaaagaacagccaaccccttatatccttcagaatctccagtaacagatgggtagaaaacattcacagacaggctcaggatcttgaatagaaatcttgaatgaagactatgagtgttggagttttggattgacatttccacactgctatatttaaaatagatgagcaacaagcacagcacaggaaactctgctcagtattctgtaataatctaaatggaaaaagaacttgaaaaataggtacatgtgtatatataactgaatcaccatgctctacacctgaaactaatatcttattaaatcaactatgctccaatataaaataaattaaaaaaaaaagaaactatgagtgtaagtgaaaaccagagtttttaatcaatgttcagccattaaaagtctgatctatgtttcttacaattcctataatggaaatttcatgataacagtagttctgttagacttatttgaggggattaactctggacattgcaatgtgctggaaggtttgaaggatatgaaaacatggtagatagttcttaccctcatcttgcagaagcttagggtctcacgaggcatgaaggtcatcgaggaatgcacagcccagctgagggagtcagctggtgacctgtaagaatcgaccttccaaaaggtgccaattcaagtacactagttctttccagtgtgacggatggttatttgacattattaagaaaagactgaactattttttcccaagaagagtcatatatttattgaccataaaattactactgtagcagctgcctctaattccttggtagaattcagtggctagaattaaacattagtctcatcatttgataatcataaagcaaggactgtagcctgctaggcttctctgtccatataattttccaggcaaaaatactggaatggatagccattcccctctccaggggctcttcgaacccagggccctaacccaggtctcctgcactgcaggcagattctttactgtctggggcaccagggaaggccaatcatagagcgcactgggagtcggaaaaccaagtgtgatcagttttcatctctggtacttaaaaagggttctgtatttctgttcaaagagttaaaatgcattaaaaaaaaaattgacctctgtgaactccttttcactttgctcaggccgtcttctgaattattatttatccacagtttggttttctttttgtagctgtttgcatttaaatggagagttttccaaagacagcctatactgtagctactattggtatgcattccggagaatgggccagattttacattctttggaagtatacataaaatcatcattcactgtgttccaagaaaataattcctgagggcctccaagagggatcgtacttggaagcacgttttttctctctagctctaatgatttttggattcttcatgtttgggtattcatattcattaggggccataacgatgtgccaccctggttaatttctccatgcagaaagcaatagagatttctatgacattgcctgtggtgggcagtgaggaatccctaactcaactcagtattttctcccactgggtaaacgtttctcagaaaagttaataaggcattgaaatctgcacagacagaaatgctaatgcctccgccacatacctacgattatcagctcagtctttagcagttggaatctgacataaatcctccagatgtattaacgtcggctgtggtagctggcagagtcttgttatgttgaccttgggcaaagccttacctgacagcaattcaatagaaagatgggtgccaaggcactgcatttgtataaagaagagaataaagaggctgttaagttaagcatctgctgtcatacaccataaaagcaggattcaggctgccgcgtatgagctgtgttccaatgagaccctgagagagtggaaccccaagagaggggcattatgccaagatcagagaccgagggacatctaactatccattattgcctgcttcactgtgggggctaaaagtgcttaatgcctttgtgctccccccgacagagttttatgactgctaactgcattattttggtacaatatgggcaggagatcgtaactctgaagtatttcactgaatctggaggtgcgaatatattgaataaaatcaatagaggttttccaaagaggattaactggtagaatggacactgcctgcatagaattgaaattctctgcatgaaggaaagagggtatcatttataaggtagctgaagatctatttctctttcaaaaaccagttaatatttgtcaagacccaactttataataatgctgaaataagaatattttgggaacactgggttaagtataattaaaataattttacctctttgtctttgctttttttaaacatattgtcaccctgtttatttaacttatatgcagagtacatcatgtgaaatgctgggctggatgaagcacaagctggaaccaagattgctgggagaaatatcaataacctcagatagacgacaccaccattaggcagaaagcaaagaagatctaaagagcctttgagaaaggaaagaggagaggaaaaa

SEQ ID NO: 53671 - DNA, 1750 bp, Bovine  19866880732265
  misc_feature (1)..(1): n is a, c, g, or t
nttaagaacctgccttccagtgcagggcacatgggttcaagctctggccagtgaactaatattccacacaccccgaggagcaaccaaggcctcatgcatcagaggaactaaaccttctcattgcaaccgatgagtccacacaccaaagtagagaagtccacgcaccataatgaagattctgtgtgccacatctaagacctgatggaatcaaataaataaataaatactgagaaaaaaagaattgggtagatgtcgagttacaagtcccaaccttgctgttccccagctgtgtggacttgagaaactcacttcatctttctgaatttttgcattttcatttctgcgagaaagttctaaactgagtcattggtttcctgtctccctctcgaatgacctaacaaaaagacaggtagcctgaaacctgaaaccttcacttttgagcctagaaaaccttggctcaaaaccaaggcaatgtctgtgataagatatttggtgaggttttctaaataaggttgtggaatcaaattcttttgaagaatttttaatccatcttgggttcaattcacaagaaaatgcacgatggattggaaggggagagtaactctttatcttcccaaagatcacctttagactcaaagatctgaaagacctcttgaagtgtattctagttgagcccattttcgttttacagggaagaggagcagaggcctctggatctggattttttgtgaacgttttgtagaatcttacacaaaaatgtaccattgccagctataaaggaaaaagtcatgcccctcaacagtgaggaaaatactgcctctgtggtttgcaactttttacatatattttgaaaagatggccaggataaaagaataaggaccccaggaaggccgtggaaggtttcctcagttgtccatctagaaaacaacataggtatttcatcaaagaaaatgtattcatttagtaaaatgtggacctctctaaagaagtatagattttcttaccaaaaaaccttagagaagaagcgactctagggaacagaatgtagaatgcaatgaagtcaagtcatgggggcatgcagtctcgtcgttttccgaggggggatttttgaatgtaatcagagggatgagttgcaatcttgccctggcaatccaaccaataaccccagctcagttccagccccttcagacacgtgtctgtggtgagggtgttagtatttacattctatattaccacaaatattgcttctttgctttagggcagattggcagcagaccttacacactggaggaaatgtttaatgaactcagttcttattttctgtaactctctaatcctgaaacactgaggcttctcacccagagatgtttgcgggttttatatctatgtatatagtcagaacacagaacagtggggagtgggactcctctgaaattgctggtaagaaagggaagcaatggcccacttttcagtaaatcttgtacttatcaatccaggaacatagtggttagtgtgctggaggtttgatcctaaaataaccagtgcctctgtgaactgtcagtctttgcaataaaattctgctacaccgtgacagagtagcatctgacttatggacaagttgctctagaaagacagtttaatgcagttccaagtgtgtaaaatgaagtcagtgtagggcatggaaagattatttatagacgagttcctgtagaaatatagaataaatacaaattacacgtcacaataagga

SEQ ID NO: 53672 - DNA, 1766 bp, Bovine  19866880823541
  misc_feature (1)..(1): n is a, c, g, or t
nttcctagaggctgtacatttcacttgggctcacgttgctgctgtccctgccttgcccttcaggctgtaaagccccttaacatgcgcctgataataagcccaactcaaggatgatttcctgtgttctgagaagttgactgacatgcggacaaacgtttgccccaactgttccctggtgcttctatcaagaggatggagggaacattatgcacaaatgtccccaggagcaaagtccaatgactacaattcataaggtaagaatgacagagagaaaagatccctgcagacagaatttctagggggatcagaggaggtggtagagataggaagtgatgcagatggagagggaaggacccttcagagaaacttcctctaacagctaatgcaagctgaccatcagctggcctcagggtactgactagctctcccctctgctttactgcccagaatcctgccctgggagacactgacttagccatttccttactcagatcctattctcttagcagcattcctggcaccaagtccactttcggagtggaaaggtcttgagaaaaaaaatgggaaagaagttgagctgtcagtcaatcttcttgacaccatttctcttgtttgttgaaaaggaatgaattttctttctcttttccttttgggcataaggttctctcactccaaatgaagtattttgaagctcagcccagcctgttctgacctgcaaaagattgagttaattaacctttcatgggctgattactttcaacctttttgttagcacatcggggaaatatattagtggttactaattaaaggtattgatatgcctttacatttcttcaaattcttagattcctagaactaagttgattaaggaaaaaaaagggggggaagggggggagtatctgttgaatttatgaaaaagcgaagctctgaccttattctgtaacctatatttgtaattgagttttgggagttgagaccattttgtcagtataatgacagctcagatttactgtgtgtttttcatgtgtaagaaatatgataatttttcatgtgccatgttatttagctctcacgattctatgggataaatgtgagtatcaatcccatattaaaggtgagaaagttaaagtttaaaagtcaagaaaattgcccaagatcacaaagttagtgcacaccagaggagggacttaacgtgagaatctgtctccgaagacaatgcatttaatctcatcaatgctgacttaaccctatgacaatgcagtcattatttctggagtaagaaggaggtaaaaataaaatccacttgcaattccagggtgcatcatttttttctcacgattatcccagacacttcttatctccacccaggagcagctaggctggatggtctggctctggtgtcttcacaaggtggcagtcaagctggcggatgtgtcttgagacaaaccgggacctggggcctgggatcctttgttgcagggcttgcatccagaccagacagatgcctcttccagcaaaaaatacccacaaattatatgggactaaaaacagctgtgtgcatgtgtagttggggcaaattatggacaagagtatacaaaaagaccaaaatcccaattgccacttctgaaaagccaggagcaaaaaacggggtactgctcatgctccttgcacacaacaccacccaaaagggtgggcaaatcatctaaagcctgatccctggacacacccctaccctcactctttggtaaggaaacagtttgccccta

SEQ ID NO: 53673 - DNA, 1606 bp, Bovine  19866881012999
  misc_feature (1)..(1): n is a, c, g, or t
natcagctgctatattcatctgacatttccatcaagtctccccaaactcccaccaatgtctccttattgtttattatagtcaacccagatttcttagcttccttgtaagaagagccatgtattcacttgtcactccttccctttagcctggattcttgtttcttctcaagtaagattttccactgtctcttctcttgcctttacttccactagaatgccccaccaggttccttcttgtacaatttcctgttctttgtcactttcaaaccagattcaaagctatgaccccccccccaaggaaatactttcattcattcatacatcaattggcactaatatgtatacacacgcatgcacatagacacacacacactactaacaaagtctttttagaagatacttttaaatgcttgaaatgttgcaccagactgggattatgttgcctgtatatactcatcttgatcaacctgactccagggtgtttacttcctaatgtgtctttggtattttcatgacacaagcacatcagattgcatcctatattgcacatacattaaatgtgtattcactgcccagtggatcctactggctgacagagcttgggttatgaagggacagtgttataaaacccttcaaatcatctgatataaatattttaccagaagaggaaaccagaggttggtctaattataaaccaccagaagaaaaatgggtaatgactatcaatgtcacttaaaaaaaaaaatgaactgctgtcatgtctcagagaacttgaacatattttgtgtcccttctcattctttctattggcctactctgtacatgtctgaaaatggctaaaggtgtgtattttatcccttggtttcggagagaaaattgaggaaacattcatgggaagaggagggatgatgaaccttgagaacagttgtgtagagtctattgcctggtgagacgctcatggtttttaggtgtctctttgaatttggccgtgccactggaatcactccctctcattctgtagctcagctttatatcaagagtatccactggggtaagggtcagagtgtttccaggaaggtggtatgatgtcgttgtagtgtaaccacttggctgaactgaattacacctccccaaagcctcttcttctatgttcctggctagaatgtgtcatcagagataatttcacacaagatttggaggttggaggtcatgcatagctgtatgctttcactttggggaggttggagaagatgcttttgtctctcacgccttctcaccaatggaccagttcactttactgttgctggacagcacctgtgcttgcaactggcccgccttccccgggtcttccttcaatgtctccaactcttgggccagatgtgtttagcccatgacaaagctccagcttcttcaagacacccatgccactaagatgagaagccaaaagaatgccatgggctctgcaggcccttgatctcttcctctttacctccaccttcctttcccaactgcctgccctgggaagttgagcaagtcttatggagacagtttaatgagctgccacatgagttggtacaggtcaaatccctgtaacaaatccacatat

SEQ ID NO: 53674 - DNA, 1303 bp, Bovine  19866881021083
  misc_feature (1)..(1): n is a, c, g, or t
ngactcattggaaaagactctgatgctgggagggattgggggcaggaggagaaggggacgacagaggatgagatggctggatggcgtcactgactggatggatgtgagtctgagtgaactccgggagttggtgatggacagggaggcctggcgtactgcgattcatgggatcgcagagtcggacacgactgagtgactgatctgatctgatctgatctgaaggttgctctggtggaagcaggtgcagttgcttctggtacttgctctgtgcctcatagatgccaagtagatgcaagccttcagagggaggcccagggcaaagaagggcaggtgcaggaggtggactggaccatgtgccctgaagctggaccagcaagactgatgggtaggacccaggagggcatggatgtggcttacccagctccatgcaggcctgaaccaagaagggaatcatttgacctttggtttcctaccatgactttgaaacaaagtgaatctcagtgaagtgttaacagagcgctacacgtcctagatttttttttaaatcttttttatttgttttatttttagagagtataaatgccttgtgttgtgttagtgtctgctgtacaatgaagtgaatcagccacatgtatacatatattccttccctcttggacctccttcctcctcccattcccccattctaggtcatcacagagctctgagctgcactctctgtgctctatgaagccctagattattaaactcactttaaatgtgtggagactgagtctttgagaaattaattgtctcatcctaaatctttataactccaaagaggtggagatgaaaactgcagcttaactcttctgctttcgcagccaggattcttatttatattatatcgtactgtctctgcatcagagttaaatggaagccgaccagaaagtttctgtccttccctaaaatctaagtatggaaaaggagagagagagagccaaagcagactcttacacgttcgctgggatgactccaggcactcacagggtatggaaatgctgctctggattgtttcatctcggtggtgattgatttaccacctcttagtataacatccttgtacagctctgagctctttgggggaaagatttaatttcagtttacattttagatagaaaggaaagtaaaaaagctgtgaaattgagacatgagccacattatgtcggctgtgatttatccctgtatttctggaggacatcgggcagagtagctaacgtaaaatgaggggagtcaggcatcagggtcatggaggcaaagctta

SEQ ID NO: 53675 - DNA, 1204 bp, Bovine  19866881108159
  misc_feature (1)..(1): n is a, c, g, or t
nggaagatttgggagtatggcattgaaacatgtaaaatatcatgtatgaaacaagtcgccagttcaggttcgatgcacgatgctggatgcttggggctggtgcacggggacgacccagagggatggtatggggagggaggagggaggagggttcaggatggggaacacatgtatacctgtggcggattcatttcgatatttggcgaaactaatacaatattgtaaagtttaaaaataaaataaaaaaaaaagaacaacaacaacaaaaaaaattgaaatagcctttttttttttttcagttatcacattggcaatctcatatggtaagagtttatggggaggcaaaagaggagactctgatacatttctggcgggagagtaaattgctaccacatttggggaaactggaaatactgacgaaaattaaaaaacggaagtattgataccctttgcccaagaaatcccacttcagggactcttccctacagaaataaaagcacaagaaaatgatgatattatgcagcagcagcagcaaattgtttactgcagctttgcagaggaagagaatgaaaagtaagctgaaaaaaggcatcaacaatgtaaagactgaatacattatgatacatacattctattgaacattatgcaacttttaaagaaaggagttagggatgtttatttattttcccatgtcccaaatagctttttttgtttgttacaattctctcttgctttctctgcggactgttctcagcctcaaaaggaagacttcactgtagctttgtttacgttttcttccacatcagtagtaagagaactgtccccaggatggaaattcacctgttagattcgtattctgtgtggcatgaaattgctgcctgagacatagttgaggaagcaggaggtgaaatctcagggaaagtgtccagaaaagtgtatcagctctagcacggagaagaatgtaggctgcatataaatttaggctggttgtttcctaatgattttaaggggtgattctttctaatggcaggggcccgggggggagggtcacggctgcctctttacctgacagtggaagatttagctatacaacatagggttgttcttgtgacgtcaaggttaatgtggctgtctgtaccctggggacctgctggctaaggtcatgtctactttctgcaccgttatagtaaattagtcacttttt

SEQ ID NO: 53676 - DNA, 2406 bp, Bovine  19866881165087
  misc_feature (1)..(1): n is a, c, g, or t
ntgctgggagggattgggggcaggaggagaaggggacgacagaggatgagatggctggatggcagcaccaactcaatagacgtgagtttgagtgaactccgggagttgttgatggacagggaggtctggtgtgctgcaattcatggggttgcaaagagtcagatgcgactgagcaactgaactgaactgagctgaaatgagttactacagttacagagaggaccacatgggattgtcccttctcttattttctgatcaaccattccctctccattgattgattcccgtcagtgtacgcattttactgtaatatctcccttgaaaaagaatccttgatcttacatccttctccagtataaactttatttcttttctctactattccaatgaaatttttcatcagaatcacgagtgaactccatcttgcctagtctgaaggtctgttctaaaggtcttcgagtgggacacatttcagcagcatttgactcatcctggattcccttgttctgaaacacagctctttcttgtttcttttctttcaccactggccactcttccttcgtcccctttacagacacttcctcactggactgtcccaggggttagtctctggaacttttctgtccttttttctgtgctcccttgatgatttcattcagtttcatgaaagctacagatataaatagatgacaatggctctcaagtcagtacctcctgccctaatgtttcccctggaatcccccagaatctgactcttttttcatatcttcacttggatgaataataggcctcttaatcttaatgcagtcagtcttcattatttgaggatttgtctatttgctgacatttatctgtgaccccccaaatcaatactcatggtgccttctcaatcatttgcacacatgtgcaaagctgcaaaaatttgagttattcaacatgcacattccaactaaggtcaaacatggcaacactttgccttcttatatcaactcccataatgtaaataagcatcctctagtaatctctttaatacaacattaaaataattgtgtactttccttgtgatttcactgtttaaaatgattcctaagcattgtgctaagcactatctagcattcctcagtgcaaaaaggctgtgatgcgccttatggagaaaatgcatgtgttacataagcttcactcaggaatgagttatcatgctgttggcaatgagtttaatgacagtgagtaaacaacaatattaagtaataggtctttaaacagaagcgtacataaaagaaggtcatgtattgatcagctgacaaaaacattgttatcaggggacctctggaagttatccctatatttcccctaggtgcaaaggttcagtattagctaattcagggttcatggtgactttgtagaatataactattgtgaataagcagaattgactgtatatccaaaccttaactgtgaattcctcccaccccattcttaatctcagaaaataactttattgctctattagcttggcccaatctttgttcatcttttcctctcacctcccacctgcaatcaaccagcccttttatagattcctttgaaattgctccactttttacaccttcattctttcaagcctggttcaaatcgtgatcaccatgatgacggtaatgacatcctaattggttaccctgcttttatccatgaccatgcccacccttcacattcaggtaagtgacagtgtgacactcctcccctgggaaccttctccagtgacttatagtattcagagcaaaggccagagtcttaccatggctttcagctacgctgtcctccctgctgatcctctaacacatcatgaactgctcaccccttgacctttcactttcttttcttcaaacattaatcctgcaagggttcatgtgtctctcgcctttgtgtctctcctcaaatgtcagcttatcagagacagccccccttggtagtgctctatgtagaattgcagctcccccaatctctctccctttccctgccctatttttcttttttaaaaacattttctttatttatttatgtctgcgctagggctttattgctgggcacagactttctccagttgtggtggcttctcttgttgaagagcacaggctccagggtgcacagacctcagtagttgtggctcttgggctttagagcacaggcttagtagttatggtacactggcttagttctccctgcgacatgcagaatcttcccagaccagggatggaatctgtgtcccctgcattggcaggcacagtcttaaccattggaccaccagggaaggcccctgctttattttcctttgtatcagttttcattcaatgtattatccatctgtttaatgtttaatgaaatctcaatagattgtaagtgtttgag

SEQ ID NO: 53677 - DNA, 911 bp, Bovine  19866881282880
  misc_feature (1)..(1): n is a, c, g, or t
ncccttagattacagtgaaatgtgcacagtggtttcaggtatctgcccttcatctaagtggaacaacacccccaaatgtggggaaattaccccataagcacacttagcctttattggatttttctgatcttgttattcatttcctctggcagccagttcagaacaagcaagggaacactatattccaaactgcatttttaaaatgtgaatattctgcctgttactttatgttttatgcattgtttgcaaataggaaacacgggtcacttcatattttatgaattttctttgaaaaatgatttgaaagaaagttcaatatcaggagcatagaccttggctctgactttgccgaatgtctgatttttcccatgctatctattttcttaaaaaaaggataatttaaagcaataccttgccctttggcctcattactataatctgatgagaaccagccttaaaatgtatatatttaataaatatgtacttacccaataagctgtaaaaagcactgcatgggccttgaagtcaagagtacaacatgtttttcaaaatatatcaaggtcaaatttgcttacctgataacatgtaaaaggaattcttggtataagttatatactgtcatatacttgcagatttaggaccaagttgaccaaaaattctaccagaaatgtcattaaggtaaaagggaatcttttggctatgggatatattttatttccaaatgcagttttcctttttgcctgtgttactgaaatcttagtaaatcttttcaattgtagcttatctcccatgataggttctttctattgctgtacatttcaactcaaagtatgtctttccctctccacatttcttatattgttcctatggttcctgtcacagttatattccccattttctttcccttccag

SEQ ID NO: 53678 - DNA, 1323 bp, Bovine  19866880111805
  misc_feature (1)..(1): n is a, c, g, or t
ntcatggcatctggtcccatcacttcacaggaaatagatggggaaacagtggaaacagtgtcacactttatttttttgggctccaaaatcactgcagatggtgactgcagccatgaaattaaaagatgcttaatccttggaaggaaagttatgaccaacctagatagcatattcaaaagtagagacattactttgccaacaaaggtctggctagtcaaggctatggtttttcctgtggtcatgtatggatgtgagagttggactgggaagaaggctgagcgccgaagaattgatgcttttgaactgtggtgttggagaagactcttgagagtctcttggactgcaaggagatccaaccagtctattctgaaggagatcagccctgggatttctttggaaggaatgatgctaaagctgaaactccagtactttggccacctcatgcgaagagttgactcattggaaaagactctgatgctgggaaggattgggagcagaaggagaaggggacgacagaggatgagatggctaaatggcatcactgactcaatggccgtgagtctgagtgaactccgggagttggtgatggacagggaggcctggcatgctgcgattcatggggtcgcaaagagtcagacacgactgagcgactgaactgaactgatgaattataaattcccacatttaactaactgggaaatgttcatttcattttatttctaacggctatattaatcttctacatctcaatgtagcaagacagccaaattaaacatttttaaagccatagtcatatattcaggttttaaaccaaaagtatttccattgtagaaaagcaatagtctaattaattataatcttagggatgacattttccttactgtgtcttaatacctttcttaagcacctgaaagaatattttaaactatctcacctatttctgaatattcattggaaggactgattgctgcatgtgaaactccaatactttggccacctgatgtgaagaactaactcatttgaaaagaccctgatgctgggaaagattgaaggtgggaggagaaagagatgacagaggatggcatcaccgactcaatggacatgaattttagtaagctcagggagttgtgatggacagggagagggaagcctggagtgctacagtccgtagggtcgcaaagagtaggatacgactgagtgactgaactgaactgaacacctgtttctgaggtggaattgaatcaattcaattgggttaggccaaatgtattttagagaacttagtgatgtgtaaatctaataccctccaaaagtaaaatacat

SEQ ID NO: 53679 - DNA, 2409 bp, Bovine  19866880507075
  misc_feature (1)..(1): n is a, c, g, or t
natgaaagacaataaaaagcagtatatccagaacatggttcaagtgaaaaaatttccaaattcaaatgtgtttagaagcagcttcaaacatgttcttttttccttgtatctgtttctttaacccagctttgatgaacacatacatgatttccatttgaaagtttaatacattatggttcacataattgacaatgaaagatagatcaaagaatatatagacctagattattcttttccatgctttggaaagactggacagaggggttaagaacaattatctcttacatttgtgtgatttccagagagtattacttgattatgttcgtaatgttcaagaatcatcccaaaggtcatgaatattagtctcataaacaaaatttacttaattttaaatacaagtaaagattttgtgatttgtgattaagattaaatcacaaaaaaagatgtgtcattaagattttacatcccccccatgtagccatatttaaaagtcaagaaactgaatatattataaaaatattctcctaatatttttgctcattgaattttcgactttataaaatgagaaacatttctttgttatttgtcaagtcatggagtgcttagtcaagaaaataagaaagtttgcagacaccatgatttaaaaattaattgagcaactaaaacatatatattttaaatatataatcttagcatgtaatacaaattattttacttgtataattgtaacatctaaagataagtaggtgtcccaaggctgagtaaatcaatactcaccttgtgttttcactgggtctgatatctggcttggatcactaattccatatgcattggctgccctcacaaggaaaaggtaaattgcattaggtttgagtcctttaatggcaaatgtttctgttttcacattctccgctacagtctgccagctgctaccagatgcatggctatggatagatacataagttagaacatgcatatttaatggtaaatcaaaaaagagaactaggaaacaccatcttcactctacctgaaggcttctataatataagacgtcggagttgcacctgaattcaaatttggttgccatgacaacgttactgtatttcggctgacatctgtaacttcaggttttgagggggcactagggattaaatttgggtcggtgggtcttggaggctgaactggaactccaaattctaacaaagaagaaagaaacgaaagatgcttacgcagagaagcacataaatgtagataaaatatccatcccctacttagacttccaagacatccacttcatctttttaccagtaaggaaacaactacatttcaagcttcacttttaggtaaaatagtatcaaatttaccttggacttcaatgtaagcactccacgttgcttcaccactgggggttgatgcaatgcacgtgtatcgaccagtatcacccagctgagaagacagacggaaaataaatatttggaatactcaagagctcactgggctggaaaaacgattagttttgtatatggcccatgaatatggagagctgccttaaaatgcactaaccagaagcttcctcttaatttaacatgttttcattggaatgtgacttaaaatgctgcatgaagacaaaagacaaattgttattctaattgtatgataaagatatagtatttaagtgcattaacatcatcaatttctgtgtcaggcacagtacacgaggtatataccttaaattcaaagggttaatctttaatactagtttatatttcatatttactaagtcacatggtaaggctaataaagtatatccaatgactcttcttgctgtttcatattttacttgagttacatccacatggataaaggagataaacagatatttaaagaaaatggatagacacaaaatgatttcttcttaaagcattccctctttttcctcattttatttttctaacctgtaacttcaggcagtttagcaagtataaagttaaaccccagctagaatgatgctctctcctccttcagaagtctgactgccagaaaacaaacacaggtcacatgttcaatggtaaaatcctcagtaacataatgaacccatatacctctgcttaaggcaataactctatcatcaaataatattggataatgcaagaatgctgtcattttgttctggcaaatgtaataacaaagttacaatcattgtcacaaaaaagtacaacatattaactttcatggcacatgaaatgaactgctatgctgatccaaaactccaaagaagccgctcacaataggcaataaagcaattgaaatttatgtttattgctgtcaaagctactctttcatatgcctcatgagcttgtctcatcttgacctaaaatgaaaaagaaaaaccgaaacaaacaatatagt

SEQ ID NO: 53680 - DNA, 4230 bp, Bovine  19866880508574
  misc_feature (1)..(1): n is a, c, g, or t
nctccttgacctgcatacaggtttctcaggaggcaggtcaggtggtctggtattcccatctcttccagaattttccacagtttgttgtgatccacagagtcaaaggctttggcatagtcaagagagcagaagtacatgtttttctggaactctcttgctttttctatgacccaacggaatgttgtcaatatggtctctggttactctactttttctaaatccagcttgaactggattctcagttcacatactgttgaagcctagcttagagaatttggagcattattttgctagctagatgagtgcaattgtgaggtagtttgaacattctttggcattgcctttctttggaattggaatgaaagctgaccttttccaatcctgtggccactgctgagttgtccaaatttgctggcatattgagtgcagcactttcacagcatcatgttttaagattagatatagctctactggcattccatcacctccgctagctttgttcatagtgatgcttcctaaggcccatttgacttcacattccaggttgtctggatctaggtgaatgagcacaccatcgtgattatctcggttgtgaagatcttttttgtatagttctgtgtattcttgcctcttcttaatatcctctacttctgttaggtccataccctttttgtcttttattgtgcccttccttgcatgaaatgtacccttaatatttcctttctggatcatggtgataacataatgtgtctccctgcttccacttattctctcccagaatctattctctaaacaacaaagaaaggctttttaaaaatggtgcaatagattctgtctttagacagaataaataaggacactgacaatttttttttaaccatcttaatcatttttaagtgtaatgctcagtactcttaaatgaattcacatggtggtgaaacagatctccaaaatgactttaaattatgaggcatatcttatttctttaatatcgttttacttttatttacaacttttttgcaggttgtactgcctttactttttctgctcttagaataaaacccaaacatatgatcatagcctctaaggtcactattccagtctgttcaggctgctgcaataaaagaccacagcctgggtaacttataaacaacaaaatattatttctcactgttttggagatggaagcctaagattagggtgccaacccggtccagtgaaggtcctcttctgggtcacagacttttctttgtatccttacatggaagaatagacaagggagctctctcttgaggctcttttataagcgtcctgagtcctaatcccagagccctcatgatatgatcacctcacgaaagcctcattttttaataccattgcccttgggggttagttttcaccacgtgaattttgaaggcacacactcaggccttaatagcctggtgttatctggctgaagcctctctattccatttcctctcatcacaactccttactatatgcattcaaaccagtctcctttcagctttataattttgccaagttttccctacctcagagcctttgtaattgctgttccgtctacctaaaatatttttcaacttttcaccacatacttggaactttttcattcttcatgaatcagcttcagtgttaacctcctcagaaaagaatttctttcacaatcttgtctaatttagtatggtctattccccagccaattactttctgatatatcatgtagatcattatatttattataattggtaatcatagtgtctattcaattaatttgggcttcccttgtggcttagctggtaaagaatcctcctacaatgcaggagagttgggttagatccctgggttgggaagatcccctggaggagggattaatttgattatttatttttcttcctctaatcaatgctctccatgaggaaaaaaaatctgtcattcttatgcaccaccaaatctctaattctgtgaatagtgtctgtcatagagtaagagtccttatcccattcttccattaagaaattaagtgaaagagaaaaaatattactctcctcaaattgaattgttcagaaacattatataaggagaacaaaaaatacttatgctaaaatgaacaacttgaattagtataataatttctcagcattttttcttgtgttttccaacagcatgtatttttgttaatagtttcagatgttcattttgtacaaataaggtattaaaacataatggtttaataaaaagaatttcaaaataaaacagaagcatgtctcttatttaaacaagtttataaatatgttcaaattatccacttaaaaatggagataatataggcattgtaacctggggacattatttgaaactcaagagacttagaaaatgaatgctatttctaaaaataaaatacacctttttttcacatattatgtactcacatattgtgtatttcacacattaaaaaggacgatttaatgttgtttgccatctggaaaactaaagcataatagctatatctctctatgtctgcgttcatggtgattctgcccttttcttctaaaggaaatttaggatattaatcagtttatctcttgtctcttgaaagactttccactgaggcatttttaaaatcttggtttccaaggagaaaaaatatgaaaccgcaacttagtgactactaattcatttaatctataaatcagaaggaacagaaaaataatacatatcatttctagagcttacaacttccataaataaaaatttcattttctggtactgacaacctgagtttctactatgctagtgagtcctcatcatgtcacttgctctttatgactaaagtaaatattaaagcccacatacttgatagatctgcagtgatcctctcttccactctgcttctgaaatgaaataagagttcaataaaatgctgcactacaagacttttgttcagatgcatacagtatatctttcgatatgtacagcatattcatttcttccaaatgttttatcgaccttggtgcttgagggtgatgaaaaacaaagagtagaagctgaagtgctgatatatttacagaaggattcagaaagtataaagtttattggttaccattatcaagaatagcgtttaatctgattgaaatttttgttttgtattgtcagcgctagggtagaactgattagggtatgaaaacattcaggtgcttttcgctaagagacataattaaagtccaagagacttaggcttggggatttaattccaagcagtctctttactgaagcttgaacttggatctcatccaggtttttccctgtctcattttaaatcatcatcatatacttcagtagcagccatgcaaatgaacgtattcctcatgttctgggcattcaagaaagtctatgaagttaaaataaaatggcatagaattttctttttcttacatttatttttgctaaaacttcctgtgcgttgcacaagaaaggaaagtgctgaatttatttctaaacaacatgtgttcatattgtgctgctaagtcactttagtcgcatagatggcagcccaccaggctcccccgtccctgggattctccaggcaagaacactggagtgggttgccatttccttctccaatgcatgaaagtgaaaagtgaaagtgaagtcgttcagtcatgtccaaccctcagcgaccccatggactgcagccctccaggctcctccatccatgggattttccaggcaagagtaccggagtgggttgccattgccttctccgtttcgtattgtagtgaatatgtatttgtaatgtagtggaatagaaaacagggactaatttcaagtgaaagaaacttgttatggcaatggtggctgtattgccaggactccttttgttacagaagacaagctcaacaaactcaggcatgaaagagaacttactagtacatttaatttggtaattgagaatgtggctgaccagatgagcttagatccagggacccaaaacagattgtctctctctcccttcatctctttatttagtttctcttggccattggtctctttctttaatactgcagacaagaattcatgatatggtgaggaaactggctacctggagacatccagtcatagtctgcttattcaaggatcaaaaaagaaaagctttgttttcttcaagtcattcattccaaaactctctatcacatacttaagtgccagatt

SEQ ID NO: 53681 - DNA, 1828 bp, Bovine  19866880522134
  misc_feature (1)..(1): n is a, c, g, or t
naccattaagatcaatccattactgaattagaaatatgactgaatttagcaacaaatttgtgccaacattacttctagcagcagtaggttttcagcagcagattggcactgtgacagggtccataattttcacagtatgtgtttcataatttgtcatgcacactctgattgcttggcatattggcagggtccacagtgctctctaaatgtcaccaaacgcatttgaggatttgtcatgcacggtctgagtaagtgacacaacacagcagagtggccaggttcagagctgatttttgcactccctgtaagtgttcttgagctcagccaccagtgacgagggcctgatgggaactgcagagcccttctcttggagctgctgatttttaattttgcgtcaagtgatcatatggatgcttccaggagaaaatactactacactgcaggtgtgatttgcacagcctagaatttctgcctgataatattcttttcaaatcatttcttgtagtgtacttaacatttttttcatacaagcacaaagagcatatcacaaattcggagtaggaaaaggagagtaatacatatgaatagagagtggagaaagctatattcaagaaattatccagttaagagatcaaaaaatgagacgtctgctgtttataacagaaaggtagaatcgtgtcaggatcagagaatactgggctaggtgttaatctggtttctgtaggaataacttgtgagtttaggcaaaccatccatcctatttttggcttataaatgagggggttggatgagagcatctctaagggtgctttcatgtctaaacattccattgttctaagagaggaacatgagtttgttaatgtctttcagtcatctttcccctttgcctgcaatgactgcataatgctcttgcagggtttagtaaaagcttcaagagctacctctgctggaagctgttagttgtctaggattctggctattatcttatcacttttagtcactgtcttttaggaggatgaaggaaattagtcttttttatacatttgggtccccctggatgcacctgttactatgaaatctgtttgatgataaataactcacatatgctcaagagtgttgtcttgacatgtgcagtgagagactttcagagacatatgttgtaaaaagcaatagctgcgactttgtattggctcacagatagtgaaagtagaggagtgagtggaggctgacaaagactgtgcaggcagggagagaagctaaggaaattttgaaaagttcaaacctgcacactgcacttaaaaaaaaaataacagacataagaagcccacattaatcacaaatatgtatctattggcctaaactgccatatataaatccatgttaggcacagaatttttactttaaagaaatccagaagactagaatcacttcagattaataacttttcaaaaaaattattttctcttccaaaaagtctgccatgattttgcctttattgaaaatgtttaattttctgtgctaacttgatggagacaagaagaaacattaccattcttcctttatttctatgaaaaagtattttttaaatgaatctttatttatgggaaattttccaccattcactcacactgccaacccctgggtaaaaatcgggtgactactgaacccttatactcaactctcaccacagtacccatgaacaagtgaagattcaattggtcttaggtttcttgctccaacacctgatgaaaattaggcatcttacttttcaaactctaaatattattgagagattgattcatataactgcttctgtaccttttattaa

SEQ ID NO: 53682 - DNA, 1494 bp, Bovine  19866880573988
  misc_feature (1)..(1): n is a, c, g, or t
ngacagtgaaatttgcctcaatgttaactcccattcctggtcttttttaggtgcctgaagttagaataagcatatcttgctcacacaaaagtctcttaaaatattaaggaaaaaaaaaatcagacctagtctaactttattgttttgggggataaatttttgtgccaagttctggattttttttttccagtgatatgaattttagctttcaatgcagcctcccaaaccatcctcatcttcttcttaaatatcttaaaattctacctgaaaatgtagtgctcaaaaaagaacacattactctaattcatgatctgaccagttcagattttgctctgcatataattctgctaagactacatttgtttttctgacaactactcactcaggtggctctgggaggtgttctaattgacttcaaacactgaagtcagctcccccaccgatcctgcccccaacacacccaatgcacacactccttttaagcccagtatcctcagcctatccttctacagctaaattttaaaacctaagttcaaaacctaagttcaacctaccagtcttttaaatttgctccattaattttaatcttgttagtgctggcccatcattccagtctgtcgagttacttaattctggttctctcactcggcatgtgagctgtgtttctcaaattttatgaacttcccttatttttagtccagtgaaagaaacacaaatccaatgacaaatgacaaagtcttatggtataacacagaaaagaagtctgagtcctgcatattcataaaattggctaatttaatccttgtccaatcctgtggagtagggatttttagccccattatatagttaagggaatcaatgctcaggactcaatagcttgctaatagattgaggagctgagataacaaattttttgatttcaaaacggtatgcctgttttactgtttctagttttccagctgacatgggtttatttcatttaggttattctgcttgctatcatgtataaaggttaagtagattaaaatttttaaaaacaagttaacggataaagcattaactactcctcatttacagttgaggatgtattttacaaaatcattcatatgtgtatatgacagatcacagttaatcagaaactttcactaagttctactgggtagagaccactggactggggaccaaagtttcagttcactttacagctgtcctactttctgcattctttacaaatgcgtatataacactgaaaacctcaaactgccttaaggcaggctccgagactactaaagctactggtgaagtgactcataatagcaaatatatgcatttgggtgtgttgatttcacacagcaaaaaacagacgtgggcatgttccacagctccgtttgctttctctgggaattctgaaacaaaaggtcctcctcacaaggttgtttatacactctctagagaagacgaaatgcccaacaggcagctagactctctctcaaa

SEQ ID NO: 53683 - DNA, 1605 bp, Bovine  19866880582404
  misc_feature (1)..(1): n is a, c, g, or t
ngttttagtaccaaataataaagtgaaagccctggtataaaagagttttggcaaaattaataactcctggatctggggctaccaccatatggatatggcccattgtgaataataggaaagaaaacaacaaaaaagagagaaggatgaagtctttccaggacttcccttgcctgatgcatgcgtgaggctctgctttttagcttctgtcaatagcagacgtcttagaaaggaagccaagatatgccctctgacgaagtgttcctttcctctgatgaaaaaagaagtcgacaaggcaactaccagctaggttctcccagacttcaagaagtctgtctgaactgtcagctagcagctctactttcatataaatgaggattccccaaaattgaagaaagctgaagcgaagttttaaaaataaaagcacaagtcttatagctaggaaatagcaatgaaaattagtgacacggttgtgtttagcaatcggaacattaattttcctaaatatgagaggtcttctgttttgccaaatagagtgtccaggagcctgattggtgccaaatgaaaaaatggcagcactccctccatctatgtctctgattataaaacagcaggagagatcattagagtagcatacacgttctgctttggggcatatgtcaggttcaatactgagagcagatttaagctttgccaaggatgccaagtacttcttcctgtgacttctccaacagtgaggtgctgagcttgtgctgctggcagttttgcagaaaactgtggtggtgagtgacacagatggtgtggagagtctgacattgcatatcatttaccaatcagaaaatgactcagttcttttatgcatgcaattacaaaggaccacctgtaccagtgtgtgtcgcctgcaacagtaggaaaagggcacgggcccatttgaaagataaactctttcactctttgttatatatttctgtggtttcagcactgcctttatttgtgttcagtctgtgagaattcaataacatttctcattacgattctgcctattagtgtatcggtgtgaagctatacttcttaaatctcatcttatcgatatatctcctgaaacagcaaaatgctatattgtaaagtgatttccttgtctaacctctaaagcctggtatcctaagcaatgtcaagcgcactttttagatattttttgggtgtacttcagatacttgggaaataccttgattatataaaaacctaatgatgagattaaatgatatcctcttgacattaaaagtcaggaaagtagcatttcttcaccacctgtggtagatactttatagatattaacttatataatcatctcaataactccctgaggtagacagtggtattcctctgtaccgatcaagaatttgagacagaaaatttaaataaatttccagattcacagagctaatcaatggtagagaaagattacaacacattgtgtgattctaaattctgctctattttcacaatggtaaataacttgcattctcccaaaagggtggtcttattctgtcttcattagactgctagattgattttttcccctaaaatgaaaatatatatttattatat

SEQ ID NO: 53684 - DNA, 1838 bp, Bovine  19866880586307
  misc_feature (1)..(1): n is a, c, g, or t
nattggggtattattttttgtgttttcctttttccttcttactggtacaactcccaacttaaaagtcaaatttataaagacaattaatgtatgcattgtttaacataagcatgttaagtgttaatttatttttagttgttttgggcttcataagaaattctttttgttttctgattcttcatttccatgagataagtaagtcttcgggggaaaagaaaagaattccagtataaataatttatctttcatttttgtttgatgcacattttgcttaaaagtggagtaattcatatagttagaaaggcatcttggtacgatacattaaaagaaaaatcatttacatatttttatgaagtatatagaatgataactttgaaattttccctaaagaaaactgaacataaagctaatgaaagaaatattcttgagtgaagatgctcttattagtagaataaaaagtaaaataaaaaatctatgccaatacaactaaagttctgtatgtgtgtgtgtatatacatatatataaatatctttttaacatagcattcacataaaaagcagctggatgattgttactaaaattgatggcttatttggtatggctgcctcaatatatcaattatgtgttataacaggaacttgcattaagagtctctagttgacttcataaggtgttttttttttttttcttaaacataataaagtagtataatacatcatttaaaagataccagcaaactaaagtttgaaatgtacacttattttcaatttttctctaattttatgtttatggttcaaaatatgtattaactatttcaaagtaatctacttttacaatgcctattatagcttgatgacaaatatacagaaccaaaattttaaaaataataatttcagtagcccaaagacattctaacagataataataagagagcaataaatgctaaagaccccaagtaagggcaaatgaaattgatgtttaacatgaggacaatttggcagccaagggggaaaagtatgccttcttaatagataaccaagactgactgtgaaatgccaaaaatgattgagtaccaggagaaatcatcagtcatctttcagagtcaccaggaaaaaaaaaaaaaaacttcaagatgtccaacagggcacttaaaggaaattaaaaccctagtacacatgaagtctgctaggcggctgatcgtgcaaaacatgccatggtgttaagataccagggacagagaaaaaagagttttaactatgggcccagattcaatttgatatggaatttactatcagcttactatctgagatttaccattttcattttgtcttgaaataggagtatatgtttaaaccaagaatcgataaattttttctgtaaaggatcatacagtaaacacttcaggatttgcaggatatatttattgttgtttttcagtcactcagttgtgtccaactcttcatgaccccatggactgcagcataccagacttccctgtccttcaccatctcctggagcttgctcaaactcatgtccactcagtcagtgataccatccaatcatcttgtcctctgtcatccccttctcctcctgccttcaatctttcccagcatcagggtcttttttaataagtcagctcttcacaacagatggccaaagtattggagtttatgaatcagtcctttcaatgaatattcaggactgatttcctataggattgactggtttgatatccttgctgtccaagggactctcaagagtcttctccaacaccacagttcaaaagtatcactctctggcactctgctttctttatggtccaagtctcacatccaca

SEQ ID NO: 53685 - DNA, 1303 bp, Bovine  19866880756388
  misc_feature (1)..(1): n is a, c, g, or t
naaattttggaaaataaaaacctaccagaccattgccccagaaatatgagtaccagtaagacggacataaacgtgaaaaataaacctttctttccacacaccacaaagatgtatgccaagttgtgactattaattaatgtgaatcattttttattgtgatttgagaaaatacttctccattatatttccatcagacatgtatacatagtgaaaatatattttaatgcccctgaaagcattctcagcttaataagtcatgggtataaagtttagccatgacaaaaaaaaagatttgcacatagttgtcaaggggttaaggatattagcttttctgtaaatacagacacattttctaagaacaagtatgtttctaaaagctgccaaattctgctacttagaagaactccaaactgggagtctgttaaggagagataactgcatccagtgattataataactggattaaaaccgagaaggcaggaccacaggtacctttttactaaaggtgatgcgaaagaagaggaccctctttgaaagaaacagaatagaacagaatattaggacttggacttagggaaaatgaaaagttttatctttcaaatgtgctgtatattttggttacctttaagaatgttgattctatggatagagaattgctcgggagagaaaattttgttggaaatccagaaagcttaagttaaggggaaaaaaatgcactgccaagtctaaaatcatcaattgatcattagcatgttaaatcatgctgaggctagaaacagtgtgcctatctaatgaaacacatgcaaacaaggctcggatgcactgtggaatcatggataaacaactgcactgaagggatgacaagcaacaccaaccatttctacttcaagtgcatgcctgctaggagtaaatgaagtactgtttccattgtaagtcctttccccccagcttactgcagaaaatgaaataaaaacagcaacacaatagtacaacacatgccgaactaacgaaggaaaggaggagggtaagcgcaaatatatacctgttggtgtgaaggtaaaagacgggactgaaaaatcaaaacaaaatataaaccagttattaagctgaagagagaaagggaacacatcacattagtataaatcaagcagacagctgaacataaaacaaatgtaaataaccaagccagtcgttctgacactctgatatgtggataaaaccaaatctaagggtctctgcaggtaccatttcgaagtgtctgacattctaggacaggaggggcgtggggagtgtgctgggttag

SEQ ID NO: 53686 - DNA, 1035 bp, Bovine  19866880760269
  misc_feature (1)..(1): n is a, c, g, or t
ntatggatgtgagagttggactgtgaagaaggctgagcgctgaagaattgatgcttttgaacttggtgttggagaagactcttgagagtcccttggactgcaaggatgtccaaccagtccattctaaaggagatcagccctgggatttctttggaaggaatgatgctaaagctgaaactccagtactttggccaccacatgcgacgagttgactcattggaaaagactctgatgctgggaggcattgggggcaggaggagaaggggatgacagaggatgagatggctggatggcatcaccgactcgatggacatgagtctgagtgaactcctggagtttgtgatggacagggaggcctggcgtgctgcgattcatggggtcgcaaagagtcggacagggctgagagactgaactgaattgaactgaactgaaaactatagcctgggatatacctgagtttttgctaaaataccaaaaaagaaaaaaatatatatagttgaacatcaaaaaattactgctaaccacagcaaaggaagtgaagtgaagttgctcagtcgtgtccgactctttgcgacctcatggactatagcccaccaggctcctgtgtcagtccatgggattttccaggcaagagtactggagtgggttgccatttccttctccagggggatcttcccgacccagggattgaacccaggtctcccgcattgtaggcagacgctttttaccgtctgggccaccaaggaagtcaatgcacatctaatacacaaataatgaaaatctagagcaatgatcaaataaatagccattgggattacctttataattatattgcgtctaaactgatttgtgtgctggaactgagaaagctttctgttaaaatgctttcaaaagagtgcttgagcttcacaggtagttctaagattttagctttagttttctagtttcagcatccaaacatgaggagtgtatgtgtaaatatttaaatagaattacaagtttctggaaagtctcaagatgtttcttgggatgata

SEQ ID NO: 53687 - DNA, 2188 bp, Bovine  19866880800961
  misc_feature (1)..(1): n is a, c, g, or t
ngctgcagtcccatctgcagtgattttggagcccaaaaaaataaagtgtgacactgtttccactgtttccccatctatttcctgtgaagtgatgggaccagatgccatgatcttcattttctgaatgttgagctttaagccaactttttcactctccactttcactttcatcaagaggcttttctcagcccagggatcgaacccaggtctcccgcattacaggcagacgctttaacctctgagccaccagggaagctcttttataattcataagttgatataatttcttagacatattgtctttgtaactatggatacatcatttcttggtaggatttttacttagagcttacagttttgtagtcagagaaggcaatggcaacccacctccagtactcttgcctggaaaatcccatgggcggaggagcctggtaggctgcagtccatggggtcactaagagtcggacatgactgaatgagttcactttcacttttcactttcatgccttggagaaggaaatggcaacccactccagtgttcttgcctggagaatcccagggatgggggagcctgatgggctgccgtctatggggtcgcacagagtcggacacgactgaagtgacttagcagcagcagcagcagtgcaatcttaagtgttccctatagaaaatttagcagataatatcgtaatgtgaagaatataggccactgtgtcgtagcagtttcttagatttttttcatttgaaggcattaataatgttgcttataaacccatggcactgaatcactgtcttttaaaaatgtcatgttcaggtgtattgactaccaagttgtaaatctcatctctaagtgtttttcttttcttcactacccatcttgttacattttgggcgaggggttctattttttcctattgatggccatttatttcatctagaaaagccaaataaagcaacatttggaaaatattattaaatacataatttgtgatgacatttctcagaggaaaaaaaaattcagtttcttgatatgtgggacttaaggggatgattccagtggaggcttctgttctatgagtaatgaaaatgcttgatgacaaaaacatctgttctataaatacagaataggcattgattcttcttttggatttactctgttacaatagtctgtctgaatgtgataaatcccactagtaaaacaagttgaatgtattgtttttaaagctttactggggacagaagctttattctagacttaagtgtcatggcattatatataaaaatatttatattttaggaaaaactacttctttccataattaatatgggagagagaaaacttactttgtactaacagatcattataaagtgctataatgttctggaagtataattctttaaaatattctcagggcagatttttaaaaattaagtccaacattgacttgaaagaattcagctatttcagttgaccaccaggccagttccttagctcagctccatgtgacagttcagacataattaattattcaaggccagataaggaagaatgcgaatgcatttagtatattttaccttttaacatttgatttgtgtttcttaaagaaattagcttgtctccatgttaataattgcttgtttcatcattaagtagtgtaagcaccttagtatgtctgtggacatactggagatgtatttcaaataaccaaatagaaaaactcactttgtgtcctttggtaccttcatttgcctcttctaccaatttcatcttctacttcctctggcccccctccatcaagtttttccttcctctgccttttcaaactctcatttcctattaaattccgtctgtaaacacacccaagccttccccatccaaaatcactaactcaacagcaatctggtctctctctccttccccactctgctctctctctcctcttttattaggaattttttaaaagcttggtgtaccctcattaagtctagttatttaccttccatttagtgaaaactgctataatctggtttcaatcatcatcactccattgtaattcttgttaattggctcatgaatgtccttctatttgtaataaggaagcagtcgtgttttggtcatcttcctggacctctctactctatttttgcactttcataacatatttccttcgattcggaaatgcatcct

SEQ ID NO: 53688 - DNA, 1199 bp, Bovine  19866880844102
  misc_feature (1)..(1): n is a, c, g, or t
nagaaagctgatgtctatggcctgaatatatacatgcagagaggtggtagtaccatcaggcattccagatttatccatgagagaatgttcttatgccaaaggctgtttcatgaatgtctgggctatgatttagagaggattccctggttgcaaaaatatgccctggtttaattcctgaatcaagtggatttattcctatgaagacctcccttgctgtggtctttcagcgtctggctttgtttcacaggtatgaaaacaggaaaccatcagcaatacccagaaaagaaaagattagtgctgactgtcagacttgtacagcgttttactaaagatggttagcagttttgtttctctttcttctttcttttatcacattttgtcatacactaaattcagtaattttatcatcagatggtatgttcctcagattcaggaataatgttttgtttttatctttcccattatctaactatacaaagcagggcactcaataagttaactgaatttgaattacaaaatggttttggtcgaaaaaaaatttttttcttacctcctaagctagaagttgctgtttttgaaaagaaagaattatcttagaaaattctgatgtttggctcgtgtaacttatagcttctttcagcccctttcaggcgactgtcagatcaatttgtgatttctctgtgaatgtattaaatgtcactgaataataattaccaaaaaatcataaatgtaggattgaggttcattttaattagaggggaaaaagaaatctccgtgttaacaagctacctagattctcctattatttcaacatatttccccgtgagtggagactgaactacgttgaatttatcacaagagcaaacaaacagatataacctacagcttatgagccattgctgtgttcagcaggtttccaaatgaacactttttctttgatagtatctgttaactagctatatttcttaatcttcataaatgccatcacttaattacttgaactccttttaatgatttgctaaatcagcaagtctgtctttcctggttcaagtgctccctctggtgttcatttcccaagatgcaccagctccagttgtgtgttaacaggcttggttctaaagcagagcagcatgggagtagttcttggagtaattctaaaagatttaaacacatttcacctttaagttaaaccttttaag

SEQ ID NO: 53689 - DNA, 920 bp, Bovine  19866880887095
  misc_feature (1)..(1): n is a, c, g, or t
nttttggcaccctatatacaggataagaaatcaagtttattcaaaatgattgcttaattatgcacacttgaaacatgtggggcttaattaatggtggttgatagtaaatcatccaggtaaaatatattaacttccgaatacatgctaatcctatgcataggtgtattattagtcaaagtaatttattatttttcttgatttatttttccgcaaagtatttgagcattcaaaatggtaaaatattttacttacaaaaaagacattaaaaaaagacagattgaaggaagagttaaaactctccaaaatatttctcattcccacagagaggctgaagtcggagcaaagggattactgggttaggcaaagcaattaaaaaatctgacttaaaaagcaatgttgtatgaccttgagcaatgtcccaagttgttttgaaaaaacaaaagtatgtgttcttagaaagttcagttggttttcagtcagattaatttggggaatgttaatatgggattcatagcctgtatatatctacataaacctatatctatctatttatctctgtatgtatccacacacacacacacttgctgttgtttcagaaattaacatttataatttcttatttttaaaaatggcctttgggacttccctggtagtccagtgattaagactcctagtatccactgcaggggccatgggttttatccctgattggggaagttccacatgccacataacatggccaaaaaaaggcctttggactctaagcaatactttgagatttatatattaattaaagataatggatttccctggtggctcagtggtaaggaatcccccttcaatgcaggagatgtgggctcaagtcccaggtcaggaagatcccctggagcagggaatggcagcccactccagtattcttg

SEQ ID NO: 53690 - DNA, 1698 bp, Bovine  19866881170030
  misc_feature (1)..(1): n is a, c, g, or t
nttttcttattgcacttggaaatgcctatttgagaaaatatatatttatgttgttaattaagtaatatgaaaaagatgttttgtaccaggactgcaatcagccccattcaagactttaaagttcagagcctgaatggagttgattgcaggcaagactcaacattcatcagacagtcaaatcattccattttccttagatattttcttgtttagctgaaccataagtgacatcttcagggaagatatttcaaatgattttttttttaccttttagttatgcctggttgaagcattgttgtaggccagaaaatgagtctctacaaccttgaaaaagtaaatgaccttattgtaagctttgaccttgctcgtagcatcttttctgttgctttgttagctctgagtgtggtgtattgtttcagttgagcaaggtctttgaagctccactttttgccacccctccctccctaatgatttcaagctgttcaaagaaatgctttgaaacacaggcaggagccaaatgttttatagtaaggctgatttaaaacaagcttcaaataatgcttgcttttagggaactaggggggatgtgaataaatggacagtgcatgttccttcaaaatgttaggtttgcttgatcactcagagataggtttgtctttcattacatgcagtatgcaaaaaaaacacagacttctggaatttataaccaagtaataatgttatacttgcttttctagactttgaaagcagtgcacatgagatttttataatatgcaaacaatttcagggtaactgtgatgccagcaaaagaatgaaaccctttatttgtattgatttttctatttaaggaagcctagaaggcaatatatttggttctttaaaaaatgcaacaaaatcagaattgaatttgtgtagacacttcttaccaaattagagcaacaggaaaatcactgacatattacttttatttagtacatactaaataacaactatgtctaacagatgccttcaaaacagatataccaaggcctagtttgtttatttttgcttgatgtttagttgccaagtcgtgtccgactcttgcgaccccacagactgcagcccaccaggctcccctgttcacctgcatctcctgcattggcaggattctccaccattaatcctccagggagtccctctgtttattagaacctgtcaattaggttgataaatagcagaaacttgctcttcaactgttctataatctagaaattatttcttatacatctatgtgtagcaatatataatattataccctacacatagtgggtgcttaaaaatgatttcctgaatgaataatattagcaaaatcaagaacaggctttttttaggccataagaaaacagaaggctctcacaccagagaagtataaaagtgaaagcaggaaaagaaaataaacctttttaaaagaactagtgttcagcatcaatctctagatgacatgcctagggttggtaagaattactttccattatgatcatgcaaattcagtgtaggaaagggcagggtagaattatagtgcctaattcaccatgatgaggaaacaattccatgagagagagaaataaatagtggaaggaaggcatgagaaggaaggagaaggcatgaaataatggagataacagacatcccacaatggtagcaaagagggggtatatt

SEQ ID NO: 53691 - DNA, 1404 bp, Bovine  19866881239333
  misc_feature (1)..(1): n is a, c, g, or t
ntcattagtgaagttcggagaaaaattcagttatacataaaagatgatttaacacctcccattccccatgctaagaggtacaattgttagaatgcaatatgtcatcagttctttttccagtccttctctgcttcctgtgtgtctttgtaggcttctttgatttcccttgttggtgtgatattttggtaaaaagcagctgactcacatcccatccagatccccagggtcctccagatccttcataaatttggcattcagccctctccttgccaattgcttcctttccccccaattcccacatgtctccctcctaagccatctgctcctcctcccttccttcgatcagtgctttcctctggtcttccaacttctttcattgttcagtgtctgttgcttccttttcccctttgttccccgacaggaaatcaacatgctttatgcagttgatgtcatagagccccttttccctgagaagttaaaatttgtgttcctgcaagtaaataggtcattctgttgtgtgaaggtcaaaggaaactggcgtattgaaccagaattttttttcctgtcttacatagttatgcacattatatatttcatctttttttaagaataaatttttattcatgatttaaatatgttaatcagtatgaatctattatatgaatcatgggaccaaagaaatgagttaaaaagtaaacttatgtcctatcctacttaattttcaaatttaatcactgaaatccagtgtattagtaaaagtcaatatagttttatataagacatgtaataaattcaggttttaaaacttatatgcatgactttatagacatttgatctctgtaaatttcattgtttccatctgtgacatgaattgtctaataatacctgtattagtttacagtgtccttgtgggaaatcagtgaaaaaatacatatgttattttaaatggtgacacagtctttatggattagtaatcagtattctggttttcattattgttggtatatctgcctgacctctggatatattcagcaatcaaaaactgggtggaaaaaaccaggaactttatgccatagcaatttcaacttttccgaataaacaagaagaccttgtatatatgtatatatgaaacagatttggcatttgtctcatctaattttctgtttatattgatttacaactgtgagaaaacaaatttctacagaatcagcatgagtacttagtacaggtgaatattatgagtaagtaatttttcaggctaatactggtattaagaaactaatttgaatctttgttcatccttattgtgaaatgcaataaccaatgggggactccacaagagaattaagccctaatgccctcaagcatccactcagtgtaataaatagacttttctcttgtgca

SEQ ID NO: 53692 - DNA, 748 bp, Bovine  19866881532785
  misc_feature (1)..(1): n is a, c, g, or t
nccctatttttaagggtttcattcattttttttttttctttcccctgtcaacagcttactcctatttgctgtgaggcttcatttcactgacaaagtagtctttttaaatagaaagacaaattcccaggactgcatattatcttcctctgcttttcccaagacactcacttctaattaaaatgtccatatttaattaaaatgcatattatcatgcagcttttgcaatcattttgttgttgaaatagaagaataaaagcataacatatgtagtaaaagtgcgacacatgtcttctgaatgatttctaattctcagtgtgctacagaaaatatgcagtggcctcttccaaacgtggagaagtctgagaaaatacaaaaatgcagaatatgttcagaggtagccgtttgtttaagtgtcaagcaggatatttctcatgcaacttcggttctaaagggaaaaggcctaagtattcattatagctatgtatttggaattgtgcacatgctattaagactagatataatcaagttgattgaaaagtgtccttgatagactctgctcctgtctttacaaattccttattcataaaacaaaactaataaggtcactttttgatagctttgggtatgaggattaaataagtggatacctggcatggttccttatatagtaagtgtccaataaatgtcactcattgctaacattattattatactgctaacattatcattattatttatgtgagagctt

SEQ ID NO: 53693 - DNA, 841 bp, Bovine  19866881697492
  misc_feature (1)..(1): n is a, c, g, or t
natttttaaggaaaagtttagaaataatggaacagtctttaaaaagtggattatgctgtataaactgtaaatgtttctgatttgaaacattcacttcaatttgaactgaaacaagaaatgagaataattaagcatttcagacaactgataagaaatgaatttgaaaagtgtaaacagtaggtagaaaagacttagattcagtgcacattttttccaagcataaagcacagcccaaaacaaacttttttttttttaagccagtgactccatcagcacacctaatgttttcagctgccactgctctcagtgtaactgacacaattttctgacactctatttactgctggatgaagtggccatttaaggctgtataaatcaaacagtttggacaaagctggcagtatttataatgtcaggatgagcagatgtttccaatttgccctcatttccatatatattctgtttgaacatgcccttgcctatgtaaatgaaagaggcatttgactccaccagtactttaaattcatttccattcaagtaattggactgaagattttaaatggttatactttccatagtagcctttcaggagcttttcagttaaagtaattttaggacctgcctacatcaggaggttcttgtgtgtaagattaatgtccatacacctttaagcagctctaaatgaggagaaatgtttgttcgttcaaatgtcgagtgtatgttgaatgtaaaggctcaagaagtctttttaacattgaagtccatcttagaagatcaagtaattaaaaaaaaaatgtctttacaaaactacccagattctactctataaatatgcagttaa

SEQ ID NO: 53694 - DNA, 795 bp, Bovine  19866881768864
  misc_feature (1)..(1): n is a, c, g, or t
ncagacttaacaggtgttccaatttattataatagctgttaacacacacctgcattttacacagactgaagattttggctagtcttcaaaagtcttcttacagagaacactgtcatgatttaccaattccagatttatttggcattgattacattgcaagagtgtagaagacataccaaagctagaaagaggaataccaactttttggaggtctgggaaaaaaaaagatccttgcaaagaatatcataaactgattatgaaagacagtggttttgttcagtaaaacaccctttctttctcttctcataatcctttgaaagtcaattaaaattggaaaatgacttctgatgagcattgactggaaagggatgataaaatggataaaataaaaaattagttcagctgctcttgtgggtaataatgaagatctgaaaagggagcaaggtaaggaagctttaaaaagaaatatgttcaattttaagctgttttaagttgtttgaatgttctaccaccttcagcttttcagtacaatctgtttcaaacccaaacacatttttgtttgtacattaatttgtgtgtgtctgtaaatcacaaaaatgaacactgagttttttgagttagacattacagtaggctcaggagatgacccatataccaaaccaattaagtctaaatgcggaaaaggaatatgcaagaaaaaatataatttcctctcacagtatctccatcctttaagatatcttgggagatatccagagactttcacgaacttagacggagttcaaagaaactgta

SEQ ID NO: 53695 - DNA, 1815 bp, Bovine  19866880552867
  misc_feature (1)..(1): n is a, c, g, or t
ntggacctcacatcttgagaaagagagagaggttgggggaagagagagagaaaagcttttccaagaagaaactatttctgtggcctccgaggccgttccaaggctggaggcacatcttgtgctccagcggcccatccattgatccccactgtgcccttggcagccaggatgcatgaggaatacgggcccagagggaatgtctggccaagggcagctcttgtccagtgagaagctgttcagagaacgcaaagcctctggatgtaaaggctaaggccagagcttcccacacatctttggtggtgtgcctgcaggacagagttcctcttccacagcccggtagctttgggccctgaaggaagtggatggtggcccccagaccctcgtcctgagagggttagagagagaaagaaaatggatgcgagcccctccgctggcccctgatcttcctgagatctgggtgtgaacggggagggctttgggcaacgggaggcgtaccctctggaggttaaacaacccacatgtgcataagaaaggtccagacatagaaatctggcaccaaagcagagggtgagttttctgagcttcctgtgggcccgtgaccccttaagatgttagaacagccttcctcacaggggacccacaagccagtcaggcctgcagaagacaatttgcctgaatattgtcttaattatacccaggaaggtgcagggccagtggcagtctagatggagagaggtaaactagtcctgcttcagctgtagcggacccttgggaagtctggctgagagggcaggaacccatgcagccacatggggctgcagagaacaagacggctctcctccgctgccttgttgcgggctcatccaccccaggaagtgcaggctgcaactacaggtaaaacagtgcccaggaagccttgtgctggtgttcataatgccaactccggaggcaagtccatccacgtccacgcaccctcctaagtctgagacctgctggcacataaaacagtgctttacggtgtatcaggacacccgtgaagacttcttttatcccaattagcagagtttatcctgaaatatttatgaatttggcagactcagggataaaattctgctattaattataatgatcgtctcagagaaagtaaatcattggataccaatgtttaattattattgtcaaaggtgtggctgtttaaccatagccgttctctcatatacagttgagtgattatgtgtacttgaagtctggaatttttaattctacaagacaactatagagcagcctgaatgcctgacttgtcagaacctttggaataacaagggcttatgagcaagactagctttgaatcactccacgtgttatttctgcactccccttggcggatctctgaattcagccagagctcccaagcctgccagcagcactcttgaggggcagccaagccccagggtgaccctgcctgactttgcataccccacttcaagtcagtgtttttgttttttttttttccttcatctgtttccactgtcacctacctcctcccttcatcttgcctaggactctgtctaaagtcttttcttcccctggtggaacaatggctcactgtccagtgtccaggcccccttcctgctccttagcttgtgtctccaggaccactcacccgggcacctgcccacccctgggcacacctgctcaacctgagcatggctctccaccctcacctgacccaacagctctcccatctgagcccccacctcttccagaggggaggaggaggtggctcagggtttgggggatccccctgtgctctgt

SEQ ID NO: 53696 - DNA, 1192 bp, Bovine  19866881344393
  misc_feature (1)..(1): n is a, c, g, or t
nttgtttcaggtgggcccatgcattcctgtggcgttcccatgtgtgcaaacaggagatactaggaggcaaggtgggctccagatgtaaattaccaaagagggattctgtggtcttaattagtgggcctcactgcagggaaacgggacttatctgcttttctcagccctgcaggctttattggttatgaaaagacatttggcacataattaactttctcttattggaaaaatagagcgtggggacaaagctctttcacgcacctgagagtcagtgtaatagaggtgctggcggttgcaggatggggttaatctatttgggcaggtgtgactgcaaacaaatggttttcggaggggaaaatggtccctgcacgctgcggagtgatttgaaagtaaaacaaataactcaaacaaccccagtgacccccaaagctggcagagcactgagtaccattctgggaagatgccaacaaatgaagtcagcagctactgggatgcatatgggttttcctccaggctgactgtttttggaagctggtgaaaatagactaaagttacagattatccactagtcaggccgttagtcagcgtgcacatgtgacacaccagccagtggtccttactgcactgggtaccatgggagatacacgcaggggctcccagggcttgaatctgatggcaggaaagtcaggtgcaaccatctgaggtccctgagaaactgctactgaggaatgatgtggtctaggctccaagcgctgcaggagggccagggtctgggaggaagtcatagaaaaggaaaaagctgtggtgggagctcaagaatagtgtcaaatagcacattcagctgccccttgcatccgataacttgagaaataaaacctgacatcacggacaggctgccttccactccgcactcaggataaacctcctctgagagcggggtgatgttcagagtaagacagaggggctggaccaggctggaggggtccttcctctggcctggcacttcctcgggcaggctgctcatctgcattgtgtcctggcttcctcaactgtatctggagagtattagtatctgccacacagggttgtcaccaggttaagtgagaaaatccatatgaaattcttcaagcaggtccagatggagatatcacagagacagaagggttcttgaggaacctaacacagcagcaag

SEQ ID NO: 53697 - DNA, 9550 bp, Bovine  19866880067095
  misc_feature (1)..(1): n is a, c, g, or t
nctcaacattcagaaaacaaagatcatggcatctggtcccatcacttcatgggaaatagacggggaaacagcggaaacagtgtcagacataatttttctgggctccaaaatcacggcagatggtgactgcagccatgaaattaaaagacgcttactccttggaaggaaagttatgaccaacctagatagcatattcaaaagcagagacattactttgccaacaaaggtccgtctggtcaaggctatggtttttcctgtggtcatgtatggatgtgagagttggactgtgaagaaggctgagtgacgaagaattgatgcttttcaaccgtggtgttggagaagacgcttgagagtcccttggactgcaaggagatccaaccagtccattctgaagatcagccctgggatttctttggaaggaatgatgctaaagctgaaactccagtactttggccacctcatgcgaacagttgactcattggaaaagactctgatgctgggagggattgagggcaagaggagaaggggacgacagaggatgagatggctggatggcatcactgactcgatggacgtgagtctgagtgtactcagggagttggtgatggacagggaggcctggcacgctgcgattcatggggtcgcaaagagtcggacacgactgagcgactgatctgatctgatctgatctgaagtgaggtcaagagtctcccaatgtaacatgtgaaatgcgcaggatattgttcaattcaagattactcagcatatgaagatccaggaagtcctccatccactaagaaaagaccagcaacagacagcgacctcaagatgacaggggttatgacctgcagtgtgtggcccccaaattcaggcactgaagccccaaccaccagtacctctggtgtgactacatttggagacagagtccttaaaaggagattaagtcaagataagccattggggttggctctaattcaatctactcagtgtccttataagaagaaaaaaatcacacacacagagacaccagggctgcccacgtaccatgtgaaagcccacatgagacacagcaggaaagcagctgtctgtaaggcagggagacaccaaacctgctggtagtgccttaaccttggacgcccagcaccagaacttcgagaaaactaatttctgttgtttaaagcacccagtctacggcgctctgtcagggcaaactgagcaaagtaacacactgatctcatcattttctgcaaaaactttttaaaatgccacagcaagcagtagggaatattctcacaatgactggaaatacaggaaatctcagcagagaaataaagactggaatggaaattttagaaaggtaaggtgtaacaaccatatctacatatgtgtacatatagacatatacacactagatggacactgagatgacagagaaaacagtgaacctgaaaatagatcaagagaactcatccactctaaacaacaaagagaaaggagactgaataaaaattaaccaagtcacagggacctgtgaggcaaaaataaaaggcaaaaatcctaaaattaaggtcccttgtgtcccaaaattagaggaggaggaggatggtgctaaaaatactgggggaaacaatggctttaaaaacccccaagtctttagtaaaatacttaaacctacagattcaagaaatcaagcaaaactctgacaggagaaactcaaagaaatccacacataggccagtgggtagtggagaccacaggactaacgaatacaggcagaagggaacatgaattttgaactgggtatatgtgaagccagactgttttcatattcaaagtcacagcccagagacttctcagcagtcctgctgataaacagaccctaagtgccagcaaagaatccaaaggagaactgaacacccccttgaaggcgaaccagagcgtgttaactaccagtggtgacaccacaattacaggcaaaggtttgctgggcagaagggggcgcctgtgaaacgccgcagggcatcgacacagtgagcagcaagttccaccaattaatgaagtgcttctgagcagttctgtctacaaggtttctgaaagaagccacggctgcaccagctaaggcccctgggaactgggaacaaactcattctctggcagcggggatgcgagaaacccagcatcgccatggctaccagcagagcctctctcaaagcctttcaggaatctctactatttgtggaaactggggagcattccccaaaggccagcatccctctgctctccaacacttccagtggttgcctctcttaaccgtccctcaatccagttgaaaagcaagagggcgcccgtacactccactcatgcttgggacccttccttggtgacactcatcaggaatgcctccatcagacaccctgctggagaggtgatcccagcattttcactttgccagaagtcctgtatattcacagatcccgatctggaacctcggtagcatgctcttaaactccttacatgattggaggggaaaaatagatcctcattgatgtgaccaatgtaccagttaaaggacccaagcctttcttttgctttctgtgttgttttcccaacataattgcaaagagaggtgagtgacaactaatgtaatctctgttgtatatttgccaggaaagcttcctacgggggccagcggtggatgttcatctgcattttttcaaagaaaataaggaaaacatgtagattggtttaataagttaatgttttggagaataatagaaattgatttttcaattagcttaagttcttattataaatccagactctcccaatcaactaacaaaacaaatattaaaagaaactatccaaaaaagagagtctgtgaggtcttctgttcggtggttcctcccaacactgcacatctatttgtcttttctggtcagtatatctccattattccaggagggatctcaattcacttttagaatgatgtctctgaaaattgccccttctgcagcctctggccaaatatgaggctccgttgggaaccaccagtgatcatatctcaattgcttaaccctggggtttgcatctgacccacagcaggccaaagttcttcccagtgattttcagaatacagttaaagaggaaacatctgttccctttgggtgggaagctgaagaagggatccctgggttccagatatggacaagtgctttgtgtaaaggaatgaaggtgacctgcagagaaaggcaaagacatggtaagaagacattctggtccttggtctcgggtgtatttggtggattgatacataatgggccccaataagccacgcctcctgggacacacagccttgcacagtccccgtccacattaacttggttgggtcttggccaagtgacttgctttggccataggacatcagcaaacgcaatgcaagcacaggcttggaaagcacttgcacaatgggacctacactttctcttgctgctttcagaacttggtcttccagcctgctggagatagatgacccagccaatagtcagcaacagttgccagacatgaaaaagatcatcataaaccatttggtcccagtcacgccatgatggaaggtaaaagaaaagcccaggtgtcccagacaccccagccatctagctaaggtcacagcagtaaaactacgcccaggtgacaccacatggagcagagatgagtttcccagatgaacccagcccaagtcaccaatccacagattcatcatcaagtaaagatttgtctgaatttaaactaaaagtcactcgattttcaagtgacttgttatgaagacaaagctgactcatacagccttcttgaaggtactctattcttgcttttctcataaaggcaatatattctccagtttgtccaatttgctgtgtaggattaagtgccttcctaatggccaatcactccttttcctttgactacaaaatcttcattttgtgtagggaggcaatgtacctaagtaaactactcactctgtccacttctctttctgtagatatcatcatatgacacagttaaagccttagagaaggatatgaacaatcaatgagacagaccataccttttccactttctaccttctttcatactagaacacagatgtgatgactggggtctcagcagccactttgattaaatgagggagaaaaaaaaaaaaaaaaaagagtaaatgagccatgagtgaaaaataaaagacatcagatctgatattgttgagcttctaaagcaatgccatgagcatctaactccaaaaatgttactgtaacagaagggaaagtggcagggcacaacttctcaagatacaccccaagaacgacataccccaagggcacaacatcaacaaacgagaattaaattggaccaagatggcaagaccaagaccttgatcctcaatcagcaagtgaaatgacacacccaaggtgccctgacagttccaaggcagttaaaagaccaaggagtgggtgctggcccaaatctccgccccttcccaaaaacagttggaataatcctcccactcattagcatgtgaaattacccagcctataaaaaccattctgtctgtggagtgtccttctctctgaatctgaataaattcacttcttacctatcactttgtctctcactgaattctttctgtgatgagacatcaagaacctgagtttcattaggtccggaaaacaagtatcatgggttttggctggatttgagttccagccacgtgggttcgtatcccaaactgggttttggctggcttcaagtcccaggacatgggttcaagtcccaatctgtggtaaatggtttcattactgtacaacataatcagaaacttggttctgagacaactgtgtagagtgagtgtcaggtatacaaagccaaatacaattttaaatgatttaagttacagttttgtcacttgtggccagaagagtcctgcctagtgattggggctttcctctggggagtcctctggctatttctgaatgccacaccttgaggtgcctgacccctcttgactctctgatttgcctgcagacacaaagtcatttccattttccttcttaaaatacatgagatagtggatgcttccaaaatatatttcattaaagtccaaaataataaaacacacatataagaaatacaaagggcacgtaaatgtcatgttcccatatttgatcctaaaaatgccaaaaaagcttaagagcccctattctaatctctttactttatggtactagttctcaaagtggaggccctgacaggagcatcagtatctctggagaacttgttagaaatgcgaattcccaggccagcccaaacctactgaatccaaaccatggtggtagggtgttttgccaaaagttttcactttcgtttctggttcaaaggatttgttaacaaaataaaccactcattttatacaaataaatattccaaatatttactagagaattatagagcttactttcaatatactaatattaaaagagaaatagaaatagcagaagatacatcaccaaattggagtcaacgtgccgaattaaatagcgctgggaagtcccaagtcacagcacatctggagtcccatttgggaaaaggtcccaggcagcatgtctggtctgtgtgtgagacctcaaagattgcagttcagagttccactattaatcccaggatacaaatagataccatcaccaatgtgtgagcaaactgcaagcctgggttcatggtaatgctgtttgttttgtcttgtacaactcggaatgttgtcaagcctgggacttggttggccaggcccctccaggggctcaaccatctccacattcatctcccatcttatctatggtgctgcaagttttgcactcacggcaggcagtcattcctggtcactcacagtcagggcagtgtccaggcaggttagaagcaaggtcagaggcctgctttctttgtctctgaagcctaagcaagaccatttatttaatttccctcacagttagccccaggattgtttaggccaaagagcataggaataaggcaaaataacatgagcagtctttttaatttctataaacaccaatgtagaacatattgtaggttttagggaaaacagtccattcatagtaattgatggagtgctccaataagtggggttctcaaactcgagaagttggtcctttcacaggcttgtcacagtctgtcagtaaatgggcacagttatcaaagcctagataatttaaccaccgctgcaagagtctatgactttgtgtttctactggccaatggtagggcaggtgaagctgtcttgggtgttggccaggtgatattcttgtatgaccacgtggagatccatttgcttcattctcaaagaacaaacttaacaagagggttaaagcggcatacaagtagaagagctgtcaaggtgcctagaataaaagctagccaggaaaccaggaccagactttggcccatgatgttactgtttctctaggtatgagaagatgcaagagtttgggttcagaaaaaaggaaaaacaaaaaaaatctttacctgaaaacatctatctgaaggcctgttttgcccatttttcccagagcacagagggagtgcctaatttctgatatgaccctgaattcctttaagggggtgctgaagttcagcagcgtagtagccattatttaatctttgcagtggcagtctgcaagtgccaggctccagggagcagggccccttcatagccgtagatttgatcatgttttgggggcatttcatggccattgggtcccatgatgctggaaaggctcattcccaggtctagcgaagattccatcgacaggccactcagtgtgctattaaaggaccaggccctatgaataaaaaacgtctctggaccattcctgtcttactagcctcttgggccaggaaacgattccctcttgttgcttcttcccatacctggtgttacattattataatcattgatctcatattttatcagtggctcagtcacatacttggtaatgtaagagataacaattttctgcaacaggtgacatagacaatgatatagatcgcaattatcagtaaggtcacaagcaagaatttaagtcaagaactttcattaggtatagcccagtataccccagatcatctgacttagttaaatgattacagccaggtattaatctcctggttgtacatcacggaacatctgatctttatccagagattgactattgatataaactttagaaacaaaattagcgtgtcttttaataactgaactaaaattttaacaataacacttaacaaggaaccatttcagaagtgagtaacaaaactagaatttaatgtttagtgaaacataaacatttttccttgtgagagcattaaccttgcagccagggaaggctttatcccatcaaataaaactgaggtttgtcagggagctgggaaaagccaagcggccatcttggatttcccatagccctgactgattcatagctacctcttacccattttaaattccccagtttaggaacagactattgccatgttttaaggacatcaggatagcaacaatctggcagtgaggggttaattttgtagaagcagaatgacctttagctacatgtaccaaaatcttcatagatcattgtgcagtactgcacatttactttactaaagtaacaaaagattttaacaaacataaatcacttcaaggaggagaaattcacaacctattgctcaaaagctgcattctaagaaaagtttgttctcttaacagagagagcaaaccaaattccagtctggtaccagctcactgtgagtaacaaaatttgtttatctggttaatctttgaaagatttcttcataaatctgaaaaaagtaatagtgttctttcaaaggtatgagagtaaaaccacagaaggcattttaaaaatctcattatattgcaattgacaaagcaacctggtcattactctgacatgcaacactttactatgataactggaattataattgacaacattttatcaggatacatcaggtgtttatgaattccacatattttttagcatatccatagtaacatcaaccacagggtttaacctgagaagatttatcactccttaaacaatacttcccatgtaatttaacatgtcaaatgaacccatgtagtttaatatctctctttgagaagtctcaaggatcctctgaagtaccccaaagtgagctagaggtcaaaagaacttcattagaatttaattttaggaagttttgccaaaacatcaaaaggttttataatacttagtgagataggatcatttaggtcactatgcaacaacagttattcacttagccaaagttaacaaaagatttcaaagtaaacatagaacagagcactttaggcataaagaaacttaaaatccattatcaaaggcagttcaacatctcaagaaaatttgtattatgcactaacctcttttcttggggtctacttgccataaaacctgtctctctctagttttgtttttttaatcactttgctcatttagaaacagccacctgtaagtcagacctactttcttttttcttaataaaacgtaattatatttctcatactttttttttaaactaaaaacacagtctcttttccttaagcaatcatgaactgtcctttatattagcattctatagattagtgaacataaataccagtgataatttctaaaaacatttgctttcttagagagaacatctcaggatggcaccatacatattcattaattgtccaaaatctctttagtttctctgtaagaggaagttatatcatcatgcacgctaagttgcttcagtcatgtctgactcttggagacctcatggactgtagcccaccagggtcctctgtccatgggatttcccaggcaagaatattggagtaggttgccatttcctcctccaggggatcttcctgaccctaaaattcctgctcctcctgcactgtcaggcaggttctttaccgctagtgccacctgggaatccccaaggggaggttagtgttcagtaattaatgtttcaaaatcttatttatttggaaatgacctagctattcaataaactttcatcacttagtttagcacaaccctagaaatccaaattaccccaatctggagagactatttagacagacattcctaaacttgaattattcttaatagagtttatctaaaagctcttgtctcatttatatttttcgtttttaaagtttcttcactcgagttactttccttgttgacaaagttagtttacattaagcctaggcacaatgaaagtattacacaatatcgatgactcaagacatgtcttaattagattcgcaaacagatatctctagttcacctgaacctgaaatgcatttaggttaatttctcttctaattgtttaatttgtaagcacttgcttttgtttagtcaattgaattagagctcatttacaaaccaacttcagcaatgtg

SEQ ID NO: 53698 - DNA, 4071 bp, Bovine  19866880163576
  misc_feature (1)..(1): n is a, c, g, or t
ncagctttcctcacagtccaacactcacatccatacatgactactggaaaaccatagccttgactagaaagacctttgttggcaaagtaatgtctctgcttctgaatatgctatctaggttgctcataactttccttccaaggagtaagcgtcttttaatttcatggctgcagtcaccatctgcagtgatcttggagcccaaaaagataaagtctgacactgtttccccatctatttcccatgaagtgatgggaccagatgccatgatcttcgttttctgaatgttgagcttttagccaactttttcactctcctcttgtcctttattattgagtgaaacttccctcagcactgtgtgccaggctttttgctaggtgctggggatgtgagtgaacaaggcaagtccaagtctctgtcctcataacagtagttttctggaggagacttattgggtaagaaagtacacaagtgtttgtcagattacagtggtgttaggtgctatcagagaaaagctgcagaaagaattattggctcctattgatgtggcgtgctaaagaagattacagggtgattgtccatcctgtagttgtacttaccccaagtccttacacacacccaggtgacaaagtttcaatgttgcttcttggttctggacattttgcaaagaggaaagttcagatcatgggtctagacgaaatggggtttgaggtttcaataaggaaagaacctaggagcaagagatagaatcttctaccatgagctgatgcctctaggtgattggcttagctccggggactggagaaacacagagcatggatggtgactgacatctgaactcatcagattcacacaaggatcctgagaaaatctctgaagtttgtgcaggggatcccagtaaacagtatactcttgactgaggaactgacataaaactggatgggtatcctctcatacctggcttgcagctttcagatgcacatctaagaggcggcctaatgaagtcagatgcctatttccagggaaccataccaggcatgtcaatatctgtggggtgacaagatgttacagcttactcacctggctgactcattgactcttaggaacagaaaggtctttgagttgattcaagtgagtggttctcatacctggaactgaaatcagcctgaagcttctaaaactagagaaacccagggcatagacttactgggacagaattaggatgatctcaagggataaggattgggaatctatgtatttttatacatttagactaaaccccatgtaaagggagcccatgggcaagcatgagccaatcaagcttatttggtgaatgccatcattctattcattattttaaatatagttatcatttctggaatattccttagaaaatcatgatttaaatactctccataagtgtatgattcctggaaccagatcagaatattttttatactgtgcctctttgggaaactgaatgtctgttcctaatcctaggatgaatatttagtgaaggtgctccctacttctgtgtgaaatgtgtgagcatgtgtgtgtgtgtgtgtgtgtgtgtgtgtgtatgtgtgtgtgagtgtgagtgtgtgtgtgagtgtgagcgtgtgtgtgagtgtgtgtctgtgtaagcatgctcacacagtgttttcagacttgtttccaaagagtgagtggggtgaaccctgtcatttcagatatcatttgacatggcccagtctgggggtgtctcagttccatctggattgcacagagaggcagagcagcatgtagtgagaaagcagtaatgagctgctttcttcaatgtttaaggctattatcgttgaccttaaaaggacactatttgccagcatgactattgtaaaagatattcattgattgcatgaacagttaaaaaatatttagttagctcaggctaccggccaggtactaattttattccagggattcagaaattattaacgcctggaccttagtcgtatgaggccaccaaggttttgagtttagttggggaaatatatttaggtttagaggatgttgctccatcgcagtgtggttaggtgtttgtacttaattctctagccccatggcttacaaaatgttcattgacagcaaagaacaccttgagtaaagtggacctagcactagaaggccggacaccgcttacaaatcctctgttccccatgggcactttggggaattagttcactctccactagtaacccagtctctatggctcctgttgagcttctaattcagccacacatacgctgttccatagttatatgatcagagtgattaattcatcaaaagtaagattctaaagcctaatggaatagtatctatgaagtgacacacccttcttttaaaattgatatgttttttctattttttaaaaagattaacaaaaataatctaggtttttaaaagtcattcagtttattcccatttattgcattgctgtgcatgtggaatatgctatgttttacataggtgattttaatttacaataattctgtgaaatctttattatctccattttacagatggggaattggaagcatagacaggtaaactaatttgccaaaaagacaaagagaaaataacagaatcaggattcaaatgtaagtttatctgattctaaagctcacagtttaaagaagaaaacttctctacgctggtttgattatatttacacacgtatggacttccctggtagctcagctgataaagaatccacgtgtaaggcaggagaccccggttcagttcctgggtcaggaagaccccctggagaagggatgggctacccacttcagtattcttgggcttctctggtggctcaggcagtgaaatatccacctgcaatgcgggagacctgggtttgatccctgggttggaaagaacccctggagaagggaaaggctactctctccagtattcttgcctggagaaacccatggacagaggagactggcagactacagtccatggggttgcaaagagtcggacacaactgactgactttcccttcctacacacgtatgtatgtagtattggaagctgtcattcatcatctgaattttaggacctcttagagaatatctaatcctgagtctaaaatagaaattctgtctataaagatttttatttgacttcagacacataacaagcatctactgagcatgtgtttgacattgtgacaaacactgggaagctaacactgagaattcacatgcaatctaataacagacaattacaaaaatcgaatcaaatatttgcaattctgtgattattgcaaaagataaatcctaacttctcttagtcctgggagaacctgaagagcagtactaactattaaaagcccatgtcagtacttatgggaaaaaaaaccctggattgggggcacagataaaatcacacataagggaaaatttaaaacatggtacagcaactacctccctctatttcatcttaagcacatgtttcatgttgagtgaataagtcacatgaacttgaaaacgaagcatgggttttagaaagaaaaatgagtttgtgtgcaaaggcctctattgtttcctgggatcaatgctattgattttgctctatggcacacaggagtcgaggctttgaaatgtggatgttgactagcagcaaaaagccaaggataacagcttgataatgagagagaatgacttaaagtttctctgtctaatctctttaacaagtggtgctgggaaaactggtcaaccacttgtaaaagaatgaaactagaccactttctaacaccacacacaaaaataaactcaaaatggattaaagatctaaacgtaagaccagaaactataaaactcctagaggagaacataggcaaaacactctccgacatacatcacagcaggatcctctatgacccacctcccagaatattggaaataaaagcaagaataaacaaatgggacctaattaaccttaaaagcttctgcacatcaaaggaaactattagcaaggtgaaaaggcagccttcagaatgggagaaaataatagcaaatgaagcaacgg

SEQ ID NO: 53699 - DNA, 960 bp, Bovine  19866880166483
  misc_feature (1)..(1): n is a, c, g, or t
ncctagagcaattgtcctaagcatgtgacaaagggaacttacttaatgaaaggtctaagagatataatcagttaacaaggcaattaaacacattacccaggactgtgccacctgggttcctgtggcctacaccagcaaagactagcaacatcatttcaattacacacccacagttagccccagacgcgggttagtaaacaaatgctaatacaagaaagatgatatgtacaggagagaattataatggcagattaacaaatgcaagctaacaaattgtacattctgcaaattaataaaactaacaacagtagcttattcttagaactatcctgacagcattgacttatttgaagaatccataaggtagggaaacaaacaagaaaataaaaatggaccaaaaaacagggggaggggtgtgagctggattctaactttaactctgctgctaatagtgaatctaaataaaaatattctcacgataagaaacaaaatgtaaaaattatcttcttctcgtcagactagctctttcactagactctggacaaatcaacctcttttctgagtttctatctcattttaaagattggaaaaaaggacaaaagagagagtcttgggaagtaggaggagtgttaatttctaaaagccagttgtaaacatcaccgtttattgaagcaaatgtagaaacaaacataaaatcaaaacaaagccaagtgagcagttggcaagtggagcaggtttcacataaactgtgaatcaacaaatgtgaagaaggatttattatttgggcccagaacaatactatctactaaggggacacaaaagagtccttgctaaattaattgagcacttattctcaaatagtcctcacaaaaggcctgtgaggtgaatgcttagaaatgagtgaacttagtttccaggacacttaaccatacactaaaatgctttggccacaagtatcag

SEQ ID NO: 53700 - DNA, 4106 bp, Bovine  19866880208830
  misc_feature (1)..(1): n is a, c, g, or t
naaacaaagccaagtgagcagttggcaagtggagcaggtttcacataaactgtgaatcaacaaatgtgaagaaggatttattatttgggtccagaacaatactatctactaaggggacacaaaagagtccttgctaaattaattgagcacttattctcaaatagtcctcacaaaaggcctgtgacgtgaatgcttagaaatgagtgaacttagtttccaggacacttaaccatacactaaaatgctttggccacaagtatcagaaacccccgatcaacaaggaaatgcatcgctgctgcaactgagaatacagtggccggaagtcctccgggtgtcatacaaggacctgttttctctgtcctcagtggcagctctgtcctgtacctgtaccatcggatgtccacctcatgcatcagtgacaattggagcaacatgtttccttgtttctcaacatgagagacaacccttctcttttctgtttttcccctcaagctgacggggacaacttaggtcatataactcctgagtcaataactgttcctaaggaatgtcatgtgctagaatgctaaaagtaataaggaccattcctagagctggggatggctccagtttcttctgaatgtgattacgagaggtgtatatgtgaacaaaagttaggtgcttataagagggaagaagagagaagggatgaaatagacagacagccagtgggtccactccattagctctaagttcaatgcttggcaagtggcgaagccagaactgaactagttaaaacatttggagaacctcggaccgatttctgcaacttagaaaaccaccttaccaggcaattcttcatattacaacccaacaaatcagttttgacaactataccccagagatgcacgataactctatctacccgacaaaaaggtcaggtcactttaccgaaagaacttgtcaagacaactgaaaacagcatttgaaatccagaaattcatggaatagccaagcatatgaattccatgccaatagaagccattgctttgaatgagaatcaactgtgttataaataataataacactatctgcacataataaatatccacgtgccatttaacccatcttagtactattaatatttgtttatggcaaagcagcactggtgtatctaaaaactgcaaaaggcatagaaagtttttaagcaattataatttgtttaatgactagtcataaacaaaacacctcagcctgctaagcctcctctaatttcttctggctgctactgataatggtctgtaaataatgctgcccggtgtctggtgtctctgaaatatttaacactgagacacagatgagctggcaaggtgctggcctctttttagctgagacctagatcccaaaatattccctcttcatccagggttccatcgaaataaatatttgcttttcacaaaggatttttgtcctaggaggaagaaagacagatagtggcagcccaggacagcaaatctgcttagagaactagctccaggttgctatgcagagggaaataagccaggtaatccaacttttggaccatttcccaatctttccccttgcttagggtcattactatatacctgtactccaagctcgaccaacaaacacattcagatcctctccattgctgggtaaacagaattccttgccaccaaggtactcctgaaaaactgagcaacattttgttccctgaatgggccaagtgtccttccaccccagcttttttgatgatgtaattctttctatccagcttctaagactcagataaaatgtttcctaatggtctcagcatgaaataacctctttatcttttataataccaatctctgcctagttctgtgtaagcaatttacatacattatgcacttgaaccctgagttaaacctcaactcattgttgaggcaagtgttgctagaccattttattaaatacaaataggggattcagatgcagcatgattacattgaaggagatcaaacccgtcaatcctaaaggaaatcaaccctgaatattcactggaaggactgaagctgaagctgaagctccagtactttggccacctgatgggaagagacgactcattggaaaaagactctgatgctgggaaagattgagggcaggaggagaagggggcagcagaggatgagatggttggatagcatcactgactcaatggacatgagttttagcaaactccaggagatggtgaaggacagggaagcctggcatgctgcagtccacagggtcgtaaagagtcagacaggacttaacaactgaacaacagtatacccaatgtcacaataaatgaccaaggcaagagactaacacaggtgttttagatcccaaagcccacacactgctttttaaattccaagtacaccacaaacactagcattttatttgtgcttcctttataatgcagatatcatttctacccactgttagagctattgacgtgaatttctttatcttcttttctaaagtctggaattcttgaaggcacactctatgtcttattcatatttgtatcttctgagggatttgcatagaatagatgcttaagacatctttgttgaaagaatggacaccattcaatacatacttatagcaatgaattgctattattaactttcagatttgatttcctataatcactacccttgatgacagagaatgaaccttttttttttcttttctaggaagcaaacccagagacaaacagaaaatcaaaactggtttccattagcatatgtggaaagacttcgtttatgctcaagtaaaaactagactgatacaaatataaaatgcacttggcaatttgttttgaattttagcactttctttcatgaaaaaaaaaaaaaagcccagaaccattggtgcgttaatgagttccccatgtgagcaccagggttggcatgacatcccctggtttcatagagcttttgacatcaaccatgactggaactatccgttgctcattcggcaggcacagaacttcctcccagccttgcctatgacaaggtcatcctctgtttcaattggacacgtgggtcctttagaatggagcttcagtctggccgtgggatttggcaacaatgacaaagagagcaatcaacaactgccaccccactcactgttcacttgccaaagctaaaaagtgactgattgtcaggccttctgaggttaagtgtgatagatcctttcttcctttggatgtaatgcctgtctggtgatgaagttaagaacttaatgcagtgaagaacagcatgtctttatggcacagactctgggtgctagattcaagaacttccattcacccgtatgtgttgctttctacgttccatatctgatttttgtttttatattggagaaaaaaataatatcctcattgctgttgttgttcagtcatccagtcatgtccgactctttgcgaccccatggactgcagcatgccaggcctctctgtccctcatcatctcctggagtttgcccaagttcatattcattgcatcagtgatgctgtccagccatctcatcctctgacaccctcctttccttgttagagaatttaaaatgaaggaatcggcatttacatcatcccttggactgcgtctgttacagtacttaattgtacctaattgctctaaatgctgtcagttccttatttctgtcttcagatattatttttggaaacaaggactaacatcagtttataaattagctgtacgtcaatagttttgttgtttttgatttgctttgcattgcttagtggctgtctcagaaatattactgaaatttgactgtatttaattgcaaattaggtcacaagtagaacctattttaaatgagtattaagcctaaaagttaggacccccaggtttaaactggatattttgaaagcagagaataagttttgctctaggaatactaagtctctgacttacaaacccaagcaatggaaaggagataggaccactgcaagcactgccatgccacagctcaacgactcagtcgtcactgctataaagtgaacatttgcttccggctaaccgtgccccagtgatgagtgtggaaacctattc

SEQ ID NO: 53701 - DNA, 2621 bp, Bovine  19866880210174
  misc_feature (1)..(1): n is a, c, g, or t
nccaaggccaaatttgcctgttaccccaggtgtttcttgacttcctacttttgcattccagtcccctataatgaaaaggacatcttttttgggtttaagttctaaaaggtcttgtaggtcttcacaggtcttcacaatttcagcttcttcagcattactggttggggcatagagttagattgctgtgatattgaatggtttgccttggaaatgaacagagaacattctgtcgtttttgagattgcatccaagtactgcatttcggactcttttgttgaccatgatggctactccatttcttctaagggattcctgcccacggtagtagacataatggcataagaacctggaatgtgaggtccatgaatcaaggcaaattggaagtggtcaaacaggagatggcaagagtgaatgaaaacattctaggaatcagcgaaccaagaagcactggaatgggtgaataatcctgcctacagaacttttatgtggactcattcatgtaatgtgtttaggatcaagcacataagaaaaactcaacaaatggtcggtattattagtaaatagaaagtgcttaacatattgtgtattcagtaaatagcaactattggttgtcatacacaccgcacataagtcatgattatataattaagaagtatcctggtctcttacttctggttttacatgcatagaatattgccttctgagtaatacaggcaaaaatgtgttcctggggagagagcacttagtcttgagctcatcaagaaaggcagcattgggatctgaatgggatttagagagttagaaaacatggagaagataatgatataaaagccaagagataggaaaaaaaatcatgtttgtggaagaaaagatatagtgttttggatgaagcatagctgcattaagggattaacaggattgcaggcttaactggtagtccagtggttaagagtctgagcttcctattgaaagggtgtgtgtatgatcactggtcagggaactaagatcccacatgctgtgtggcactgccaaaaaacaaaatcaaagcacccacataaacaacaagagcaacacaaaaggttaacagggatgaatttgggtagaattagaacaggaaaaaatagaaggagtgaggaggcaaaagagaagtttgttgtgctcacctaggcccgagtggtaagggtcagaatgagagaaacgagggaaggacaaagggagttcagatgcaagatagccttcaaaagagaagtcagcagggcttggacacattaaatgacacatgagcaaatggaagaagacagaatgacaccagtattttcatttaagttagtgtggcatgtatgataactttgagaaatgggaaagtaatatttagaagggcaatgataggtttgacatttttatgttgaatttgaattaatagagaaacatttttaagtaaaaatgtccaggggcatttggaaatctttgattgctctggcccaaacatagagttgaaagtcatctgcatggaggacggaactgaaggaggtctttattatccagagatatatagtaaaaagatcatttaaatagtttcatacagagaaccactgtatatcaggaaatagtggaaaaattttaaaggaaaaaagtgattacagttacttgtatcttacatttaaaacaatttgtattccaattccaactggccactaatccttagaatgaacaaagaattaatttcttcttgtcactgtttccatatatccagtgaatctgtgcactagtctctgaaaatctacactccatcttactttctaaaaaactgtataaatgcagacttattttctagtctttttgtcatcacctggtgtttttatttaaagaaatcattggtatgttgatttgagatttgttggtcttttatgcacaatctcacacatagtgaaaaagtcagtcttggactcttcagcatggataaaacttcgaagacttttggtaacttatctgaatgcaagatccttttagatttttatcattgtttcccttgagctgtcttgatattttttaaaattgtggtgaaagacacataatataaatgtcttaataccatctcagtcattttcaagggtgcagttcagtggtgttaagtgcattcacatcgttgtgcaaaccatacccaggaagtttcagtcttgcaaaactcaaactccataacccttaaacaacagctctccatgtctccttgcccttagcacctagaaactaccattgtgacgttttcttttctttctttttttcccctcacttttgaccatactacaagacatgtggggtcttagttccctgagcagggttggagcctgggctctctgtggtgtgcgtgcagagtcgtaaccactgaactgctagggacgtccccactgtgtgatattttctgttctcggagtctgagtacctagatacttgctgtaagtgtaatcagtcacacagtatttgtctttttgttactggattattttagtataatgtcttttaggtttatgcaggttatagcacatgtcagaattttcttttctatggctgaatactattcttttgtatgcatgcatcacattttgtttatccattcatataat

SEQ ID NO: 53702 - DNA, 1360 bp, Bovine  19866880295986
  misc_feature (1)..(1): n is a, c, g, or t
ncttaaaaaaaaagaagaaagcaaagaagggatttgacagtttggcaggagccagcagctcaacctgcctgtctctcttagtttactcactttcctggtccctcagtccccgatatctgtttatatcaggtgttggcaaacttttttccacaaaggccaggtggtgactgtttcaggctttgcaggttatacggtctctgtcacaactgctctctgccgttttaacaagaaagtaacaaaaaaaaaatttttttttttaatgaagaaatatagtagctgtagataatttgtaaacaaataaacatggttgtgttccaataaaactttatatgtaagaacagttgttgagtcagatttgacccaagaatcatacttgctgttccttggtctatttccagtggtagactttatgttttttagatgaatttatacttgaataatcattgatactttggaataagactggtaaacatttagaacagtattcgtcaaactggcagttcactgaaagacttgagaactgtgttaagaatgtagattcctgagtcctgctcctaaagattcgaatacagaatgtctgggaaagagcctcagtgtgtgtacttctggcccctggctctatatatatacaacagagtttgaatactgtaagtgtatggcttcaatagataattttgcaaagacatcacatgaaataaatctctgtgtaatttatttcacccacagtcataactccacgccagaacctctggtttaacgaacagactatccattccgtctccaaacctcgtgtcattgtaccctttcctgttttatttagaggcagacacatttaagtgaaaataatcaccatcagaatactaatatgccataagctgatgtcaggatatttattcaacagaatgcaattaccagtaaaatgttatgttctaaatggcatggctataatccagtgtaggctttttaacccctggtgatttttgtttcatttgatttgtgatgagtggcaaccaggcatggttgctgtgggctggcaaagcaagaataaaggggaaatagccccatggccactacaggcagctttcaacctgcagtatgccactaaatctccatcaccaccgggtggctctacatgattcccgttgttaattgaatttttccccaagtagaatgagggcttgttttgcatcaacacagttccattgtctgatgattgttgttggtaatgtcaactgaacttaagatatttcagcatccacatgcacaggcatcattgctgtgactttggagtaagagtgggggaagtgcacaggaggacagcacacaggagacgtggtactacgctcactacgctgtgtgg

SEQ ID NO: 53703 - DNA, 820 bp, Bovine  19866880358832
  misc_feature (1)..(1): n is a, c, g, or t
naggcataagagaagacatgggttcatccctggatcaggaatatcccctggaggagggcatgcaacccactgcagtattcttgcctggagaatcccatggacagaggagcttgacaggttacattccatagggttgcaaagagtcagacatggaatggcaccccactccagtactcttgcttggaaaatcccaaggatggaggagcctggtgggctgcagtccatggggtctcgaagagtcggacacaactgagcaacttcactttcactttcatgcattggagaaggaaatggcaacccactccagtgttcttgcctggagaatcccagggacaggggagcctggtgggcttccgtctatggtgttgcagagtcggacacagcaacaagtccatggggttgcaaagagtcagacatgactgagtgactaacatacacacacatataatgttaccctttagagtagttatgctgcctcttgtgaggcaatgcatatgggaagcttgtatgagggcccagtgtatagagggagctcagaagcaaagataatggtaaccgtgacaatgatgatgattttaatgatggtggatctcttgttacttcttctcacccttagataaaaggacacaagtccattttctgtaatctaagattacaaaataattaaataactaaaaaatgaaccctgaattaaaacaattagctagaaagagatggttcttaatctggaatagaaagatattgactgcatttaaacttgttaaaagttaacgtgcttgctaacagcctccaatctaacagagctgctgtctagctcatg

SEQ ID NO: 53704 - DNA, 1551 bp, Bovine  19866880358836
  misc_feature (1)..(1): n is a, c, g, or t
ntggactgtagcccaccaggctcctccatccatgggattttccaggcaagagtactggagtggggtgccattccatgtctgactttttgcaaccctatggaatgtaacctgtcaagctcctctgtccataggattctccaggcaagaatactggagtgggttgcatgccctcctccaggggatattcctgatccagggattgaacccatgccttctcttatgcctcctgcactggcctgcaggttctttgttacaggagatgaaaattctgcctggtttcattaaaatacaccacttaggttaacaatcaaagccgtgtttaaacttatctcaggtctagcaagaactgctacccccacacccccacaaccacaagcaggcacagtcaccccaccccaaggctctgcagactctaaaagcctggagacgcaaaaggataagcaatgcttacttttataatcacattcttcacttcatgaaaagatctactaaatggaccctttaaatagcaatctcttttagaacacttaaacataattcaatttactccttgagaaacacatttactataccaagtgaagcccacctcgacctccatccaaagttttgaatagttactggtctaatggaagcacagatattttgtgcttctaagggaaaggatatgcatccactgattgaaagtatgctcgttgccagcctagtgactgagcactgaatgttgggctaagttcttgtaaaacaagtgtgagtcagatttgtgtggaaactttccacacagaattttcaagtccagtgtgttggcagataatctttaaagtaccagcttaaaacagaataagtgctatcataggagaagtacaggtttcatggatacttcaaacataagcatgtcatgagagatttcctagaaaaagtgaaccttgcactaagacctgaggaagcgaaaagcaatgacttccctggtggcgcagaggataagaattggcctgccagtgcaggggacacaggttcagtccctggtttgggaagactccacatgcggcagagcgactaagcccctgtaccccaggtactgagcccctgctcaagagcccgagagccgtgactgctgagcccatgtgctgcaactactgaagccttcacacctaacgcttgtgctttgcaacaagctaagccaccacaaggagaagcctgtgcaccgcaacgaggaatagcccccactcaccacaactggagaaagcctgcacgaagcaacgaagacacagtgtggccaaaattaattaatcaacaaactgaatacctaactgccacaatgttatctgtcagttatgtcaacgttatatgttaacacctaaatatgaagaaataaaatttacgtatacaaaaatatgtaacaattgtaaatgtatgtatacaaaagtttataagtatgacctagcctctgatactgcacaccatcatttcttttcatgccatggaatgaacaggacacaaaatgcataaactacaaaagattttacagttgcctactccagtacttcttgtctg

SEQ ID NO: 53705 - DNA, 3449 bp, Bovine  19866880358842
  misc_feature (1)..(1): n is a, c, g, or t
ntaataaacacttactatctcaacactttgtgagtgtcagaaatccaggaatgacttaactgagtggtctgccttagaattgtttatgagactgtagtcaaaaattatcagttcaggcaccatcatctgaaagctcgagtggaactggaagaattgcttccaatgtggccccctcgcatcagtggaaaattagtctgatggttggtaggagcccacagtttctgttttggcctctctgtagcctgcttgagtgtcctcatgacatagtcactgctttctccctgagggagagactcaaaagacagcaagcaataagccacagtgtcttctggtacctggtctctgatactgcacaccatcacttcagctttattctgtttaatagaagcaagtggcaaagtacagcccatatgcaagggtaagggtatcaggcatcacctcttgaaatgaggcgggtcaaagaattttaaccatttaaaagcatcagaatgtgttacaagctctttgctctataaggcatagaaatataacatttctgctgtccagaatacaatcctctaaagcaattaagtcacatgcaaggcagttcacatccaaaacagatcagagatagtttcagtgaatgcagatggaaacagtcttacccaagtggtcagaaggctttgtggagggaacgggggcagatgaggatcctggcatacaagtaggatgattaagatgtttcaggcaggaaacagcatcagtgaaggcctgtgatcatagaaagtatgcatttgaagcatatttgatatgcctttattacagaagacaccagaagaacagttgtttatggagattttccccagatagattgaaattcatatactatctgcagagcctctgtgttccctgcgggacaagactgtgtattttcatttccgtgtcctcaggagctaatgctatgcctggcacagaataagttgtccaaaatagtttattgagtaaaatatgtgctgaaagatagaatgaacatgtacgtaaatgaatgatcaagagaataaatgaaccccctactattgaacttgtaacccagagtacttatctgggtggaaggaaacaagatggaaacatgtgacatgcagggcattgtgatttttcatctatgcaaagaccaaagcatagctattaatagaataaatgccagcctctactacctcaggggctgaagccagtgcattcagtcttccaaacttcccaacacagagggtccaaaagccaaccaacttttaaccttctgtctctggataaacagacaagcagacctatgagctgccactcttcccctgcacccctgctcatctttaatgttcatcttctagtcatcttcccaagtttccctggctctcaacaaatactccatgaaaggctgtatctcatccaactctgactatgcagctgacaatccaaccatgagcaaagtcatatgaacacgtgtgtatctcacccattcaatacttgtagaggtgttgctattaaagactatttcctatttccttataaaatatttaaaaggctcatgctgagcttcctgacccgcttcactgtcttcttcaatgttccacattccagaagagccccaggaaatcctgtttaactgattaatcttcactcaaagtataattaaaaataagacagcccccaccggagcagctctcaattgatcaggaattcacacacacgtgcgtgcgcacgcacgcgcacacacacacacacacacacacacacacacacactgatctcccaatgttaggtggaccttcagaaaaatatcaaaacccttctccttcatttcacaaaaagcaactgaacatcagatgaatctgggttgacaggcagttctgaaatggcaggtggtaatgagcttgctaattattatgtaccatcccttgctagtcatctcatctggctacctggaggatatcttctatctcaccttgggagtccccagtgtctcatctccagataaagactgccaaggctggtaacctgaaaaactctccccatgaccttcagatgtctaagctaataaagaaagtgaatgtgaaatattaatttccctcactgaatataaacttttgactgtgttaaagcccttaccagccttttccacatggtccctgctttctctattctattgttattgttattgatggtattcagccagaatttagattgccctctgaaagcactgttactccccccagaaagtcatttatgtgcatctatggccttaaagatgattaaaagatgatttctattcccctttagtcatttgtcattttgcttaggggcatacaagtctagggtaggtttccagggagatttaatcaagtgactggagtggaattttataagagatctctccaaaggtaaggaggtggaaaaagatgagactgagttctagtgactggagttcccacagttccctgggtatgtgatcctaatcaagtgcctttacctcggcactttggtcacctcatctgttgaatgttatgaataacgagctgatgttcataaacacacagcatgtgctccacaaacgagattttcctttcctcctcgcttctgagcagggctcagagcactgtcattgcaagagtggttgtgttccaggaggggagggtctggtacctgcagaaacagagctatccacactaggaagatcgtggcatgcctgcatgcatgctcagcagtgtccgactctttgcaaccccatggacaatagcctgccaggctcctttgcccatgggatttcccaggtaagaatactggagtggattgccatttccttctccagagggttttcccgacccagggattgaacccaggtcttctgcattgcaggcagattctttaccaactgagctatgagggaagccctttgattcactactttctgccttttttcaggctacttcataatcccatcttcccaaagtttttttttttttttttgagcaaagaactgtttcaggtgccttttacagtcttccagggaattgaaatttttgtcactaaaatcattttggaaagactgtagtaaatggacataagaaggcataatgtctggtgaatacaggagatgtagcagaacttcccagcaagcagtgacagtttttgcctggtggtcaaagaagcatgcagtcttgcattattctgaccgaatgttatgtgttttcagttgactaatcccagacgctttctttgctgccttcagttggtcttattgggagcagtgcttgctggaattaattgttggattttcctgaaggagctcatagtagaagactcccttccagtcccaccatatatacattacctcctctgattgaagactggcctttggtgttattggtagtgctttctttcacttgccctatgatctcgtctttcccctgttattgtacagt

SEQ ID NO: 53706 - DNA, 5483 bp, Bovine  19866880367567
  misc_feature (1)..(1): n is a, c, g, or t
ncatcatcatttgtttacactggttacggctatataatatatatatgtatgtatagattttatatatatatatatatatatatatatatatatataatctttatgtgtatatttagtcacttcagttgtgtccggctctttgcaactctatggactgtaatctgccaggctcctctgtccgtgagattctccaggcaagaatactggagtgggttgccatgcccttctccaggggatcttcctgacccagagatcgaacctgcatctcttatgtctcctgcattggcagcgggttctttaccactagcaccacctggtaggccccaatcttctaaagagacaaatttctatatagagagagacaattttctaactcgtttattttgaatctttttgtgattaaacaagttagaactaacgtagcaatccgtaagtagatggttcagaactgatgcagaggccttgctccataagattgtctaagaagcctgtcctgtgcttcatcatttcccagggtaccacctccaattgtactgtctaggatgactctccagtatctctgtgttccagtcagttgaggaaggttagggactttaagaacgtaactcagaagttacagcatcacttccaggtacactcttctggtggaattaatcatatggtcatacctaggagcacaggtggctgtgaaatatgctttttactctggttggctctgtattcagctacagattgagtgttactttcctttctaaaggaagaaagagagactggatgttaggaagcaggtagatgtgatttccatgctgcttttacagatactaattggcaacataaaactgaggtcctattaattttctttattttaaattttgtatcctttttttaaatttttattttatttttaaactttacataattgtattagttttgccaaatatctaaggcctgaaaacttatcatgacttttaaatgtatttttgctctaccctccatgtttagacatggtttgtggcattaaaaaaaaaaatcaatgcctttacagcattgttttctacttttgtcgttgaacatgtatttcagttaaattatgaaataaatgggttttggtgagctagcctggaaaacttacaaacacaatattgtttctatgggaaaaagacttcaaattcttaagaaaatctgacaaagaaatgtgcttttgaaattgaacacatttgaaaggtgggaactgctaaatgcactcaggtttacacatatgaaataacagatgaggtttactggaacattttctcagtaatgacttacccaacactccaacagcctcagtacttggccagagctagccaagtccagatccagtttcctcctttctccatatgttcatcaggcacagaactgttggtttctctttttcacttcaaacatttagcctgttactggaaagttgtttagttgggaagttgtaacaagagtataaatagaagattagataaggatagtttaagacctttgagttataaatttaaccaagactttagagaccattcattcagctccaatactttggccacctgatgtgaagagctgcctcatttgaaaagaccctgatgctgggaaatacaaaaggagaagagggcagccaaggatgagatggttggatggcatcacctatttaatgaacatgaacttggatgaactcaaggagatggtgagggacagggaggcccggtgtgctatagtccatggggtcgcaaagaatcagatatgacttagcaactgaagaagaacaatatttaattttaataaatgtaatgatggggcttccctggtggctcaaaggtaaagggtctgcctgccaatgcaggacacacgggttccatccccggatgggaaagatcccctggaggagaaaatggcagcccactcagtgttcttgctgggaaatcccatagacagaggagctcggtgggccacagtctatggggttacaaaagagtcaggcatgacttcatgactaaacaacaacaaatgtaatgatggccttcttactctagaaagaaaatggttatggattttacttttttagaagtaacaaaatgcttatggatgctaatgttaaaatagctacttatcgaatagtttgatttcaaatctctgaataagtttgtcaaaggagttctatgcttttaactgtcttctctccccaacccccactattttgcctgctgctgctactgctaaggcacttcagtcgtgtccgactctgtgcgaccccatagacggcagcgcaccaggctcccccgtccctgggattctccaggcaagaacactggagtgggttgccatttccttctccaatgcatgaaagtgaaaagtgaaagggaagtcgctcagtcgtgtccgactcttcgcgaccccatggaccacagcctaccaggctcctccgtccatgggattttccaggcaagagtactggagtggggtgccattgccttctccaactattttgcctaagcacgcgcttagcctgagaattgaataatccagtgttgactgtggaatttaactcccagttcagtctcaaccagaccagaaagttttctttcatatactgaacaaattatttattacatgcctgttaacaaagcatttgaataattttcccagtactgggaagcagaggttaggtaagagtcacaaaccttgctcccagtgaagcctattctctgttgggaaagataaacaataagcaggtagttacgacaggtgtgaggagggttatactggatgatgtggggacagattgcaggggtggatggtttagtttaagggtcacaggaaacttcccccaagaaagaatgaatcaaagtataaaacaaattccctaagcagagagcaggttacatcccgttttattcagagattacatcactggcaagcaagtggcctgtgagaggaagagaagaggttccttagcgcccatggacctgcctctgggaaaacatctggcatagcacttggcacattcctgtcataaaactgaatcagtgaatggtggaatttcagccagtcttgatgatgacaagaaaagttttcttcacatccaaggagggagtaatgacctaacatatcaccttcttccagacaagattaatcctccttaagattgcttagaaacagttaagctggtcagaggttccggaatttaagggagggaaaaaaagcactgtcgaagagatggtaatgaagcagctataggattgtgaaatcagagtgtcagaagcagtaggctctctagaagcagtcatggccgcatcttgcattttaaatgtagaaaataaagtccttaaatatgtatgcacatgtatgtatgtgtgtcggggggggtggtatgggcatgtaaggaatgtataggctttagagtggagagctctgaaaatgtcttctactcaacaaggggagctttaacaacttagaaataaaatgaaaaatgataaattcaaattttggccagagagaaggatatttgaagatgaattgggtgatgactctgaattaaacacgaggatgaataaaggacatagattccttcctctcttgtaaggcacctaaggcattgaaacactggagtaaaccatctcaaaacaatatagaagaagttgagatttcatctactcatttttaaagtcattagttgattcattccttcaatggtatttctttgagcagatgatagcaaggaagtactgtggttatttgttattggataagacaggatttgtatcctcatggaatgttcaatctagtgggagatgataggagattgaactcaagtgttaaattctaggatggagggctccgtgacaaaggtacttaaggacaatatggtgatgtgtgtatagggatttccaatgagggcttcctggaggaggtcacctataattgcatgtctgaaagatgaatcaggcataatcaggtgaaaacaggcagagaataatgagagctcaatgtctaaggaatagcttatacaaaagcacagaagtcagagcataataggtcagggggaagcagaacatgcagacagttagttggctctaggtacagtgctgggtttaggttcttaagacagatgagatatgattcttgtttgtttgtaacaggccaccttctccaccccatccttccaccaggattttttatagagacttgtatataaaaggcttccctggtggctcagtggcaaagaaaccgcctgccaatacaggagatgcaggttcgattccttggctgggaagatcccctggagaaggaaatggcaacctactccagtagtgttgcctgggaaatcccgtggacagaagagcctggcaggctacagtccacggggttgcaaagagttggattcaacttagccactaaaccaccaccactatagccgattaaccatgttgtgatgagggactcagccatacatacacatgtatccattctctccctaacttccctcccatccaggctgccacataacacagaacagagctctatgtgctatacagtaggtcctcattggttatccattttaaatatagcagcgtgtgcatgtccctaactagcttttccccctgtctaccttccccctagcagccataagctcattctctaagtctgtgagtctctttctgttttgtaagtaagttcatttgtatcatatttttcttaagattccacatataaggaatgtcatacagtagttcccctctgtctgacttatttcactcactttggcaatctctagcattctctaagccaagaaattttgcaacacagagcacaaagtacaagtttcagagtccccgaatttcccaggtggctcagtggtaaagaacctgcctgccaatgctggagacggaggttcaatccctgggaagatcccctgaaggaggaaatgacaacccactccagtattctcgcctgggaaatcccatggacagaggagcctggtgggctacagcccatggggtcacaaacagtcagacaagactcagcaactaaataacaacagcagctatggatggcatgtttgtatccctgcttaatgcatatgttgaaaccttatccatagtatgatgatttttggagatggaggtagggccctcatgagtagggatagtgcctttattagaggaaacccagagacatctctcatcccttctgccatgtgaggttgtggtaagaaggctcccaccagatctgctggccacttgatcttggacttctcaacctctggaactgtgacaaatttctgttgtttctaacccacccagtctgtggaattctgttatagctgtctgaatggactaaaataactgtcttggtggattttctgtaaaagtcaaatcagggctcaaacaaacaaaccaaaaaagataaacatgcaacagaaacacctagggaccagccaagccaggctggtagcagga

SEQ ID NO: 53707 - DNA, 2297 bp, Bovine  19866880367570
  misc_feature (1)..(1): n is a, c, g, or t
ngctgctttcacctcagaggaaataattatatccaggtttgactctgttcatggggcgtgactacagcagaatgggtctcttcctgaacagaaaaagaaaattgaaaagaaaaaaaaataataataggaaatctgacacaccaaactccaaattatctaaatccattttcaatgaaaagcttggtggcttggtaaagatgatgacttttgaaggaaaaaagatccattgaaaaattccatttcccgtgctgtaaggttaggagaataaattgcacccggggaagaggggagacgctcctttcgacatgtaataaagcaggtggcctcatttgaattttcccattaggtctcctggagtgatctcagaaatatgttggtgttgcaaactgtacctcagccttggttctctgactccaggactcaaacaggttttcaaacagaagaattagtgtctggattacttgaaatgtccagcagaaagttgtttgttattgtgctgggtttcctatttgccatagaatattaaacaggtttcttcttttccacagaatattaataactggattgcaaagtggacaagtgtcttccctcccaaccagctctttccttctgtcctctcatcctgttttcccaccacaaggattggtggggatggttccaccccatgtcagggaggggctttctagatggagcatctgatactgacaggtttgtgtctacagccagagactatcagtccaaatggaggctttcccatgaaaggtgtgataaataagtccatggagtgtccacttcatccctttgttcattcggcagatggattttttttttttttggctgtgctgagtcttttttactgtttgggcttgtctctagttgtggctggtgagggctactcttagttgcggtgcgcgtacttctcactgagatgacttctcttgtgcagagcgtggggtctagggcgcgcaggttcagtagtcgtggaacacggtttcagcagttgccgcacgtgggctctagagcacaggctcgatagttgtggcacacgagcttagttgctccacagcatgtggggtctttctggaccaggggtcgcacccatatctcctgcactgaacaggtggattctttaccactgagtcatcaggaaaaccccttagcagatgaatgttgaaggaagctaaacaatacaaccaacgggttccctgtcctcatgtggtacacagtcaggagagagccaataaagaaaagagttagcaaaacattaactaattgaaattttgaaaagttctatgaaaaagaagtataagataagcactgagaaaatgtatcagagggactcaaaagtatagttgccccacacaagctaatcatttggtatgcttacaaacgtatttattggaggtaggaagaaactgacttaggaaaaaatcattccattttagtagttcaattcagttcggttgctcagtcatgtcccactctttgcaaccccatgaactgcagcactgcaggcctccctgtgcatcaccaactcccagagcttgctcaaactcacatccatcgcatcagagatgccatccaaccacttcatcctctgtcatccccttctcctcctgccttcaatctttccaatcatcagggtcttttctagtgaatcagctcctcgtatcaggcagtcaaagtattagagcttcagcttcatcatcagtccttccaatgaatattcaggattgatttcctttaggattgactggttggatctccatgcagtccaagggactctcaagagtcttgtccaacaccacagttcaaaagcatcaattctttggcactcagctttctttatggtccaactctcacatccatacaagactactggaaaaatcatagcttgactaggcggacttttgctggtaaagtaatgtctctgctttttaatttgctctctaggttggtcatagcttttcttccaaggagcaagcatcttttaatttaatggctgcagttaacatctgcagtgattttggagcccaagaaaatgaaatctgccactgtttccattgtttccccatctatttgccatgaagtgatgggaccagatgccatgatctgagtttttctgaatgttgtgtttttagccagctttttaactctcctctttcactttcatcaagaggctcttttaggtcctcttcactttctgccataagggtggtgtcatcttcatgtctgaggttattgatatttctcccagcaatcttgattccagcgtgtgcttcatccagcccagcatt

SEQ ID NO: 53708 - DNA, 4474 bp, Bovine  19866880455948
  misc_feature (1)..(1): n is a, c, g, or t
ncacacgtgtacttaatctgtatcccagttatcccacttctaggaatgtatttcaaagatacattgacaaaactttacccaagactgcagtagactatggagaaggcaatggcaccccactccagtactcttgcctggagaatcccagggatgggggagcctgacgggctgctgtctctggggtcgcacagagtcggacacgactgaagcgacttagcagcagcagcagtagattatatttctctccagccttcctagtacccacattctgccatggcctcatcgcaggtgcagcgattcttcatctttgatattgggcttgacctggaggcttgttttgaaatgatgccatgtcagtggaaacaacagtgtgctagccccaaagctaagctttaagagacaaaaacaataaatgattatttttatattcagctaagtcttggtggttgtttactacatggcattttgtagcaaaagctgatacaaaggaaacattgtttgttataaacagcatgtcattggaaacaacccaaatgtccatcgatagatgactgaatgaataaaccagggacagactacacaaaggattattatgctttatgcttaaactttttaacagcaagagtaactgccatttaactagatcaatttaaaatattcatatgcaattatttctgctgagaatcttcaaattttatgtatcagttcagagcatttaatttttcacagtaacatttgtgttaatcaaggcaccagccccaaagcactgctctcagccttagtaaatcagatgtgtaaagtatcaaatctggattgctcttcccaggaaactcctgagttactgtgggccaggagtctcagactttgctcatcaaaaatgatctcaagctcctaatggccaccacgcatgaatgaatagggaaagattgttggaggtataagttgctgactgtgcatggcagctgactaggtttttccttgattgctgtggggagctgtatatcatgacacataagatgacaggttcgaggtcagacacctgagctctaatccctgacattctgaagtatgaccagcttagttatcgtaaaactcaagtctcttctccatcaatcaaggttaatagtacctaccattgagctttgatgaggatgaaaagagggagcaaatatacagattgtgcacagtgtctgaaagatcatagacacccaaatatatttgtacatcccttctcatcaaaagtatggaattgtgaatgtaaatgtgggctctgaaatctttttttattttattttatttttaaactttacagtattgtattagttttgccaaatatcgaaatgaatccgccacaggtatacatttgttccccatcctgaaccctcctccctcctccctccccataccatccctctggggtgtcccagtgcaccagccccaagcatccagtatcgtgcatcgaacctggactggcaactcgtttcatacatgatattatacatgtttcaatgccattctcccaaatcttcccaccctctccctctccaacaaagtccataagactgttctatatcccttaatattttcaaagaaatttatataaagattacaacactcataaggcaaaattcactacgtctggcatcctataaaaaatgaccaggtgtgcaaaagcagcataatatctacaatgaggatataaatcaacaaaccaaaactgactcagaaatgacagaaaatggaatttgttttcataacctgagagactttgatttgaacttgaggctaacggctttggctttaagatatcttggttgggatgtttggaaattttatctctctggaattcaagatcaataacatctccaatcaattttttgttaatcaacccaagattttccctatgtttggaacagtaaaacagatcttaaggcatctccatccacaatagtgcctgaaagtcttgattcatttgtttatgtatgactacatctcagtccttgagaatcttgaaggccacattttatcttaaacctgcagaaaactagtctccattgtatatagtaatgttagtgacaaccaaccaagaaagcagcgtcatagagatgtgtgttcaataagaccactagatggcgcaatatcttcacatttcattaacaacacttaaagcccagaaaggaatttagtcctttacgagggactcttaccggaaagctatcctaatttgtcattccagctgcctgccttacttgctgatgatcttgtgagaaggaactgagtctaatacatctttgctttgctttaacttgaaagagagagctttctaatttttttttttctttctgttgatgctgtggtgagagtttgagtattttcaaacacagatcatgagatgaattttaattctcccattccccagctctgaacacgggctgcctgccttcccatcaaccttgacccagattccagcattctgcaaggtctagggtggcttcctctcctgtcacaagccatcactgatctttctagtctacgagcatctattttttcctaaattcttgtaatacttttgttagttccttactaaacaagacagtataacattgggcaagttacctaatttgaggctcagtttgttcctctatataatggaaaccgctatagtacatcactcatgtctaacacacaacaaattctcataggcatatttatttatgagtctttagtataatattaggtatggtcagtatttcctgaacatggacaactttccaagcaactgcttactgatatagatggaacagtgaacacagtgtatgcaagccatggtctcacaagccttacagtagaggaaggaagagggggataaatcatcccagcaagatctacatggactatgggaacatgcagcaaagataacttctcttgtcagctagaattaggagagtccctttcaagaaagtattatctgaacttaagctgataaaaatagcagtgattagccaagtaaagagaagaagggggtggggctttaatgtagtctgtgcaagtccaaaggcaccaagaccagggccaaatggcttcactagtgaactgcaccaatatttattttttaaaaaatgcaaaaaatagataaataaattaaaaatttaaaaataatgcccaaaatttacactctttcaaaaaataaaactttttttattaaaaaaaaatttccaaatcattctagtatcactctaatatcagtaagactctaataataaaaccaaacaaaaacattacaagaacattgcagaccattgtatcttatgaatacacaaacgaaaattctcaacaaaataccagtaaaccaaatccagaatttatatagagagttgtaatgaccaaatggaatttataccaggaatacaagatatgcttaaaaatctcaaaatcaattaataaaatatatcattaactgaattaaaagaaaaaaaaactacatgatcatctcaataggtgcatttgacaaaaatccagtacctgttcacgataaaaacactaaacaaataaaaataaaaggaaacttcctcaacctgataaaggacatctattaaatacccacagttaatatgaaacttattggttaaaaaaaaaaaaaaaaacaactgaatatttttacgataagatcagcatgcatcacttctattcagtactgtacttgatggaagttctagtcaggacaattaggtgagaaaatgaaacaaaagtcatacaactggaaaaaaagaaataaagctatctccttttacagatgattatcttgcatataaaaatcttaaggaatccattagacacctattagaactaacaagcaagatcagaaaaggtgcaagagagaaggtcaaaacataagaaacaattgtatttcctaaacacttgcaataaaaatccaaaaactaggaaaataatttgcttactagagtcaaaaataataaaatgtatagtaatatatttaacaaaatacaaaatatcatgctgtgaagactataaaatggtgtttaaatcaattaaaaataaagaagttctaaataaacagaaaagcatcttagctctatagattggaagatgtaatattgttaaaatgacaacactccctgatctacagactatgtataatctctgtcagaattctggttggtttctttgtagaaattgacaaactgatcctaaaattaatatggaatctcaagagacacaagatagcttgaacaatcttgaaaataaagagtatagttgaaactcacactttctgattgcaaaacttactacacagcaacagtaattaagacacagtattgttggcacaagatacacagaatggaagtgagagctaacttattttatatatatataataggtacatattttttcaattaatttttgacagaggcatcaaaatcattgattaagaatattcttttcaataaatgat

SEQ ID NO: 53709 - DNA, 8220 bp, Bovine  19866880459558
  misc_feature (1)..(1): n is a, c, g, or t
natattaatgttccaggaaaaggagaagagagaaaggacacgagcgcccagaaagaatgactccatctggctttgatgtgttcctttccacaggatggcagcagcccggagaatactgaatagtgaggaggagggaagagaggaggtggaggtggcctggcagcatctgagggattatgtgagctgtggagagtcggttctgtctagacaaaaagtcagccagccatgccgccatctgcaactatcagagaacaagccagcaagggaaaggggagtccctgggagccctgtttgttccaatgagcgggtgtaggatattctttgtaaaggactattgttgtgctaaacctggggagagggggcacctggtattattgagactcttcccaaaggtctgcttttttgtggatctcttcaggcaaaggtattctttctttgcctctccattgaggtcctgtgatacctgttcatttctcacatggatatcttgtgtgatacttaagaggtcaatctgcagtttgacctagatttagttcctacctgtatgtctctctggccttgcatggtgggcaaatcactctgagggcctctgttttctcttctgtaagtagtgtaagaagtagtgaggtagtagtttgtgtataggctctaacagcagtggctggtcttacaactgctagagcctattttttctcttccccaaaccagagacagcagagggcaaggcagtgaaggagtgacagcaaatggaaacatcttgggataatcacctactagctgcacagatgtttcatattctgctgaaggaagcaagtttccttggaatacttgaggtaaggcctctgtatgttgagtgaactttgacccttttgcacagtagaaactgagactcaacctgccaactccacagaagtaatagagatctcaacacatgaagaagcatttcagactagatcagctgggaggtgtgacatttaatttaaagaatttaagaattgataatttgtgacatgttggaggtattagctaatatgattagtgtgataatcacattgcataagtaaatgtttcagatcaacatgttgtgtatcttaaacttacacaatgttgtttgtcaattatatctcaacttaaaaaataacagaaaaggcaaaaggaagaggaattagatgagagcttagactatgtctggctaactattttcatttcctttgtgatgaggaatgatggttgggtagcagaaacccaccaaacagtatctgtagtctgttgtacaatataaaaatttagtccatggttcagtaaaccctatttaccatattatatagtggcaatagtcgtgttcagttatatcttttgatcgtctttgtagaaggtcagattaaagaaccctttaggtatgaaattcatctggttaggaccatacctgaatattgttgacaacattcagttgcccagagacaggaaaatcttattaggcaaatccccttaagaatgcagcattagagaaaatatgtccttaagcaatcttggaatggagagtttcctcccaaacaagttgtaaaaccccccggtggctgagaggttaaagtgtctgcctgcagtgcaggagacctaagtttgatccctgagtctagaagatccactggagaaggaaatggcaacccactctagtattcttgcctggagaatcccatggtgggattctgggagcctggtgggctacagtccacagggttgcaaagagtcggacacgactgagctacttcactttcacttttctttctaagagaaaagactgaaaaaattggctacataaaattataacatttccgtccaggagaaaaagtgtaatgaatgacacttaaaggactgtttttctcaacagataaagtgagagtgaaagttgctcaatcatgtccaactctttgaaaccccatggactatacagtccatagaattttctaggccagaatactggagtgggtagcttttcccttctccaggggatcttcccgacctaaggatcgaacccaggtctcctgcataatgagctattacaaattagtaagagatcatttggtcaaaagaaacatgagtaagctgattgattaaaaaaaaataaaattggcttattagcatatggaaaaatgctcagcatcatgtataagtaaagaaatgaacattacaacaccaatgaggagtttgtccaggttggattggtttgtcagtttgattatcatcatattggtgaggtgtgaagaaataagaatttttatcaagaacagatacagatttttggagggcaatttgacagtaactatcaaatttaatacaaatgcttggtcaaggactaatattttatttttattttttgaactgcaagaattccctcatcatttattcttcagaaatcgagacacagtgtggaagagaggatgcatgcctttgctttctggcctccctgggatcacaagaggaaagagaacacagaccgctatcagtacagaaagtatttttatagaagggaggaggagctttccaccccgtttgtaagacctggtctgaaggagaggggccagaccccagggtcctcttgaaggactaatattttaaataaggtattttacccacgcatatgcacatatgaacgtgtacttggattgttttgtagtatgtaaagttagcaccaaagactagcagcgaattcaatcaggaagatactgtgaagtaaactactgttaatctataaaatggaatactacacagctttgacaaagatgacaatgaacagtatgtgtgtgtatctgaaatatgtatattttgaaatgtgtgtgtgaaatatgtatggtcttgagattcagttaaattaattatgtccttttatacccatctttaacctttctttgttgcaagtgtgctacatatgtaaaattgcacaaagcagaatacacagctcaatgaatgagaacaaaatgaatatcatgtaactgctaatctgatgaagaaagagaactctgtctataccttttctttttgtctacaagctcatggataatttccgtcattcaaagcttctgtttccttacctatgattgggaacactgaaaatcgttaacaccactgttctctcctttctgaaaatgtctttgtgagaatcacatgacttaatgttaatgttgttcttctaagtgacagagagctctgcaaatgaggatgaagatggccattcagtctgatagatgtgtgaagcctgcaaggacatcatgcttgcagttgtccttaagccttcccttccttgggaagacagaatgtaaggaaaagagtggtattctgaacgagacaatctgttggtcatcatccttccagtaaatttgacttgaagccatatagtccaacctgtgaatgagaatgcacaaacttcctaattgttctgaatctctgacttttggcaggacactgccgaactggagccatgcaagcttttgggagactttcccagagccgtgaccttgtaggaatggtcttcagtgactaggtgaggggatcccttaccagtaattgctagggatgtgaaataatacatgtgccctgccaggttccattctagctatgtgacctctgacgagtcatttaacctcactgagcctgaattacctaccttcttgaggatatacataaccccaacctacctaaccctaacctcacaaggtgctgtgagtgtccccgtgagatggttcatataaacttctccctgaggttcctcacttgaccagtactcagaactgtttgctgtgtaaactgtcttggaatatctaactgggtcatcacggtgagtgagactgcagcatgtgggcctatatgtttcttacacatgaacacaggcagccaggtatggacgtggagagtggggtgatggttttctgactcagaaaaccacaatttagccctcagctctccattgctcctaagtaggtctttcatgtatgaagtcacagggtctttgtacactcaagatagtgacacatggggcttgcagtgcaaagaccaggatctgtcaggcttatatagaagaaataagagtatgaagtgaatgccaaggctttatgtttgtgtgggtaggatgtggagagcagaggggagagagagaaaggcacagaagtagaaatgtataaagcttgacttttggcaccagaaagattggaatggaatgttctttaagaggaacactagagagcccagcaagatgtatatttgggggacctctctggaagtctttgatgccagtctaggcacttagcattgatctcctagatagtagaaaagagccactgaaggttcttaaacagggatgtgacaggtctcaagcccaggaggtaaaactgaattagcaaattagttaggaaacaagatagttattatccacaactaaggcattattatgttccgctcaagaacaatcccctggcacagagcctcatgttctcaacagatgcctgctgaatttttattttgaatataaaattgctgtagcccagatgtcatttggcctccccagctttttcatataaagtgatgtgacattttaaatctgaagcaagtgactttaaatctttctcttgcacagacccagtccaaggggtgagatgagtttagacgtgacggcagccctccatcctccttactccccctcaaatgggccacggggcctgggttaagccccacttcctattcctctggttctttctctgatactgcctatcatcatgtgccaacccctccaggctttccagacttccacagcgagtgtggtgcaaggctctgatgtgaagtaaatgaaacaaaactaaaggccatgaagtcagcagcatgcagaggcaccacttgaagcgggtgtctgcctttgaaaatatccacgaggtttcctctgccatgggcacagccctgtcataggaactgatgtacaagagagcagaatgcataaaatacaacccagtctatccatctcaagccattgacattttcctcatggtgtcctaattaactctggatgctttttatgtcctttatgcgtttttatatcatagaaagtgaactgtgttggttgccccacgtcatttgtgagagaattgtggaagctaattaaaaacaaaaccaaaagccacagatgtaattattacataatgaggtaaggataacattatcagatgctattacatataccaagagcgaattttaattagaaccccaggtagttactgagaaatcaggtataaagaaattctaccaggaccacctatttgcaaaataatcatgcatcacaattattgcttgggtataaatcaaattccatggatgtacttcttaaaaggaagacagttctctggtcttggcctgtgcaaaacaaataaataaaacacatgcattatcaagaccagtttcctcaatctgatactgcaggcacaaaagatttaggaccttctgaaacatgtaatcctctagtatcaaagattagattcattctttctagtttctataaagtataaatatgagctgcgtctgtaatggcaatgaaataaatattttaaggcatatactcctgttcttacacataatttataatcctattttatgactctgtgtgtgtatgtgtataaaatacacaattcattccagcacaatatgtcacaatgacagtaatatacttgtacatattgtgaaatagtgccaagcaactggtaaacttttcagtaagtcatccctaaagaccctttctagaacttaagccatgtgtcgtctccatcttgtggccaggtggccaggagaaaacaaaagaggctgtatgatagaaggcggggaggcaggttaatctctctgaacatctattgcctgacggaggctgactggaaggcccgccctggtccagcggaaggagaaccactggtggatgatcactgtcttctgtgatcacgagggtgttgtggcagctggtggtgatgtgcagggaatcagtttcctattttgcgcctaatgaaaacattcgctagattcaaatccagatttttgtgttctaacctcagccacctgtctccccaacaactaaatggctgcatgaccttgggcaagccctttaacttctctgaaccagagcttctctatcttttgaatgggaaccgtggtgctcactcagtcctagtgtagcatgaggtcaccataggatgagcagtttaaaattagtggattcaaacttcgatgggttcccaggtggtgctagtggtgaagaacccgcctgccagtgcaggagatgtaagacacacaggttccgtccctgggttgggaagatcccctggaggaggggagcccagtgggctacagtctgagggtcagaagagttgattgtgacagtgacttaacagcaacagtaaaggaattcagtgacatttgaagtgtcatgtagtgctaaatgccacaaaggacagatgcagcaggactggggagagagcttgccggtcgggaggacgttgttttggataaggtgctggaagggcctcaggatccacatttgatcacagaaatggatgtagtcagggagtgggtcacatggctccctgggggaaagctgttccaggtggagggacagcaaatgccagaactgtgttgcatgggttcaagggccaggaacaaagccagtatggcttttccatttctgcatgcttgtccattggagttcattttgaggtgtagccctcacaaataaccatggatttcaggggccaggaaaagtcagatggtggtgctcactcactcgcacagcacagtgcacagggtctgtcacttctgttaccctgctcattgattttctgcctttacttataaatgtatatttagaccatgatgaagttactcttggggcttctcaggtatcttagttcagttcagttgctcagttgtgtccaactctttgcgaccccatggaccgcagctcgccaggcttccctgtctatcaccaactcctggagcctgcccaaactcatgtccattgagttggtgatgccatccagccatctcatcctctgtcgtccccttctcctcctgcccccaatcgctcccagcatcagggtcttttccagtgagtcaactcttcacatgaggtggccaaagtattggagcttcagcttcagcatcagtccttccaatgaatattcaggactgctttcctttaggattgacaggtttgatctccttgcagtccaagggactcccaagagtcttcaacacaacagttcaaaagcatcaattccaggtgcctcagtaaagaatccacttactgatgcagaagacacaagagacacagtttcgatccctgagtcaggaagatcccctggagtagggaatggcaacccactgcagtttgcctggaaaattccatggacagaggagcgtggtgagctacagtccttggggttgtgaagagttggacacgactgaacacacacgcacattactcttgccctgtaagtaaataggtaaatcaaatctttttctttcaggaaataagtattgtactgttagacagcctgatttatgggagtagtagaaacaaaccaaaaacgttgtttaaaaggtgcagtctgtcaagcagttgactctgcagggcagcttcttctgcagcggtgtggaaagaggagtgtcacattcaccccacccccaacctctttgtcttcctcctcctgggcagtgcttcttcctcagcctctggatttataagaccattgtgctaacagtgctgtatgcagtttacaagcctttgctcaattctcgtggtccttatggaagtgtaatattaaactagtcacataagactgagacaatgaaatgcagtcacatacattaagtgtttagcacaatgccaggtatagggtagattcccccaaatggtagctgttattatcacaacattactttatttagtcctcctacatacccaaggaaaggggcattataatcctcaaattataggcacagacaggttaaataacttctccagagtcactctgctagtttcagtccaagatagggtttaaatctcaatctgtctagtgctaaagactgtgttctttttcttcacatactacctcactactcttcaatttccttatatctataaaatggatataatatatatatgtgggcatgtatatgtatattatgtatgcatat

SEQ ID NO: 53710 - DNA, 3690 bp, Bovine  19866880459559
  misc_feature (1)..(1): n is a, c, g, or t
ntggagaggcaagaaagaatacctttgcctgaagagatccacaaaaaagcagacctttgggaagagtctcagtaataccaggtgccccctctccccaggtttagcacaacaatagtcctttacaaagaatatcctacacccactcattggaacaaacagggctcccagggactcccctttcccttgctggcttgttctctgatagttgcagatggcggcatggctggctgactttttgtctagacagaaccgactccccacagctcacataatccctcagatgctgccaggccacctccacctcctctcttccctcctcctcactattcagtattctccgggctgctgccatcctgtggaaaggaacacatcaaagccagatggagtcattctttctgggcgctcgtgtcctttctctcttctccttttcctggaacattaatattaatagcttgtttctttgcagctgctttcttctccaacctcaagggaccagaaccttttcttggactttgtgacagacggaggaggcctcattcgaaggcggggagagacgcactgggggagcacaggcgcggatgctgtctctgatgtaatcccgggccgcccagtgcaagcatgtgacgttgctccactgccagcccagtccagccaaatattctgtgtaatatgtgtcccttcagaggaggagaaagagatctgcaaacaatctagccaaaggcccgtgaaatcatccctgatcaataatcagtggttctgccgccagactgcactagtatctcatctcatataatcaccataattctaccagcttaatattggtatcctcctttaatagacagggaaactcaggctcagagagaggcagccaattgcctacatgtcacacagcttgggaggttgaaagttaaaactcaaatctccttctaactaatttcccatacatttctttttgtctgttttctgagagttcagcctgctgcttttgtgctcggtggaccccataacatcagcacttgagagctgacacggtaagaccagactttgtgggtctgacttctcccctctcatgcccactccagtcaaatctgacatggtctctgaggttcatggaagctctggaatggagactcgtgaagccagaaggtattggccagatctgtgctcaccggccctcagagaatggtcgattccctcactgtgctttcccatggtgggctggagggcagccgcacatccagaataacaaaaaggagatgttccaggctgactggggtgaatcccaaaacatcagcggccgtcttggcaaggggaaagctgacagcgctccaacttcaagctcatggacacaagatacgaaagtgacaaaagacaccacacctctgtagttttaactttcaatgcattctcaggacattcaaagtctaaaatggtcaaaatatctggaaatttcatgatttacaaggctttgtgtgatatggctttggcgggcttttacagtctcaccgtgaacaactctttctgactctcagctctgatcaaggcagcctccttttgattcctcaaatacaacagattcctccctgactgatggctttccaggctcagggctgctccccctgccatttatttgagtgagtgaaagtcactcagtcgtgttcgactctttgcaaccccatggcctatatagtccatggagttctccaggtcagaacactggagtgggttgccattccccttctccaggagatcttcccaacccagagattgaacccaggtctcctgcattgcaggtgattctttaccagctgagccacaagggaagcccaagaatactggacttatctctactagtcttttgggttggggacagcaacccactccagtattctggcctggagaattccatggactgtatggggtctcagagagttagatacaactgagcaactttcactttcactacttatcttttgagcttctttgttctgccatgtcagattaggtgagttcatcagactgggcagccacggggcactgatttacataggccgttcaaacatcaacggtgcattttcctatgaagagccagatagtaaatattttcagctctatgggtcgtatagtttctggtgcatctactcaatcctgctgctgtagtgtgaaagccagtacagataatacataaacgaacaggtgtagctgtgggttccaaaacaacctttttcaccaaaacaggtggcaggctggatttgacctgtgggccatagtttgctgacctttcctctaggacatcactgaaatatagaactttggaagcagttaactcaggtttacacagtaaactaacaaaacacacaaaccaatcttaatttcagaaatgttaatcatacgttgagtataaactgaagcaaatatttcttgctgggctgagcccacctgtgatgcatattttttaagagatgcaagctaagacagggcacagccaaataaattaatcaatttttttagaaagggggggaccttccaagtagtgtagtggctaagaccccttgctctcaatacaggagacctggatttagaccctggtcagggaattgaaccccacatgccacaactaagagttgaaatgtcacaacaaagatcatacaagacccagctaagacagggtgctgcccaataaataaatacatgttaaaaaaagatgcatattatcagcagtcagctgagatctggactcctaattcatggagtgaaatgggagcaaattattttcatatacacatattggatcatttaacatgtttcacaagatgctgtctcgggaaattgcaaaagaaaacttaagcgagaataagaactatggaaatgtagaaaacattttgcttaaagtatgcaagactatcaattctgcttgtcagtggaagtgaattaatggatggaactattttggtatacaattttaattaatctagcataagtttctcggaagtctggctacaggcaagccacaggttccatggctgtgccctctgtttgttccacccacctctctcaggcaagccaaattacaggctctgctgctatcagttttatttttggatacacagacctcccaccagcttccagtgtctgctggagcctagcaagaggcagacagaggaagttttcttcatgcttcagccattactgggacacttactatgggtcaggggacacaggtgaatgaaacactgagtctaccgatcaggatctccctgatcaggtaagtaggcaggtaacactcacacatggaatgcaattcaaaggaatcaaaatgacgcgcagcactgaagaatgcagccacatacgaggaccacctacgccgtgtagcgctgaaccgtgtgcatccttgtagtcagcttgcagccggagcctcgggctgtctggacacaggcagaggttacataggggcattgttgttgttgttactgttgagtcactaagccgtgtctgattcttttgctatcctgtggactgtagtcccgccaggctcctctgtccaagggacttcccaggcaaaatactggagtgggttgctattttcttctccaggggatcttccgcacccagagaccaaactcaaacctgcatcgccttcttggcaggcagattctttaccactgagcaatgggggaagccaatactggg

SEQ ID NO: 53711 - DNA, 684 bp, Bovine  19866880506679
  misc_feature (1)..(1): n is a, c, g, or t
ncaaagaaagcacggaataggagaacactttaggttccttgtaaacattaaaggtacttattccaaatggattttcttctaggaaagagatacactacctcttttttacttttccttttcccctttcacatttctactctattcacatccttcaaaggacaaatcagcaaaaccccaaaagagtcactgctatgagaataattgtgaacttgctgagtccttgcaatgttcgttatttaagttcttaagtgcagatagtcaaatgtccaggagcgtcgaatctcatgatcataaaaacctggtccatggaagccacatggcgcttagacctctgcgtctacttcggcataccctcttgataaatcgctgccctgttgtactccctgaacatttcacgacaaggtgaaatccagtcttgtttcaaatttacatttttcctgagcttgcatatttccatcacatttcctttgttgccagtgtaccaagtccttataccttcccactgcatttactgctgtttgaaatggtttctcagaaatgggacattaaaaatcctttgaaagctgttcaggcatgcttagtatcaatctaatctttttttttttttttttctcaaggtcttcaggtagaaaccctatataggggttgataattaagtataagtatccattaaaaagaaaccat

SEQ ID NO: 53712 - DNA, 4365 bp, Bovine  19866880519509
  misc_feature (1)..(1): n is a, c, g, or t
ntcctgagtgttcttggaaggactgatgttgaagctgaaactccctactttggcccctgatgtgaagagctgactcattggaaaagaccctgatgctgggaaagattgaaggcagaaggagaagaggatgacagaggatgagatggttggatgtcttcaccgactcaatggacatgtgtttgggtaaactctgggagttggtaatggacagggaggcctggcgtgctgcagtccatggggccacaaagagtcggacacgactgagcgactgaactgaactgaactgaactttattaaatccaatcaacaatagaggtcatttttcattatttacaaattatgaaaatgacggctagaaaagttgtcacttatttaagatcaaacagctcactgattaataccaaaattacagctcagagcttctacctccctgtccattttcttttaaaaaatattaaccccaatgtgcttgtgtttgactttcccttcttcatcttcattgcacagatgcccaaagggaaattcagacaataagtctacatccttacaatgcaagcttaatgaactaaccagaagagtaatcccaccactgaaaagctaaattaacatcctaaaaccataactaaaaacattgcttcaatctgacaactgcacttgtcatttctatagagtgtgggctttttgcatatggaatatttcccttcaaagaaaattgagaacttctattgaattgtgccagacagagccatagctgtgttgaacattctaccgacattccttgaaaagcatgtgtcatcttggcatcttatttagatatatcttttaaagaagcagttgctgctatgctgtaagctaatggaaaggaactgcagtttctttttaaagtcatctgggcccccagagcagaacaacgattcaaatcatgactattcagcagccacttaagtgtatgacttccctctggcaaagttctgagttaagcccatggatcatattattctgagtcagttgatatctctccgaatgctactgcctgtgtttccacaactaaatttatagaggagtctttgcaatagtactataccaactcttgtatatcttcttgattatttctgttctctctttttgcccacattgtcaggtccagactatgagcagaaagccccaaagctaacaaatgcagaatgcattccattgactcaaaatgtgataacacagcagtatttctctagagaggattttccctcattaatccagctggatctttcactaaaaacccactaagagagtagttgaatgagggacacactgaattttctttcagtactttctaaagtcaactgatcacttctaaaatcagaacaccacccactctttgctgacaaaaaagtattatctttattagcacttaaccaaacaacctaaaaagcacgtgccctttgtaacaattgaaaagaagataagatgaagatttgaagtgatgataatgaagacacttcagttttgtgaactcagaagagaagtaataaatgagagagagagagaaaaaaaaagaaatggtgaagaaagttttggtgactatcagggaacaggaagtataatacaaaaacagtgtaatgcttccctggtggctcagaggttaaagcgtctgcctgcaatgcgggagacctgggatcgatccctgggttgggacgatccccaggagaaggaaatggcaacccactccagtattcttgcctggcgaatcccatggacagaggagcctggtgggctatagtccacggggtcgcagagagtcggacacgactgagcgacttcactttcatggccctgatacagccttgggcttccctgatatctctgttggtaaagaatctgcctgcaatgcaggagatcctggttcgattcctggcttggaaagctccactggagaagggatagactacccactccattattcttgggcttcccttatggctcagctggtaaagaatcctcctgcaacgcgggagacctgggtttgatccctaagttggaaagattcccctggagaagggaaaggatacccactccagtaattctggcctggggaattccatggactgtatagtccatggggtcgcaaagagtcagacatgactaagtgacgttcacttcacagtcttgagtcagatgtaccaaagttcactagttcattcgtttcttaattcacttgacaatggtagcatggcatactggttcaaagtgtagacactgtagccagagaactagaatcgaattccattccaccagagccaagctgtgaagcctttggcaagttccttaagctctctggcttcaggttactcatgtcaggcaggcatgataatgtgtctatttcattaagttgcaaagaggatttaatgagctgtagataagatgactaacactgtgcctggcacactgtgaacactaggtcagtgttacttttactgtcatttccccccatgcatctgcatattccaaccccacaagaagtgctgagtactggagagggaataagatagacgctgtgcctcattagatcatgataaatattatgatagaatggattagggggatgtgagagaaaagaatgaggctgtggagtgattttattcattgaatggtgaggaaacacctctctggaagaagtgtcattgaatctgaaagccaaagtttgaggggatgagggttagttaggggacttaagggagataaaacgcccagtcagagaaatgtcaggtgcccggcacaggttgaagatcttggctgcttctgaggaacagagctaaggctcctatggtcagagacaccgtcagggtggtgaagagtgagaaatgagcctggaggtgtgggcaagggctggaccaccaggacaggacctcttccagacaggctttattctcagaacagtgggagactactgaagaatgttatgcagagaaggaatataatcagatttttttttaagtgaacagactagttttttagagcagttttgcgctaagccacttcagtcgtggccgactctttgcgaccccatggactgtagcccatcaggctcctctctccatgggattgcccaggcaagagtactggagtgggttgccatggccttctccagggcgtcttccccacccagggatcaaacccgcatctcatgcatctgtattggcaagtgggttctttaccactagcaccacctgggagcccaatcaaaccaaagtaatcaaatcgaaccaaaacctcaccaaccagaaagtcaccttcaaagtcaatggcaaacggccccaaatgtgacctccaagtcctactagacctgtgacccttgtccgaagtgccttatatacagagtttcccttcacagaaagaacactccaaattggagccaaagccccacaaatggagctgaagctccccaagttggagccatagcccccaaaaggacaaggtcaaaaagcctctggtaggaccctgatgtcaagctgttctgggggaaggttacttgagtgtttaatttgcaaaggggagtggtatctgttagagcagtttctaggcttacagaaaaatcccacagaaagtacagcagattcctttaaatccctggttccctccttccccacactttcccctgctagtaacttcgtgcactatgcggtgcattttttataatctataaactactattgatcactatcatcactaaggtccaaagttcacatttcaattccctcattgtgtggaacagttctatgggttttaccaaggcctactgtcaggtttcataaatgacaatgtcacataggatcatgccaaatactttcaccactctgtacttgatttttaattggagggtaattgatttacagtgttgtattggtttctgccatacaacaacatgaattagccttaaggatacatatatcaccactctataatgtttttatttttaactgtacaagcttaaagtaggtggaaaatgtggttgaaacaagagtcttgataagaaacttattaagtggctgttgccacagtcttgacaaactcagaaaactctaactctagagtcaactgcagatggtgactgcagccatgaaattaaaagacgcttactccttggaagaaaagttatgagcaacctagatagcatattcaaaagcagagacattactttgccaacaaaggtccgtctagtcaaggctatggtttttcctgtggtcatgtatggatgttgagagttggactgtgaagaaagctgagtgccgaagaattgatgcttttgaactgtggtgtggagaagactctgagagtccctggactgcaaggagatccaaccagtccatt

SEQ ID NO: 53713 - DNA, 1275 bp, Bovine  19866880527494
  misc_feature (1)..(1): n is a, c, g, or t
ntgactctttgtgaccccatggaccatagctcaccaggctcctctgtccatgggattctccaggcaagaataccggagtgggttgccatttcctcctccaggggatcttcctgatccagggatcaaacttctgtctcttctgtctcctgtattggcaggtcggttctttaccactagcaccacctgggaagcccagtggttggtttaagggtgataaataaggacaagaaggcgactcttgagctctctttcttcattctatctttaaagggagtcatctgaaacaaacaaggaaaagttaaatctgctaaatttgaacagtaggtgcattaacaacttttgtatttttctaactctaagcaacatgacctgaacgcaagcatttcctcaagtcgctgaccatcccctagatgaccatgttgctacaagtcctctctttgataaggaagattaatatcaccttctttagataacattttccaaagcacttatccttgcaatcctaatacatgcactttgttgatgtctaaattggtctttaatataaaactatattcctgtgtatggtgaaggggtaggcttcctctaatgcagttccgattatctcacttctaacgagtgagttcgcttggctaagaggaagagagcgggctgcgctggtgaactctaaagacttctgacccctttttacattcctccaggctctagtctgacaaattctcaaatttactgtaggataaggcactaggagaagaaaataaaagagaaccactggtgtaagacacatggattggtgttcggctgactacccgaaaaaaaaccaagactaacaagattaaaataacttcaacacttcatgtgaaagaggcacggatgagcactcattaaggcagcacagaaaagaacatagcagtttttggtacaagcagcctggtcttgggagccttgaccttgcataggaggaaagaaagaaaacaggtgggagcaagtcaagcctgtcccatcagtgtggagaacggacttctgcttttgataacagagtctctcttccctgaccccaaggcccatagcaaacacactcaggagcatgcatcaatccatccatccatcactctgcaccatgtcctgtgtgtggcctaacagatcgtaagatgattaaaccatcactgttgctctcaagtgcctggaagtctggctcaaaagactgatagaaaacaagaaagattaaggcaatataacctggtaaataaacaaagataatcgaaacctagattt

SEQ ID NO: 53714 - DNA, 1192 bp, Bovine  19866880562683
  misc_feature (1)..(1): n is a, c, g, or t
ncaaacccaatgagacagctatgcgtactgtccttatccctgcaggtgagaaacctggcgccaagatgttaaatgacattccctggtcactcagctattaggtggttgaactgaaattcatactcagacctgagtctaaagctgactctaaagtctgagtctaaagctccttctctgttcacaaacttcattgcttttcttgtacattctgtcttattaatatttaaaaatctaaatatacagggagctttaaggaattacactttttttcaataagcagaaaaaaataaatctccccacaaattcctgggataaaaatcatagacataaacatgcctttgtgaatgttacatggtcatacaaccactgtatttatcttatgattttaacctccacagagtctaatcagatatgtaactatcataaatatattcttaataattaagctattagtgctacttttgcaatctctcatttatagaatcgaatcattattaatgaatagttgagtattccatgtgattgtctaaaacaattgcaaaacaaacccattcattataatgattcagttggtgcatattaaagaaacatctacaacagtattttaactttcttgaaattaaccacgttgtcacagtatactgcaggaaatatccatcaagagacgaaagatagttttgtgagctacccatgtagcaaatcatgattgatttgctctctttctcacccatataagttttcaaagaatggggcaaaagtgtttcacataactcttagggtaaggaagtccctggtggtccagtggttaggactccacactttcactgccatgggccttggttcaatccctggttgggaaaccaggatccctcaagccttgcagcacaggcaaataaaggtcttagggtgagggtttctttgcaaagtgtctcatgaaatgaggataccttaaaggaggtgcgcttccatgatactcaaagaaacaacctcttgcatacatgctccttcaagagcatgaattagctgctgttacttcagactctttcaatccagactttgaggtctcagttccatcattagcagacatttttccaacagaataaactgcaaattctaagacacatgaagatcaacagaagtacaaagtatttgggctcagataggctccattgatagatgaggaaattgaagc

SEQ ID NO: 53715 - DNA, 3965 bp, Bovine  19866880569344
  misc_feature (1)..(1): n is a, c, g, or t
ntgcaatacaggagaccctggttcatccctgggtggggaagatcccctgcagaagaaaatggcaacccactccagttttcttgcctggagaatcccatggacagaggagccttgtgggctacagttcatgggatcgtgagagtcggacacaacttagctacttaagactatttatatgacttggtgccagttacttaacttttctgtgtcttggattcagcatcagtcaggatttctcccagaggaaccagcgtgaacccttaaaagctgtgattgaggaagttcaaagagaagactgtttgcaaagatgcaggcagagctaaaggaccctcataaggaatggtgaagcatctcagagctagtgacagtacaagcattatcactctgagcctgggatggaggacaagcagaagagtcatttcacagagcttggagagctgttattgctgtagggaagagctgcctggagggagctgtaactttcaatggaagattgcagccaatccaagttctggcaggaaaagagttggagcaataaaaagccagatgtcatcctcctatcttccaatctccctgctggctcccatggactaaaagcctactggaatccagaaggcaaggagctcattgatgtagtccataaaagtcagtttcctagggtaagggtcagatggagatgggtggagaaaagatctgaaggggcaaatgaagactttgaagataagtttccttatctacaaattgggaattctaaccacctatcttatagagattgtcttggaggttagggggtataggtaataagttatgaataagatacaagtcttatttctccttgtcatctgctgctgaaccttaatccactgatgtctctttttaaagtaagttttttcattgattttcttttggatgtcattgttattcggtttgtcttaatctcccagaaatgtcgacatgacatgtttccctaatgccagatttttcaacacgagtttaactctggtgtttccttgaggttggcagtctttcctgctttatgatttatttttgatcataggtgaggcttgagaaaatatccaatttcaggatccttggaagattcttccttcttagtttcagccgcttgttgttattttcagggttatgttgccaggacttccctgctcctgactccaggcaagagccatgcttgctgccacctgggtttcatcatttcatgcttcatatctgcttctgggtttgttagataaagttaccttttcatgaatgggagaggagcggacctttccaaataaagcaatgggagatccgcgtccatgtgaggcaggcttggtgtaatgaagagaaactgtcagccttaggttctaatccctttccagcctcttacttgcagtataaccttgaaaaatcccttttcttgctctgagccctattttcttcatttgaaaaatgaaatttcattgcacttctctcactggttagatgtggagagataaaatgaaatatgtatgtatagaagactagacacattgcttggtacatagcaggcattcagcaattcctgtagacaaatcaaaatctctgaagtccagtggggatcctcaacttctgattatactggagcttaaaaggagctgacaggtactctgggcgtacaaatattgagtccccccaggtgaaaagtgtgctctttattctaattgacagtctttttgtctttgttgtaagcattactaaaatttttctcgtgggtgaattgagtccacagatatcaaatctacttcctaagattctatgatggtaagatgggagctggaaaaaacgacattaaaaattacgtaaaaatcctaataaatcatgcaaaaatccctattaaaatatttttggctgaattatttttcatttttatatccttcttgtgtgatataggacatgacgcttgccctgagtatttctggaatatcttgtcattcggtaagtctgagctccagaatcacttaggttaaaacagcagggaccctgtgtccaaactacagtcctgcccctgactttgaggaggtcgttcacacaaccttttgtgcctaaaaaatgaacatcactatgccctttatctcaagatttgtttacagattaggataacaatgtaaataaagttcaaagcagtgggtaaggaagagtgctcagcagtggtagcagttattgttgaaatacgtgcaacgtatttctgtgcaacgctacggactgtagcccgccaggctcctctgtccatgggactctccaggcaagaatactggggtgggttgccatttcctcctccaggggatctttcagatccagggattgaacctgcgtctcttacatctcctaccttggcagttgggttctttaccactagcgccatctgagaagcttattgttgacaagggactattatcaaatcaatgtagatctgggaaaaaggcttatggagtccgctacctttactttatgtctggggaaactggtgctgagaaaggagaaatgtaacacaccgaagaccaacccattatttcatagaaccgggtttcctgaggtccactgtaatttctcggcactaccatttcatacagaagtgccaccagtggacagacagcagtaagccacgtcatcaggagatgcaggacagtcttcagacttagatgccatctgttaagcactgcaaatttgtacaagtgccctgactgccaccaatgctcctgctcactactccccatcaagttccaaatagcctgaggattttgttgccatccgttgaaaaatgtcagcttttcatgatgcagtttcagaccaaattctgcaagaaatgttttcaccctcccttccatggcctctgagacgtaggtctggcacacagttgaaagataaattctatgttcccataaaaataaaggatttgcatcatggggaatggttaatgctcagttttttgtagaatatgctagaaattggagggacactgtgactatgctttcagtggtcaaataagatgtcttgaagaaaaaacaccaccaccaagaaggactctgctgctgctgctaagtcacgtcagttgtgtctgactctgtgcgaccccatagacggcagcccaccaagctcccccgtccctgggattctccaggccagaacactggagtgggttgccatttccttctccaagaaggactctaggagaaggtaaaagggagggtaaatcaagaatttcgtgaggacctacaagtggatcacacattttaccatgcttttaaaaaaaattattacttcattatgtttattttccactgaaagttctatgaggatatggctctatcttatattctcatccataattaacacagtgcctaaaactttggtcacctaatgtgaagagtcgactcattggaaaagatcctgatgctgggaaagattgaaggcaaaaggagaaaagagattcagaggatgggatggttaggcagcatcaccaactcaatggacgtgaatttgagcaaactctgggagacagtggaggacagaggagcctggcatgctgcagtccatggggtcgcaaacagttggacacaacttagccactgaacgataacaacaaagcatgattaaatgtttgttggggagtaaatgtgctagaagctctttacaagtgatctttccaaatcatttgtcacttcgtgaattagaaattatccccacattgtgaatgaaaacaccaagatttagagaagctaacggatgtgtgcattgcgtcagcgacagatctggaatcccaatccaggggccatgattcctgagtctgttctgtttccacggtgacctgctgcctgactctttatgggagacatctctacttgtggtgcacattactggcaggtgttcttttctgtagtgatttcctgtagatgaagggaaaggctctacctcagagaaccacaagg

SEQ ID NO: 53716 - DNA, 759 bp, Bovine  19866880620580
  misc_feature (1)..(1): n is a, c, g, or t
nggttatagttctggtttctgtttgcaatggggatttcatgggggaaaatatttcagcccagagctggacattttgagatggcagaggtgcagacacccacatagctcttcactgtcatcacagtttcccagcccggttcaggcaccatgccgtgtatgcagagaatctttcctacaagtcatatggcaccccacatgatgtaggacaaaagccacacattttcacttacaggaagaagaagttctgaagagcaagggaacagtatggtgattgcagctaacatggtattgtatacttgaaagttgattagatcttaagcattctcaccacaaaaaagagagcactatctatgtcaacgacgtgaagtggtggatttgtatttatcttgattttggtaattactctacaaagcatatgtatatcaaatcatcatatcatacactttatctcatgtgaagtgtcatatgcagattattcctttgtaagtacagaaagtaccaataagaaagctgatgactgcataaccttcatggagaaaaggataaagaaagatacgaatatccctcctgttggatcgtttaagtcttcctccaaaagtatggtctaatgggcactttttggttcaaagctctgtatgcctggaatgtgacttctgatatccctgggaagttggaataggaaaaccatatctccaaccccatttcacaggtcatgacaagctggtgaaggcaatcacatttctagataaatgtagatag

SEQ ID NO: 53717 - DNA, 1816 bp, Bovine  19866880622468
  misc_feature (1)..(1): n is a, c, g, or t
ncatcctaactttacaaataacatgctcgtgctcaatgtgtctgtcttgatcacccccatcttctcaattgagctggtaccaaaacataggggaaatgcaatatactttagtttaaaacactataatcaggtgaattaatgaaccgaagttgtggctctgagatcactgtgttttcttgtcaaaattcactaatggattctattggtcaaaattcttcacttcagcttatagaaatttaaattgaataaaaacttaaagatcatataattcaattccaaataagcaagctgaaatttcttcaaagataatttcctgggaggtatttctgtggtatttctaaactggctgcttcaaagagaattataaaataataagtattttgcccctaacctctggatttactaaatagagcatttattcttgaacctgccttttaactgagtaatacaagtcaggggcccatccatagaaaaggaaatttatgggcttatgaatcttcatttgcagttcttgagagtataatgatgacttctgatttagacattccccagagatgcagctgagctggtgctaaaaaacctcagctatttactaggatatcaatccctctcatcaggacattaattcctaggaatgttttagtctctcaattggtaatttccatcactcattccatgactagcaattaatattcattaagggtccatgctgctgctgctgctgctcctgctaagtcgcttcagtcgtgtccgactctgtacgacccaatggacggcagcccatcaggctcccccgtccttgggattctccaggcaagaacaatggagtgggttgccattatcttctccaatgcttgaaagtgaaaagtgaaagtgaagtcactcagtcgtgtccgactcttcgagaccccatggactgcagccgaccaggctcctctgtccatgggattttccaggcaagggcccataagacacctaattctcccgtgtactgggcatgtatctaccgggggtaagagaatttgatcaaagcaccaaatcttcctaggtcatcttattaaatagtctttttttttttttttcaatttaagcaagttgttttacactgcgacttgatacacacacacatttccacttcaagggtctaattgattcatcattgtgttacattattattcactaagtaatatattatttaattataatacatacaaatgagattattaaatattactcactaaataatataataacttatgagaaagtaatttataaattctgaagaataacatacatatttcataaaagttcttctaagagcataaacttgttcatcaaattcagaaatatgaggaaaagtgggccttcacttttctgatctgactgcgtcactctctgcttgagaattcttcaagggtaaccttggcattgtaggtgatacccaaatcatctttctgggcctgctcctgccccacccctcaccttgtacctttgagttcctgctcatcctctctcctcaacctaggcagcttttccacctaatgaacccttgtactttcctcaaggcctaacctgaagtcacactgttcacaggccttccctaccctgtactccaggtagaaggtattcctctctgtacacgttcatagcataacacatgcagtcttgggacagcccctctccatagtaacagacgtgtctcattcatcttgccatttcccagcccctcaaagaacggctactcacaatgcttgtcgcctcccatcttgcagcattataaccaacgagggcgtccttttccttccagaaatggtcc

SEQ ID NO: 53718 - DNA, 2846 bp, Bovine  19866880636851
  misc_feature (1)..(1): n is a, c, g, or t
ntacctactgcgtgctgggtattgggcatagaatagatgaacgagacaaaatgtctgccctcagtttctatgcagaagataaacactgaacaaatattttcaagtgtggtaaagactatgcaggaagcttgcaggtaggagagaatcctacatgatccaatgcctcttcaaagaagtggcacttatgttaagacgtaaagaatgatggatggcggatggtgtgttccctgtaccaagtccttagggattcaggagcccaagtaaaccactgaggcggaaggcaaatagtgaaatgcagaatagtgaaaagtaagataaagacttttccaaattcaactttccactgcctagtcctaaacggggcctggcacataataaccctccctcaatactttggtgaatgatgtccttgaacatgatgtgctcttcacaagagttcataatctcacaaactgctacctgtttgtccatctggcaaacccccactcatctttgaaggtccattatctcttcagtggagaaggaaatggcaacccactccagtactcttgcctggaaaattccatggactgaggagcctggtagcctacagtccaggggtcagaaagagtcggacacgactgagcgacttcactcactcactatctcttcagtgagtcctgcacccaatatccactcccttccagggagttattcactcaccccactattctgccagaacatctattatttctttttcatatgtatattatatataaaatattatctaggcttccctggtggctcagacagtaaagaatctgcccacaatgcaggagacccgggttcgatccctgggttgggaagatcccctggagaatatattactgggttttaaaactttttatttttggctgtgctgggtctttgttgctgcacgggccactctctagttgcaatgtgcaggtttctcatttcagtggcttctcgctatggagcacaggctgtagtcgcacaggctccagtagttgcggctccccagctctagagcacaggctcaatagttgtggcacacaggcttagctggtccataggctgaggaatcctccccagatgatggatcaaaactgcatctcctgacttggcaggaagcttcttcaccactgagccaccagagaagcctgatctctgtcctctctgaggtcaagaccaagagttcacagacttgcctgaaaagcaagaatccttgtggagtttattgaagaaacaaatgcccagggccactgaatcataatggatagggtgaagaccaacatctttactggcctgacatcagttggtggactggtgtggatcagcttttggaaaccatttttctggaccgcagatctgagtacaagattactcactgccttgtaatacccactgccctgcaatgaatctttaaatgtgtgaagagtagaattctgcccctttgtgtgtttacttaatgaagatttattgggcatctgctgtttctgggcatcacactaggtgatggcagtacagagatgagtaagcacaggatctatctcaaagagatctcaggtacttcctccagggcagaagacagggccatgactcagggaggcaagcagctggacgtgggatgaagcagcatgttcagctggtactaaaacaccctgaagcttttacgagcacagtcagccaggcaaacaggtaggaccaggatgagcaggctgccatgcttctaaccattcttgttcatgcacagaacttttccccacttcaaggcttccttgagggtcaacataatccaagtttgcctgtagaaaactctcttcagagatgaccaaacattgtgttctctgacgtctttacccaccgatggattgtctcgcccagagaagagtcaatattctaaccaactatatattaagcacttacattcgaggttactgtcctaagcagttccccccattctccaagagcatctatttgagagaagcattagtattttacccctgttgtctcccttactgctacatctgccactgtgcctacctaactcagttcctccagccctatgcccaccatcacctatgtctaacctggcaccagctaatgcagacatctgatacctgagaacaagtttgccaacattacacttaaacccactgtattcctttcctattgctcctgtaaaaaatgttaccgcaagctcagcagttcaaagcaacataaatttccaagtatacctgtttttattgtgctttgctttattacaacaacaattggttcctcaactctgcttcctgacctggtgctgtctctccaattgcctgtattcccttaccatcttaatattttcatgctttttatcatacttcaaggcccagccaattgccttgtcattgaagtatggatggaaatcgccagccgtaaccagtgcttccctcctgcctcttcttgggacatctgcacattcttcctaggaacatattgtacagagttcttaatcttcacagctttgtaagctgctaagagaaatggataaagaagatgtaaaacatttatacactggactattacttagctataaaaagaatggaataatgccattagcactggcatggatggacctagagattgttgttctaagtgaagtaactcagacagagaaagacaaatgccatatgacatcatgtatatgtggactctaaaaaggaatctatttacaaaagagaaatagagtcactgatatagaaaacaaacttatgggtgccaaggggggagaaggaggaaaggtaaatcgggagatagggattgacatatgctcactaaaatatatagccaataagaaccta

SEQ ID NO: 53719 - DNA, 1921 bp, Bovine  19866880680945
  misc_feature (1)..(1): n is a, c, g, or t
nattttccttaggtttctcatctaattggcctttcacagtgtgattatatatgtagtcctgtttatctccttgccttggccagctttctttactttcacacccattgcagaaaactttgcttttccttaaggattttattttttaccctgattgcctgcatttaatttacatcttctcctccagtttcaaaggtttgctgaggctgtgacttcacctccttagcagtgatcactttcttctttgaagctgagttttcattggaacagagatgctgtgtcttttggctctctctcctcatccgcactgtcaggagatgagggcaaaccacagtcaccctaaggatttcatgggataaagctgatactttctggatataagaagatagtccacttccctgctgtgacttggaacaggagagaatgttgcttctcagtctgtgcaaaagctttagaaagctttaaaggctctggtccttaagaagtgctctgttgtgggaatgtttggggcataagagggtacatgtacattcccacaagtcacctgtgagaggcaggcagctggctgtcttttattgttgatcccctcaatctcgaaacataacttccctcctcagctgggcctgccctgatcacatttggagtttacagtacaggatttgttttgcatcctgttcctcgtccttggagagaactccctttgatgacagtgccagcaactaattgtgagtggaaccaattgtatgggaggataaagtccatggaggccagaggtccacagcgtcctgaagagaagggaggtgccacgagaggatgtgattccagggaacattcccaacttcctttccttgagaattcttcatgtaggatgtccaactctcccactggaactactgaaccttacgtttggaaggaccataaaaacctccaagctctttcagaatgtaaattccttgggcaattgctgcagaaaagaagcagcttagaatcagatcatcaggaggcagaatctgagctctgcctctgactgccttgcttcagctaatataagcccatgctggaaaacatttattgaacacatactatgggaaaggcactgggatgagtgctgtgtcctcaacagcttattttatcttggtaacaattttatgagtgggtattactcttattatgggcttcccaggtggcgcagtataaaggatctgcctgcaatgtgggtgacccaggttcaatcctgggttgggaagatcccctggagaaaggaatggcaactcactccagtatttttgcctggagaattccatggacagaggagcctggtggactacggtccacggggctgcaaagagtcaaacatgacacatgttattcttattacgggcttcccaggtagagcagtggtaaagaatctgcctgccaatgcaggagataaaagatactggggttctaatccctgggtcaggaagatcccctggaggaggatagcaacccactccaatattcttgcctggaaaattccatgaatagaggaacttggtgggctacagtccatggggttgcaaagagtcggatgtgactgaacacacacatacatacgtatatcacaacatacatcactcttatgttttaaaaaatagaatgaaaatacaccaggtcgggcatgtctcctaaggttacagaattactaaagaaaagaatcatgtcttagggaaaggtgttgtaagttcatgtgctgaacaaatacaaaatactctaaataactacacctcgccaacccttatttcttcatttggaaaatgaagctgataatcctgcttatggattaataggattaaataaaattgtggcccggatgatgaaagtgaccagctagttacctagaacataggttttcaacttgattgctaatgctcttctctctctt

SEQ ID NO: 53720 - DNA, 1865 bp, Bovine  19866880696033
  misc_feature (1)..(1): n is a, c, g, or t
nccttttgttggaagaagatgccatctaggactttcatagctaaagaggagaaatcagtgcttgactacagactttcaaaggacaggatgactgtcccgttaggggctagcacagctggtgatttatgttaagccagtgctcatttgtgtgtgttctcggctgctcagttctgtctgactctttgtgaccccacgaattgtagcccaccaggctcctctgttcatgggatctccaggcaagagtaacggagtgggttgcattcccttctccaggggatcctcccaacccaggaatcaacctgagtctccttcattgcaggcagattttttaccatctgagctaccatggaagccttgcatatttgcatatgtaggatatgtaattatgcataattaaatagaaaagatacagtattttatatgtttaatttgctctctttcaataaaacttttgttagtaatgtgtatttatttgtgatatgggcttcccaggtaactcagtggtaaagaatccacctaccaatgcagcagatgcaggagacatgggttcgacccttgggttggaaagagtgacaacccactccagtgttcttgcctggaaaaccgcatggacagaagagcctggcgagccacagtccatggggtcacaaaagagttggacatggctacgcacgcacaacccaatccaatccgtttgtggtaatgatttgcttttgtattcacaattttgcatgaattttagcgccttccttttccctagtgtcttccttttctcaggtgttatccatcgattttattattgagtttgtcctgtgacgctgtttaacttagctgatgccctcttcttttccccggcatctggattgaaataatacttttaccccaaatactgtaaaagactatcagcaagcttaacctacattctgtacatgctcccgtctcctctcattttctggtagttgtactgtatctatcttgccagaacatgaagtccatacatgttctactgtctcatttaattacgtagtcttacatctacaagcatgtgtgtgtatattgtgtatgtgtgtgcagatacacacatgtatgtgaagtgaagttgctcagtcgtgtccaactctttgcgaccccatggactgtagcctactaggctcctccgtccgtgggattttccaggcaagagtgctggagtggattgccatttccttctccaggggatcttcccgacccaggaatcgaacccgggtctcccgcattgcaggcagacactttaccatctgagccaccagggaagcccacacacatgtatacatgtacacaaatgtactatatgtgcatatatacacacatacatacccatatactatctcttgaatccatgcattaaggacccatctctcatttcctgagctctgtctttagctgcatagaagtgtactgatattaatttggagagtaaaactgaaattttttttctgttttcagaattttcttctctctgtcatattgcccagatagcacattccattcctgtccactaaatctcagggaattccttctaaccaactggggtatgaccccctttcttatattcttccttcatttagctgaaatcccctattgccttatttaaaaaacccaaagaaagtcctttgttttctcacatttgttgttcaaggtatcctatttcttgcatttttgtctgtaaagctagataacttttggattgcacaaggatatccgacttttgcacaattactggttaaatttagtcacggccgttgtaattgctaaccgttaaacaaaatcatgattgtggcatcggaaactataaaggttgtgagagggaaagagaattaagtaat

SEQ ID NO: 53721 - DNA, 1516 bp, Bovine  19866880740676
  misc_feature (1)..(1): n is a, c, g, or t
nacaatgggggaactattgtaagtggaaatactgccttgataaaaaatgttcagaataggtctagaatcatgaaagaatcaagccaatgtaggtatttactatctgctgctgctaagtcacttcagccgtgtccaactctgtgcaaccccatagatggcagcccaccagggctcccctgtccctgggattctccaggcaagaacactggagtgggttgccatttccttctccaatgcatggaagtgaagtcgctcagtcgtgtccgactcttagcgaccccatgaactgcagcctaccagtctcctccatccgtgggattttccaggcaagagtactggagtggggtgcattgccttctccgatttatctatcacaacccataacttgtaagcaggttttacccatccaaggatcatgtccttgataaataatgaagtcaatacatggaagcttgagcatcacagttaccctgggcccctgatgctctcctcctggctttacacctgtactgtcctgtcctacttatgtgttcacccttggcattcgcttgtgatttctgaaactcttttgctctttgggtttgcacattgattttgatttttacaaattgacccttgctgttttctgtgcctaaaactgcaattttctctgcaactctcttcactgcccagtcactttgtctagggtcctgtcctttatttttagcctaccacatctaaaactcgaaagagattcagatagtcattgtgctgagcatatatggggcattcaatacgtagatattgattggcatattggctgcagattggaatcatggtaatcagtggaagcctaataataaattaatgcaacaaggtcattggagtgaccctcagaaaactatttgcttgctgcatcattgattacagaggggaattataaccgccccagggtagctgtgaagggctaattcacgtaatactgtcacagttctctgactttcctgctcatcgacaatattcaatcaaaattcttgctgcactacatgctgatgccaacaagacctctgagttgtcacagagctctcctgtgaatacagagaactcggttacctggcgtccatcactacttaagtgacctacaaacagatggaacttaacatgtccagggtacaacttattaccatatcctaaccatttctcctgtgtttcctaactcctgtcagaaacctgggtatcatctttgatacttcccaacactcacctaccacattcaatcgatctccaagacctgcctgtcttatcaactagtctctttagaatttgcctacttctctccctatccactcagttttcttagaatgcatagtttctagtctataattaacacacaagacttccaactgacatgcttgttttttaacttgattgcttcatccccacccatgcattctccatcctatatgcattccaggaggtctttctaaattttatacttgatcatgtcactttcctgctaaaaattctcacatcgttc

SEQ ID NO: 53722 - DNA, 3158 bp, Bovine  19866880813062
  misc_feature (1)..(1): n is a, c, g, or t
nttcttttccttataggatattgcaaaatattgagagtatagtttcctatacttattggttatctgttttatatatagtagtatatatatgttaataccaacctcttaacttatccctcccccctttccccattaataaccacaagtttgttttctatgtctatgaatctctttctgttttataaataagttcatttgcatcataacaaagtatctgagaccaaaacttaagagctttatacaagcagttcctcaaagagcttgtcttggtctgttctggctgctgtaagacaataccagagactagatggcttatacccaacagaagtttattccttacatttctggaggctggggagtctaagatcaagatctggtgtttgatgagggtcaacttcctgcttcatggacagctgtcttgtcactgagctctcacatggccaaaggggtaagggagatctctggggtctcctctataagggcactaatccattcatgggggctctacatcattacctagtcacctctgaaaggcccccacctcctaacaccactgagaagcaaatactgtgctccttgctttatgactgttcttgtttcatcttcatagacctcctggaggacaaaaaaatttctctgattctcagaaaggtaaagcaatcttccctgagtcacacagctgggattaagaactcattaaagttgcaatgggaagctgttaaaatgcacagggagctcagcttggtgctctgtgatgacatagaggatgggatgagggtggtgggagggaaattcaagagggaagggaagatatgtagacacatagtggatttactttgttgtacagcagaaactaacatgacacagtaaagcaattatagtccaatgaaacaataataactaaaaaataaagctgcatttgtctgattgaaaagctctttggctcttttggcccaaccttgccagaggacctgggactatagccatcctcctggacactgtgtactgaaggctaaggtaggatttgccagcctgggaggggtgatggacattccaggcagagcagtttcagactatggaagtcaaagaagccaggaagtatgggatctttaaggggaatgactttctggtctttctctgtggctggagactagagtctgttggtgaggggtatagggaggggaggggatacctggaaagaagcgagaggaagaaaaccatgcaggcagtctatttgcaaagggctttgcatctgccatggtatccttcttgtgctaagaaggctccagtctcaggatttttgtttgttttgttttgatagttaatttactatacatttctcctaacacttaacataccagtgaatatcatgaacaccaagaggtcaatgaggcaagaattcagtgcaatagaaggaaaggtaccccggatttgatttcataggatgtagccttgtgtcttgacccatggtttagacctgagtgaactttggactgcaatttaaccccgtggtggtttcatttcatcatttgtgaagtggaaacaagcttaagtcctattaatagagtcagggtttcaaatagcatcatagataggaatctgccttgcaaactaaaaagtgttggagcaacaagcattcccagcctttggcatagcggtagctgatggtgtcaaaggcaatgaacttctccttggctggatttctaccagaagaagaatacaaatggctttgtgtttcatcatatttttttgttgcaactgttttgtaaaagttctcttttgcttctcgggccagcattagattgccttgtgcattctttgaaggaagcccagcccaggagtcactctggtccttgtgcagcggagtcactgagatggagagataatgtgagcttgtgtgtgcctcaccctgtcctgtgagggaggtgtgagaacgctcactgtgacacatgggctcatgggtccggagactgaggctcagacatgaagtgatgtacccacacatggcgagcatgtcccagagccagacgccagcccaagatttgtatgcctcttcttttcactggtttatgttgccttcaataaaagctcctctgagcaaataggtaggactgtcagttaagttcaagccagagttgaggcggaagtatgcccaagggtgatgaacgccttgtcggacactttgctgtggcttttaccagtcagcagccagaagaaaacccacccagagccagctgaaatcagcctgggccgtaatgagccaacacctattagggtgagaaagcctctgttgttggctccagttgacatcaagagaacaagtcaggaatgaggaaccaggaaaccactgggagaagattttgccacctggaccgtttcctggaatataatagttaaataaggcaagccctgataactcttacagatctgtgtgtgtgtgcgtgtgtgtatcgttttaaaggaagcctattcaagcatatcagactcaagacttaagtgaagggtgccttcagttttggggagaccatccttgtggacagcagccatctcctctcttggaggcgtctgcaggtagcccacctgtccagcaggaatactctgtcaagatgcattagtgtcatctggaagaacgctgcctgtggctccctccccagattagaaagagggaagctgaacacctccagggtatcttgggaatgacatttaaaaatccacagctgtcctgggtgatcctggtgcctgagcgcatttggagcacacattatttatgtcagcaatctctgtcagtgctacatctggggatgaagaatcaaaccccgacaaatttaattaaggctcatcacatagatgaaattgagatgctagacgaggcaatttgtaatggttagaaaatgcctttctaagtcccacctaatgcattggcttctcagcatctcccagaaaatgctctcaccagatacgccccagagagagggcaccttttagaggttcagggaccacataaagcttggtgatggatgttttcctcggggcgattatggttctttagtctaatagctcccctattcataccatattaagggcttaataagaactgaaaaggtgctggtagctctaaaagctgacgcaaatgcaagggctctgtagaaaacataata

SEQ ID NO: 53723 - DNA, 2987 bp, Bovine  19866880826967
  misc_feature (1)..(1): n is a, c, g, or t
nctttatggcaaacagatggggaaacaatgggaacagtgacagactttatgttttggggctccaaaatcactgcagatggtgatagcagccatgaaattaaaagacacttgctccttgaaagaaaagttatgaccaacctagacagcatattaaaaagcagagacgtgtctttgccaacaaaggtccgtctagtcaaagctatggtttttccagtagccatatatggatatgagagttggaccataaagaaagttgagtgctaaagaattgatgcttttgaattgtggtgttggagaagactcttgagagtcccttggactgcaaggagatccaagcagtccatcctaaaggaaatcagtcctgaatattcattggaagaactgatgctgaagctgaagctccagtactttggccacctgatgtgaggaattgactcattggaaaagaccctgatgctgggaaaaattaaagataggagacagaggatgagatggttggatggcaccaccaactcgatggacatgagtttgagtaggcttcatgagttggtgatggacaggaggcctggcttgctgcagtccatggggtcacaaaccgttgggcacgactgagcgactgaactgaactgattgatatttatggacacccatacatatcatctttattaaaactaaaattaattccacgagttcagttgtgctgttaaatttacattttgaattttaaaaactaataaggggaaaagtatatcaatttttgcaaacagccatgaagaaatgaatgcatgaatgaacaactgctgcccaaaaatggcgatcacaaatgagacccctgttgccacctggtggcagcataccctaattgaagaattagtttttgagtgaaatcgagaagcctaaatgtcagagacagaattctatcacatcacatgagataacataagtgaaatattagaggatcagaaacctatgtgatttaagttaaaacttatttttcattttctatctcaagtgaggaggagaaatgcaactctctggtctagggtacaaggctagttttccttaagctatattaagagtgttcacctaatgagccacagagccattttacctataaggtggccccaggcctattcagctgccctactaactaaaaagttttattatgtcctttctatgggcctcatgtagagaaaataactgttacaccagcagtcctttctagggataactcctcttgaccctttgaaaatttctgtcgttctatggattcctgcacatacttatttttaaaaggtcattttattaaactaagcccattatccatgccacaattcaaaccaatcacatcgttatctcttgagaaaaaaacaggcatcactatttttattaaagcttcccagtggttccaatgtgcagccaatgttgagaatcactgaactgtagtaagggaagattgaaacatgggccatggaaaaatgatgctactgttcaaaattaagcaaatctgcagcaaagctaaatataaaattcaagtgtgtatgaaaaaatatgcaacaaaaatccacaatgtcattggtaactgccctccaaaatgcttccaaacctctgaatagtaaactatcattgatagacaactttctgtacaggtgttttctatatacatttaatcttcacccaaatgagaggtacactttattatccctgtgttccttgccaggtggcacaatggtaaaaaatctgcctgccaatgcagtaaacacagattttatccctgggtcaagaagatcccctggagaaggaaatggcaacccatttctctattcttgcctggaaaattccatggacagaggagcctggtggctatagtccatgaggttgcaaagaatctgacacaactgagcacacacaaacacacacgtgctacttacagtttcaaaaactaaagcagaagtagatttattaacacaagatcatgcatgttgtaaatagcatagcatggattttgaacttaagactgactccaaatcccatgggtgattccatgctatcttgttgattttgaattaagaaacagaatagccagcagacttccaagggtctcctttgattcattaagcttcttcctgagcctcagaccactagagccaaagctttaacaggtttagagacagagacttggctcagtaattcatctgagctcccctggatcactctccctccttaccaaataactgagttaagggaactctagttcaaatgcaaagaaggcagtggtaccagctgattaggagatgaatcaaagacagacttttttcagtgggaaactctggtgggcttcccaggtggcactactggtaaagaacccacctgccagtgcaggagacataacagccacaggttcgattcctgggtcagtaagatcccctggagaagggaatggcaccccgctccagtattcctgcctggagaaccccatggatagaggaaccaggtaggccatggttcatagggtcacggttagacacgactgaagcgacttagcacccacacaggcatagatgagctggcatgtgctctaataaaatgatggaaggtagggctccagaacagcaagcatttatctcattttataagcaaatatttgtgtggattctctcaactgtgccctccatgaaggcagagacaggatctgggtcttcagtgttgcccaccacaccaggcccaagggtaccactcggcaagtgcttgttgactgaacacaagcctgtggaaagtaaattgagagtcaagtggttagaaggaagattaccacttcctagctgtgagaacatcatcaagttacataaccacgttccactcagttttcacatcagcaagctgagcttacgcctaactggggccaataaatgcccttgaaagcaataggagatatttgagttaatttttagtgaaaaacaggttaaagtattttcatcctcagatac

SEQ ID NO: 53724 - DNA, 1742 bp, Bovine  19866880829322
  misc_feature (1)..(1): n is a, c, g, or t
nacgcctttgctgggtatcagttcccccttaactaccctatccagtacccacttaagaaggattagtggataatcagttgagtggaggcagatgatgtcagaaggaggatcatggacctgctaatggtatacttcatgatatttccttggtgcatttgatatttctcaaaaaaattcatttgtggcagtatcacatggaagagagggcacttaggttagaatcctaagtccatggtgtgccgcactcaccctagaacctagggcacgagtgaaacccagcttcagctacaggaaactgaggcctgcgagagatgtgtcatgacaggggccctgtcggtctgttgttcatcggggtatcctcaatactgagtacatgctggacacagtgagtctttaattaatagttgctgaataaactgaggcttgtgaaaagtactcagaattgaaagggtactaggagttgcagtgggactatttagaagctattttcaaaataagaataaagaaggaagaggcttattgctcagggcagaaaacaatgttaacggagaagagaaaggagacattgctgagtaagttttgtaaaatatatcatctctgtcagggataatgatcttccagctggaaaggacagacatggagaggaggatacatgaggaaatgctatggaagcacagaggtcgagatgcagaaacaaaataagtaggtccccccagggcagaagcagacctttattaaaggcacatcaggcactgtgttaggggttttagatatgcagttgaattcctttctcacagcagctctggaagacatatattatatccattttacaggtaaagaaactataggaagaaaataaatcatttgctcaaggtcaccaccttgaataaacgacttttaatacagagaagatttgaatacacagttgtaactctaagtaatcttccaggaactacagaggacaattccagagaactgaagatgggcaaattattcaaagttaaataggaagaaaatataagtggtagaatttccatctaaactttatgtctgtccccaagaaaaccctacagctgaaaatgtgtacatataaaaaaattacatatatatgtgtgtgtgtgtatgttagtcgttcagttgtgtctgactgtttgtgactccatggactgtagcctgccaggatcctctgtccgtagaattctccaggcaagaatcctggagtgggtagcctttcccttttccaggggatcttcctgacccctggaaggaaggggtcaggatcaaacttgtgactcctgcattgaaggcagattctttaccatctgagccaccagggaagcccatgtttatatatacaaatgtgtatgtgtatatatgtataatattttttttccagaacttggaagcagtgatcaccagaaactggcatggtttacctaaggatatgagaggtgatgatatattaccttgttttcctttctggcaggattgctaggccagcaaagcatcaagtgctctgacaccatgtgtgtcaggctcagcatgggacttggaagtttccttcctcatattttggaagaaaaacctgagaaatgagagctggacgatagtaattttcttctttaggccataccacgaggcttgtgggatcttggttctctgaccaaggatcaaacccacccacaccctcggcagtgaagacatggagtcctaaccacggacagccaaggaattccgacaga

SEQ ID NO: 53725 - DNA, 4160 bp, Bovine  19866880833009
  misc_feature (1)..(1): n is a, c, g, or t
ntacttttgatgaattagtcctctgatctttaactatggaaacagcatatgtgtggctgaattagaagctctcagacctgctctacaggagccatagagactgggttactagtggagaatgaataattccccaaagtgttcatggggagcagaggacttgaaagaggtattggacctcctagtgctaggtcccgtttactctcagtgtgatctttgcagtcaatgaacactgtgtaagcgatggggctagagaattaagtataaacctaaccacactgcagtgcaacagccttttcgcctaaatacacttccccaactaaactcaaaaccttggtggtcccatatgactaatgtccaggccctaattctctctgaatccctagaacagaaatagttatctggcacgtggcctgggctaactatttgttacttgctgatggaatcaatgaacgccttttacaatagttatggtggcaaacagtgtcctttttaggtcaacaataatcgcctttaaggggcttcccaggtggagccagtggtagagaatacacctaccaatgccagggacacagacacatgggtttgagctctgggtagggaagatccctgcagaaggaaatggaaagctgctccagtattcttcctgaaaatgtccatggacaaaggagcctggtggactaccatgggctataggccacggggctgcaaagagtcggacacgactgagcaaatacagacaagagcctttaacattgaagaaagcagctcacctacatgctgctctgcctctcatccgtgcaatccacatgcaactgagagaacccacacggggccatgtcaaaggacatctgaaacgccaggctcacctcacctactctttggaaacaactgccgaaaacattctgtgagcatgctttcacaaacacacactcacacacacttttcccacagaaatagtgagcaccttaactacaaattcatcctcaggattaggaggaggcatttagtttcccaaagaggaatagtcttagaagtattctgatctggttctgggaatcatacattaatgcaaagatttaaatcgtgattttctaagtaatattccagtaatgataactatttaaaattaatgaaaagaataatgtgttagtcactcagccatgcccaactctttgcaacccaatggactgtagcccaacaggctcctctgtccattgaattccccaggtaagaatactggagtgggtttctattcccttctccaggggatcttcacacccatggatcaaatcaaggtctcctgcattgcaggcaaactccttaccatctgagccaccaggggccctttctgactggctcatgcttgctcacagactccccttacttggcatttactctgaacatataaaaatatacagattcccaatccttatctcttgacatcatcctaaatctgtcccagtaagtctacgccctgggtttctctatttttataaacttcagagtgattccagttccagggatgagaaccattcacttgaatcacctcacccctttccattcctaacagtcaatgagtgagaagctgtgacaggtgagaaggctgtaacaatctatcagcccacagatcttgaggggcctggtgtgactcctggaaagttgcaccacccgccaaccccttaaatgtccatgtgaaagctgcaagccaggtatgagaggatacccatcccagctatatgtcagctcctcagtcaagagtatactttactgggatcccctgaacagacttcacagattttctcaggctccttgcatgagtctgatgagaccacatgtcagtcacaatccatgctccgtgtttctccagtccctggagctaagccaatcatctagaggcatcagctcatcgtagaagattctaccccttgttcccaggttctttccttattgaaacctcaaacgccatttcatctagacctatgatctgaaccttcccctttgcaaaaagtccagagccacgaaatgacattgaaactttgtcacctgggtgtgtgtaaggacctggggtaagtaccactacaagatgaaccaatcaccctgtaatcttctttagcaccccacatcaataggagtcaatcattatttgtgcaacttttctctgatagcacctaacaccactgtaatctgacaaacacttgtatgtgtggcctggtgcgctgcagtcaatggggtcacagagttggacacgactgagcgactgaactgaaccgtgtaatttcttacccaataagcctcctccagaaaactagcgttattatcatagagacttggacttgttttgctcactcacatccccagcacctagcacagagcctagcacacagtgctcagggaagtcgcactcattaatacaggagaatgggtcttcttatggttgcacaggatgctactttcctgcccactaagaaatttctctttcagaatcagtttgtgactatattgctcataccaaccatggggattctgaattccctcacgaggttcagaggattaagtaaccataagatgcacaaggaagctcaggaagttgtaggtatcctgccatgttgaagtctcaagtcaacaaccaacagacacaggctgtctatactagttgaggagaagggtgatggacaactctacaagacccctgttctgctcctctgatacctaccaccctagataccgcaggcaagtacgcactgcagattaaatgccctgcttctgacagagaagaggcatcagaagcctgtattctgaagggtattgactgggacttgaggaaatagcagaggaagggacatacagcggaatgggtaaaaggagagaaaaatcttaagggagaaagacaagtgagtccaaatgtgtttaaccagtcagtcaaggtatatttttatcctgacttacgaagtactccttctaccaataagctgaagcatctttcttaaaccctcacctaatatttgagcaacataatggggattaaatcaatttttcatattttatagagccaaagaagctacaatgagtttgtaagaatccagaatgattcaaattatcagaggttttggagatgggatggatcttccagaaatcttcccattcaaatgcttgactttggataacgcttaatttcccccattttatagataacacaagctagttctaggactgagattcggtgagaaaggtgtgaagggcctcaaaagagcataacctggtccattatacacagcatttggcaaaactatgcttatgactcagataagctaggaccttatccaagtaacccagagattcccagactcatcaaaatttatttcaaaaactttttaataactgatttctataagccagtttctgttcaaaaacctttaatcctcacaacaagctggtgaagtaaatacaatcagtattttgattttactagcaaaaaaaaaaaaagtacagagaggtcaagtatgtttcttgaaattgcacaactaaaaagcagccaaccaattcttaaaattggcaataaaaaagataatccaggagatctccctcatatggaaggaggctttaccaacagccctcctccaaactcacattgctccgagagaacaggttggttttagcccctatgagatattgtatcagagaccatttgtttatttcaatgacctctttttagatccagagacccaaacccttagaacttacactatggtcattgggtaattccaataagaaatgtgattgtggggtgtcaaccacgacccaaaggaatctgacggacctccactgtatacccctacctactaattaaggtttggaaagatgctttcccaaaagttcaactccagcccacacggaagggcccttaccccgtaatactctcgccctccacagcacccaagttaccaaggcatggctcctggattcaccactctcaagttaagttgtggaataaaataggagaagatacctgatatatctgcgagcctctggaagacttctggtatctattcaggactacagataagtgtcattctgatgaatatccaaaaagttaagctcctggggataagctttcttgggacggtgcctgtgttcagtctgagctacttcattgtctctct

SEQ ID NO: 53726 - DNA, 1891 bp, Bovine  19866880833588
  misc_feature (1)..(1): n is a, c, g, or t
ntactatactaatatttggaaaaatatatttttcagtcactcatccattcatttaaatttgcctaccaagtgccaagtagctacaaactgttagaaaaaaagaatcaaataagtctaagccactgtcccaaagaagactacatagcttgatgtgaaagaacatggaagccaaatgaaataatttgattattaataagattaatagagaaggtctgccatcttcaaccttatgtccacctacgcatcaagagctgtaatcagtaatggacatctgccttccccatcacagatgaacagtgcatgccttgggctaaggccaatccttcaccttgtgtagcggatcatctctctcacctacccaagggcaacactctctcttttatcatcaaattttcctctctgttggattactctgtccaatgcacaatcatgttattcttccttccaaattaaaacacacacatgaaaaccacagaaaaactctcttaacctacccttgctctcctgttaactcatattcctctgatccctttcacagcaaactccaaaaagatatttatttaatctttctctcattttctcttacactcactcctaataggcttttggtccattttgaaaccaccttgtcaaagtgatcagtgggtttcgtgttgccaaattcaaggatcaattctcagtctccatctaacttgatctgttgacacgcgcctcacaagatccaaagataaatgatgctatagttgttctgctccagctgtcagactatttcctttcaagaactgaaatctgcctacttgaagtctgcaaaaactggtccctgctccgacttttggaacaccactgaaaaagcttatcctctctttcaggcaggtttttccactgtttgagagagtcccgtgtcctgcacaagcacaccttttccctaaacgtcacatgtattcagtgggtttctgacaattagtagagtcaatcatgacctgaaggcaaaaaggaactatttatcacttcagttgttcaaacaacagatgtttcttgagtgtcctgttttaggcacaattttatacaatgggggtatggcagagagcaaaacagacatatcacctgccctcagggaacccacatagtaaattctattgaaaaatgattgtgatactctaggccagtgatccccaacctttttggcaccagggactggtttcatggaagacaatgcttccacagaccagggtgggagtggtttggggatgattcaagagcatggcaattattgtgcactttatttctattattattaattatgtcagctccacctctgatcatcaggcattagaatccagaggtttgaggactccttcatttttctcatgttttatacatattaatgcctacatttagtgggataatgctctgaattatgatctagcacattttttcatctccaaaattcccttttgccttccattctgcatttcccagccagagactgtagcaagatgacagaaaataatccagaaggaacaaccagtcaagttgatgactttgagttccaaagaagattatttttagcctgtagcaaaaacaatggtcatgaaaaatgagctgcaactaagcatctggtaaagtttcccaaattctaggttttaaatcataagagaaacatctgtaggacttagaacatggagtctatataataaacttaaaataggaagtggtagagtgagcaattacagaaattctaagccccatcccactgatgttgggcaagactgaaggagaaggggacaacagaggataagatggttggatggcatcaccgactcgatggacatgagtttgaggaagctccaggagttggtgatggacaaggaagccctggcgtgcctgcagt

SEQ ID NO: 53727 - DNA, 2042 bp, Bovine  19866880863946
  misc_feature (1)..(1): n is a, c, g, or t
ncctgtttccttttttttttttcctttttgtaaactgcaggagtttcttggatcacttgattactttatggggtaatgaaaaaaaaaatcaatcctaccttgaggcaatcagctgcctcttcaagcaattagctttatgcataactttcaaggaactcctcattgtcccttctgaactgctgtgggaaaagattggaaagagatagccaaaagccaacaattcagggtgaggcacctggacaccctcctcagctcacagaaaggttaatgagttgcattgtggggacaaagagaactttgacaagagagagtctggcagttgtcataaggcaggaaatgtgaccattatcaatccagagctggttgtgcaaacacaatctatatgtttatataccttctcccagcttgtggacattgtttaaatgggaggggaagaaagtgtggggaggaaatcctcttccttttggcaagacacagacagaaattctcatgcttgacctgcatcttttgtctcaaggagaaaatgccacctcctctgtgtggggtgtcacagagagcatttgaaagacagcatcaccaccatcaacactgaatgaatgttcaacagccatttattgagcactgattgtgggacaggcattatgggcatgtttgtatgctaagttgattcagttgtgtccgaccctttgtgaccccatggactatagcccaccaggctcctctgcccatgggattctccaggtaagaatactggagtgggttgctgtgccctcctgaggggatcttcctgactcagggattgaatcctggtatcctgcattgcaagcagattctttatcccctgagtcaccagggaagctcaacagtctctacacaaggtgccagacttacaataatgagcaaaaagtcaatctcctttctttcttccatacaattcctggtctagtcattcttgtcattcaatagtcatcatcatcattgctatcatcactaccatctctttttcatctgttagtacggtgtttaaaatttaaatgtgcttgaaacaagtaggtgaaaaatgaaatatttcctgccatatcattaaacaaggatatcgcagtcatcagtgattacagccctccaatgtgagctagtgaggcctaagggcactcaaggaggagaagaatacctgcagtttagcagccatcagactgcagccactccccacagtgagtcccaagggagctcaggatgtgaaaaacacagaatactggtcctggatagctgagatgcataaggaagaaatgatttcagtgagccccgtctcttgcatcttcccatatatagaaaagtgctaaattccttaacttaggatatcatattttctttaatcaataataatcttttgatgttcagactacctgccctttgttacaaagtttctatataacctggcttctcccctcactttctcagagcagttctctcagagttacttgagatggtatctccaggtcttgaagccctaaagcttcccaaaaaataaaacacaactctcaactttcaggttgtgaatatgttttaagtcaatatagcaatgaaaaaatgaacataaaaacaaagtcttaaaaaataagactaaaaataatcacctgggaatttaattaaagtatacatttccaggtatatttgccatgctgtgcctgccctagcaaatttgagatgggtcccaggactcaacattttcaaaacaatcaggaagattttgatgcagacatttcatggctctcattgtgcaaatataggcttatgttatatcacttcaaacatttttgtcacattcattgtgtttcaaatgtcacaactgcccaagaaggtaaatagaatgagaattattatctccaatttatggatgagggaaacaaatgcataagaatgtctattcaatctaatttaatataattggcacctgatttgttcaagctttgtactaaaagttgcagagaatgagatgctcagtgactttgtgttagaagaacaaagaaaaggacacaaatatg

SEQ ID NO: 53728 - DNA, 1312 bp, Bovine  19866880978394
  misc_feature (1)..(1): n is a, c, g, or t
ntgaaagtgaaagaggagagtgaaatagttggcttaaagctcaacattcaggaaacgaagatcatggcatctggtcccatcacttcatgggaaatggatggagaaacagtggaaacagtgtcagactttattttggggggctccaaaattattgcaggtggtgattgcagctatgaaattaaaagatgcttagtccttggaaggaaagttatgaccaacctagataggatattgaaaagcagagatattactttgccaacaaaggtccatctagtcaaggctatggtttttccagtagtacggatgtgagagttggactgtgatgaaatccgcgtgccgaagaattgatgcttttgaactgtggtgttggagaagacttttgagagtcccttggactgcagggagattcaaccagtccatcctaaaggagatcagtcctggtgttcattagaagctgttcattggaaggactaatgctgaagtgttcattggaaggactgatgttctttggaaggactgggtgttcttccaaagaagaactgttcattggaaggactgatgatgaagctgaaactccaatactttggccacctcatgtgaagtgttgactcattggaaaagaccctgatgctgggagggattgggggcaggaggagaaggggatgacagaggatgagatggctggatggcatcactgactcgatggatgtgagtctgggtgaactctgggagttggtgatggacagggaggcctggcgtgctgcgattcatggggtcgcaaagagtcggacacgactcagcgactgaactgaactgaactgattactagcaaggatatgatgataattcaaattatttttacccatagaaatgcaaatgagttgcgtctagcagaggtgcacctgattcctgccccatagaaaactggtttgctgcctcgttgttgttttttactcctaagtcatgtctgactctttttcgaccccatggactgtagcccaccaggctcctctgtccctgggatttcccgggcaagaatacttgagtggattgccattttcttctccagagggtcttcccaacccagagattgaacctgagtctcttacattggcaggcagattctttactgctaagccaccagcaaaactctacagtttgctgccttacaggctatcaaccagttttgtaagtattagcaaattcattttagcattcttgagtgactgtaaatatgtctgctcttcagattttcctttgaattgtattaatcatcttaggattttgttttaattaataaagtagataaaat

SEQ ID NO: 53729 - DNA, 4143 bp, Bovine  19866881012020
  misc_feature (1)..(1): n is a, c, g, or t
nattaatcagttacttacagtcagtactttatagatgaggacactgtggcttccagcggcagtccgaagtaggggctaagactcaggtgtgtctcgtgtcaacgccctgttcttccttgtctcttcacctcttgggtcccaagatcggtccttgacttgccaggagcatagtacataacacataggctccatgtggctcaagttatttttagctaaaatcaccttcaagatttgagttatatatcaagcaaaagtttataatctacaaagatatctgtagagatgacagggcagtgaagcaagcaagaagaaaaagaagtaaaataagtagatgaatattgatcatctcagttggagccctaacagtggcttgtcagccctctcaattccataacacctctgcttttaaagcttagtgatgttcttctgtaagatgaatccttttatgaacagcatgtagctacagatattgaggatggtgttggtgacaaaacaataaaagcaaaattaatctattaaatataagggcaagaaactgaattcttgaaataaagtaatacctttcatgagcaggcttacacttcattggcaatctgacagcagctttctcctaaggcttcatgaaaattaaccctcctccattcccaggtgtagaatatttcagtggctttaattattactcaaaagccataatagaaataaattactgggtttgaagaacaaatatgggagcttatggaggaaatggatcctacttgataatccagttagttaggagataaaacatcactctcatcccattgcactcctcaccatttgtcattttctggtaaaacacacacatacatacatacacacacacacacacacacacacacacacacgtgggctgtgtgtcagtgctaaagaatccacctgcaatgcaagagatgcaggtttgatccctgggtcgggaagatcccctggaggagaaatggcaattcacttcagtattcttgcctggaaaataccatggacagagaagcctggcaggctacagtccatggggtggcaaaagaattggacgtgattgagcaactaaacaataacaacacacataaataatacatacataaatcacaaaactactttttagttgctctgaaactgattttctggtgctgaatgcaatgtagtattaaataacatttagaaaatagacacataaataattcaataaaatcaacaagaatgcaatgattcagagataaccactgttagaatgttgttagactcaacagaaacttgggcaacaaatataggtaagcaattcacagaagagaaaaattcagtaagtattaaacacataataaaatgtactcagccccactggttgttcaggaaattgaaaataaaacaatgcaacaaatataaaagctaacatgagagacatagctgaagaaagtgtcaaagaagagaaacataaaatcaaggacattacccagaaggtagcatacacacatgttgtgaagaaatagaacgcatgtaaaacatctgctctccagaaaatacggaaaacatgccctctctttctcatgctttccttccctttcatgtgccttctctgaatgatgtagctgtgaagccgtcagtgtagacagagcaactagacaatagtgagcaggactgctgcatggagcgtcagaacaagagcaaggagagctgggggtccatgcaggacgagaggggaggcgacattgacagtgagatcccaagcagggtgagggaggcacgcctgttgaggagtggcttggtatggagtgccagaacctgagcaaagtaagttcttctttgtaagagggacttgatgaagagaagacttgtcaaagagagtcagaccaaagcagggtcaggaggaacggcctatgtttgagaatggcctatacttgagaatacatgtacatatacatatctcatatatctccagatgggagatagctgtatttaggtgaaaattttaaatggcagaataacgtgaatatgatattacttctgtaaaagactgatatctaacagaatatcattagccctaagcatttgtgcatgtgagcatatacacttgttcttaatgcacatcaatttgttaatgtgttatcttgggagacagaaatgaaaatgttatgggataagatcattaatttttaaatacgattttacattgttttattggttcggaagagggtatgttactttcttaatacaaaaaagagaaaagaagaaaatctgtaaatactttatgtccactggggacattttagaatgcttagtttccaaagtgtgttccagggaattgtatttgatggtaaatttaaagaattctccttccaaataagtttgtgaatctggggtaaaaaaaaacaacaaacagcattttttccactaaattatttatcatatgacttaataattttacttgtgaatttctgagacgacgccttcacttgtagaatttcttgaatattttgacaagctggaatatctcagggaaccactgcttcataaagtcaattttctgaaataacttgctattccaactcccaagacattaccattctcaagaccaattctttttaatctttttgctaccatttgtacatagtgtagatcatatggtaacaaaatttttacttccttttcctttgtaatgctatgttgttttaccattgaagagattttcgtggaattccagtgtaaatgtttatgcaaaatgtaaccaacagaatcctaaaatcacaatcctaaacataattaacctgtaaatcatgtacttgtgtaattcacactaaaagatttaaagggactgaccagagatggtggtgtctggagacaggtggaaagccttcatgcagaaaaggaatttgaaaacacaaaatcaaggcagctctggtcagaatgaaaggatgtaagaaatgagctcaggatacagactctagcttctattaagagaataacccgactgattaatcacaaagacttgaggatgaaatgcagttctacagagttgaaccacaattctgttgtttagtcactaagtcgtgtccaactctctgcaactccatggactatagcccagaagctcctctgtccatgggatttcccaggcaagaatactggagtgggttgccatttccttctccagggaatcttcccaactcagggatcgaacccttgtctcctgcattggcaggcagattctttaccactgagccaccagggaagcccacagaattttgtagaaggaagcaacacctatcattatgtagcttataataaaaagatttatgtttccacatacagtgagctgtcttcactgtgtcacaacccaatcccttattcatagaaatggttatcccctgaaaagaaaactgaaagcctgtcatagtccgttcaggcggctatggaggaataccatagattgggtggtttaaacaactgacattcttttctcacagttctgaaggctgggaagtccaagatcaagaagcctgcagatctgatgactagtgaaagcctgcttcaggattcttgccgtatccacacatggcagagagagagagcaaggccaagctctcctgtctgttcatatgaggaaaccaataccacgcatataggctccaccctcgtgacctaattacctcccaaagtaattacctcccagctcctaatgccatcacatcgggaggtagcatatggatgttgggggggacacatataataaagctgctctgatcatttatctggaagccgaataaacccttaagtgagtaataattagtactagcatttttagagttgtttactaatctctgctgctgttgctaagtcgcttcagtcgtgtccgactctgtgcgaccccatagactgcagcccatcaggctcccccgtccctgggattctccaggcaagaacactggagtgggttgccatttccttctcaaatgcatgaaagtgaaaagtgaaagtgaagtcgctcagtcgtgtccgactcttagcaaccccatggactgcagcccaccaggctcctccgtccatgggattttccattactaatctcacttacatccattatcagtttcatccagcttaccctacctggacagttag

SEQ ID NO: 53730 - DNA, 1135 bp, Bovine  19866881029367
  misc_feature (1)..(1): n is a, c, g, or t
natgaatcagatgccactttctgtctatataagtaagggcagaggtagatggttaaaagaagacagaaaccttaagtcaaccactgaaagagcgcttgtccctctcaggtgtctttttttcttcttcttctttaagcaggtagaaagaatttcccaggactaatagaaagtctcgtcaaaaatacccatgatttgtcagttaagcccctgatatttttagtgctggaaaatctgtcaaaaatgaccaaaaaggctcacgctttacggagcataagaaacaaaaccacgggggttgactgaaatgaaacacagtcatgagtagtaagtttgaggttgcctgctctttaaaaaacaagaaacaaacccgtctcttctgttttcccggcgctgtcagtcttaaggggcccctgctaactttgttctctctgagagcaggagtgtgcctaccagtttctggtttcctgccgtcgtgtttagcatacggactttacatatttgggttatcaccccagtcacctcttcgatgaaactgaccttcctaagttaaaaatactctgatgtcagacattcagtgctccatgggttactagtgactgaccgacgtgctgtttccaccagggcagatgacgtttcttgtgaatcctgaaacatgatgtggtttttcctctctcccatgctctcatttcaatttcccctaacccaggatgagtacagaagaacttcctcaaaagcactgtaacagaaagaggtttcaacaagcatgagaattataccaaagagaaattgctcacactaatggtttaaaatatcactgggcaataagctaccataatttcagcattatgggggtatgatgtgtattaatagtttaggctacactttgatagcaaggagctacaaatttgtaatggttcaacaaaaattgttattgtatcattatgtaacagtccaaggaggtggcagataatgtgtgtgttggggtggagggttctactccaccccctcattgaggaatccaagctgacagagattctgccatcttgaatatgtagcttccaaagccattcttgaggttgccatcacaaccagccagaagaggaaaaggagcaaagaagaagaatgggggtgcccaaat

SEQ ID NO: 53731 - DNA, 1281 bp, Bovine  19866881285260
  misc_feature (1)..(1): n is a, c, g, or t
ntcatccacaaatcaatagactgtgatgaaatgatttctatgtagtcttcgatccctagtgtttaatggttttctcatattgttagaaaagtttctaatcatcaagtctttggtttgggttttatattaaacgagtaaatacactggggctcatatggcagattttctttctggaggattctaggaatctttttgggccctaaactctatttggtcttcaaatccactggcactgaaaaagagaaaatgctggaactctgaagggcagatgttagataactgactcctacaggcatgctagaaagcagttattttagagtaccacacaccaacagcctacaaaaagtggcagtagtaatcccatcatttaattattccaaactagattccagagaaagctacaggcttgaagtacagctgcaggacagaggacagagttcagaatccagaattcaagttctagaatcttcatgtcctggtttgagacccagttctatacatccagctgcataatacacggcaatttactgaatctctctcagccctagttttctgctctataaaacagacttaacaatgatcaggatcatgatgtaataagagcaaatgactcctagggttgtggtgacgattgtacaaaaagaggtacatgaacagtcattatagcaatcagacattggagagttttgtggcaacatccccgccagttctagcacctaataaatggtcatcacaagcttactgatggatggcctggtaaacaaacatgacaaaagttgctcttctcacttccttaaacccagcagaagattagggacaagagacaaatataattcatgaacggaaggaaacaaaagggtttggagggacatggagtgacaaatttctaacttccctccaacatgtttaaacgatgtgtccctaacggagtgacattgcccctgattctgctgtttctattttcagcagccatcacctagctatcaggagaagagataactaaggaagcataaagacaggaaacaggacttcgatggctttagataaagggtcattgtgtctgtcaggaccccatctccacagcacagacatcaaaatgggtgtttttggtcagcccagacatgaagtcattcgagtgggatgctgagccagtgtcctctcttcacagagttcacacagagttaattctgcttgttactaagggttccagggccaagattccatcaaatacagattaaagtgtccccagaacacgacaacattgtttggccagtaccatat

SEQ ID NO: 53732 - DNA, 1779 bp, Bovine  19866881418049
  misc_feature (1)..(1): n is a, c, g, or t
ngtggggaagatctcctggatgaaatggctacccactccagtattcttgcctgggaaaacccatggacagaggagcctggtgggctacagtccatggggtcacaaaaagtcagatacaactaagagactgaacaacagcaatgcacagaatgccttccacgagggattacaattaatagacaccatcataaagagttcagtggagagcagggtgaggaaaaggcactgtgaggactctaatcttggagataaattcttgttagcatcatagacttgcttccttcctgccatttgaatggcatatcttggcctgcccaggatcagcaggaacacacaatgcctgtgctccattattgcaacataaaaacaacaaggctcaggtgacttctcgggcaaagccattccaaatgtctctgccccttacttaatcacagtgataaatatcatataaagagctgaggctaaatgccaaacacataaaccagctggatggcagcaaaaacaggagctattaggccctgtcactgatgcccaggggagcttacctgttcctctttttcaacaggcactgcagtggtaggactgtttgatgtgtttcgtaagtcagtatagcaacagcagggagatatatatttgaagtattctgcagccaaacttctctttgagtgcttttaataccagcttataacacagagaccagcaggagttggtattcaataacagagctaataagaggtgcggtgtcgcagaaaatccacttgtttccagtgatgcgcaagtgcaaagcatttttatgagattttgtccaagacctcctgagcacctgtgaaaagtgggtattacagtcccatcccagacactgaggaaacggagactaaggtggaggagccaacagtggcaatgtgggtagctcacataatttctctaaagagatggacagcctctaacattctgtgcctccagacccattttttaagccaggtctccaaagtaggaaatcaaaagatacctggagtaacaggcaagtttagccttagaatacaaaatgaagcagagaaaaggctaacagagttttcccaagagaatgcattggtcatagcaataatcttcttccaacaacacaagagacaactctacatatggacatcaccagatggtcaataccgaaatcagattgattacagtctttgcagttgaagatggagaaactctatacagtcagcagaaacaagattgggagatgacgtggctcagatcatgaactccttgttgccaaattcagatttaaattgaagaaagtagggaaaaccactagaccacccaggtatgacctaaatcaatctcttatgactatatagtagaagtgacaaatagattcaagtgattagatctgatagacagagtgcctaaagaacaacagacagaggttagtgactctataccggaggcagtactcaaaaccatccccaagaaaaagaaacccacaaaggcaaaatggctgtttcaggaggccttacaaatagctggcaaaagaagagaagctaaaggcaaaggagaaaaggaaagatagacccatctgaatgtagaattccaaagaatagcaaggagagaaaagaaggccttcctcagtgaacagtgcaaagaaatagaggaaaacaatagaatgggaaagactagagacctcttcaagaaaattagggatactaagggaacatttcatgcaaagatgggcacaataaaggacagaactggtatggacctaacagaagcagagaatat

SEQ ID NO: 53733 - DNA, 1299 bp, Bovine  19866881695316
  misc_feature (1)..(1): n is a, c, g, or t
nccctggtgactcagatggtaaggaatctgcctgcaatgtgggagacccagggtcaatccctgggtcgggaagatcccctggagaaaggaatggctacccaccgtagtatccttgcgtggaaaattccacggacagaggccgcagtccatagggtcacagacagtcagacatgactgagcgactgacactttgaaggctgctcttgatgttgggaagaaaagaggtgatatactctactgaaaggctatctccatttagtcgcatactgatatgatggggaaaccttcctagaaaagttctctttagatacatctgtgcaaaaagaatgagctgtgtgaacttggccaagtcatgtcacctctctggtctctgctccctcaggggttaaccccgcgttgcgttggatggctgccgagatcctgtccctccatcccattccctcctgtttccaagaacaataattaccacagaaaatatcatcttgccctagattgtgatcttcatgacttcatcccgtgtgaacagacgaacatcaaaaaacagctgaggcataacacaggatctacggcagtgtcaagggggcttccttaaaacctccagttgagataaactttcagacaaatagcacttgtgtgtcagaagggaggcgggagaaggtggtgcagcatgaagcagagtctttattcagggcataagctcccgcatcctgggacagggagaactttgttttctctaaatgtgtgtctcaggcgcttgcctgtgttgtcactcgaggacagggaagaaggggatgtatacgagctgcttccatcctaaacccttcaacccaagtctgcagcttctgtggcttctggctaggttcctgggcaggggaccaggccagcctgcacacacgtgtgcatgcacacacgcatacactcacaagaatcatcacacactgagactccatgggggagagaacagggtgctgtgtgaccctcgctgtgtgacttctgtattatttatttattatttatgtatttattttataataaatgatatttattttattttccaataattttattgttttatttatgttataatatttatttatttataataaatataaattatttatttggggtcttcactgctgcatgggctcttctccagttgcagtgagcgagggctgctactctccagtcacggcgcacgggcttcttactgtggtagcttctcttgtggggcgtggactctagggcactcgggcttcggtagttgcagctcccggactctaaagcacaggctcaatagtt

SEQ ID NO: 53734 - DNA, 1535 bp, Bovine  19866880392643
  misc_feature (1)..(1): n is a, c, g, or t
ntttaattcctgtattacaggtaatatcactgttattttagtcaaagcctggctttagttgaaactgaaagctgtgtgaccagtaatggcaaaactgaaggggtaagggtaacatctttgattcaagaagaacagtaattctgtgatgagaagctccagataagttcctccctagtgatatttgctaatttttcactctttggtatgcattcatttttaatcatggcagaatacttagctgtaccatatgaatatttcccttgacttagggaattccaaagggaaaatcacttttgctttttatttttgtaaatataaccttaaagaccacattatggaaatttttcaatagtaaatctgtccagcctataaatacattggtgcatttcatgtccccctccccagaccaggataccaagccaaagtgaacttgggattggctgaatgtcttggcataagtgccttggcattcgtagttgaatttccagacccaaagctaaatgggtattttcctctacagtttgctgtggtggtttggggaaagtgtatgtcaagaaataaactgccaacttcaatgtgcctaattgtgcaattaggtgaaccattgtaaactttatagcatttctggaagaaagcaattacttgttgccatagaagcactctggagtggaatcaaacagtgtccccacagccaaatatgaggaacctgtcttgccatgaggtgcacggaaatgcagcacccattagaagtttctgaataccaggcaagtgagctgatggagggaaggcttttctgagtgtgatatcaaaatgaaagctacaactttgcctttatcccaggacaactatgtgatcattactggtggctgagatggtaaagaatctgcctcctatgtcagagacctgggttcgattccagttgaatatgtttttctgcctcagtaaatggttgaagtagcatgcatggtgtatgctcatgtgtgctcagtcactttcagttgtgtccaactctttgcgatcctatggactgtagcctgccaggctcttctgtccatgaaattctccaggcaagaatactggggtgagtagtcattcccttctccagggaaccttcttgacccagggatcaaacccaagtctgcattgcaggcagattctttactgtctgagccaccagggaagcagatttttctgttcttttgtaactgaagtatagttaattcacaatgttgccttagtttcaagtatataccaaagtaattcagttatatatatatatatatatatatatatatatatatatatatatatgtacacacacagaaatatgctttttcagattcttttctgttacaagttattgtgatattggtataatgctctgtgctaaagagtagctccttgttatttacctattttatatagagtaatatgtatatgttaatcccaaactcctaatttatctctctccccaactccaaaattttaaatcatttaaaaacagatataatttagggaaaaaaatacaagatatg

SEQ ID NO: 53735 - DNA, 1221 bp, Bovine  19866880589762
  misc_feature (1)..(1): n is a, c, g, or t
nttcccaggtcagggtatttttttttttttttctaaaacagaaaatgtcaagcaagtagtgatggtataccctatgagcagtatactcagatcagtccaccaaaccgtatatcaccaaagcactaatgatatctgtctttatcatgggcccttggcctaaaacttggatccctctgtagcaaagagctcctattcccttccaattacatcaggctatttcgggcattaaggtctatcactgtatggaactagccaggaaatgaagaactcatagacttgatcagggagaagagagaacagcagaaagagggagatgtatatggccaatgtttggctaattagcaccatcaactgatatgttcgttggttttcactactgttgtcccttgagaacattttttagaatctgagaactgaccacaagatataaaactcagagtccatattatcacacgcttctaacatttttaaaagcacatcttcatggctaacagaattttaaaagtgaccaaggatcaaaacctgaatcaaagtcaggccagtgagctgatgtattgcatggtataaatgtgggtctgtgactccactgggataggagcatgcccaggcacttcatctcaaatgagtagctgtgtaaactcttgaatggcaataaatagcaagttgagaatctgtttcttcttcacggtagatgattctgttaccaccatggagttcaacaaatccataccaatgatttgctagtatttactgctgatatcagttatgttaggatgcgtgctaagtcacttcagtcatgtccagctcttcatgaccctatggcccatagcctttccaagctcccctgtccacaggattctccaggaaagaatattggagtaggtgtccatgctctactccaggagatcttcccagcccagggatcaaacccacatctcttacgtctcctgcatggatagctgggttctttaccactagtgccacctgggaggcccctatattaggataaaatattaggataatatgaaggctaatatccatactatgacagcttcaacttagatttcctaaagaactagaaaccactgcgaataagagatgggtccattccccccaatagccgttgctcattggtgagaccacagtaaactacttcatatttttaaaagtcaatgcttacccctcaaagaaactgggagagttaaatatccccacagctta

SEQ ID NO: 53736 - DNA, 3043 bp, Bovine  19866880625274
  misc_feature (1)..(1): n is a, c, g, or t
ncctcggaagaggggataattttaaatgaggtctaaagttcagttcagttcagtcactcagtcatgtccaactctttgcgacaccatggactacagcacgccaggcctccctgtccatcaccaactcccggagtccacccaaactcatgtcctttgagtcggtgatgacatccaaccagctcatcctctgttgtccccttctcctcctgccctcaaactttcccagcatcagggtcttttcaaatgagtcagctcttttcatgaggtggccaaagtattggagtttcagcttaaacatcagtccttccaatgaacacccaagactgatctcctttaggatgaactggttggatctccttgcagtccaagggattctcaagagtcttctccaacatcacagttcagaagcatcaattctttggtgttcagctatctttatagtccaattctcacatccatacatgaccactggaaaaaccatagccttgatgaggcggacctttattggcaaagtaatgtctctgctttttaatatactgtctagtttgatcataactttccttccaaggagtaagcgccttttaatttcatggctgcagccaccatctgcagtgattttggaacccaaaaaatggtcataaaggtggggccctaatctgatggggtagtgtccctttaagaagagaaagagatgctacacctctctcccccacctctgcctcttgagctcacagtgagaaggtggacatctgcaagcctggaagaaataactcaccaggaaccaaatcgactagcatcttgaacttggatattccattcctcagagctgtgtgaaaataaaattttgttgtttcaattacccgatctatggtgttttctatggtagcctgagtatactaaaacaggcagcattaagagctaattggtatttttttctttttttaagcttaaacatatatgctgctgctgctgctgctaagtcgcttcagtcatgtccaactctgtgcaaccccataaatggcagcccaccaggctcccccgtccctgggattctccaggcaagaacactggagtgggttgccatttccttctccaatgcatgaaggtgaaaagagaaagtgaagtcgctcagttgtgtctgactcttagaggcaaatatacaaataaatcacattaactaaaaacagtaataaaaatcactgtgatctacatcaagagtctacttaaaacagagatgaccaccattggcatatgaattagaaactgtatttcaatgagcccaggattgctatctcagaagtcatggaagattatgaaagtttaatgtacaccatacagctatttttttttcagttttatttattttactttacaatattgtattggtttttgccatacattgacatgaatctgccatgggtgtacatgtgttccccatcctgaacccccttcccacctcccttgccatcccatccctctgggtcatcccagtgcaccagccccgagcgccctgtatcatgcatcgaacctggactggcgattcgtttcacatgtaataatttacatgtttcggtgccattctcccatatcattctgccctcgccctctcccacagagtccaaaagacacaatgccatagaggtttgttctgatcaagattattttatatgcaaaaataatgccaccaaagaagcatgagagtggtagtaattacaccatgttatttatgtaaagtaacatggtgagaacaaatgtctatacttgttgtatatctgaaagcagttggctgtcagagccatattaaagaattaatttactcagtattcttatgctgcattaggcttttgatttagtcttttttttttttttttttttttttagtctttaacatttccaggaggcaggatggttttatccaggctttttcttttttttttttaaattatgcacaaaagtttactagccctaaaagagtactttcacccttgatatttattacagccctacatacaagtatactcatttgtttatgtatgtatatgtatatacatatatacatatttgaatgattatgtgtatgtgtgtgcatttatttgtatcttggcaaaaatcaatgttactacgatagaaaatattcctaaattttgcttcttatatatgaaaatatggattaaaagtaaatttaaaagctcacaattccattttttttttcaatctaatttaactggaattaagctaaggggtggttttcagtccctagacttaacataacttgcatggctttactatgataattagatcaaaggaataattccaccctctcactacctcaaataaaaattccagcctaaattggtcatggaaaatcctttcattttcccttcctgtaatgtgcttgcattgttatcattgctacacatttgaaattaagctgcccattttttgaataccaattgttatatgaagtatgctctttgtatgtagaaaacacacattatggtctcacaatcactttgagcatatgccagctatggaatctgtaagatttgtggtttaggtgcttgctttcccagcaggactttggaacatctagtgtttgtggtctggtcatttttgaattccaagaatatagcagactacacaaaaggaaaatttgagaaaatatgttgaattaaataaaaagaatctattactttgaaaaagtgtctattcttttttctgagaagttgcattgacaaacatctgtaaggcaattggtatacagatattttgagaactatagttaaacccactgaataattgagacactcatgaataagatatgctaagaatgtttctcaacagggtgtccccatgcgacctctatgacaaattttaagtgactgttgatggttttaatcatataaagatataatattccaaatcatcaaagattttagtgtctgagtgaatgatacagcctctgtgcgtggcttcagtatcccttgctctcatctcttattccagccaccgctgctgggacagtttcactgtctttgagctg

SEQ ID NO: 53737 - DNA, 2039 bp, Bovine  19866880666652
  misc_feature (1)..(1): n is a, c, g, or t
ncatctgctgtctatctgcatcagagtcttttccaataagtcaatttttcccattaggtggtcaaacatttcatacatagcagtgtacatatgtcaatcttaatttaccaattcatcccacccctctatttcccccttggcatctgtatgtttgttctctatgtctatgaaaaaaaaaaatgaaaaaaaaaaaagtacataatcttcttgtgtggtggtctcaaataaccaaacatttagcaaatttctgttgaatgatccctatgtgccaggcagtaagatatgctttctggatatactagtgatcaattcatgaatttcatccctttctaggatttattatctggtcaagaagatacatgtcaaatacaaatctaatgaatacaatgttgaagaagtccaggaactaaggtattgataccagagtaccaacatagccgagtacaaggctaaggtagggaggtggactcttctgaaggagaatcatttattttgaaatgtgagtgagtaatacctcactagagaaggtaagaaagtaatataagtattagaagtggaaagagggctccatgcagaaaatacttgtcccaggctcacaggtgggattgaacaaaacaatctgcagcttcatgattttcttctcccaccaatttgagcctagagggatgttgcaatgaagcaagaaacagaagggtgttcttctccagttggacatcctacagggacccttgatgtatgaaatgccaaagaattgaacacagagaacaatgcaaaagactgaagagttctcaatctggaaggcaagggtgtatgaaagccagaagtgaaggttaagtgtaaatgaagtgttttcacattcattacataagtttaatttggaatcacttcaaatgttgttgcatatactgcactcagcagatgaaccagagtatgtctttcaccaattcactgatgtttttattaaatcttactcaaaagtgcatgttcaataaaacaagaacatttaaaaatgagtgtaaagctatatttaaagcttcagatgagagcaagagagagcatacacaactagattaacttgagatattaaaatggagaaaattactccattcaaagaagatatgctaaatcattgctttccaacataaaaaacaaaaacaaaaactaattctaagtcatttagccaatttgtccttcgcatgagagttgtaactttgctaggcaatctttctttattgtttattatttattgaacaccaagtaggcagcactgtataagtcatcctagacacagtgcctaccctaaaggcacacagactaagtcagacagagaaagcaattcagacataaaatatgtcaaatgtgttgattacactctgaagattgagatccttaattataaatatgtcttcatagcttaggaagtgaaaactataaatacaacaaaaggcaaaatgcttgggaaatcatatgctaggtgtgttttatatctattatttaagaattaatgattataattttacctcgaagtgcacctttactaggagaaaaagtaaaaagcaaaataatacaaagtttttgcgaaagtgattccataataaccttctatattctattaaaacctttgaactttgctttcaacttgcttggaagtttttggttctatgctctatgttatcacaggcttgaagacaatatttaaagactgcccttgtcacaatgctgatctcctgtaatatattgggaaggtcattacatttacccaatatacaatgccaaatggacgaatataggtggatggacaggaaaatgctgctgctaaggtgcttcagttgtgtctgactctgtgagaccccatagacggcagcccaccaggctccaccctccctgggattctccaggcaagaacactggagtgggttgccatttccttgttcaaagcatgaaaaaatgaaaagtgaaagtgaagtcactcagtcgtgtccgactctatgcgaccccatagacagcagcctaccaggctcctccgtccatgggatttt

SEQ ID NO: 53738 - DNA, 769 bp, Bovine  19866880845496
  misc_feature (1)..(1): n is a, c, g, or t
ntttaggtaaaggacataaacaacaattcaagggggaataaaatccccgtatttgcaaaactagtttttgtttgtccttctgtgatacagttcaaaataaaatagcacctaagatagatactactaaacatgttctacacggtgacagaaatatgttcttttaatgtccaaaatgtcatccacatggatgagttaacagacttgttccataagtttcttgacttcctgcagtaacacttcctgttacatactagtgatgcacagagacacagtgaagcttttctaatctctttgctataagtgtgggtatgaatgtgaacatatctggctttttggctgagtttgctccaggtttttacagagtgaggtctttctggctgttaattcaaagcaaggaaaatctagactattttggttttgggtgtggaaggcaaagaggaaacaatgtctttcaagcgtttgtaatgcgtcttagcaggcaagacatttaagaagattcataagcagttcttggttgtatgacatagaactgaatcacaaaacatatgctgaaagcccaagatgtaccagccaatgtgtcttacactattggaaccatatggtacatatacttcttccaatttaaaaaatacactaaactcccattgtaggaaaaacaatgatggcaattataatcattatgaccggggtgccagtgtacctacagcagtactctgattgttctttgagtgtctctacaggtttcttcttcctagaccagcagagacag

SEQ ID NO: 53739 - DNA, 676 bp, Bovine  19866880864365
  misc_feature (1)..(1): n is a, c, g, or t
ngaaggaacatgaaaattttgtaaatttattgggacaggcataaagtgaatatcatcttaaatactttggaaatgaccaagttttattactaaaggggaaggagagaacaagaatgagccttgggtaagcagagagcgccataaatcatataagatagctctgcgcttttatccgtgggtccatatgttattctcaaagaaaaacaatgtataacaatttagcattattttgcacagctctgaggaggtccttggaattccctgtaacaccacttgtaaatttaatgtcaatatatttgtagcttttctcttagtttaattcagctctatttaaaacataaattaattttaaactttttaaagaaatattctaatttcaaggatcgtgaataaggaaaattaaaagtgctttatttatcagagattaatatttcagtggcttttttgaagcatcttatttcaataaactacaaaggctttgtgaacaaaaataataaaatctgtattcctctgattatgatttgtgtaatcgatatttatcattggcaattgttacatatgtatacatattgttcatatgtgcactttgggagtattaattacacttcttttataatgtttaccacatgttaatcaacacaagttatcagatacaatgggtagttattcatgctta

SEQ ID NO: 53740 - DNA, 1694 bp, Bovine  19866880864593
  misc_feature (1)..(1): n is a, c, g, or t
nagaaacttccaagatttttagacttacacactgatgtttcatgcatcggatgcccttctaaagccctcctgttcccttctttctgcctgttcttggtgtctccactatcggtgcgtgtgctcaggtttagagaaagaacttggataactagaaaagaaaatctttaaggaccattagcacagcaatgaggctttctcacagaccttcagaaaaattgacaaaggacaaagtttaaacaggagatctttggagaaacaaatgagcagttacgtgaaacattttatatttggataaacttctgaaatattcacatttattttcctttaataggtaagctatatttattataaaacctaaaagcattaggttaagtgctattttattggttattaacccagggttagctactttatcaaattttatatagctaagtataaatgaatttgtaaaacagtagctttcatttttataattttaatgagtgtctatttttttttgacaaatccatagacctaatcgtagatacagttaagtaccagaaaacacaatatatccactgacaggaatgtggtttctaatcacagctttgtcactcacttgtatcgtcataggtcccacaatgaactatcctgggctgtttttcccatctacaaaactgggagtgtgagtcagcagaggtcttctctcctggttctgcatgggaaatatctatggagttttagaaaaatgcaaatttccagaaacctccttcactgattcaggtgagtctggacatctgttttttaaataattgccccatattacttaaccagtaaccaaatttaaaggatgcttgattcagaagaattgtcacacttttcaaaattctactgtgtgcctgtatgctcagtcatgcctgactctttgtgactcaacggactgtagcccaccaggttcctctgtccatggcattttccaggcaagaatatgggagtgaactgccatttcctcctccaagggaagactgtggtggggccagtctgttttaattgctctggcctaaagaagatatacagacgttgtgctggtgccaagaaaccaaataactacaaaacaagctagataaacaaagctatcacggtagtttaattaaactggtggagaaataaatgagacccaaagtgggctgaagattgggaccaacatcatgtcagctttgtaaggggcaaatgtcattacaaataggtcatatcacattaaattaaagttaattagaattttatggacttgaagatttaaaattattttaatgtgtttagttttgtagttatatatgaaaaacacacataaagggcttataccaatattatgtctgcaaatatttaagcaattctgtctaaatcttttattgaaatagtttacaatgttgtgcttgtttcaggtgtacatacagcaaggtgatatatatatagatatatacattcattttttacattctcttccattgtagaagagaatccagaagaagtatccactattagaagatactgagtatagttccatgtgctatacagtaggacctttttggttatctattttatacatagtagtgtgtatattttaactccaaattcctaatcagtccatcctcccctttcccctttggttaccataagtttgttttctgtttctctgagtctatttctattttgta

SEQ ID NO: 53741 - DNA, 479 bp, Bovine  19866880867173
  misc_feature (1)..(1): n is a, c, g, or t
ncttttgtaagttttgttatttctaaaatgagatacatgctaaatgttggaaattagaacatatgtttaacatgcagatatcttcaatcttggaattgttgactaatttttattctgcagttatgtgaagaacagtgttaaaaattttcaagaccgaatgccctccttttaaaatgcaatcctctctctagctctcaggttgtcatctattctctgacacaaacagcctgattcccacatggcatattcagagcctgccctgtatagactcatttacagtgacaccatttaagtcacactttttaaatagttcccaagagacaaagctcaaatagagcagagccaaccacattagccaccacacacagctgggttgagtaacaggcatgtttaatctgttcattttgaatctctttggcttttgtgtctaaggatagaaagtgaagtcactcagttgtctccaactctttgcgacctca

SEQ ID NO: 53742 - DNA, 723 bp, Bovine  19866880929729
  misc_feature (1)..(1): n is a, c, g, or t
ntagagctgagaacctagtacatctgggctcaagtcattttccacctctagaaaaaaatgcacctttgcaatcctacacagatggtctctcctcgattatgatttctgtccatctgtgttgtttactggataacatgaaacacattatctcaagcctatggcaaaacacacgcttataaaactatttcacagtgaatcagtgaaaaggaacaccatccaagaaatttgaaaacttaattttttcccattttttaactcatgtcacttatttcctctccttcacttctccttacaccttctagcttcccctacacagttactgaaaaaaggtagaaaatatcttttctagatactgtgcttttgagtgactatcctctgcaatctgcacccccccacacccccgtctgtaaattgtattttctaggctacgaaacattcaacatacacaattttgatgccctcccatctagagacctctgtttttcaaaacagattttttataactgtgctccccttctgcctaatgtgtaccccaggggaatgttgttggctttgtgattgaaccacatattttcaacaaataacagtgttgaagccaatgaaatctgatagtagcaagcattattcagtgatctctgaatagaagaggttcatatttctctcccctttggggtatgaaggaaaatgacacagtgggatgtgtgaactgcagctacatataag

SEQ ID NO: 53743 - DNA, 1489 bp, Bovine  19866880969317
  misc_feature (1)..(1): n is a, c, g, or t
ntaaaaaaaaagaaaatctcctgatgtacatcacacacacacacacacacatacacacacacacacacacacacacacacaaagttgctcagtcgtgtctgacactttgcaatcccctggattgtatatggccagtctcctcggtccagggggattctccaggcaagaatactggtgtaggttactatgccctcctccaggggatcttcccaacccagggatcaaacccaggtctcctgctttgcaggcggattctttactgtctgagccaatagggaagcccaatgtaaatggcaattgattaaaaagcatgataaactcatcattctcttttagtcataaatcaatttgaactttcaactctacttttttatatcttcacaggatttcttacctaccccaactctccaacagttttccccacttcataaatgtatctagtaaatgacatgaaattagattacctgaatgatcgtatttgttatgtgctcagttgtgtcctactctttacaggcccatgggctgtagctcactaggctcatctgcctatgtaactaccaggcaagaacactggagtgtgaggccgtttcctacctcaggggatctccctgacccagggatggaacttgcgtcttttgcatttcctgtattggcaggaagactcttcaccattaagcacagcaccatcacctgggaagacctcatacttgctatatttgtaacacacatctagaaatgtttaaataactgattttaagaaattgaaacaattcatttaaaccttttttttaaacaaatcacaattctcttagtataaattcaattatagatttgtgtctgtgtatgggaggtgtgtctgatgcttaaaaaaaaaaaaagtttgtaaaagctatgttagccagtatacatcaatctcaaatttttgtaatatcatggtaaatgaatggagaagtctagaaaacaatttataaatttcttcagtaatcatcagagacaggttttttgctattaaaggcaatgcaatttaaactgggtggccataaaatataggaggtttttcccattgcaatacagaggaaataaatgtatgttacattccttccccacccagaacatggaaatagaaatggaaaaacaatttaaacactaaactttcaacagtaaaccaaacataatgctgtcccttaatttatctgcaagcctccaaaactctgatcacagccaaattcaatggtgtgtttaactgctgaagtctgtcaagagatacaaaacaaattcctgaaagtattcattctcttcccagagcatttcctctgacacatgggagattttcgttttcagtctctgtaggctgtcttccctatcagtactggcctacacttatacacatgtacacacacctacaaataacgctatttatggaagctaactcacatctttaactgaaatctctcttcccttgctattaaacatagcaggccacccacaa

SEQ ID NO: 53744 - DNA, 977 bp, Bovine  19866881004135
  misc_feature (1)..(1): n is a, c, g, or t
ntgcaagcaccactcactccttgaaaaacagacagactctccctttgctctgaatcattgcaataaagacaaagccctttcaacattagcatggcaggcagcaggtcccttggcattgtgagctgtttagaaatgtagaaatgatcatcggagttgccaaaatgtgaaccagtgccagaaatgcttgtacctcagtgaaatttcatctttttgacccaaagctacccagaaaaaatttgagtagagagaggagaggagacgaaggggagtaggtgtttgtttttaggtgaaaagcacaactcaaagagtattctaaagtcaggactagaagaaagataatttgtatatttgtatatgtgcatatgtctttccttggtggcccctaatcttggaaaaaaattatttttgcaaaccaagataacctgaaacagattatagggaaatccgtcagaaaaaataaacacagagtgtctagtatgacgtgaggatgtcccttagtggagctgccctggaaatatggtgacagaattgtttgttttcttgtaattttacacagttgtgtttctgtctggcttgatcaatgctggtcttgtatcctaaatctccctttctttgccttcctagtgagtcactgaccatgtggctccagctcccagtctggctgctaaggaagaaggaaaaaaataactagtcttgataaacatgtaggccattttgggtatgagtttgacattgctgatttttttcttttagctcaatctctagagaactgatacatttaatctcattcattaaaagccagatataccttctcattatctaatacactgagtttctctgaagggtctttcagaactcaaatcagattggtaacacttttatttacattgcatctgcaaacactgctatgaattgctatctgagggaaagaaggctgtgggtctagggtatctatgccctttaagtttacccagtaa

SEQ ID NO: 53745 - DNA, 1108 bp, Bovine  19866881030294
  misc_feature (1)..(1): n is a, c, g, or t
nttttatcctagagaagctaacctttgtaatgctttgaatttttaaaaatttcttttattttcacattcccctattgctatatttttttcctttcgttctatctcacgcataatataaagttggaaagtttaagtgaattggttagaatttatccacccaaactctatcaccaataataaaacctggttcttatcctggcattattaagtttgcggtttcacactaacaatttaaactcttcagctggaaagctgctagttcaatacaatttatcttcatatttggctgatgaagtatatataacaaatcatcacatcataaattctcacatatcttggtgctgtcagcttaatcaagccagctgcatccttgtttctgcaacaggcactagtccacagaaggggtggatctacaacatgtcatatttcagagtacactgagtgcagttttacacatcaggagaatttatctctaaaacaaattactgtcttcctgaagttaagaatcattggtggaaacctccttcctcactgacctggtaagtaggttctctaggagtgatttgcatagtatattacaaaattagaagagaaacctaaaatcagcacccaacctcaaagctttctcacccagagtatgtaaatccagcattacaagggcaagtcactgtagggtaacattgaaaggtgaacagtattttggaagcttttcaaattaaacatttatcctttagtaacatcttagcttgactgtgatgcacaaattagctttgataaaatgcatggatcagatggtggttactgccaataattcactgaaaagaaaaaagatgacaaacaactgtgttggttttaaatacactttctcagattctttcctatcatttggatttagcagatccaggggagtggtttgagattttaaattttacaatcaccccagataaatctgacacatttggtccagggagcactctgagatactctggaagaagaagaaggcatcgcatgacattttcatggtgaaagcctggaagcagcatgtggctaccaaggaataaaggggaaactttatggttttactcaggattcatcaggaagattatag

SEQ ID NO: 53746 - DNA, 3579 bp, Bovine  19866881109079
  misc_feature (1)..(1): n is a, c, g, or t
ntacataatttccactgatgattctgctaaacccagtagcttgtatctgttattcttacatcccaaccaaatattttaaagaaataaggcatcggctgcacttctcttatattcctaatgttacaattttgtttatggaaaataaaaatgtgtaattatctaacagttctttggcaggttatttgaattgcaccctgggctgatttttcaagtctccttcaaaccattcccacccttatctcctttcatccgggttagtattgcaggtccggtatgaaaatctaagggattctcaaacttttcaagaaataaaatgaaggcagcaatagagactagagaaatagattatggccaaaaaactgagagtcagctttgagcatattcgcttgctacagtgtagaggggaagtgttctgacttgagtctggctcttactggggatgtactgggaataatatttgtccaacatatgtcctttaaagaaacaaagagcaaatgaggatggtggtttttattttagcttttgctaaattatttgtattgggtatagtcgttttacaacaaagagacttagctacatatatcccctcttttttggattcccttcccatttaggtcaccctagaggattgagtagatttccattaacacaaatatgtggaatctggaaaactggtatagacgatcttatatgcaaagcagaaatagagacacagacagagaacaaacacacaggcaccaagagggggaagaggtgtaggatggattgtgtggttgagattgacatatatacactattgatactcgtgtaaaattgataactagttaagaagatggccattgaagaagaagcagcaaaataagaatcaattaatatggtagcatgggctatagcagtattatgggttaaagtagtgcagggactttaaaatgtcctcttataaatatgttatgaggtaaggaaagcactttatcattattattattactaagttaaaagacaaaaagaaaagggtaggaagggcaaatggtgccagtccgttgccctaaaagacatgttcctcgcgctctgaggagggtgctgctgtggatatggatttcgtgacacagtcatcagcaggagttggctttgctgggtctcatctttctctgggtttgtcttctggaagggctcttagagtgcaactgatcacaaagcatcgtggcagctccatctcttgtctgcagactcactgctgctgctgctgctgccaagtcgcttcagtcgtgtccgactctgtgcgaccccatagacggcagctcaccaggctcccccgtccctgggattctccaggcaagaacactggagtgggttaccacttccttctccaacgcataaaagtgaaagtgaagtcgatcagtcatgttcgattcttagcaaccccatggactgcagcctaccaggctcctctgtccatgggattttccaggctagagtactggagtggggtgccattgccttctctggcagacttactaatctccttcatttataacttgccacacccttccacactcagcaacttgtccttagaacaaaatctcatctcatttatgtgtaatttcatgcagagtttcatatagagggtaggctttgtatgaaaacttgatacagttatgcaaatattgagggactgatacagagatttaggaatctgcaaaccacatttcccatgttcgtttgccatttggcttattaaatgctatcagcaagaggtgctgggggcacattagaaggtggaatttctttcatttactctttgtcttttcctttctttcatagaatctttgaagggagggggtgcatgcctcttcaatcccaacattggagacggtggttcttgctcccagatcttggtgctggaggcagtggcagtgtttgaagttgggagctttttccactcccaaatcctggctcagaaatcttccttcttttaattccatttcctcctagagttaataatctttgactcagctccctttctcttattcttctcttcaagttttgcccacctacataatcaatcattgtgcaacattactcttatctgagaaatctggtaatcaatcatcggaccacatcacttctatttgagatgctcagtttccttttttcctagctagattctcactactacagaaagaacatatgggagagagaaaaacttgagactctgggttgattaacgcatgagaatggcaggcaaaatagaaaagcatgctattaatgtgtataaaatagaaaactttccttaatttattctttaacaatattaataacatttttcctttgttgccaatgattttgttgaaaaatgattttgttaaaattatgaaataattaatacctataaatatatatgtatatgtaacataaaaatacatatggttgtttttgttgagtcattcaatcatgtctgactcattgcaaccccatggactgtagcccaccaggctcattctgtccacaggatttcccaggcaagaacactggaataggttgtcatttcctcctctgggggatcttcctgattcagggattgagccacctgggaagtccacaaatatatataaatatatacatttggtggccatacaataataattaagaaatataaatttgtctgctcgcctgattaggacatagagtagcctgtgtgctaaatccatcacatttctccctcttactgtaatagaaaatcactattcaaaattgtttttatcattctcttggattaataggtttcttgcatatgtatttatgcatgcactacataatacttagatatttatgctttaggttcttgaacatagaactattatgcaactaataaaattctgtaagtatccttttgagagtttctcaactttattaaaattgtttgttgggatcaaccacaataatatgtttagcaatagctctctcctctataggattgccttgtgttaatatattataattaatttattcttttccacactgacgctcccaaattttcattttcaccaggagacgtgttaaaaatcttctctagcatgtttcccagtgcacagacacagcagtttccctgaaaagtgctattgctgggtcacaggatatatgtatattctattttattagataatataacattatatcctattgtaatggtagcaatttatttctgtaattacctggcttctatcttcctgtcaatccatattatttccatgactttatattgtcattttttttaatttgcatttaattgcttgtgaataataaagtgaaagactttacatggtttttgatcattagtcttccttattttgtcaaatacttgtttttatttttctatttgtttccttatgtcttataacggttactttatgtgtgttacatagcaatctttcttttttttaattaatttattttttaaattttattttatttttaaactttacaatattgtattaattttgcccaacatcaaaatgaatctgccacaggtatacccgtgctccccatcctgaaccctcctccctcctccctccccatacc

SEQ ID NO: 53747 - DNA, 1102 bp, Bovine  19866881121231
  misc_feature (1)..(1): n is a, c, g, or t
naattagctgcttctattcctatgttataaatatagatctcttctattcctatgttataatatcataataaggcacattcttttcacctttttgattttgtaagactagtaagggttcccttaagggtacccttgctgagctctctgtcctccctgtattttatgatcactgctatgcattggttccattagcagtagataatttgtccttaaaatagcattaagagcactgtgcatttcatcattttatttcccccaataaagctttcatacttgaactttgcttttcttgtattgacaaataaataaaaaaagaataagaattagctggctttccatgacaatctaatgagatggaagatgattttaaaaataagtaaaaatcttaaaagcaaatagcttacaacaattgttggtgcattgtactattaaaacagagctttttggagttgcctgttgctgacctcttctactagccatgggtgggatgggaggtgcttgggtctttgtcaatgagccccagaaagtaggtgtttaatcctgagctctgcgcagtgacctcctggtagttacagcgtagtatctggctgctagcgatgatgaaagagttgccagtgactctccagtcctgccaattcggcagtgatgatgactgaggtcagtgagaggggagagagtctggactcccagaagcagctgtcgtcaacccagagaagccaaaagcaatctcttccaaccaaatcccttatcagaaatttccttcaaatccaatgatatgttctatctcacaatttacagtgacatggcagttttatactgataatgcgccattgcttttcttagaaaccaaaagctctctgcagctgccaagatgtccttagagaaaatcatagcttttcaatgtcttcttgctgccttcctaaacatttatagcataagcattcatgtttaatagtcatgagtagtgataaattatcatgaaatgaccctgtccccagtatttctttatgtgactatcaacttccattgataagagtaaatcattcatttaataccttaccccagtcttttctgccaagtttataatccgctttttttttaa

SEQ ID NO: 53748 - DNA, 1298 bp, Bovine  19866881159902
  misc_feature (1)..(1): n is a, c, g, or t
ntgtctatgtttaatgtgctgatatgatttctcctaaaaggatggtaaatttaaatatggtggcataacgtggggcctgataaatttgaagatggctgactgactaaataaatgtccattggcataggactaaaatgtactatgtctccacttgatcaatttagaactcaactaacaaaaattgttcattcttcatgaactgttgcacttgcaagtgtgatcgttctgacttcaacttaaagaaagcaagtcagttattaccatttccagccttcaaaatgaatagcgaaatgcaggcaacaggaaatgaattatttccttaaaatacacagtcacattatatgaacaatcagatgattcacattgacttaaaaaagaaaacacttaaacacattctagcatgctctgctatttatgttcttgtttaattgattgttcaaagtactccagggtgatgaaaaagtccctgcctgtcactgtgattgatcatctaagagtaaagtacaaaatgcaagaagtcagcaaacaattattttaaaaatgaaaacttgagacaagtaatttaattttaagctagtgagctgatgctcatataaacacaccaaaactgatcagagaaaaggaaagttaacattaaagatttggaattattttgacaaacactagtacatttcggaaaagattctgtatattctgcctaagagttaaggatcttaactgcagaacaaacaagattacaggaaataatcagatcccagagattctccagttggataaataaggctaagcattcataacaaataagctgtatcttttgtgtgggctctcaagcgtgtgctggaaagattttgaggttatctagactctaaaaaaattccttatacaactatcactgtttcttggaggaaatgctagtaggatgtttgaatgtacaactttgaaatttcctactttttcttttgttgtgattcattagagaggatcaggttgtgctgctacttctctgtagaaatattgacttgtgttcattcaaaaaattaactttgccaacacactgaattacttttcactggaagactagcaaacatcttatcaaaatttcatgttaaaggtagtttttccttatttttcttttttgtttccagaaaaacaaatattgatctatatctgatatttattataatgtatttaataggtgacaacacgatgctaaaaagacaaatagtaatatttaacttaatgacagatgatgacaacacagtgttaaaaaggcaaggaataatattaacttactgatg

SEQ ID NO: 53749 - DNA, 1222 bp, Bovine  19866881259903
  misc_feature (1)..(1): n is a, c, g, or t
nttattataagtatggggactattagtatttacaagtgactgaaaaggtctctgaaagtttacttatgttgaaatataagaaacaaatatcctaccacaagagcttagatcctcagggataatcttaacatggccagatgaaacctagattttaatcatattctcttaaagattattggctgttaataagtcaagaagtttctgcaagcatgcactacctccttctgtggagttgtgtttcacatttgtgtgtgtatgtgttcttgctttcacaataattcaaaaataatgctaataaaaataaatgacacaggaaaattgtgatctgacaatcaaacataacattaagaaaatatcaattcaatgatgacacattttacaaaacttttctatgttgagaggtttgactgattctttatatattacctctttagtgatgagagagttagggtagacagctaaatgacttttgccccattggattataaaatcacttccattactcagaaactcattccttgctgtaggagacccacatcattttaataataccaattataataattatcatagtactaacacttgcaattatacaaggatgtctattccagtgattcttccaactctttagaaaggaaatacacaccacagatgggaatcattttgccactgaaatgcagatatcactggagaaaaagatggtgtctcctttagctgttgttcctggttctttctgacagttgctattcagaaggaagaatttaattgaaggtcaattaaagaacaatcatgaaaattgaggggaagctgaaaagcctcagatactccaagaaatagttgttaaaaacacagatgatgcccaagaaaatctagagatttttaacctttattccaaatgcaatacttccctttatttgcggcaaacaatctcagtgaccaaagaacatctactgaggggccatcaagtgcctatcagctactgcgtccttgattgcaggtatgtacattcccccatgatcttttgggtgataccctaggcatcagaactgcattattttgaataacaaaggtaaacaattccatcatgctctcatagcccttttgctctagcaatttctaaaccacgccatattttcagacttattttggctaccttgtgaatatacatggattgcatatggacagctctgcagcagtaactgcaggttggcaatctctcaaa
